United States Patent Application Publication US 2026/0103690 A1 - sequence listing, part 72

SEQ ID NO: 352786 - protein, 359 aa, unidentified
MGLTGTTVRTHHHQKEGVHMMNVTRIGIDLAKQVFQVHGVDERGHTVLRHRVARSQVRAVLAQLPTCVVGLEACGSAHHWAREMRALGHDVRLIAPQFVTPYRKNDKNDGNDAEAICEAVGRPHMRFVPVKDVGQQAVLTVHRARQLLIAERTALVNQSRGLLAEFGLIVPAGIGALRRLWPSLLEAPAVPALAREVFTDLADRLRAVDERIAAYDHRVVQLAQQTEPAQRLMQVPGVGPVTATALIATVGNAHAFRNGRQLAAWLGLVPRQHSSGGTRRLGRITKRGDVYLRTLLIHGARAVMRHLARRTDATSRWVTALHARRGFNKAVVALAAKQARILWALLATGRTYQPAVACP

SEQ ID NO: 352787 - protein, 286 aa, unidentified
MQKKVFKGQLTIGLDLGDRSSSYCVLDENGEILLEQKVATTPEAIQQAFGKMPRYRIAMETGTHSPWVSRLLEALGHEVIVAHAQKVRLIVKSRRKDDRLDARTLARLARIDPELLSPMQHRSAQAQLHLTEIRARAGLVSARTALVNAARGLVKSYGQRLRKCGTLQVSREITGGLSPGLREALEPLLREVESLNERIQEYDRRIEKMAKETYPETALLKQVKGVGDLIATAYVLTIEDPHRFRKSRDAGCFVGLQPGRRNSGESEPQMRISRVENLCDHAGWPA

SEQ ID NO: 352788 - protein, 342 aa, unidentified
MSIYVGMDVHRKRSQIAIVDAAGEEQRNRNVPNDPTELVPILGGLPPGTPVAFEAAYGWGWLVELLEELELEPHLVHPSRCKAIASARLKNDKVDARTLAQLLRADLLPEAWIAPQATRDLRALLRHRASLVRLSTMAKNRIHAVLADRGIRQQTGLWTGIGRVWLAELELPPTQRAIVEDYLALLDGLAEPITRLDHQIATLARADPRVQALMVLPGIGRLTAMTLVAEIGDIGRFPTARKLCAWAGLTLAVRNSDRKVRHGHITKQGSPWVRWILQEAAQTAKKRPPFADTYAQLARRRGRSIATVAIARRLLARCFHILNQLEAAPTGEGQTGCARETA

SEQ ID NO: 352789 - protein, 386 aa, unidentified
MTELIKYGIGIDISKDKLDACFCEMDNTQFVKIKSTHRFSNDLNGFKELEQWLKKHQKQKLLLNIVIEATGVYYEKIAIFLYKNKIPVSIILPNKAKKYMQALGLKSKNDKIDSSGLGRMAAEQKLIQWEPMDDYFYKLRQLTRHYEQLQESKTHFNNQLHALKNSSFEVKQVLTQQNKMIALIEKQIKETYKIIESHINSNKEVKQKVENICKIKGVGLLTVSTIIAETNGFVLFKNIRQLVSYAGYDVVENQSGSHVGKSKISKKGNSHIRRILHMSSFITVKYNQKPFVDLYNRVYDKTKIKMKGYVAVHKKLLIYIYTLWNKNEAYCPMVNDFPENEEQSHLFLINSEIKEHYSKEIVPIFTGTMQNEFISNILPETIFVLR

SEQ ID NO: 352790 - protein, 323 aa, unidentified
MLNATPARLAAGIDVSKRKLDVAITGSLERFTVANDAAGHAIIAERLHSLGIQRVGLEASGHYEAAVAQHLRQCDFVVLVLDPGQVHGWRRFQKRRAKTDPIDATLIAEVTAAVDLPRQPPDPRLAPLAEHLTLIEQLAEDIARLKTRLERYSDAAPLRFLKAEIQRLTKCRAKQLARLISLLRAAPDLARRFDILISIPGVGEITAVTFVIRMPELGRLSRAEAAALVGVAPFNADSGEQAGQRHIAGGRSRLRRAVFLAAFAAAQHWNPLLQATYRRLRDAGKHHTVATVACARKLVAIANALIARDAPWQPEPPVRQGAA

SEQ ID NO: 352791 - protein, 355 aa, unidentified
MQSNKISFKGQNIYVGIDVHLKTWHVTTLTESGCKYSFAQHADAKELFDRLNKKFPEAHYKSAYETGFCGFSVHYALTELGFENIVVNLADIPTTGKEKAMKTDAVDSEKIAWSLKRGELTGIYIKDKRYMDDTNLMRLRQRFIRDLSRQKNRTKHLLYTQGVVYPERFSKKGTHWSRNFMKWLREDVELLSEEKRTLMLLCNQVEHIRKDILTITREIRRLSTTDKYKENFSLLSSVPGFGLITSMSVLTELDNDPIRFPNERKFVAILGLIPTCHDSGEKKSNGVKTFRGNKQIGPLIVEASWVAIHRDYQLGCYYTNCCQSMNPQKAIVKVARKLACKAYAVMKTKKAYVQS

SEQ ID NO: 352792 - protein, 309 aa, unidentified
METEIGCDISMDWIDVCVLEPPRHFRVANKAKPVERLARELPPGSRIGMEATGTMHQLLADAMCAAGHTVYELNPRWVHRYAGGVGVRGKSDRGDAMVIARYVHAEGAHLHPYRSPTPQQREIRTLLHRRAQVMKLKTASRQSLGDQANEVVQKFNQLVKDIDRRIATLLAADPQWKGLAAKLRRIPGVGPLVAAHLVEALARRPFEAVKAFIAYTGMDPRPNDSGRKKGIRRLTHHGDAHLRAALFMGAMAACKVAQWRALYEHNRGKGLPSTAAFIVVARKLARVAFCLFKTGQDYDPEQIGGVAPT

SEQ ID NO: 352793 - protein, 450 aa, unidentified
MAKRSKKRCEQLPILHPHAAGIDVGASELFVAVSADRDPQPVRSFPTFTRDLNALADWLQQCGIRSVAMESTSVYWIPVYQILESRGLEVCLVNAQHVKNVPGRKTDVSDCQWLQYLHSVGLLRASFRPPGIICAIRSLWRHRSSLIQMAAEHVLHMQKALDQMNLQIHRVLSDLTGMSGLRILEAILAGERDPVTLARLCHGGVKSSEDTIAKSLEGDYRPEHLFALRQSLAAFHYYQQLVVEVDQEIQGQLGGLGTAATAEPTVPKRTKASAYQRPRYEPKTFDLRSELYRVFGVDLTNVPGISSITAHTLLCEIGTDVSRFRNASAFASWLGLCPENKISGGKVLYTKSRRVRSRVATALRMAANSLHHAKNYLGEFFRRITRKLGKPQAITATAHKLARIVYHLLSTKEAYNETVFHRCDEEVLRRQLPSWNHAFLAAYARMALGS

SEQ ID NO: 352794 - protein, 370 aa, unidentified
MTKFSVYIGIDWANDKHDVCVQVANSSARKLEVIKHSPKSINEWITNLHKQYKGQIAVAIELSKGPIVYALQKFDFVTIHPVNTSMLAQYRKAFSPSGAKDDPTDAELALDLMLRYPNKIKALKMESESVRKLTYLVEQRRKLVDDKRRFSNRLIITLKEYYPHLLDWFSHRGSGMFCDFITRWPNLQKLKRARADTLKKFFGSYPGRTAAYSVKRIQSISEAEPLTLDNAVIESHQLLAVALANQLLVAVKVIKVFDREISELFNALPDAELYKSLPGTGPCLAPRLLVAIGENRSRFNSASEIQMYAGVAPVTVRSGQKSWIHWRYQCTKFTRQSFIEWAAKSIKQSYWAEIYYQQQKVIPTRQLCVR

SEQ ID NO: 352795 - protein, 417 aa, unidentified
MSVEQINRSRTELSAGATAPTAGIDWASADHAVAVVDSSGTQTVREMVEHTTAGLRQMTRMLTRAGVNEVAIERGDGPIVDALLAAGFAVFVIAPGQVKNLRHRYGAAGNKDDHFDAYVLADALRTDRRRLHPLTPDSPATVTLRMTVRARKNLIAARVGMANQLRAQLEHVLPGTIGLFRDIDSAITLAFLTRFPTQARVDWLTPRRLETWLRTQHYPQPARAQQLHAHLVAATRGTVGDQADARAHITAALVAGLIALRTQIKALEEQIETQLHAHPDAIVFTSLPKAGIVRAARLLVEIGDCRARYPTPESLTSLAGATPSTRQSGKVRIVSFRWAVDKELRGAVTDFAGDSHHANAWAADLYRKARARGCDHPHATRILAHAWLHVIWRCWQDGVAYDPAQHRAFQTLLATAA

SEQ ID NO: 352796 - protein, 360 aa, unidentified
MSFNGTSVGLDVHALSVVAHAVDEETGRIERARLCPDHGEILDWLHRLRAPVRVAYEAGPTGFGLARTLAAAEIDCVVAAPSKLIRPGGDRVKTDARDAAHLTRLLRLGEITAVTVPEADVEAVRDLVRAREDARADLMRFRHRLSKLLLRHGRVYSGGQAWNGVHETWLRRQRFDDSHTTAAFDHHFDAVLSATAARDRLDEQIVTIAASPRWADPVDRLGCLRGISALTGLALSVEIGDWTRFTGSSISAYVGLVPTEYSSGTSRVQGSITKAGNAHVRRLLIEAAWHHRAAYRNPGPTLRARWAKVDPALKARGHAGNRRLHQQWCRFNERKKHHVVANVAVARELAGWCWSLATLN

SEQ ID NO: 352797 - protein, 475 aa, unidentified
MYLRCVQTTTQPRTKRQRLEELTDVHPNAAGLDIGSEEIVVAVPADRDPQPVRVFRTFTPDLLALLAWLLACGIDTVAMESTGVFWVPIYELLEQHGIRPYLVNARHIKMVPGRKSDWNDAQWLQKLHTLGLLRSSFRPDTEIVTVRTLARYRAELIERRAPHINHMQQALKQMNIQLNVVLSDITGKTGLAILRAIAAGERDPQRLGELRNSNCKASVAEIEKALTGNWQAAPLFILQQALELFDYYTEKLAACDREMERQYQAMESRWMADAALPDLPKAKPDSKSKNEPNFNVRAQVARIIGVDLVAVMGLSASTVQTIISEIGTDMSRFPTVKHFCAWLGLAPRNDISGGKVLRSRTMKVRSRANQAFRQAAESVARSDSSYGAYYRSMRARLGPRQAIVATAHKIARVVYHLLKTGEPYQEEGAAEYEQKRQERELKYLTRRAHKLGYTLAPGATTSPEALPAGGSPGSF

SEQ ID NO: 352798 - protein, 400 aa, unidentified
MNPVIGLDVAKGESQVQAFLQRKKTYKQSFKFAHHLQGLHTFYQFYQEVEQVAGQPPAVIFESTGHYHEPVLQFLEDQAITYYVINPVVSYEAKKTGLRKVKTDKVDAYHLGELYYKEDLEAFQKKTEQYLDLRQLTRQHSALTDSYVEIKLQFQAAVDHIFPEYHNVFSDLCGKLSLNTLLHYPTASAIQKVSQQTLADDMCQFGARRSDAWFLDKAAQLKAAADRNPFQHPVCHGHIVSLQMYIQMLFQYQEHLSQLKREIDALARSFEDHGLIQSIPGIGDKLAATIISEIGGINQFERPKQLAAYAGLDPSVFESGKYKASINRITKRGSSRLRQALYTAVQCGLAKNRNKKLIAFYNRKRNEGKPHRVAVIACANKLVHWIHAMFKRQEVFVDQS

SEQ ID NO: 352799 - protein, 454 aa, unidentified
MKENEISMEVVNPHAAGVDIGSRSHWAAIGQNNDDVQEFGVFNEDLYAMAKWFKENGIKTVAMESTGTYWQSLFAVLLSEGFDVILCNGKFTKNIKGKKTDIKDCQWIQKLHCLGLLSSSFLPEKQTEQLRTYCRQRSLLLDSAASASKKMQKYLRLMNLRLDVVVNDICGLTGLTIIKAICEGETDPQKLASFRHYNCRKSEKEIAKALETNGRQDYLFGLRQEFDMYQMFQKKIEECDVEIKNLLDKIIEGNDSKKQHLIDPKPYKKVNKNSPENIDLNLKSYQYFEGVDLLAIEGMSYSTVLTLMSEVGLEGIKKFKTAKHFANWLRLAPNNKVSGGKVLSSKIPKGSNRLKIALRNAANAIGNLKDSTPLRDFFQRINFRKGRVSAISATARKLSVIIWNMIVKNKPYYNPVEYLYLDQKRKLGLVKRIQKQITKFELSKENFIFENINI

SEQ ID NO: 352800 - protein, 460 aa, unidentified
MKGKRQAGTRKRSQKILEMIHLDAAGIDIGSKSHWVAVPDDRDEKPVQEFKSFTPNLEELADWLEACHITTVAMESTGVYWIPLYEHLEARGFEVLLVNARHIKGAPGRKSDILDCQWIQQLHTFGLLRASFRPDGPIVALRSLIRHRDQLVRSAAAYIQRMQKMMVLMNLQLHNVISDVTGVTGIRIIRDIVAGQTDPTVLARHRQPSCKATQEEIAASLTGHYRPEHVFALRQALELYDFHQDKIRCCDTEIEAQIHTLEASCKTPARPLGASNKRRRPPRDNEPGFDIRSPLYKLCGGVDLSALPGIGPYNALKLISEIGLDMRRWPTERHFASWLPLAPRNEISGGKLLRSRTQPSANRAAAIFRMAAMSLGRSDHALGAFYRRLGLRVGKAKAITATARKLAILVYKMLRDQIEYSEHTAESYNKQQRERILRGLRKRATSFGFELVDASTGEIL

SEQ ID NO: 352801 - protein, 338 aa, unidentified
MIVIGVDVHKHSLTAVAVDELGRPLAERSGPVEDELVRWARSLADGRLLWAVEDCRHVTRRLEQLLLVAGERLVRVPPRLTGPERRRGRTRGKSDRLDALAVARAALREPRLDGPRPQEPRLRELKLLVDRRDDLVAERRRCQQRLRWHLHELDPSVQVPLGALDRTVWLDRLRRQLARREQTTQVRIARDLLGRCRELTRSISELDQELQERMQTTAPRLLELAGCGPISGAKLVCEIGPIDRFASDAQLARHAGVAPLDASSGKHQRHRLDRGGNRQLNCALHRIAVTQGRTYGPARAYLERKQNEGKSRREAIRCLKRQLARTVYTTLKTESALT

SEQ ID NO: 352802 - protein, 343 aa, unidentified
MQVTTIGLDIAKNVFQVHGVDAAGKTVVTRQLRRGQVIGYFAKLPLCLIGMEACATAHHWARELTKIGHTVRLMPASYVKAYVKRSKHDAADAAAVCEAVTRPSMRFVPVKTIDQQAALMLHRCRDLLIRQRTQLINALRAHLAELGMIAAKGKEGVKDLTAIITDAVKATVLPEPMRQALQALAKQLAALQQQIGELERNIQAQHRASDRSRRLETIPGIGVLGATAIAATITDPSVFKSGRECAAWIGLVPRQNSTGGKERLCGISKQGDRYLRRLLVMGATAVIRHARTHPDKHPWVTKLLAKKPYKVVAVALANKMARIAWAILAKGEIFRAPALAATV

SEQ ID NO: 352803 - protein, 398 aa, unidentified
MLITNLQKTDDFNGQIFYVGLDVHKKSWAVTVRSLGIEVSHFTQPPGAGALKNYLQKEFPGGTYHSAYEAGFCGTGAHEELCRLGIKNILVHAADIPSTDKQKKNKTDLHDSRAIAGHLERGNLHSIHVLTQGQQELRSLFRLRESKVSDVTRANNRLKSFLMYYSIKLPETVSKNEFLSGKALAWLSMELGCAAGTFALQQYVEELKYQRRQLSHITKSLRGELLALHKSTYENLLSIPGIGAVTAMGMIAEIADFARFGDPDEYCSYLGLCPWEDSSGDTVKTKGMQPRCNSHLRPLLVEAAWTAIRKSRTLFAYYSKHAGKSGKKAIVKVARKLALIAKGVATTGQLYQEDYLKKKQQEHQNKKELKAGRFSSGIAEQHINNQPGDKLQFAVMPG

SEQ ID NO: 352804 - protein, 432 aa, unidentified
MQSTNKPFISVGIDVGADTSYMSIALPNQLIVGKPFKITHSNLSSLERAVSAIKEAEEAYSLESRIFLESTGIYHYPLFCYLKDRGLNCYVINPIITKNSTNINIRKVHNDKFDSKKVALVGLKPDLKTSAIPSDLVLDLRNLTREYYNLTDNRSAYVNKLQGQLRMVFPQYIGVFSKVTTLTSLALLDEYASPEAFLAADKEDIVAIIRKTARFGLTYAENKYEAIIEAAKSALIFGHSVSSSFMMIRSYISFIRKFDTEIASIIAAMNALVEANAGELFVEQIRLVQTIKGAGFLTAVTVMCEIGDFFVFSKPKQLFAYFGLDPDVKQSGKFTGSKNKMSKRGSAIARRAIHTIALVSISRSKKGVPHNPVLSAYYQSKCKSKPKMVALGAVMHKVCYIIFAVLRDNKAFSPISPEEHVLNHQIKLNGIA

SEQ ID NO: 352805 - protein, 341 aa, unidentified
MHNYIGLDAHSKTCTFVVVDGRGRQTNYQRVKTGESEILKFLKSVNGSKSLVCEESNLSKWLYTLLKDEVDKLVVCDPAVVNRRRGPKDDYPDTLHLAQQLRGEFLTPVFHEDNFFSELRSVVGSYRDLVWDSIRLQNRYKALFRSEARETDGKKIYNDEERIQELSNETDRFVAGAIYKQLQLIKEQQEGYVKRFKEYEKKYSQIRALSSIPGIGEVRACTIAAIVCSAQRFENKFKFWAYCMLVKYNCMSDDTNYGKKKVPGNRTLKDVFMGAAQSVLDGESPLRSLYDEHRKRGLDHRAAKKNVARKIAAIALSVMRKGVHYREDYEVKKEQPTPKQV

SEQ ID NO: 352806 - protein, 369 aa, unidentified
MVEYTEAFVGIDAAKSRNAIAIAEAGREGEIRYLGEVEATPQSMRKVVARLAAKYQRLHFCYEAGPTGYGLYRQLTALGHDCIVVAPSLIPRKPGVRVKTNRRDAISLARLLRAGELTPVWVPDEAHEALRDLVRARDAAVADLRRKRQSVTSLMLRHGRIFPGKTTWGARHARWLQEQRFEHPAHQIVLQELVLAIQHAQERLERIEAATAEFVPGWSLAPAVEALQALRGVNLISAVTFLVEVGDLRRFETPRQLMGYLGLVPGERSTGDTVRKEGITKAGNSRARRTLVESAWTYRYPPRIGKVKLYHLQRVTPAIRDIAWKAQSRLCARFRALAARGKKSTVAVTAVARELAAFMWAIARAVPAT

SEQ ID NO: 352807 - protein, 355 aa, unidentified
MNSSKYIAMDVHTATISVAVRDAAGKLIMESVIETKASTILQFIQGLRGDLHVTFEEGTWAAWLYDLIKPYVTNVVVCNPRRNALLKEGSRNDRIDARKLAELLRTNLLRPVYHGEKGLRTLKELARAYLTISKDLTRVMNRVKAIYRSWGIPCGGQSVYNPRHRKEWLSKITQASVRRRAELYYEQLDALVLLRKQARQELLAEGKKHQAWKLLRSIPALGPIRAAVLMAIVQTPHRFRTKRLLWKYSGFGVVTHSSADHRYVKGQLERSKKPVSVRGLDRDHNHQLKDLFKGAAIQASTRKGPFREFYEALVAKGMRPEMARLTLARKIAVIALTVWKKGGAFDAKYLKPQTA

SEQ ID NO: 352808 - protein, 311 aa, unidentified
MSGFVGIDVSKTYLDLAVGKEGEVTRLGNEEKGISLMVTRLQEVQPDLIVVESTGGLERALITELFFAHLPVSLVNPGRVREFAKSIGQLAKTDKIDARLLAHFAQAVQPAKIILPNEQEQYLSALMTRRRQVIDMLIADKNHLLSTPTRLRELVERNIDWLEKQLKELNVQIDDFVDHDPVFHTKNDILRTTPGVGPVLANILLSDLPELGRLNRKEIASLVGVAPFNRDSGMFRGKRRIKGGRVNIRTVLYMATVAVIRWNPILKIFYNRLVAKGKVKKVALVACMRKFLTILNAMIRDMQPFHVALIS

SEQ ID NO: 352809 - protein, 400 aa, unidentified
MLSIGIDVSKGKSTVCGMKPGGEIVYTPFEVQHTRKGMLELVSLLRSSGEEVRAVLESTGSYHCPVVTALLENGIFVSVVNSLRMKRFCSQSIRKVKTDRIDAMQIALYGLAYWQELQPTRLPEDTYRELQLLARQYYQMTSMLIKAKVDLNAICDQVLPGMQELMSDHAGRHKLSDFVLRYRHTTHILEMGETRFRKDYCKWAEKKGYRNCERMAVLIFATAQNGIPVLPNAPSTQIVITEAIRVLHTVEASRDAILTQMQALAKTLPEYSLVREMPCIGDTLAPRLIAEIGDVRRFHSKRALIAYAGIDAPPYQSGKFCANNRHISKRGNRYLRKTGYEVMQSYVMHKPANDPIFTFIEKKRSEGKSGKLAMVAGLNKFLRVYYGKVTELYRSLPAIE

SEQ ID NO: 352810 - protein, 346 aa, unidentified
MDLYIGLDVSLASTAICVLSSHGQVIKETTASSEPEELERALRSLSGTVAGIGLEAGPLSQWLYRHLTEAGFDTVLMETRQVKGALKAMPIKTDRRDAEGIARLLQMGWFRPVHCKSISAQEMRALLSSRKAILQAIVDLELSIRGVLRNFGLKMGRVAKGRFEERVRELADGNAMLQAAANPVLSARTALRTELAGLEKLARDHAKSDPVCRQFMTMPGVGPIVALTVKSAIDDPDRFRSSKDVGPWVGLTPRREQSGERDIVGAISRAGDAGLRTVLYQAAMVMLNKGRPSWLTAWALNVAKRRGKRRATVALARRIGVILHRMWRDGTAFRFTRAEAAAVSGA

SEQ ID NO: 352811 - protein, 328 aa, unidentified
MKNYQEVIGIDVSKSKLDAYGHNRGSHREFSNDVLGYKALLKWANGKKQKVFFCFENTGHYSLKLALYLSSKKQVYVQENPVVIKRSSGVIREKNDVVDAMMIARYGWLHREELSPSELKDNELLEVGRLLALRDQLVRSRTGLKNTHSELKKLLNSSSTDTCCKTLVSSITHLTSQINKIEKQLKTVIKDSEHLSQNYKLVTSLKGVGLIVGAQLLYHTNNFKRFQTWRQFSSYCGTAPFGHSSGSSIHKKRKCHPMGDRQMKSLLSMAACTAIQYDSELRQYYKKKREEGKLKMIALNNVRNKLLSRVFAVVKRRTPYVELHKFAA

SEQ ID NO: 352812 - protein, 359 aa, unidentified
MYSECTKVQFTGQHVFIGIDIAKKSWKVCVYLGGAYHKHFAQPPDPEVLVTYLHRNFPGAVYHSVYEAGYFGFWIHRELIRLGFDSIVINPADVPTTNKERRTKTDRVDAAKLARSLANGELTPIYVPERAAEEDRTLIRMRAGFVRKQTRTKNQIKALLQIYGYRLPQDITDRYWTRAYIRWLESLAFEQEAGGAAFKALLGELLTLRATIADLTNQIRHMARQERYQSRVELLLSICGIGLLAAMTFLCEIITIERFKNLDRLLSYIGLVPGENSTGETEEDTGLNPRRNPALRYMLIECAWVAQREDPALLNAFNAYCRRMPKSKAIIPVARKLVSRMRFVLKNNQPYVTGVLSAR

SEQ ID NO: 352813 - protein, 340 aa, unidentified
MNINTIGLDIAKTIFHLVGLDKNGKQVQKKKLRRGQLLAYFANLPTCIIAIEGCGSAFYWQRELTKQGHRVKLLPAQYVKAHLRGNKNDYNDALAIAEASRVPELREVTPKTIEQQGIQALHRLRERTVNDRTSLSNQIRGLLAEFGVIFNQGINSVKKGLPTVLEDAENGLPPAFRDALGLKYNQFCQLDDLVKGLNKLINESSEAHKEIELLQSIPGFGDLVSSSYYSVIGDGKAFAKSRDVSASVGVVPRQNSTGGKTVLQSISKRGDKYLRKMLINGARSVVNHAHKKDDALSVWVTRLVEKRGRNKATVALANKLARIAWAVTVSGKPYQTNYAL

SEQ ID NO: 352814 - protein, 359 aa, unidentified
MTRITTIGLDLAKKVFQVHGVDAEGKVVVARKLRRKEVLAFFAKLPPCLVGMEACGSAHYWGREIAKLGHTVKLMPPKYVKAYVKRGKTDAGDATAICEAVTRPSMSFVPVKGIEQQGLSMLHSARSQLVGQRTQLINAVRGHLSELGIIAARGLLGLAELVGIVRDESDQRLPMTARVALMVLVRQIEIISTEIAALDSTLRKENKASELGPRLETIPSVGPVIASAFRARVTDPALFKNGRHLSAWIGVVPENDSTGGKVKQKGLSKKGDRYLRSLLVNGAMAVVRQAQRRPDKHPLVAKLLGRMSAKQVAIAIANKTARIAWAIMVHGGVYEAGHRAPPISSAGVRGCRIRGLAMG

SEQ ID NO: 352815 - protein, 338 aa, unidentified
MKLYGGIDLHSNNSVIALLDEEDKPVYRRRLPNDLSVILGELTAYQDAIEGLVVESTYNWYWLVDGLMETGYRVHLANTAAIVQYEGLKYSDDDSDACWLAKLLRLGLLPEGYIYPKAERAVRDLLRKRGQLVRQRTANLLAVQNLLARNLGYSLSANAIKRLALEAVDRLLPDAYLALAVKSNLAIMRSLDESIEQLEKTVKTCIKPRPEFQPLLSVSGIGDILGLTILLETGEISRFTQVGHYASYCRCVGSERISNGKRKGRGNTKNGNRYLAWAFVEAANFAVRYNPKIKRYDQRKCARSNGIVAIKTVAHKLARACYYILRDRVPFDVNKAFT

SEQ ID NO: 352816 - protein, 340 aa, unidentified
MTIKTIGLDLAKSVFQAHGVDADGATVRVKKLHRKQMLPFFLKLSPCLIGVEACGTAHHWARTLSAMGHEVRLIPPSYVKAFVKRGKSDAIDAEAICEAVQRRTMQFVPVKTVDQQGILMTHRARSLLVRQRTQAANALRSHLAELGLVANPGVANLARLAEQALAGQNVLPSFARAALEIMLRQIVALGQEIAELDRQIAAWHAESEASRRLAAIPGLGVITATAVAATVTDPDQFRSGRQFAAWLGLTPQQKSTGGKTRLGGISKQGDRYLRRLLVVGATAVIRHTKDKPTPMAAWIRKLLEKKPFRLVSIALANKLARIAWVLLTRKETYRPHQLGA

SEQ ID NO: 352817 - protein, 342 aa, unidentified
MSEKRYIGVDLHRRVFTCCVRLENGRQFLSEWRLEQMPQFLKKLRGTDEVAVEVTGNTRLFYDAVAPHVARVVVVNANQFRVISQSVKKTDPNDARNLALYLAKGLLPEVRMKEKQQAQVASLLQTRDRLVKLRTALKNKINNLLSARGIELEKEGLSSEKGLTRALAMEVEDLTRFELQILVDQIRSLNRSIAELEKVIDREGQKLKGHGNLTSIKGIGSLGASVLLSVIGDVRDFPEEGKLAAYFGIVPRIHNSNETERSGHITKRGSKLGRTALVQCALIAKRYSPYLASYYEAIRSRRGTGRAIIALARKFLGVIYRTLKNNWVFEDFPNFVLRETAA

SEQ ID NO: 352818 - protein, 412 aa, unidentified
MNAVGIDVSKGKSMVSVLRPFGELVAKPFEVRHTSSELSELAKRLKSLEGETRVVLEHTGRYYEPVAQLLHDAGVFVSAVNPLLIKEYGNNSLRKVKTDRADSLKIARYGLDNWTELRQHTPMDTIRYQLKSMNRQYGLYTKNKTAMKNNLIALLDQTYPGVNTLFGSPVREDGSQKWVDFAASFWHVDCVRGIGQAAFVERYRKWCKRHGYNLRSDKAAQIHTEAKELIAMLPKNSLSKVMVQEAIAQLNTVSKTVEVFRAEMNRLAKELPEYETVMSLYGAGKSLGPQLMAEIGDIRRFAHKGSLTAFAGVDPGANQSGTYDAKSTRSSKRGSPELRKTLFVLMTVLLQSAPPDDPVFQFLDKKRGEGKPYYVYMTAGCNKFLRIYYGRVKEFMNTLDTPVDMDSTALSQ

SEQ ID NO: 352819 - protein, 482 aa, unidentified
MKPKSPEKAKPATRRPMQGNWHQMNRKQRREMTRRIQSEDLSLAVIHPDAAGIDIGNESHYVAVPPTRDSQPVRRFGCTTAELKEMAVWLKQCAIRTIAMQSTGVYWIAVFDILEAAGFEVYLVNARETKNLPGRKSDVQESQWLMKLHTYGLLRNSFRPSQEVRTLRTYWRQRNDLVQAAGRHIQRIQKALTQMNIQLANVLSDVSGMTGQAIIKAILSGQRDPHELAAFRDPRVKASAEEIARSLEGNWQEDLLFVLRQEQHGYEFCQKQMAECDQQLQQYFSHSEDRSQGASMPQEKRKERLRKKKGNKPQFELRAELFRITGTDLTRIDGIDVMTAMTILSEAGWDMSKWKDEDHFVSWLRLCPDNRISGDKIIGKGRLPSKNRVTIALKMAACTLRTSNSYLGAQFRRLRTKLGPPVAIKAMAAKLARLVYHMLRDGMQFVDRGAQFYEAQHRNLQIKSLKRKAAALGFQIIEAAAA

SEQ ID NO: 352820 - protein, 348 aa, unidentified
MVILGIDAHKRTHTVVAIDEAGRELGEKTTVSTTTEAHLELVRWADRFGTPRRWAVEDCRHLSRRLEADLLAAGEELARVPPKMMAHARDAARTYGKSDPIDALAVARASLREPNLPVARLDGPSRELRLLVDHREDLVADRTAHINRLRWHLHELDPSWDPKPRSLVRFKHLDAVAARLEPLDGMVARIALDLVGRIRELTDKANALQREIRHRVRSLAPTLLGLTGVGELTAAKIVAEVADVRRFRSKDAFARHNGTAPLPVWSSNRVRHRLSRTGNRQLNAAIHRIAVTQKRCHDGAKAYLERRMANGNTKREALRALKRKLSDVVYRALLADAPSMDVAVGEAA

SEQ ID NO: 352821 - protein, 364 aa, unidentified
MTDQLNIVCGADIHQRFLVATILCRDGKTWTNRFLMNLNGLLDFKSWLTSYGCQKVAVESTGRFWIPVHMILEGTIDVIVANAYRIKHTPGKKTDLKDSEWLAELCLNDMIEPSRIFPKEDRELRNLTRTREAYVRDLSKEKNRIHQVLESCSIKLASTISDIFGKSGMHILNGLLNGTSIEEVLKGIPNKRVREGKAEELRDALMGKLDATDIFLIRQSLQIINQLKMRIEELDGEIHSRIALRPMDIKILRSIPGIGMVSACTILAEIGNYLDFKKPEQLAMWAGIVPSVYQSADKLVTGGITKQGSKHLRWILVQVAHAIAHTKGGKLKKFFLKIKGKKGYLVAIVALAKKGSLLNPPSAG

SEQ ID NO: 352822 - protein, 316 aa, unidentified
MTAQCVAGIDVSKARLDVFVLPQRLAFACTNDEAGITMLRQKLQGLGVERVVLEATGGLEYCAARALADAELSVERVQPGRIRAFRTVLGKRAKSDPLDAKLAARFAQAMPEEQARSVPSHQAEAIRSLSARRRQLVDLLVQEKTRLKMSRDPFVLESLKITITHLKQERARIEALLESAIEKDAAIARKNALLRTIPGIGPVVATTLITDLPELGRLNRHEVASLGGLAPHPERSGISRPGDHIGGGRACVRTALYMAAVCAIRCNPGLKTFYKRLVEGGKPHKVAVVAVARKLIVLANTLIRTDAPWNPAFGIG

SEQ ID NO: 352823 - protein, 327 aa, unidentified
MDQISVGIDVSKTFFVVGLAPTGERWTSETTPVAIDALVTRLRGLAPAIIVVEATGGYERALVAACGVAGLPVAVVNPRQVRAFAQALGLTAKTDDIDAGVLATFGDRVQPAPRPLADAATQALAALVARRRQLIEMIGMERQRLEQAPPTGRITRDLRNHIRWLERRVSDVDDEIGTAIQASPIWRVQDNLLRSVPGVGPITARTLLADLPELGTLDRRAIAALVGVAPFNCDSGQHRGQRHIWGGRASVRTTLYMAAVSAARHNPVLATFYRRLRDAGKPAKVALVATMRKLITILNAMLKHHTPWTGDASTPAAIARRAPAATV

SEQ ID NO: 352824 - protein, 405 aa, unidentified
MKPVVALDVSKGKSTIVIYDQKRCIFEGEINHCQADFESLRKRMILLEQQKGQRPEIVFEATGVYSMALEKFLQDRGYIYCRLNPLEAKLQTAAMRRNKTDKSDAHELAKTHFKINRKPMFQQDTYYNQMRALSRYYDEVDEELIQLRGKMHAILQLSFPELERMITPSSALFLNIVQLYPQPSFLLVHSKTVIRNSLKKNTKKNLSLKLADKKAQELLLVAKNSYPAIDASDVRCEQVRDYASRIADLRDKKEEIIAKMVALSLDRKEYHILRSFPGIGDATACRIIGELGDIRRFKNAKQLNAYVGIDIMRYQSGNTQYRDRINKRGNKKLRKILYFMIFSMISLRKKGQNHIVDYYDKLKKQPQRKPHKVAVIACINKFLKVAFHLISHNIPYDYEIASTHS

SEQ ID NO: 352825 - protein, 328 aa, unidentified
MFYFTGIDVSKNKIDMGWLRDAKMGKKKSKSLKNTALGHSQAIDWLLKNTQANPDEIVVVVEPTGIYHEALVYALHDKGIKVLLVNPGKAKKYAEAINLLHKTDKLDAIMLAYYGHAQCHALNFWHPEAPEVRELKVMIRRLDALEKDLQREQNRQEATEFSLTSQRVSQSLKDMIGALKAEIKRLQDDIDHHINQYPELKRNRQLLESIKGIGPVMSRELVYLFASKRFANAKQVAAYLGLIPKLKESGKFKGRTMLSKTGSARIRAKLYMAAVCASTHNPDIKAQKIRLLGAGKIKMQALGAAMRKLVQICFGVIKHQTEYQPQAI

SEQ ID NO: 352826 - protein, 369 aa, unidentified
MHDVTTFVGIDAHKKDLFIAMLVGNQATPVTWTVANEPNAVRRLARKLEREAPGPVRAFYEAGPCGYALQRQLTTPRVHCDVVAPALIPRKPGERVKTNRRDARKLGELGRAGLLTAVRPPTPDEEAVRDLCRARDDAREDLQRCRHRLGKLLLRRGLQYRVGRHWTKAHRRWVDSLTWPHEAERVVVADYLLAIDQTEARLKELDQQLTAVAATEPYRERVAWLRCFRGIDTLSAMLILAELHDFRRFASPRALMAYVGLVPGEHSSGEKHRRGRITRTGNALVRRLLVEAGWHYQHRPGVGVALARRRKGQPARIIAIADKAQQRLCRRFQYLAVLNKPRPTIVVAIARELVGFLWAALQPALVVAN

SEQ ID NO: 352827 - protein, 353 aa, unidentified
MITFLLSPFISNSCKKQSDSDELTHKPDLNNGDFSAQPQPRQNMSEKYELEVGVDVAKSELCASIGTRITSFANNPAGIKALFAAIKKASGNARITCEATGSYQDLLVRSCLEKGFPISQCDARQIKHYIMSFGQRAKTDPIDAGYIAAFAKDRSPATLGKEWVRQLDMRELKRRQDFLVKQCAQCKTSLDSYQDASIKAEIRREIKAKEKVIASYQLKLVKLVDADPVLKKKRELMMSVVGIGERTSLALLMLLPELGTTNRRNICSLAGVAPMHKSSGLMDAPRTVTGGGRKKVRTALYMASVSAIRHNPHIRKFYLGLKSRGKKGKAIVMAVARKLLIHLNGLLEKQAAQ

SEQ ID NO: 352828 - protein, 411 aa, unidentified
MNPVVGLDVAKGESQIQAYLERKKPYRKSFKVKHDLDGLASLLDFIKEIEDISGERPPLVMESTGHYHTPVVQYFEEKGYLIIIVNPLISYKAKSSSLRKVKTDIIDANHLCELYYKEDLEPYKKRGIQLMNLRHLTRQHDNITGMFVQTKLQFQAVLDQVFPEYSKVFGDLYSDVSLKTLQAFPTSEDVLKGDTERLTTKIKEFCNTRSLQWANKQAEKLMTAAAQNPFQKALYSSLALSLDMYINMLFEYKKHLSMLENEIDALAKSIEESKIIRSIPGIGEKIAATIISEIGEIERFNHPKKLVAFAGLDPSVFESGTFKGTYNRITKRGSSRLRQALYMAVKCAIRDCRKQKTTDEILPRNKKLRAFYDKKREEGKPFRVAVIACSNKLLHWIYALLKNKTSFLDLA

SEQ ID NO: 352829 - protein, 419 aa, unidentified
MKCFVGLDISSTKLDVCIMTNDIEMKVLFSATFGNDIIGASEIKEQVLRFNDIYHFERIVIGMEATSLYSFHPAMFFHEDSELKQLRVEVMIEQPAKIKKYREAFEENKNDTLDAFYIADYFRIERFTKSYLKEEKYNALQHLTRTRLQLIEQLVRTKQHFIENIYYKCNTLSIELKNHQLSTNIWSATIMTLMVEDYTLDELASLPLEKFVELIQKLGRGKFKAPDKLAKAIQAAITGSYRLSHVQQDSVNTVLSLLAREIRSLEKMIKEIDRAIEDMVEVLPEYQCLTSIPGIGKVFAAGIIAEIGQIDRFKDHPQVAKYAGLNWKENQSGNTSSQNTSLVKRGNRYLRYYLVEAADSVRRHNVEYAEFYKKKKDEVPKHKHKRAVVLTARKLVRLVDVLLRNHQLYTPPRRFMEDN

SEQ ID NO: 352830 - protein, 402 aa, unidentified
MNCVGIDVSKGKSMIAVMRPFGEVVVSPFEVRHTANELSELAGLLKSLDGETRVVMESTGNYHAPVAWLLHDAGLYVSVVNAMLVHDYGNNSLRRAKTDKKDAVKLANYGLDHWLTLPRYIPEEDTRLMLKICYRQYQQYSKVQTMLKNNLISLLDTTFPDANRLFTSPPRADGSEKWVDFVATFWHCECVCGRSEKAFTTQYQKWCRKHGYNFSEDKALDIYASACRHFGVIPKTDTAKLLVEQAISQLQTTSSALAALKQEMQSLAASLPEYPVVMGMFGVGPSLGPQLMAEIGDVRRFHSKKALVAFAGIDAPPYQSGQMDVRSRSISKRGSASLRRTLFLVMSVILQRAPMDEPVYQFMRKKHSEGKPYRVYMMASANKFLRIYYASVKAYLDSLEHN

SEQ ID NO: 352831 - protein, 419 aa, unidentified
MERVFEIAAGIDVHRDTVVVSVRRQLGRQVQDVETRTFETFHDGLVAMTVWLEHQRVEVVGLESTGVYWQPVVQAIQKRTPKVVVWLVNPMQVKKVAGRKSDVSDSQWLAKLVMYGLVSPSFVPSLQLQELRKLTRFRTKLTADRTRGKNRIIKEVERSGLKLATVCSDVLGKTGRTLLQAMLDGVVLDDAAIENMTFGTLRHRVPELARALKDPITPCTAVILRQMLRRLDDINKDIADLESEIRKLLQPLADDVARLEQIPGIDEIAAAAIVAETGTDMSVFPSAKHLASWGGLSPGSEESAGKNKQAPTRKGNKYLRTTLVQAAISAKQTKGSFWHYKARRLARLGPKKAAVALARSLASVVFHILADRCDYRDPAIIPPPPARAKARLAALADQIRRLGFDITITPRAAPEASVS

SEQ ID NO: 352832 - protein, 415 aa, unidentified
MDVVHSRCAGLDISKRDAKVCVRIQGAGRARTAETVTTWGATTNQVLALREHLLAQNVSLVVLEATGDYWKPFYYLLEDAVFEVMLVNARHVKNLPGRKTDVSDAAWLAQLGAHGLVRASFVPPEPIRQLRDLTRTRTAITRERAREIQRIEKLLEDAGIKLSSVATDISGMSGRAMLEALISGERNPATLADLAQRRMRAKIPALTEALTGRFTDHHAFLARVHLDLIDRHTHAINELTARIEMMIEPFRGFRDLICTIPGISTGVADVITAETGADMTRFPTAGNLASWAGTCPGSNESAGRVKSTRTRPGNPYLKGALGIAALSAARSKDTYLSAKYRRIASHRGPMKALVAVEHDVLTTIWHMTTTGTFYNDPGPDFYTHLNPERAKNRALKQLRTMGYNVTLEPVEAAAS

SEQ ID NO: 352833 - protein, 343 aa, unidentified
MAIVNRIALDLAKDFIQVLALDESEQELFNKKLRSNKVLAKLATLKRTDDCEVAVESCGMSHHWRREIEKLGYKTVALPPRFVKAYLQGEKNDANDARAIAEAASRPNRKSVRIKSIEQQDLALMVNQRESYVQTRTEMSNRLRSVLAEYGIIMPQRISSILKGVPEILEDADNALTARSRNLVLRQYELLKTMDEEVKAMDKLLSAEANNTDDSRRLMTIPGIGPVTAVSLLALIGDVSDFKRGRNVSEYLGLVPRQNSSGGKDRLGSITKKGNTRLRTLLVHGARSALRVAHKRNDKLSLWAQDVVKRRGNNIAAVALANKHARIIWAMLTHKEDYRMAAA

SEQ ID NO: 352834 - protein, 371 aa, unidentified
MDEGVVWIGLDLGLRRTQVCAIDHSGESVHEQDCVTSLAALQDALAIFPLRRIGLIAVEAGSGVHIVRKLRGAGFPVALFEARKASRFLGVRRNKTDASDARGLADLARLGRNTVSQVHLKSLQCQELRSQLAMRHKVVRLRVAMEGMLRSRLALYGRPLGPVHSAAGLKAQMAEALAQIEAEEGVDLSKDVGPLVQLCESLRSYLRGVDRNLAKEASQHPVCSRLMDVSGVGPICALSFYSAVEEPSRFERTSDVAAYLGLTPRRYQSGKVSFTRGITKTGNKLTRTHLVNAAIALSSRGSDSELKQWATTLQERIGSPRARVAVARKLAILLLTIWKTGVPFEPFPSKQFIGRQTAEEVYTFSCIPLID

SEQ ID NO: 352835 - protein, 360 aa, unidentified
MMETKRRREQRSMLPVHPDAAAIDIGATVHVAAVGPARDPEPVRSFGTFTGDLHRLADWFAQCGIKTVVMESTGVYWIPIYEILEQRGFEVRVVNARDAKHVPGRKTDVSDAAWLQRLHEFGLLRGSFRPHGAIAALRAYLRQRERLLDYAAAHIQHMQKALTQMNLQIHHVISDITGATGMRIIRAIVAGERDPDTLASYRDIRCHSSAETVRQALIGNYREEHLFALAQAVELYEVYQAKVATCDEKIEGVLERLKQPGRAPAKPLRAARHKTRQPNAPAFDARGALYAVLGVDLTQIHGLGPYLALKLISECGTDLSAWPTAKHFTSWLSLAPRNKISGVRSCRPGHGHPEIVPPRC

SEQ ID NO: 352836 - protein, 348 aa, unidentified
MGVFIGLDVSLSKTAVCVVDRDGTVLWQGKVPSEPDPLIARLAKWSGTIALAGIEACPLSEWLHRGLREAGIPVVCIEVRHAQRFLSSRPVKTDRNDARGIAEMMRLGHYRPVHVKSPAAQAMRTTLAVRMQLVTAQLQIENTIRGLLKVYGLKIGAIHRNRFAARVTDLLGMASLPELAAAIEPLLRIRENMRAERKGFDRSFAALSRQDAVTRRLMTIPGVGPVTSLAFKATIDDTGRFATSKALGAHLGLTPRVYQSGEIDRSGHISKCGDRMMRHLLYEAASVLMTRTRKWSRLRAWGVTVAKRRGMKRATVAVARKLAVIMHRMWVTGGEFEFGSPAAATTAA

SEQ ID NO: 352837 - protein, 405 aa, unidentified
MQEGRFAGVDWASEEHAVCVNDAEGRIVDGRRYCHDERGLRALCARLLELGVELVAIERPDGLLIERLLDAGLSVIAIHPNQVAAMRPRFTAAGAKSDGFDAFVLAELARTDSHRFRVLVPDSDATKALRALTRAREDLVTHRVAVANELRAQLECFWPAAAGVFTEIDSPIALAFIKRYPAPADARGLGEQRLARFLARHRYSGRRTPAELITRLRQAADGRADTLEAEARRTIVLALVAALEPIVTRITELTSEIRSCLHDHVDGDTFRSLFRDPKSAITAATMLAELGDCRDRYPTIAALAADSGQCPVAIESGKSKRARFRWACDHRLRNAICTLADSSRHHNPWAQDIYQRARARGCTHPHAIRILGRAWCAVIWRLWHDHTTYDPTQHTALQHLIATKG

SEQ ID NO: 352838 - protein, 432 aa, unidentified
MDVVFPRCAGLDVHKKRITACRIVPDPTGQKAEGITELQPFGTMTRDLLALADWLTEASLTHVAMESTGEYWKPVYNLLEDTFTVFLVNAAHVKNVPGRKTDKADARWLAKLMRFGLLQASFIPPKGQRDLRDLTRYRTKLVQERVREVNRVQGVLERANIKLASVIADIMGVSGRAMLEALIAGRADPATMAALAKRRMRSKIPVLEQALTGIVHDHHRQLLAMQLAHIDFLDEQIEALNAAIETSLKALSTAEPSREAQPLPLTFSRAVELLDTIPGIDQRGAEVIVAEIGIDMSRFETAPRLAAWAGVAPGNDESAGKQRSGKTRKGNRPLRAILTQLAHAAVRTKDTYLSALYQRLAVRLGKKRAIIAVAHSIMCSVFHMLSRNEVYRELGANYFDERRRQFTVDRLTRRIEHLGYRVHLEPVAASAA

SEQ ID NO: 352839 - protein, 408 aa, unidentified
MEVVYRCCCGIDVHKNLIVACLRKGGRQELREFGTMTGEIKALANWLTEAGCEMAAMESTGPYWKPLYNLFELLGLDTMIVNAAHMKAVPGRKTDSKDAEWIAELLQHGLLRASFVPSREQRELRELTRYRKSIIEERSRELNRLQKVLEGANIKLGSVVADIHSKSAQRLLERLAAGEAMDDSEEISKLLHKSLLPKLDEIVAALDGIVTPLQRALLAQILDHINDLDKRIKELDRMAEAYMAEFQPAIAEVCQMPGIARRSAEVILAETGIDMSRFPSAAHLCSWAGVCPGNHQSAGKRYHGKTRKGNKTLKSMLVQCAKVASRVKGSYFAAQYQRIAARRGKNRATMAVAHSMLIAIYHVLKEGVPFRDLGADYYDGFRREHKIRNYLKRLQALGWEPELPSTTA

SEQ ID NO: 352840 - protein, 310 aa, unidentified
MDAIYVGIDVSKDRLDVHVRPTGEAYAVSRDGKGLEELIRRVAGLSPALVAVEATGGYETIVAAAIAGSGLPLAVVNPAQVRHFAQAIGKRAKTDPVDAAVIAHFAEATKPEPRSVPDEQAQLLCDLVTRRRQIIEMIVAEKQREKRAINKRVRKSIARLIAVLEKELSAVDTDIDDLVRGSPVWREKENLLASVPGIGSITARILLAELPELGSLDRRCIASLAGLAPYTRQSGRWRGKSMIAGGRGSVRSALFICAMVARQYNPPLKAFYERLLAAGKPKMVALIAVARKLLTILNAILRDNKPWQSA

SEQ ID NO: 352841 - protein, 352 aa, unidentified
MIVLGADTHKRSHAVAAVAAATGELLGEQTVQVGRRGFDALLGWARGLDGDRVWALEDCRHVSGSLERFPIERGERVLRIPTHVAANARRSARQRGKSDAIDALNVARAALQEGLGTFPVAHLDGPELDLRLLVDHRERLIRHRVELNSTLLWHLHDLWPELQLPGGALFSRKWSTRISRRLARAEQTMRVRNARDELRRLRELTLAVRQLQREITALVTRIAPQLLDQPGFGPLIAAKLVGEIAGAQRFATPAKLARAAGVAPIPASSGNTTRQRLDQGGNRQINAALHRVIVTRARCHQPTRDYITRRQSEGKSTREAIRCLKRYLTRHVWRLLQPPQAVTATPPHPSIP

SEQ ID NO: 352842 - protein, 447 aa, unidentified
MATRKRPTTESAITLTHPNAAGIDIGSASHFCAVPPDRDDEPVREFQSFTADLHRLADWLDACNVDTVAMESTGVYWIALYELLESRGFTVLLVNARHVKNVSGRKSDVLDCQWLQQLMSYGLLHGAFRPAEQVCVLRSLTRQRTMLLRSQGRLVQHMQKALVQMNIQLANVISDVVGETGQKILRAIVGGERDGMALAKLKNSRIHASLDEIARSLQGNWPGEHLFALKQALNAFDFCGTQLAECDAQIEAQLQALHVCEGEPAKGKKRGRARNAPKFDLRTQLFQMCGVDLTRIDGIDVTTALVVVSEVGADMSKFPSDKHFASWLGLCPGTKITGGKVMSGKTKRCANRAAQALRLAAAALRSSQSALGAYYRRLCARMDKPKAVTAAAHKLARLIYAMLAHGQEYTDRGQDYFEERYRQRVLHNLAQRAKTMGMQLVPCDIPA

SEQ ID NO: 352843 - protein, 443 aa, unidentified
MKKSYEKHMEKKQMLSGKRIVGIDPAKEKHQAVVVNEKGLQQGRSFSFPVSHEGYNEKLWKGLGKVLGAYRADDLVFAIETACALWKTLADYITAKGYTVLLVNPLTTYHSRPLMNHDYSKTDPKDSLLIATNAYQGNYTVYQHFTPEINKLHRLGIVQSKLTKDRQKAMARLRALMEEVFPEYLSCLGIDTGTSLYLLEKYFLPEHFRCLPVAEEELPVRSISNGNHGAKTLTKLKECAHKSVGSHTQGEEEVLRLTLDTWIMQIRQADKALKAIMEKMVELAKKTRHFEILTSLTGISDISATLFIAECRDLDLYTHYKQIEKHAGMNLKLSDSGKYVGARRISGIGNKRLLRLIYLMTTQTVRFIPEVRIKFITRQLKRKCYRKNIMASASQLLKLLMALFKENRLYTFKKDAAKKLAKLETKYEALENKQTKEKVRKAA

SEQ ID NO: 352844 - protein, 431 aa, unidentified
MKKSLKGKPVLPRGRAVVGIDIGKRKHAATALSPQGEVIAQLASFPNTRQGVDQLEKEVLRKAGGPGKVLVGMEATGHYWMCLYHELIRRGYACVVLNPLQTNARSSTRIRKTRNDKIDSQTIARLILSGEAMATRVTDPKITELRLLVRHRHRLLQATGNMERYAHTLVDRIFPEYADVFCKPFLPSAQKMIRQIGLAPDKLAKNAEHVREILRSAGRGRIAAETIEQLLKSAKESIGTRQAEAVIDTQLCSIFDYLKTVRQQIADIKKQLDDRAKKLNSPLYSLGLTSTLVATIHAESDPIDDFDSAEQYVAYVGLDPSLHDSGDTIKRRGKISKRGSPLLRHTLYLAAFVVYRRHDYFRRIYLKHRGRGKKHISALVIVAHRLARVIWRLLTDGREFTKRAPKPVSPSDKPRKSAKSTTTRKPANASA

SEQ ID NO: 352845 - protein, 351 aa, unidentified
MSRTTSAVAVSTIGIDTGKNTLHLIGLDERGTIVLREKLPRGRIGGRLANVPPCLIGIEAGMGTHYVARELMSLGHDVRQVPPAYAKPFRQTHKNDFRDAYAIAEAVRRPSTRCVPVKTDDQLDLQALHRVRSRLVGQRTAVINQIRGFLLERGIAVRQGLRFLRQQLPEILAKRIDVLSPRMIRMVEDLSGDWRHLDERIEQVTDEIEVLARESESCRQLMTVPGIGPLIASAMVAAIANGAAFTKGRDFAAWLGLVPRQMSTGDRTILGRISKRGNRCLRTLFMQGARVILLRPANWTKHSFGPWLTTAATRLHHNVLATALANKLARIAWTVLAQRRNYETRVIAEAA

SEQ ID NO: 352846 - protein, 340 aa, unidentified
MTEIKRIAIDTSKSVFTLHGVDDAGRPVVRRNLRRRELLAFFEKLPPVEVVLEACGGSHHWGRTLSALGHRVRLIPPQYVKPFVKRSKNDRNDAEAISVAASQPSIGSVPIKSVEQQAAAMLLSVRELLVRQRTQLVNALRGHAAELGMVAPLGEKGLAELQTEIAAADEGAVPAAAKQALMLLGQETRRIETRLAAIEAKLTQQYRANPVSRRLSGIPGVGPIGALNFALRVDPAQFRSARHFAAWLGLVPRECSTAGRQRLGKISRAGDERLRQLLVLGATAVIRHAKPGRPATSPWLLSLLGRKPRKLAAVALANKMARIIWAMKTSGQAYRLQPAA

SEQ ID NO: 352847 - protein, 317 aa, unidentified
MNSETCWVGVDVSKSTLDVYVSFPEQAFSVEHDPDGIRRLIETLQPRQPRLVVLEATGGLERTLVAELLVAPLPVAVVNPRQVRRFAQACGYLAKSDRLDARVLARFAQAIAPTPRALPEADALALTDLLARRRQRVEMLTMEKNRLHAAHNAAVRLDIQTHIDGLQQRLKATEQGLREAVEASPAWQAKAELLGEVKGLGDVTILTLIACLPELGQLNRKQIAALVGVAPLNRDSGTRRGRRCVWGGRASVRHVLYLATLSAVRYNPILKGFYTRLREAGKVAKVALVACMRKLLTILNAMLRDQAHWDPAHGKTT

SEQ ID NO: 352848 - protein, 394 aa, unidentified
MAFKIFRKNCCGLDVHKTWIYACMGITDTNGRTEYKQARFSSFTKGLQKLADWLAKYDCNDVCMESTGKFWIPVFNILEKTCWVTLAYPKYTKPQKGNKTDHKDAKWICDLYMCDMVNPSFIPPPDIRQLRDLMRYRSKLTNIMTSEKNRALNCLTVSNLKLDDVFSDVFGKSSRSVIRYILEHPGETFQVAPFIDRRCKHPVEEIQAVIDGTISHQQAVKLRECLQHLDELEVHKTNVEKEILCLVQQYPYQLELLQTVPGFSGNIMTAIALISEIGADMSVFPSAKHLVSWAGCCPRNDQSSKKVKSTRISRAGVYLKPLLVQVAIQPFTANADKLSAAGALEIRCQICDGRFLSMWAALFIFLGCPLPPCQKDLHVHNGRIVILASVAWIF

SEQ ID NO: 352849 - protein, 390 aa, unidentified
MANIIYIGLDVHKEKIQACAFLAAYGFGEDRVLANIELGGNYQEIIKFASTLKKKFGKETRFVCGYEAGCLGYSLCRHLQRCDIECHIMAPTTMSKEPGVRIKTDRRDAEMIARCLAYNTYKGVHLLDEEDESVRDYIRMRDDFKQMLKMVKQKILALLLRLGIRCDTCKTPWTQKHLQWLKNVDMGKGLNRETLDEYLKELDHLKERIDNFDTRIHELCDTERYKENVKKLICFPGIKEHTALSFISEIGDFTRFGKAKNFAAFLGLVPGEQSSGSKVHRTALTKSGNIHLRRLATEAAQAAIRSSPSYKSKALKARQEGAPEEVIAYADRARDRIIRKYKKMIRGEDLLGGHKAHNVVVAAVAREMSCFICGMMNGWYDGADSDKLQT

SEQ ID NO: 352850 - protein, 246 aa, unidentified
MVVVGFDVGKDSLFAARIDRSGRVKEHYELANDAKQVTALLKKLQSKHKHLLVASEATGDYHRTLALACLSLGIPFKLLNPITTKQYVKATVRKRKTDKTDGEIIARVALQGEGFLVTKETFADAKPILRASAKLVQLTQSVRLMQKHLDAILPEDEMLSRELTLCQEQLNNTITIYRKRAQELLANDELRELLQTIPGVGLVTALTLMTEIGDITRFKSQKALIAYAGLDPKVRQSGIRLLGTPN

SEQ ID NO: 352851 - protein, 387 aa, unidentified
MYFVGIDISKFKHDCAVVDELGDVITPSWSFQNDCEGFSLLRELLDALDGEKKIGLEATGHYGQNLKLFLENNGFSFMEFNPLLINRFVRSKSLRKTKTDSIDALMIAQYLMTVEYKPYPPSFYTLEKLKSLTRFRDSLVRQRSKQLVELTNILDKVFPEFKPFFKGRFSATALYLLSHYASPEKISSMNSKSYEPLRRLSRGKFSMVDFVELKTLARNTVGSTCDYLLQEMEITIDIYNQLQSKVDEVEQQISDCVLGLDPSMLTIPGIGVSSAAVILSEFGDLSKFNSPSKLLSFAGIEPGYFQSGTSESTGKMVKHGSSHLRYAIMNCAQTVINNEPTFAAYYAKKRAEGKEHRVALTHVAKKLLRVIYTLQTKELSYNPDLVR

SEQ ID NO: 352852 - protein, 356 aa, unidentified
MTSSIKYVGMDVHKQSISIAVRNAAGKIVMECVIETKANTIVQFFDGLRGEVQVTFEEGTWAAWLHDLLKPHVTKLVVCDPRQNALLQDGNQNDRVDARKLSDLLYMNKLKPVYHGDHGLRTLKELVRSYLTITRDLGRVMTRVKAIYRSWAIPCSGKQVYGSRHRAEWLGKINEPGVRLRAEFYYQQLDTLRSLRQAVRRELLAESKRHKAWKRLCEIPSIGPIRAAVLLGILQTPHRFRTKRQLWTYCGLGIEVHSSADHEVAKGQLRRKKKPVEIRGLNENCNHDLKNLFKGAAVVASTKPGPFESFYAALVAKGIRPEMARLTLARKIATIVLIVWKKGVRFDANHLKPQTA

SEQ ID NO: 352853 - protein, 354 aa, unidentified
MEKQNKMLDFTGYRLYIGIDVPLNQWTVTIRLRDLVLKTFSMNPSPQQLKDHLMKYYPHADYYSAYEAGFCGFWAHRELCKLGINNIVVNPADVPTTHKEKTQKRDKRDSRKLARELADGSLEAIYIPTKQQESLRLLSRLLVQLSKRSRQLKSRIKQFLHTQGIILPKRSEMSHWSGRFIHWLKSLEFEYDDARYYLDKLLIDLEQARKQKTHHLRKIRTRINGNKIIQFLRTVPGVGLVTAFTFYTEIMDIFRFQKLDHLIAFVGLIPSVEASDKKEKIIGLTNRCNKYLRYLLIEATWVAVRKDPALTLAFQNLLKTKSKQRAIIRMTKKLVNRMRHVWKNQQQYVIAVIE

SEQ ID NO: 352854 - protein, 351 aa, unidentified
MLLIGVDYHPSFQTIAFFDEETGECGGQELNHSDGQAERFYRGLQQRGIRVRVGMEATGYSRWFERLLAELGIEIWMGDPAEIKAKRVKKRKTDRNDALLLLRLLRENNFPQIWVPSPENRDLRQLLWHRHRLVQMRTRIMNQLQALAMNEGYRWKKKLFNEQGRAQLEKLALAPWASRRRQELLELLDRMNPTIQELTAAVEQEARKRPEVLRLMTHPGVGPLTALAYVLIIGTPARFQRGKQIGTYVGMIPCEDSSGGKQRLGHISKQGNSLLRFLLVEAAQAAARSHPDWRRRYIHLAIRRHKSIAKVAMGRRLAIRLYWMWRNGCEYSRSLEFGSYAGQLGTGHGVK

SEQ ID NO: 352855 - protein, 372 aa, unidentified
MHYNTIFVGMDVHKEKFSLCCYSIERDEFSHPHTTAADYKHVLAYIASLRGAFGEDASFLCGYEAGCLGFTLYHQLTEHNVKCVILAPTTMPVPKGKKKIRTDRRDARNIAKCLAYRDYSPVHVPTEQDEQVREYIRMRADHKLALKKVKQQISAFCLRHGLRYEGKSHWTAAHVRWLKSLKPDGLHGEILEEYLLTLENLADKIGRFDRRIAELAAKEEYSENVKKLSCFLGIQTHTALSAIVEVGDFKRFPSAEKFAAYLGLVPGEDSSGESRKRLGITKAGNTHVRRLLVEASQSYGRGRAGHKSKALKARQQGNPPEAVAYADRANERLRRKYYRMVLSGGKKANVAKTAVARELACFMWGMMTGSIA

SEQ ID NO: 352856 - protein, 406 aa, unidentified
MDILCKRCCGLDVHKKTITGCIMTPEGKAIATFGTMTKDLRALVAWIKEKGCTHVAMESTGVYWIPVYNLLETENLNVIIVNANHIKNVPGRKTDVSDAEWIADLLRHGLLKGSFIPPREQRELRELTRYRRSLVAEHTREVNRIQKVLEGCNLKLSSVVSRITGTTSSLILKALIHGEIDPEVLASFAKGRLVRKKHELMEALDGFIGPHQQKLLAVQIDHLAYLEKQITALDEEVAKRLHPFEDDLIRLDTIPGVGRRNAEDILAEIGPNMDLFPSAQHLSSWAGMAPGNHQSAGKRKSGRTTKGNRYLRVTLCESAQAVGRMKPNFLSNQYHRIAARRGRNRAAIAVGHSILVICYHLLKQKTNYAELGASFHDQRKEESIVRHVLKRLESLGYSVLLEKVGA

SEQ ID NO: 352857 - protein, 350 aa, unidentified
MDTTIPPLASIGIDIGKEVFHVVGFSTDGRIAFRRKIKRLALVETFKKLPPSVVGMEACLSAHFVSRALRQLGHEPRIIPAIYVKPFVKGQKNDYNDAEAIAEASLRPNLRTVREKTQDQLDLQACHRIRSRLVSRRTATINQIRAFLIEQGIAIRTGSRTLRNSLMAILKNRQDEISPRMSGLIAGLYEDWIALDEWIDTIASEIEKISEKEANCQRLMSVPGIGPLISTAVVAAIGTGEAFERGRDFGAWLGLVPRQYSTGGRSILGRISKRGSKYLRTLFIQAANVILMRPHNWERFSFGAWLLNAAPRLHRNKLATALANKLARIAWSILRNEKTFDTPRHEVVAI

SEQ ID NO: 352858 - protein, 422 aa, unidentified
MLEETNDTEEIIQRVAALDIGKAELVCCIRVPGEGERGKRLQEVRTYQTMTRSLLVLADRLGELGVTRVVMEATSDYWKAPFYLLEAAGFEVWLVNAKDVKHLPGRPKTDRLDAVWLCKVAERQMLRPSFVPPPAIRRLRDVARYRADLVAVRTAEKQRAEKLLEDAQIKLSVVASDIFGVSGRAMLAALVAGERNPKVLAQLARGRMRAKLSVLEEAFTGFFTDHHAFLLARMLARVDALDSDIAELDRKLEELIAPFAAAVDRLDEVTGVGRVAAQLILAEVGTDMGRFPTAGHLASWAKFTPGVKQSAGKTKGKSATGHGNRYLARVLGEAAVAAGRTDTFLGERYRRIARRRGTKRAIVAVGRSILVIVWHLLADPTARYHDLGSGFYDTRVNAERTKRNHVRQLEALGYKVTLQPAA

SEQ ID NO: 352859 - protein, 350 aa, unidentified
MTMVGGLDVHRQQITFDYVDDDGLVRSGQIRPATRKTLRRWLSEHCLEGNAEFALEGCTGWRYVSEELAAAGVGVHLGDPAEIAGLRGRKKRAKTDRADARLLRTLVLQGRFPESWIPPAHVVEIRTLGRLYCTLMDQRRAWQQRIHAQLFHQGCPPIRALLTEAGREVLAGAELSAAGRQYVDTALRRIDELTIEIDPLRAQLVNFARRQAGCQALQRHFGIGWLCAAIMWAEIGDTRRFCSSDQLVRFAGLDVTVYSSDAKRSPGHLSRQGSPELRWAAFEAAKCAARRSSPDHGYYHKLAAKHDGHNGKNPTLAVERKILRRCYHTLRELGDAALALPISEPEEATA

SEQ ID NO: 352860 - protein, 350 aa, unidentified
MKTVALDVHADVSQLALVTKDGEVLLEMQVPTRTEELRRIVAGIPGPKRVVFEEGPMSGLIHDALKDVADEVTSVDPTRNALISRAEDASDEKDAVRLATLVNTRATRTVYVPEEPYRTMRSLTRYDHTLADAITTVKNAMKALCRRWAIPCKGTRIYGKKTRDEFYTQLPSSMLRWQFQSLARRLDSMDLERTRAKRTVAKLAKKLPAIEMLKAIPGIKSVGAPTLVAWIVDPGRFKSRSARSSYCGLGLGQGITNWKPVGRARASKRGNRELKRVIFIAAEAAIRGDNGFARRYQARIAAGWERRKAIRDVARKILFTACAIMRTGREYDDSRISVPKNPGDDRQTCD

SEQ ID NO: 352861 - protein, 449 aa, unidentified
MVRKKSTTFSLTVLRPNAAGVDIAATTIHVALPPDRDQTVREFGTFTCDLNAIADWLIEYGITTVAMESTSVYWIPLFQILEERGIEVFLVNAHHVKAVPGRPKTDIKDAQWLQYLHSVGLLNASFRPEAEIAAIRSLMRHRDTLIQSSSQQILRMQKALTQMNVKLHNVISDITGVTGLAIIDAILSGQRDTHTLAQLKDRRIKCTKETIAKSLEGDYRPELIFTLKQTLAAYRFIKKQVEECDAEIQRAINSYNREKGLAKIEKKQRVNSGKKLRLRDARDWTIHAEMYQAFGIDLFELPGFATNTVLSVFTEVGTDFSKFRTAAAFASWLALCPNNQISGGKILRTKARHTKSRLSEALRQAAYSLASAKSHYGQLYRRLRAKFGAPKAVKAMANKLARLLYHLVTTRQEFDETRIGKAEAHQLERDFERLKRKARAHGFELTPAI

SEQ ID NO: 352862 - protein, 401 aa, unidentified
MVSDFMKGRYNLMKIYVGIDIAKLNHFAAAISSDGEIIIEPFKFTNDADGFQLLVSKLESFDKNSLIIGLESTAHYGDNLVRYLVTELYQVCVLNPIKTCQMRKNNVRKTKTDKVDTYVIAKTLMIQDNLRFVSFFDLDMMDLKALGRFRQKTIKQRTRLKIQLTTYVDQVFPEIQYFFKSGLHQHAVYALLKEAPSPKEIASMHMTHLANLLKVNSHGHFTKEQAKELRVLAQKSVGANDSAISIQITQTIQQIELLDSQLEKIEAEMTDIMKFNDSVIMTIPGIGYINGGMILGEIGDIHRFSNPNKLLAFAGLDPSVYQSGNFQAKTTRMSKRGSRVLRYALVNAAWNVVRNNATFKAYYDAKRAEGRSHYNALGHCAGKLVRVIWKMLTDEVEFNLE

SEQ ID NO: 352863 - protein, 377 aa, unidentified
MTTTAFANNNVISNVLYMALELSQNKWCIAFGNGVKMRQVTLEANDKLGLCVEIQKAKEKFGLPEDTKVMSCYEAGRDGFWIHRWLTSCGIENIVIDSSSIKVDRKSRRAKTDRLDASRMLKQLILHVRGEEKLQIARVPSEVEEDRRRIHRERERLIKERTGHTNRIKSFLNLFGIKFKNKGWKSWEIYLSSVKDWKEEYLPEDQKAELLREAKRLEMVEAQLKELETLRLERLETSDEEVYKKVRQLKRLKGIGDIGAWVFIMEWFGWRKFNNRREIGAAAGLVGTPYDSGESQREQGISKAGNYRIRTLATELSWCWLRYQPDSELSRWFNERFNRGKRSRRVGIVALARRLLIALWRYLETGQLPTGAELKPI

SEQ ID NO: 352864 - protein, 313 aa, unidentified
MNIIGIDVGARRCHVATEQDVASLTTDQTLQLLATTPPATIVLELTGAYGRLIAEHAYRAGHTVLIAHDTDERAIRHLLRSQRKTDRIDARYLRHLAALAPALPGPHPHLTPYEELRPLIQVRTLAHTWRYLVELRAAIKTRNRVPLSEPLPLIEPIDQLIEQYAQRTIDAVPPTIMTLLQSIPGVTPALAALLYATLGDASRFRSRDGAVSYAGVAPRHAPQSSTITGRKRRYRHAKLLATHLHMYALKVARNPHRHGRIGATYQRVRQRTDGPRALHAVKRHLIRITVGVLRSGTPHNPNHTSRAAGHGHA

SEQ ID NO: 352865 - protein, 383 aa, unidentified
MQPINTVNPTILLAIELSASTWLVAARVPGAEKPHLHRIDGGDTAALFALISSLRARVARRLDAPQIGVVCCFEAGRDGFWLHRLLTAHGVASHVLEPTSILVNRRARRAKTDRLDAEGMLRVLAAYLRGDHQACSMVRVPTLDEEDAKRTHRERENLVHERLRIENRIEALLFTQGIRKRPSLRSWERDLDVLRTGDGREIPRHLRAELDRLRRRLVITLELIREVEAERDQAAETKPQDQACRKIAALCRIRGIGANFAAVLTREVFYRSFDNRRQIASYVGITPMPYQSGGMDRDRRISRAGNPRARTTMIQLAWLWLRYQPGSELAEWFRERVGTLAGRTRRIAIVAMARKLLIALWRYAETGVVPVGAEIRAETTIAA

SEQ ID NO: 352866 - protein, 495 aa, unidentified
MERYLGVDTHALSCTLGLLSSSGQRLKSWVVETNGSALVEAVRNIPGRVHVCLEEGTQSAWLFELLKPHVAEVVVAVAPERKGAKDDQRDAWARAEELRTGAIATKVYKAPEHLASLRNAVRAYGFVVTDLVRAKNRLKAVFLSRGISTDAGVYDAKKRPQWLKKLSSPHRELAEWLGRQLDQVEPLRDEAEEWLLKESKSHPIIRKLATAPGLGPIRTAQVVAIVATPDRFRTRRQFWSYCGLGIVTRSSAEGSGQEPEVGSQPGSSDSWTEPQTTATAEGGLQGSSDDGDCAASERPAARRLRADAAIGDQANAGQADVGAEDCGDGALDVEAPGGVRPEATPALVRQVVGALTVEAKECGGVAGVAARERFEGEHPLVSWFPGRDGKTRDAGYAPPECRLKRWPIKALSGAWHPRLSGECNRRFEIGGAYAQTSDHINFAGKSPAASFAGRGVSATSPLVGASIRPLREIARAVGWSILLTTHFSGADKRRL

SEQ ID NO: 352867 - protein, 381 aa, unidentified
MTQVALETNDSANTPVLYMALELSKAKWKVGFEHGRKRRTVNVEGGDMERLREAIGEAKAKFGLPEDVRVRSCYEAGRDGFWLHRLLASWGVENLVVDPASIEVSRQARRAKTDRVDLEMLLNKLRLHHSGERVWKVVRVPDEAAEAGRHLHRETARLKVERSRQVNRLKGLLFAQGIRLEKVKMEGWAEQVEGFRTYDGKPLAADLRGELTRAGERLAVVERQLKELAAEQERRVEAAGQEGPLAMVRQLRALKGLGRVGSWVFVMEFFGWRRFRNGKQVGALAGLTGTPYASGEMNREQGISKAGNRRIRSLAVEIAWLWLRYQPDSALSRWFVERFGGTGKRHRRVGIVALARKLLVALWRYLDTGLLPEGAMLKAAP

SEQ ID NO: 352868 - protein, 373 aa, unidentified
MSNVRFIGLDVHAEKIAVAVAEPDGEVRSLGVIPNQPESIRRLIKKLGPTDQLRVCYEAGPTGYVVYWQLTALGVKCEVVAPTLVPVKAGDRVKTDRRDALKLARSYRARDLTAVWVPDAAHEALRDLVRAREAAKKDQLRARYRLGKFLLRRGQRPPTAMKAWTQKHLKWVKTVHFDHAAQEATLLDYLHEVEHMADRIERLEHAIDDAVKTGPEQMRAVIEALQALRGIALISAATIVTEVGELSRFPKPRQLMGYSGAVASENTTGERTRRGSITKTGNAHLRRVVIEAAWAYRYRPAVGAALRKRQTDLSPEVKAIAWKAQHRLHGRYCWLAAKGKLKQEVVTAVGRELLGFIWAIGVHVEATRRQAAA

SEQ ID NO: 352869 - protein, 349 aa, unidentified
MKYFAGLDVSLEETAICVVDEAGAIVKETRAASEPDALAAALRSLDLQLDRVGLESCSLSAWLHDELRAGGWPAICVETRRAKAAMGATPNKTDRNDARALAQIMRTGWYRAVHVKSKASRIWRSLLVARRTVLNEMRTIENVVRALLREAGVKLGTPSRKDFVERTRELTADDPVLTHLTEPLLTILTTMLREFAKLTKQVLDIVRDEPVCRRLMSVPGVGPLTALAFRATIDQPDRFARSRDVGAHLGLTPRRYQSGETDVQGAVSRCGDELARTALYEAAHSLLTCSRKWSALRAWGMAIAKRRGMARARVAVARKLAVILHRIWVDGGAFRFGREPAPSLASIQP

SEQ ID NO: 352870 - protein, 481 aa, unidentified
MAARKKNMTKDAAPGSPAASSAPGDDGVEVAEERIEVVRYAAAIDVGKGFGMVCTRVPGSRPDRRRQTVWRAEATYDQVVALMDHLRCQGIQRLVLESTSDYWRIWYYLAEAAGLQVWLVNAKDTKHLPGRGKSDREDCVWLCKLNERGMLRRSFVPPEAVRDLRSLTRTRSRLAQDQARHQNRVEKILEDALLKISVVISDLFGASGRRFLDALVAGERSPTALAALGDQRLRASTAELKAALTGRFRDIHAFEIATHLRLIDTINDEIARLDAAIEQQLAAIPGVAPACAACGLIGGGHAPGCASIDAAVLGLVERLDEITGVGTRNAQVIIAELGTDMSVFPTAGHAAAWARLTPRTIQSGASSRPGRTGKGDPYLRGALGQCVMAASRTDTRLGEQYRRTARRRGKQKGIVAVSRVICEIAWLLIGDRAARFTDLGPGYYDSQNPQRRTRSKIREIERLNPGMKVTLTPIDPAAAVA

SEQ ID NO: 352871 - protein, 315 aa, unidentified
MSESKVEIFVGIDVCKNTLDVQIEPAGEWFQLGNDDAGIRALCMRLSEPRPTLIVMEATGGLEARAAAELGARGLCLAVVNPRQVRDFAKATGQLAKTDRIDAAVLCAFARAIRPAARPMKEALSAQLDDLVSRRRQLVDMRVQELLRLQGASPLQAKSLKAHIVWLDKRIKSIETDLATRLRSSDAWRVKDDLLLSIPGVGEITSRSMLSRCPEIGQLSRRQIAKLIGVAPLNNDSGKYRGQRHIWGGRADVRSVLYMAALSAKRCNPVIKALAQRLLKAGKAPKVVIVACMRKLLTIMNAMIRSNTPWNPKIA

SEQ ID NO: 352872 - protein, 354 aa, unidentified
MLAELVDAVVGVDTHRDTHQVEIALPNGAPIASTTISNDATGYAELLAWIVDHAPGPRLAISIEGTRSYGVGLARAAAAAGLVVLECEQPHRKARRGKGKSDPIDAHLAVLAALRLDADRLPTPRADGDREALRILLGARQELTTASTAQTNRLRALLLGGDDTDRTVARGALTEARLASLARRRPPREASREQAVRHAEIRRLALALREAARALKANRAQLQTIVNDVVPRLIERPGIGPVSAAQAIVSFSHPGRCRNDAAFAALGGASPLEASSGRTVRHRLNRGGDRALNRALHTIAATRMRSCPTTQAYMARRTAEGKNPKEIRRCLKRYIARQLYRTLTTSMTRATEIN

SEQ ID NO: 352873 - protein, 406 aa, unidentified
MGPAASNYLTEVFPMIIVAVDVAKDKHDCFITNTDGEVLFDPFVIRNDQNGFENLFEKIRSVTDSLRNVKVGLEATGHYHLNLLGYLLDKGLPTCLINPLQTSLFRKSLSFRKTKTDPVDAKAIARLLMSDRTLQPYSLTSYQNEELKSLTRYRADKVRERAKLKSSISRLVVILFPELEKFVPTLHVATVYSLLREFPGASFVASAHLTRLSHLFSQSSKGHYGKEEAIKIRNAARHSIGTVFPSKSMELRHTIDHIRFLDDEIDEIESQIFALLDKDPPKMLDIPGMGPRMAAVIVAEIGDFKRFSSPDKLLAYAGLSPTTYQSGQLTSTYAKMEKRGSRYLRYALFNAAKYVCIWDPTFHAYLAKKRSEGKHYNVAISHAAKKLVRLIYHLETTGETYISKAS

SEQ ID NO: 352874 - protein, 344 aa, unidentified
MDHFAGLDVSVKETSICIVDDAGKIVREVKVASEPASLLAVLKNPAYHFKRIGLEAGPLSQWLFSVLAEAGLPVICVETRHMQAVLKAQINKTDRNDARGIAQMMRAGLYRPVHVKTIRSQKLRMLLTHRKLLQSKAIAIENDLRGTLRNFGLKVGMVGKVKFEARIRELVENLPDLAVLVEPMLIVRRVLREQIVILHRRLLAVVRGDEVCRRLMTTPGVGPVVALTYRATVDVPARFRKSKSVGAVFGLTCAKYQSGEVDRNGRISRCGDEMMRVMLYEAAQSMLHSKKWSWLKAWAMQIARRRGMKKAIVALARRLAVIMHRIWVDGTEFRWTREQAAAAA

SEQ ID NO: 352875 - protein, 416 aa, unidentified
MNAVGIDVSSRKSTVAVLRPLGEVVCLPFDVTHDIAGLASLVEKLKALDGETRVVMEHTGRYYEAVAKALHEAGFFVCAVNPLLIKEYGANSLRRVKTDKADAIKIARYALDNWADLRDFTPMDAIRYDLKTLNRQFQLASKQRTASANNLIALLEQSFPGIRKCFDSPVRSDGTQKWVDFAHSFWHVDCVRKQPFAAFCERYRKWCKRHAYLFKLSNAEEVYALAKRAVVLTPKSKVVKVLVQEAANQLISISRSVEVYRAEMDRLAAMLPEYPVVMAMYGVGKSYGPQLMAEIGDVRRFERKQALVAFAGIDPMPNQSGDKNVRSNKSSKRGSPYLRKTLFNVIRTYLQCAPQDEPVFQFLNRKRAEGKPFYVYMLAAANKFLRRYYAKLRDYFASLDTLQPVAPIPTILKATL

SEQ ID NO: 352876 - protein, 314 aa, unidentified
MLQKAELSCEADSENYLGGSSETMYFIGLDVHKRTISYCVKDAAGKVHQEGKIGSTRRELDAWVKTVPQPRTIAMEATIFTGWIYDHLLPHAEKVKVAHPLMLRAIAAAKRKNDKIDASKIADCLRCDFLPECHMASTEIRDRRRTLRYRGLLVKQMVQMKNRVSGLLLEKVTHTRQRLHKVGYFAELMSSSEEIDQSIRPLLKLSREHIVRAQKLDYALVSSLERDPMLAERLKRLRTVPGVGPITALTWVLEIGDVARFQSIKQAISYCGLCGAEKRSADKVVRTPIPNSATNISSRCWWKRRSWHRDTAMN

SEQ ID NO: 352877 - protein, 414 aa, unidentified
MDDDIVRWFAAVDWGSEQHQACILDAAGKIMDERVFPHGGAGLAALCDWLVSVAGDPSIVAVAIEVPHGPVVDALLDRGFAVHAINPKQLDRLRDRFSVAGAKDDRRDARIAAAGLRTDPQLFRPVQIGDPAVIKLREWSRLAHELQQERVRLGNRIRQQLWRYYPQLLELTDDVAAEWVLALWTMAPSPVQAARMRETTLARLLKQHRIRRINAETAINILRVPIIKVAEGVTEAAVLHLRSLVARLRLANREFRQAEHKLDELCAALIRPEATKDDVPSDAAILASLPGVGRSILAALLTEASGPLIRRDYAALRTLSGVAPVTKRSGKTCIVVMRYAAQTRLRQAVFHWARVAVQNDPKCRVRYDALRARGHSYGRALRSVADRLLGVACVLLQRREMFDLDHGTPQAAAS

SEQ ID NO: 352878 - protein, 352 aa, unidentified
MEVTTIGLDLAKSIFRVHGVDTTGEVVVRRPLRRAQMLPFFARLPSCLVGMEACGTSHYWARELIKLGHEVRLMPPAYVKPYVKRGKTDAADAEAVCEAVRRPTMRFVPVKSPEQQAVLSMHRARDLLVKQRTQLVNMIRSLLAEFGLNIPKGLERALLMARRIVDGKAPDVPMEAAKIVSTLSQQALDIHVRLRQIDRDLLVWQRGNDVARRLMTIPGIGPVGATALAASVTDPRQFRSGRQFAAWLGLTPLQKSSGGKERLGRITKMGDKYLRKLLIVGMTSLVCRAKHNPETIEPRLANLLARKPVRVATVAMANKTARTIWAIMTRGETYRAGHQPALAHKNNVTRIS

SEQ ID NO: 352879 - protein, 409 aa, unidentified
MERPVISCDVSKGSSHIQGFIGLSNPTCKPFIVHHVKSELKVIKEMIDSLQRQTHQKPAFVFEYTGVYHEAIIAYVSKLDIDIIAISPLESAKVRKGNIRPTKTDAMDCKNIAEVYYKRVGDKKPITIYKSDSSNNVKTLSRKRRSLLNDLKRIKVTYRRYLDLVWPCLDLYFKEMDGKVILTIVRTYKHPETIKRRTSYQIGDVLENNAHCRHKRSLELADKIKDYAKESSSGVNEKSEYVNCLMETIDELLDKEKQIEETENMLLNLVRKYPTYSLIKSIPGIGDKLAIVIASELGDYTRFKSAKQLVAYCGIDPTVLQSGTDDGKHYSISRKGNPILRSAIYLAVRIMIGMKDVDNQITKFFHKKKSSGLSQKASAVATSRKLLHVMYGMFTNGVCFVTKSIIIGF

SEQ ID NO: 352880 - protein, 409 aa, unidentified
MLKIVYPNCCGIDVHKTFVVAVIAITNNQGITEYHRKRFSTFTNGLTQLRDWLEYYSCFDVCMESTGKYWIPVFNILEEQTNVCLAHPKYVKAIRGKKTDKKDAQWIADLFKHDLVAFSFIPPLKIRQLRDLFRYRMKLTQLQVGEKNRYQNCLTWSNLQIASVVSDVFGKSAQAIIKSILDNPQDKPNIEQLVHKRMKNKVQDLEIAMEGALTPEQAEKIRVIKAHYDALAICKEDLEQMFRELGQDYQHQVKLIQTVPGFKEDLSALRIISEIGCDMTVFDSAAKLCSWAGLIPANNESAGKKFSTRISKGGKYLKPFLVQVANAVVKSDKHPELRNKYLKLKKRRGHRKAISAICRRLLVSVYQVLRKQEDYNPVLQGLTEIRNPDKTMSVQDAVRFAQQHGFNVA

SEQ ID NO: 352881 - protein, 339 aa, unidentified
MQVTTVGLDLAKNIFQVHGVSENGEVAFNQALRRAQLLAFFEKLPPCLVGMEACGSSHYWARELSKLGHDVRLIPAMYVKPYVKRGKSDAVDAAAICEAVTRPTMRFVAIKSEEQQGVLFLHRARDLIVRQRTQLSNMLRGLLAEFGIVIAQGIGSAVKFAKGVLDGDKPGIPEVAIDVLGNLSNQLVALHPRVRWYEMRMRLQARQDPHVMLLRTIPGVGPVTASAIVATAGDASQFRNGREFAAWLGLTPLNRSSGGKERLGRISKMGDQYIRRLLVTGMTSRLRQMKTHPERVDPWARALLERKPVRLATVAMANKTARIIWAVLTKNEYYRAHTA

SEQ ID NO: 352882 - protein, 312 aa, unidentified
MIKTICGVDVSKAWLDAHIEPAGAAARFAGDASGVEELASFCRKHGADRVVMEASGGYERMAFTVLWGMGLPCALANPRQVRRFAEAMGYLEKTDRIDAAMIARYGQVRDLRPTPLQSQAAQRLKALVARLSQVTADITVNKQRRSAASDPEALASLDEALVFLKRQSRALEGRIAGLIDDDPLWARLDKAFRQIKGVASRTVARLMAELPEIGTLPGKAIAKLAGLAPIANDSGQRTGRRPVRGGREGPRSILFLVAAIAAKYDPHLADFHQRLSKAGKPKMVIRIALARKLLVILNAKARDARKEFAHAA

SEQ ID NO: 352883 - protein, 459 aa, unidentified
MSKGKNKTESRFEKMPVVHLHAAGIDVGSRSHFVAIGQNKEDVKEYGVYTEDLHLLCQALVNNGITETALESTGSYWQPLFVLLQQYNLNPILVNGKFTKNVKGRKTDVQDCQWIQKLHTMGMLEGSFIPDLFTETVRQYHRHRECLVESGAAYINKMQKALRLTNIRLDAVLRDVMGLSGKKIIEAILKGERNPAVLASLAHPNVKTSSAEIESALTGDWREEYIFELRQCFELYQYYNQKIDECDEEIKKLLTAEIDRKQKEEGLAKIGDVKIKKKKVQKNAPNINIQRVMIDLTGGIDISVIDGVGLGLLLCLVAETGIDLKAFATDKQFASWLRLSPDIKKTGGKVISDKTRKGKNRLAHAFMHAANAIGNMKQGDYLVHFFKRIERRSGRAVATVATARKLAVIIWNMLVKKKPYKPMVPTEYLNKVRGNKIRNIQREIRRLNIHEDELTFATA

SEQ ID NO: 352884 - protein, 344 aa, unidentified
MSGVITVGLDIAKHVFHAHGVDDQGRALFSKRISRGKLLDFFAAQPSCTVALEACGGAHHWARQLTQLGHEVRLIPPAYVKPFVKRQKNDAIDAEAICEAAQRPNMRFVAMKSEQQQAAGLVFRTRDLLVRQRTQLINAVRGHLTEYGWIAPKGPSHVAELAHLIEEKRMAGSLPEAARAMFRLMLDQLASLNGRIAVLDKEIARRAREDEVSRRLMTIPGIGPISATAIAALAPPVETFAKGRDFAAWLGLTPVQRSTGGKQKLGATSKMGERTLRRLLIIGSSAVVQQASKRGAAKGSWLEQMLARKPRMLVTVALANKMARIVWALLVKREVYRAPVAANA

SEQ ID NO: 352885 - protein, 331 aa, unidentified
MFPVGIDVSKNTLDLCMLYDGIKGRIKTRNIQNNRHSVENILRWLRLQHCSPEDVHVVMEATGVYHERLATELHDAGFRVSLANPHRSREFARGMGIMTKTDKVDAYMLACYAFLKKPHRWEPPAPEIRYLGALLRRRDVLLGDALREENRLEKYLSTDTPADIISSCMHMAQLLRDEVSNIERQIKAHIKASPALRRDYTLLTSIKSVGPQLGMHMLVVLRSHDFSSAEQAAAFLGVVPIEKRSGTSVRSRPRMSKIGPPQLRAKLYMSALCGKIYNKRMRNIYDEMCLRGKPKMVAIGALMRKLVHWCYGVLKTGIVFNDEGLKQVLST

SEQ ID NO: 352886 - protein, 331 aa, unidentified
MRYVGIDLHKRSLVACVQDDAGCTLALESMDCRDMACIARFFDSHRPFRAVIEASSSYRWLYDLLSPRGEVILAHPLRLRAIVAGRAKTDKLDAAMLAKLLRAGLIPASYVPPVSYQHLRELTRARARLSREATAAKNEVHGLLTRRNIPSPFVVLFGPRGRRWLASLDLGPVDALVRDELLARLAHYDAALALHDRRLDELASGFPQAEALSCLFGIGRYSALLIVAEIGEPWRFADGRKVGAYAGLTARVHQSGSQSYSGRITRQGSPWLRWILVQAAMHLVRRDEKLGNFYQRIRKRSGLMVARVAAARKLAEICWLRLMRWHREAAA

SEQ ID NO: 352887 - protein, 320 aa, unidentified
MQDDLVLFGVDVSSLWLDINQYGSASNLHIDNSIDAISEWLEHIPQASIIGMEVTGRYHFLLAKLAFAAGMRVYVLNPKDIHYYAKGVGRRAKTDRGDALLIARYLASEQPHLREWLPMSQEQEQINALFLRRSSLVKIRHALMMTTSTLTGVDTELAAALLSMQRLIDSIGKQILHLSKKQGDEYYNRMMAMRGIYGIGPLTAAYLAGLFSRVPFHSSDQAVCFLGMDLKFADSGKKQGKRRLSKRGPSEARRLLYNAAAAAGRGLFKPLLDKYRERLPYAGAVIALARKLVRIAFAIWQSGEEFKIDRFSSPFLTKTA

SEQ ID NO: 352888 - protein, 379 aa, unidentified
MKEFSAYVGLDVHKDTIAVAVALPGRADAVYRGTIKNQRKSLMRLINSVSPDGERVSFCYEAGPCGYGLYREIIASGHACEVVAPSLVPRKAGDRVKTDRRDALKLAALHRAGELTSVWVPGAEQEAMRDLTRAREDMKAIELKARQRLGAFLLRHDRLYTQGKSRWTQRHFAWLETVKFDDPIQQLVLQEYIDTVREGQARVAGLEAQMRQALESWSLRPIVEGLMALRGVDVITAMTVLAELGDITRFDSPRQLMAFLGLVPSEHSSGGQRRQGAITKTGNGHVRRVLVEAAWSYHFAARKTAHLRRKAAAAPQPVQAIAWAAQKRLCARYWHLYHAGKPKPQVCAAIARELVGFIWAIACELTGKAHGSRAAGAVS

SEQ ID NO: 352889 - protein, 357 aa, unidentified
MIKNYTPKSKSEIPHQEEKVTYVGVDLSKSKLDVMSDKYRIYPNSDSGCKHFCRDLKQKSNNVVVVYEATGSISLQFAAMLDMNGIQRCQVSPRKIRHFAKGGIKEAKTDKLDCEVIRNYAITYSQYLKINAPMSKDYAEMRELQRVERFIAQNIAKTKQVLSDCRSEFARKTLNDKIKADKEQRKLINAQLHRLIKEDEYMGRKMRILMQEIGVGKETAVALALELPELGNLSRKEVAALVGVAPFNFDSGNKIGKRYIRYGRRNIRNLLYMCTRAALNAKTENVYHKRWKQLERKIKNPNSLTNAPEDKDYKRRMVACMRLMIVRLNAITRDWIAEGCPDITQRGKVIATTAIKK

SEQ ID NO: 352890 - protein, 313 aa, unidentified
MSQPLFVGIDVSKNSLDVHLTPSGERRQFPNSKAGLRRLSKLLVNRNPCLTAVEATGGYEQLALNHLAGARLRVALINPRRIRDYAKAIGKLAKTDSIDAAVIAEYASANHAHVRPFVLRQEQAVKHVVVRRRQLVDMRTAEKNRLKQASDPAIRKSIKALIAVLNRQVSQLQDQIRTTIRSNPLWSRRNEVLTSAPSIGPVTSSTLIGELPELGEGDHRQLASLVGVAPFNNDSGKKKGDRAISAGRRSVRKVLYMAALSAIRRNPVIKAFYQRLVAKGKPFKVAITACVRKLLSILNTMVHKNETWKPKMA

SEQ ID NO: 352891 - protein, 365 aa, unidentified
MLGVDVGKADLYGTWRDSVTEAVRWHGSVPNTAVGIRQLLRRAPESPVVVEPTGRYGEALIRAAQGEGRTVLLAPTRRARAFLSAVQSRAKTDRVDSAGLALYGLRGRLRPYTLPSDEVDELKQLLAARRGLSRSRSALQQQQEALPRAAATLAPVLAALTRQIDTIDRQLAKLSTPPKPPKAVKKKTTTSAAVAAVPASPATAAEPVVAAAPPPSPVLAAARTLRTVPGFGPVTAAALAACLVEKQFTHPDQFVAYLGLDIRVHQSGRRNGQFGLSKQGDAELRRLLYIAALSATQSRDTTFAQRYDREKAKGLTKPAALNAVARKLAKVAWSLVAHHTTYDPQRVDQQPQKVDAQPPLVDTQA

SEQ ID NO: 352892 - protein, 336 aa, unidentified
MKYVGIDLHKRDLVVAVEEEDGSVSKPQRFACQDEAAVLSFFEKQRPFKAVIEASSSYRWLYERLHPLGQVVLAHPLRLQAIVAARAKTDKLDASMLAKLLRLGMIPEAYIPPGNYQELRELARTRARLSQAATMAKCQLQALLARANVHPPFRSCFGVRGRRWLRSCDLGVAANAAREELLLRLEHYERQTKVLDAHLAKMAEAFPEHEALTALYGIGVYSALLIVGELGEASRFRSDRQVGAYAGLTARVHQSGGHDYHGHITRQGSGWLRWVLVQAAMKLVRVDPALRAFYVRIRKRSSKHIARVAAARKLAGICWVRLVRWQREHAAAAAGS

SEQ ID NO: 352893 - protein, 327 aa, unidentified
MNFIGVDVDSKYLVCRIQRGEKRFPIAQFDNNPAGFRKFIKWATKRQQTARVTMEATGVYSLPFALALYETPSIEVSVMNPKAIKNFIIAQMQRGKTDALDATAILEYTLRMEFRPWQPPRGEVLELQHITRRIVQLNTELTRERNRHKAASRLGIIGRIVANDTAVNMRHLQRRIDTMEQAALDIVKHDPQLNPRLEQLVSITGIAMKTGPRLLAELASLPDDMSGPQWVAHAGLDPRPHESGTSTNKPRRVSKAGNRYIREVLYFPALVASQKDKHVKAFYEMLLSKGKKPMQAIVAIMRKLLLAIWGMFKSNTNWDGEKFYKIA

SEQ ID NO: 352894 - protein, 316 aa, unidentified
MTMSVFVGVDVSKKALDVLIRPTGEYVTRTNDAAGIRALVEQLRTLSPELIVLEATGGYERTLVLALDEAGLPVAVINPRQARDFARALGRRAKTDRVDAGVLAHFAEAVRPAPRVMPSDAAQELEALRTRRQQVVEMITAEKNRLGTAPRRMQPRIREHIHYLEQERDGLEEELGRHIEADPQWHARDTLLQSTPGIGPQTSRTLIATLPELGDLSLRAIAALVGVAPYARDSGQFKGQRKISGGRADVRTALYMATFSAVRCNPVLRAHYEQLRARGKLFKVAMVACMRKLLGILNTMVRTNTPWGAHRIVNAT

SEQ ID NO: 352895 - protein, 409 aa, unidentified
MPKTLFIGIDISSEENVAQFMDHEGASLRPSLQFRNSQAGLDQLVRAISDLVEEHDAEHLHVGMEATGLYWWHLRESLAAEPLLESLRVDVYVINPSLIKGFKKAYTTLPKTDAVDAWVIADRLRFGRLKPVTENDLLYHPLARLTRFRLTMTQALTKDKNRACQLLFLKCSEYRKTAGRRTFGKASVALFNEFTTEELAHKPLEELLEVILANTNNRFADPQGFANEIKRAARNSYRLSPKMQDSVGVALAMTCENIRYFETQCKKLDKVIGRELEAIPQTLTTVPGIGNVLAAGIIAEVGDVTRFDHEKALAKFAGLTWHRHQSGRFEAEETSLTKAGNHYLRYYLVEAANSLRVHNPEYAAFYARKYDEVPKHQHKRALVLTARKLVRLVYALLSTGQIYREGSKS

SEQ ID NO: 352896 - protein, 412 aa, unidentified
MDTMYRCCAGMDVHKQTVAVCVRRMDGSGRVHKEVRTFGTMTGQLLALSDWLAAEGVQAAAMESTGVFWKPVWNILESTVKLILVNARHIKNVPGRKTDVADCEWIAQLLQHGLLRASFVPDRPQRELRELTRHRSQLVAEQTRAANRIHKTLEDANVKLGSVATDILGVSGRAMIRALVDGQDDPAQLAELARGRLREKRPQLREALRGHLSDHHRFMLGQLMDHLTYLDQQIGQFDERIEALMIPFEQAVSRLMTMPGVGRRTAQNVLAEIGVDMSRFPSAGHLASWAAMCPGNRESAGKRKSGRTNHGNRWLRAALTQAAWAASRSRNTYLSSHYRRLAGRRGKKRAIVAVGHTMLEMMYHILRDDVDYHELGHDYLDKLQPHRLTRYLVKRLESLGHEVTLAPVDRAA

SEQ ID NO: 352897 - protein, 350 aa, unidentified
MSQLIRIGMDTSKKVFQLHGVDADERVVLSRKLSRHQMIRFFTNLPPTVIGIEACGASHHWARTLGALGHEVRLIAPQLVKPYVRRSKNDAADAEALCEAMSRPTMRFVPVKTVGQQAALMLVGMRERLIGRRTQLANSIRGYAAEFGVTAPAGLSRVAPFLQQIASEETLPPLARDLFAQMAEEYEVLMEQIRELDKKLATWHRSQEVSRRLSGIPGIGPLAAALLLMKAPDPHLFRSGRDFAAWIGLTPRDHSSGGKVRHGGITRAGDSRLRSMLVVGATTVLRHVRQNGQSRLATPWLLSLLSRKKPKPAAVALANRMARIAWKLMTSGETYRKPVDAVALAAAAAC

SEQ ID NO: 352898 - protein, 345 aa, unidentified
MSRNTTKSEIRAVFAGIDYHKKFSVITLGDRDGLPILQEKVLSDVQTVSKFFAGRGSLICAIENCRGNEWIVELLKSLGCEVRVANTYAVRLIADSRCKNDKIDSRILMELVSRNYLPVCYQPTEEERLLREQLRFRTKLMRSKTQYKNIAHALMDKENKGRAITTTKKRKEAQEQAGLHPERQLRLSRMLEVINFLDEQMSVEDKELLERGRSNPDVIRLKTIPGVGDISALLLLAELGDVSRFKKAKNVGSYLGLVPRMYASSDVCRMGSITKQGSGLVRRILVQDAWMAVKMSGVFRNRYSSILKRKGKKVAIVAIARMLSEVAYRILRDKTEFKEELLTLG

SEQ ID NO: 352899 - protein, 443 aa, unidentified
MARKNQKRFEIIHHHCAGIDVGSREHWVAVNPEQYDPSVRQFSTFTDDLIALADWLQSLNISVVAMEATGVYWIPLFEVLDARGFEVYLVNSRATRQTSGRKSDVLDCQWIWQLMTHGLLSGAFRPSDEVCSMRSLVRQRANKVSDQAKSINRMQKALAQMNIQLAHVISDITGVTGLKILRAIVQGERCPEKLSSLRDGRIKADQQTIARSLHGNWRAEHLHALGQELACHDFLEKQIAECDQAIAQALARLPVLQSETGLPRKPLRSAHRSTDQQLVLHQALIKVMGVDLTAIPTIGIDVALVIASELGPDLSRFPTSQHLSSWLGVAPPTRISGGKPLAGKAPKVINRAAQALKQAASNARQDKSFIGASHRARLTRMDTSCAIKATAHQLARLIYAMLTKGQPYVEKGIEEFEEKSRGRQLRALERKARKLGMQLVKAA

SEQ ID NO: 352900 - protein, 367 aa, unidentified
MSISKFVGLDVHKETIAVALADDGRTGEIRFYGTIPNTQDSIRRLVARLSSPDVALHFCYEAGGCGYGIHRQLVDLGAECSVIAPSVMPRKPADRIKTDRRDAMTLARLLRSGELTAIWVPDEAHEAIRDLIRGRRQAKHDLVAGRQMLLSFLLRHGRKFAGRSNWTKAHWRWLGEQAFDAPHQQFVFGESIRRIEEAQQRCDRLDAMLVEALPYWSLAPLVQALQALRGVGLIVAATLVAEIGDLGRFDTPKQLMGWLGLVPSEASSGARTRRGAITKTGNREARAMLVEAAWSYRLPAREERRYRARVEGLPDEVKAIAWKAQVRLCQRYRMLAASGKPLPKLITAIARELVGFVWDIGRRMQPA

SEQ ID NO: 352901 - protein, 333 aa, unidentified
MENIALIGIDLGKNSFHIHCQDHRGKAVYRKKFTRPKLIEFLATCPATTIAMEACGGSHFMARKLEELGHFPKLISPQFVRPFVKSNKNDFVDAEAICEAASRPSMRFVQPRTESQQAMRALHRVRESLVQDKVKTTNQMHAFLLEFGISVPRGAAVISRLSTLLEDSSLPLYLSQLLLKLQQHYHYLVEQIKDLESQLKRKLDEDEVGQRLLSIPCVGTLTASTISTEIGDGKQYASSRDFAAATGLVPRQYSTGGRTTLLGISKRGNKRSELCWFSVRGIHTKTGTPVWQVGRLGQGVVVSEKQLCRHLCSGKQAGQNSWALTARQQTYEA

SEQ ID NO: 352902 - protein, 378 aa, unidentified
MNNVKYIGMDVHKEAISIAVLNSSGKLVMECTIETKAITILDFLKGLRGSLHVTFEEGTWAAWLYDLIKPHVAELVVCNPRRNALLKEGSKSDRMDARKLAELLRSNLVRSVYHGENGVRTLKELARSYLTISRDVGRVMSRLKAIYRSWGIPCGGKQVYAVRYRAQWLGKISEAGVHRRAEFYYQQFDALRVLRQEVRRELLAEAEKHEAWKLLRQIPFIGPIRAALLIALIQTPHRFRTKRQLWTYSGFGIETHSSAEHRYVQGELKRAKKPASIRGLNRNHNHAPFMEPVQECRNRGGCQAGTVPGVLRSTGSQGNPAGDGATDSSTQDGSYYVNRLEERSALRRQTSETTNSLSVSGESVPSLGFAPSGGESDS

SEQ ID NO: 352903 - protein, 343 aa, unidentified
MKSTTIGIDLAKNVFQVHGVDERGKTVLTKQLKRNHVAAFFANLPPCLIGMEACASAHHWARKLESFGHTVKLMAPQFVKPYVKTNKNDVADAEAICEAVSRPNMRFVPIKNAEQQAVLALHRARQGFVKARTAQANQIRGLLAEYGIVIPQGIGHIAKRLPEILEDGENDLPGSFRQLLDRLGDHLKELDRQVGELEVQIQIWHRDHEASQKLAQIPGIGPITASALVASIGDAKSFENARQLAAWLGLVPRQHSSGGKQVLLGISKRGDTYLRMLLIHGARAVIRVAEGKAGYADSWLARLMGRRNKNVAAVALANKNARTVWALLAHGRDYQADYEPAAA

SEQ ID NO: 352904 - protein, 319 aa, unidentified
MIKYHKHIGIDIGKYNFVVGIEGIKDTKEYENTSSGIFEFINDNKDILANSLTVVETTGGYELELLYSLCERGYVVHRADARKVKNFIRSYGNSAKTDKLDAKALGLYGKERADKLEVFKPESKQNIQLFRLVQRRNDLKQMLVAEKNRLQQANTDKFVKNSCINMIDVLSNQITEITNQVEVIISSDQLLKAKHEILKEINGIGNIVAFELLILLPELGKLTRRQIASLAGLAPKANDSGKYQGYRKVGHGRAGVKPIILFLAAMSARNSKTSGLRLFYERLINNGKKKMVALTALMRKIIVIANAKLKSLLFNLKHS

SEQ ID NO: 352905 - protein, 474 aa, unidentified
MKKHKKTKPKEAKPLHEPMPDAAGIDLGATEIWAAVPPERCQLPIRRFGAFTEDLNALVAWLVECGIRTVAMEATGVYWIPLHQLLSDAKVEVCLVNARHVKNVPGRKSDVRDCQWLQYLHSVGLLRASYRPDQAVCEVRTIFRCRHTLLQQGAENLQHMQAALDQMNIKLHYVIDDLSGQTGQAIIEAILNGEREPLRLAKYRNRRIKASEETIAKSLEGDWRREHLFVLRVAWQNGQHVQEQIKKCDQELMEYTRQLEASTVVVKPITPIRIVCLNAEPGVPQLHPAAALRPAKPRRKTSKNEPDGPWREELHRFFGVDLTLIPSIGVLSGITLMTELGNDLSAFKNSQHFSSWLCLCPDNETSASKVLHRSTRRSQNRVRQALRMAASSLHHDKSYLGDKYRRLRAKLGAPKAITAMAHQLARIIWHMLTHRVPFDIGIFAALEKANQTRRLNRLHSNARQMGFQLTPIPA

SEQ ID NO: 352906 - protein, 426 aa, unidentified
MQNCLFIGVDVALKGNQFCVMNFDQHIYFNLKFPNNPEGNDMVINKIKDIENKFFFEKIIIVMESTGMYSFHPACYLSSNEYLNKFHTEVFQINACDFDKYKKSFHDLDKEDGIDAYILADYARVGRTKALHPFRGSQYIALQRLTRQRYHICKELIREKTYVLTNLYLSFSGLMSLDKNELPFSDLFGATSSAFLEEFVSPDQIAESSVEELISFITEKSKHHSSNLNDKVTALNKAMRASYRLNQTAYEPINIAIACSLNTIKFYQQQLKNIDKAILNAALGLDSNTYHILLSIRGIGKVYAAGIMAEIGNIDRFSHNSKLAKYSGLYWKRNQSGEFDSQDKKSSKKSNKYLRYYLVEATVSCVRQNFPFIKDYYNLKYKEVTKHQHKRALVLSARKLERLIFGLLRKNQYYKPIDSVQNSKIG

SEQ ID NO: 352907 - protein, 433 aa, unidentified
MKIKYEDRLKQKVIAITTDTLVVGVDIAKNYQWARFVDFRGIEHDRALKFKNSKGGFETILARIQEICKKENFAKAVVGMEPTGHYWKAFANWLEKQDGVKAVLVNPYATKQAKELDDNSQTKSDKKDALTIAKLVKDGRYFELYLPHDIYAELRGLSTTRTGLNKRKSALKNTITAVMDEFFPEYTGVFKCPLSGKASRHILKNCPFPKFLLALGEDGVTEEIRKAVKKTVGRKKARQLVEAAKESIGVDYGEEAAGLKLRLMLVELELLEKQTEEVERAMEGALRKTDYAEFVLSIKGIGVVTLAACLGELGDPTRFDNPRQMSRMAGYNLVEDSSGKNKSGTKISKRGRKNLRSVLYQMALTMVATNDEMKQLYHYLKTRKKAPLRKMQALIVISRKILTLIHTLAKKKESYDPDKVFGYVRKEQMKAAA

SEQ ID NO: 352908 - protein, 359 aa, unidentified
MASVSIAHDPAAGVTVGVDTHGEVHVAAAFTSDLGRPLGHLEIPTTPAGYGRLLRWAQAFGDATPRFGVEGTGAYGAGLARHLRGAGCTVIEINRPNRQTRHAHGKSDPIDAEAAARAVLSGEASSVPKSDEDRVGMIRTLRVARRSAVQSTTQISNQVKGLIVTAPAELREQLRLLSGHDLIETLAGMRPGSITTPTAATKMTLRSLARRHQFLSEEIATLNAELERLTQEAAPQLCAIKGVGPDVAGALLVAVGDNPERLRSEASFAHLCGVAPLPASSGKTTGRHRLNRGGNRQANNALWRIVIGRLRWHQPTKDYLARRTAEGLSKKEIIRCLKRYVAREVFRLIVAKPELARAA

SEQ ID NO: 352909 - protein, 372 aa, unidentified
MDESSKTLYVGLDVHKDSIAVAYAPEDRGAEVVSLGSIGTRQCDIDALIRKLQSKGATLLVFVYEAGPCGYWLYRYLTRKGLSCHVVAPSLIPRKPGDRVKTDRRDAVMLARLMRSGDLTSIYVPGIEDEAIRDLSRGREDAMRDLKATKYRLKAFLLRQDIRYEGRANWNAAHLRWLAEVVCPTRAQQIVFQEYVRGVTEQHERLQRLEGELHAEVKGWRLYPVVEAIQALRGVELTGAVILMAELGDITRFDTPRQLMSYLGLTPSEYSSGERRRQGGITKAGNTHARRALVEGAWAYRYPAKVSRHLQLRLETLPAEVQAIGWKAQVRLCKRYRQLSARGKHVNQVVVAIAREMAAFAWAIARTVPLAL

SEQ ID NO: 352910 - protein, 420 aa, unidentified
MKGVRSKKVGVVKESALIATIDIGMTSNTGYCTTADGRDIKPFKFNNTREGFDKFWDMIVISKNRFACDEVTVGYESTGPYAEPLVHYLRNKPLRIVQVNPMHTKRMKEVNDNSPLKTDDKDPRVIADIIRLGRALTVVIPEGDAAYLRRLNNARERHIRERTALLNQLQQLVFLLFPEFKTVIKDMTVKTARYVLKHYTTPEMIGTLFKETLGEEMRKKSRGKFGIKDAEALISLAQGTVGIKEGIAGLVLDIKHILMQLEIIEGFIAEIESEMEKTLREIPYSIKLLSIKGLGIVSVAGIIGEVGDFSKFSTQSEIMQLAGLDLYEISSGKRKGERRISKRGRSLLRKILYYAAIQTIRKNGIMCEYYAHLIAAGMKRMMALVAIARKLLRIIFAIVRDNSEYKADYVLTRKVIKKAA

SEQ ID NO: 352911 - protein, 425 aa, unidentified
MKSRLIKAQNQRVERISTSTLVIGIDIAKEKHAAQAINFRGIVLTNRPIMFSNDHVGFEHLTSSIRKLQKVHNMNDVVVGMESTGHYWFNIADWLVKQGISVVLVNPMTTKRNKENRDNSPSKNDPKDALVIADAVSRGFYAPFSPKEEAFRRLRVIVTNREHWVIKSGRIKNRIHRWLDIRFPEYRQAFEDIFSPRSLATLRRFPAPTDVLQLSPEQMVQIWGEYMARPGGVRGRNKAIELQAYARHSVGDSTALEEDKWELRHLIEEYERVCQIIDEADKMIEQLLPEIPCSDLIRSIGVSVPATAAILAFCGDLRKLSHGNQLLRKAGLNLAERSSGRYKGQIKLTKRGNSLLRKHLYFSVFHLLSHNNAFQALHTHNVEVKRMTKMQSMMKLIGKLARMLVAMARKGQTFSADKTQSPLAA

SEQ ID NO: 352912 - protein, 322 aa, unidentified
MRMALFQVFVGIDVSRDWLDVHILPFRRRLRVANTPAGWRELAASLAEHPQASIALEASGGYERGILHHLVAAGWQAHCVDPYKVRQFARAGGRRAKNDRIDAETIARYLATFTLQPARIDPPIERLCEHVTYRRQLIEERTAVANQARLLCDPRLRRLSRQRLARLDTLIQRLDQSLAEQIAGDPRIAAKAAVLQTVKGVGPILTATLLGLLPELGTICRRKIAALVGLCPYDFDSGRFAGQRHIAGGRKHVRNALYMPTLTAMRFDPAIKPFYERCVAGRSDKKPAVIAAMRKLLTILNARMRDHLASLNHLNQNLQAAQ

SEQ ID NO: 352913 - protein, 428 aa, unidentified
MARVVEYLTSMIIYKEVEDSPIWLIFHTGGVSVHYLGIDIGKKEHEAGLIDNNGKPIGKSLRFANSKRGSEKLLTFINNHQLTKENCVFGLEATGHYWLSIFTYLNKLGFKVTAFNPLRSDALRNFFIRKTKTDARDAFLIAQVIRIDMPDATPFLEEDLLQLKQLERLRYSLVDQSSDIKRKIIALLDQVFPEYEDMFSEVFGTSSSELLKHYPMPEDIQAIDTETLAKFLNDASKNSYGERRAHEKATKIKESAEDTFGINMATDAFRMQIHLLLEQISLLDEQIDELDKKLMKLVDNQNTHLTTINGIGYPTAAVILGEIGSIKRFERPEQLVAFVGLDPAVKQSGNFEASYVKISKRGSPYLRRAIWYAAFSASQCDPALSQHYKRLKSRGKSHQVAVGAVARKLTHIIFAILRDQKPYEPHVK

SEQ ID NO: 352914 - protein, 356 aa, unidentified
MNKHSELNFSGQPIYIGLDVHKKSWSVSIFSKQGEYKTFSQTPKTETLVQYLHHHFPGAQYHSVYEAGYCGFWIHDQLREKGIQNIVANPADIPTQDKERRNKRDRVDCRKLARGLRSGDIKGIYTPLRWKLEDRSLIRTRLSIGRKQARCKNQIKSMLLFYGVEIPEQREMGHWSRRFIRWIEGIQMERTSGNIALKIHLEELCHLRQIIAKLNRAIVALARTDEYRSWISLLKTIPGISTLTAMILLTELYEITRFRSIDELCSYVGLIPDTHGSGDKEHVGGITQRHHSYLRWLLIEASWIAVRKDPVLLESFQEYCRRMRKTKAIIKIARKLLNRIRYVLKNQAEYVPGVIE

SEQ ID NO: 352915 - protein, 369 aa, unidentified
MANSSKERTTMTVGLDLGDKHTHVCILDTETGEVMEEGRLRTTPEAFESRFEGSERLTIALEVGTHSPWVSRLLEGSGHEVVVANPRKTRLIYSGSRKTDRIDAEKLARLLRSDPELLYPVSHRGEESQAHPALIHSREALVRSRTRLVNHVRGTVKSFGSRLPSCSSASFHKKAPGHIPPELREALDEVIEAIASLTKKIESHDKRIEALCGEDYPESGRLRQVPGVGPITALAFVLTLEDPSRFKKSRSVGAYLGLAPATEQSGDRDPQRRITKEGDEMLRRLLVGSANYILGPFGGDSDLRRHGEKIASRGGKSAKKLASVAVARKLSVVLHRLWATGEEYEPLRNTHRSKEEARREEVRKEEALA

SEQ ID NO: 352916 - protein, 338 aa, unidentified
MFYTGIDQHRASSVLTTLTADGDCLRQVTLPNDRGVLAAYFAQYPAPHRAVVEATGRWYWLRDLLVPQGIDLHLAHAKFLKAIAYAKVKTDAIDSNTLAQLLRTGLIPEAHMIAEAQRGPRDVLRARLRLVERRSRSKNSLDRLLEKFNVPAPAELPPLYRLQAELQLAQIALLTEQVHTLERAIQGELLETPAIQRLLWIPGVGRIVAFTLALEVDDIQRFPTVRHFWSYCRLVPGAADSGGRQRHRASKDGNRYLKLAFSHAAVRAIQYFPEVRQWYQRWKRKKPIRIARTLVAKELAKSVYVVLHDQVTFNQEFKGTPLTRQKQARWPRRASPSA

SEQ ID NO: 352917 - protein, 323 aa, unidentified
MDDSVSESRQTFIGIDVSQSSWDVHVLPEGRSFSIRVDDGAFTRLVKQLGSPEASLVVVEATGGVERQLVAALLDAGWTVAVVNPRCVRDFAKALGRLAKTDRIDAETIAEFARRVQPRPTQKTPAKQAELDALVTRRRQLVGLRSMEKMRRPQAVHKTAGQSIDKMLKVLDREIAALDKAIARLIEADDDWRSKRDVVQSVPGVGPATSAALVAELPELGRLNRQEIASLVGLAPFNHDSGKFRGQRRIRGGRATVRTALYMAALAGIRCNEKLREFALRLRQAGKPFKVVITACMRKLLTILNILVRNHASWTPHPSVEQR

SEQ ID NO: 352918 - protein, 341 aa, unidentified
MLRVDTDSGELQERPLAHREEAEKFYGALAAAGQQVRVGMEASGHARWFERLLGELNFELWIGEAAEIRAKRVRKHKTDRQDAQHILGLLLENRFPRIWVPSGENRDLRQLLWHRHRMVQARTRVMNQLQTIALNEGQRCPKGLWRERGRQQLEAIQLAAWASRRRRDLVELLDRLNPTIAELSQAIEQEVEKCREAQRLMTHPGVGPLTALAFVLIIGKVERFPSGKQVASYLGLVPVEQSSGDRRRLGHITKQGSSMLRFLLVEAAQVTVRSIPKWRSHYVHLMMRGGRKIAKVAMARRLAIALSWMWRKGWSYEQSKSSVRTRASSEQAMVCSTTPRH

SEQ ID NO: 352919 - protein, 355 aa, unidentified
MNQEKYIGMDVHQATISVAVRDSSGKLIMECILETKAATILEFIAGLRGTLSLTFEEGTSAAWLHDLLKPHVSHLVVCDPRRNALLKDGSKSDRIDARKLAELLHGNKLHAVYHGEHGLRTLKELGRSYLTITKDLTRVMSRIKALYRSWAIPCSGTTIYAPGHRAEWLAKISEPGVRLRAERLYEQLDLLQPVRQGARRDLLGESHKHPAVKLLRQIPAIGPIRAALLVALLQTPHRFRSKRQLWAYSGFAVETHDSGEYRFVRGKPVRNRERITVRGLNQNHNHDLKNLFKGAAISASTRPGPLCDFYVALVEKGMRPTMARLTLARKMAAITLTIWKKGVEFDAKQLNRQAA

SEQ ID NO: 352920 - protein, 315 aa, unidentified
MTKQLLPVNAGVDVSKDNLDLYLLERDLALSVPNDEQSIASLLKRLARYRLERIVVEATGRLEHAFVSAAIAKGLPVVVVPPLKVRRFAEAAGQLAKTDAIDARLIARFAAALKPTTRLVTDANSKLIKDLVVRRRQFTSLRTTEKNRRGVMPEALKPSIDRIIASLDREISSLEQLIQDAVEQHAAWRHKRDLLTSMPGIGPSVASTLIGDLPELGSLSRRQIAALTGVAPFNRDSGNFRGKRRIRGGRAHSRTALFLSAMVAIRYNPDIKRFYERLLQTGKHKKVALTACIRKIVTALNAMLRDDKPWHSSFA

SEQ ID NO: 352921 - protein, 469 aa, unidentified
MAADKPARPGKGGRKKKKTTSSMALPLMRPNAAGIDIGAEEIWVAVPADRDEHPVRRFRSFTGDLRAIAAWLQDCRIDTIVMESTGVYWIPLFQILADGGFEVCLVNARHYKNVAGRPTDAGDCQWLQYLHSVGLVKGSFRPEQGICAVRSLLRHRESLVHAMTKLVLHLQKSLDQMNLKIHYVLSDVMGVSGLAILDAIVAGERDPEQLAKLRNKLVRASEPEVIQALEGDYRPEHVFILAQCLRMFRAHQEEIDQLDREMEQFMMSLPAREPAAGVTAPERPWKRQHRAPAFDLRQQCFRLAGVDLTEVPGIEATTAHVLLTEIGPDLQAFPNASAFCSWLGLCPHNEISGGKILASRTRRCKHRAALALRLGAQAMHHSQTSLGHHLRRMKSKLGASAAITATAHKMARIVYHMLTTKEPYREQVSEAQQRRQQQRTLARLKAAASASGYQLIPIEPMPANEELVH

SEQ ID NO: 352922 - protein, 326 aa, unidentified
MEREYIGIDLHKAFFQACAITSTGERQWEQRWPTSEAGVTAFVARCGPHSQLAVEASSPTWAFVDRVVNQVGAIHVVDTRKTRIKAGYAAKTDRLDARRLADALRRDSVVGIYYPPPAVRDLRELGRYRCHLARLQASLKQRIRALLLRQGVVTPKALFTQRGTAWLDLLVLEGWAGTELHGLRAVLSDVRRQLVPVLAALRQVAGRDPIAQQLDRRPGFGAVFSVTIRAEVGIITRFPDGPHLASYAGLVPRVERSGGRQWTGRITKTGSPWLRWTLIEAALHQFRRQDDFGTWARRLAVRVGMLKARVAVARALCDEIFVAWPR

SEQ ID NO: 352923 - protein, 408 aa, unidentified
MTVVGIDVSKGKSMVAAMKPGGELVAAPYEVRHSDIELSHLALDVLCMEPDTRVVMEATGRYHEPVAALLHSEGIFVSILNPLLIKQSGAGSLRKVKSDPKDALKIAKYGLDNWSTLREYTPMEAIRQQLKLCARQCDLYSKNIVMLTNNLISLSDKTFPRVNELFSSPEKADGHLKWVDFYRSFWHCDCINRMSPDAFEERYKKWCKRKGYHFSADAADALYAASCGLYTTLPRDNNAKLLVTVATDQLIALRENQSKLETEMLNLCKQLPEYETVMAMYGVGKSTGPHLMAELGDVRRFPHRSSIVAFAGVDPGVVGSGKMQLSSVTTSKRGSPQLRKALFQVVSTYVKCKPENEAVYQFYAKKRDEGKPFFVCTTAAANKFLRIYYARVKECLNAAESATQVEEG

SEQ ID NO: 352924 - protein, 354 aa, unidentified
MRVYQSKTEFNCGIDLHSKCMYACVVDRDGNIKEWFNVRGNDFEYFLKRVAAYRHDMTLCCECTFNWYWLADACEDAGIEFVLAHALYLRSIHMDKNKNDREDARKIADLLRTNMIPYSYVYPREMRPLRTLLRTRMNYVWMRAELLAKETCRLMVEGKQIKKTPQRPREPWKQAVIEAHDNPHLKALVETDCTLICEFDRQIDRLERTITAESKRQRWRDLHVLLSIPGIGKVLALTILYEVGEISRFPRHQEFCSYARLVKGTVASAGKIKGARGAKMGNGYLKWAMKEAVQVAKRSHPDIKAMAQRLERKHSPQEASAIIAHRLGRCIYYMLSNGLSFSMELFKQRMKEAA

SEQ ID NO: 352925 - protein, 350 aa, unidentified
MKILKQVMGVDVSQQALDVCLGHLREDLTTELYKHRVFPNKAQGHIALEQWLRNHTDATVPVRIVLEATGVYHQLFASYMDSEGYAISIVLPTKISNYIRTLEVKTVTDKTCCQALARFGLERKLDNWKKPDPAYEKLRQLTREREQIVQERTMVKNRLHAEQSEACPNANSIKRIEERIGLLNQQEEQIRREIRQIITSEASIQQGVERICTIPGIGTLTAVILLAETNGFELVRNKKQIASYAGLDVREKRSGTSVHGKPRISKRGNKYIRKALYLPSLAAARYNPAYKELYTRLVSRHGIKMKALVAVQRKMLELAYILHKNQTDFNAQYEQEKRAVENVLSSQTGS

SEQ ID NO: 352926 - protein, 338 aa, unidentified
MQTYAAIDLHSNNGVLTVIDETDRVLKQRRIPNQLEEFIRDLEPFRSTLQGIAIESTFNWYWLVDGLEAKKFPVTLVNTAAIRQYEGLKRSDDQYDAWWLAHMMRLGILPRGYIYPREQRPIRDLLRKRATLVQQRTANILSAQNLEARNRGTKISSKEVRQLTGARVAELYENEHLALALTTTVAVIDALTKQIGLLEKAVLQKARLRSEWELLLTVWGVGKILGLTIMYEAGQMSRFASPGDFASYCRCVNAQRLSNGKKKSDNNAKNGNRYLAWAFVEAAHYAVQNYPAAKRFHDRKAAKTNTIVAIKAIAHKLARAVFHVLRDQQPFDPKKVFV

SEQ ID NO: 352927 - protein, 377 aa, unidentified
MKKNIRFIGLDVHAETIAVAVAEANGEARSLGVIPNRPEAVRRLVKKIGPAESLQVCYEAGPCGYVLYWQLSELGAHCDVVAPTLVPVKSGDRIKTDRRDALKLARSYRSGDLTPVWVPDAEHEALRDLVRAREAAKKDQLRARHRLQKLLLRRGLRSPEGTRAWTVRYLTWVKTLQLEPAALAATLLDYIAEVDHAHERIERLERAIDQAIEAAPEAIRAVIEGLQSLRGVARISAATIVAELGQLSRFGRAKQLMGYAGVVSSEHSSGERIRRGAITKTGNAHLRRILVEAAWAYRHRPYLGGELRRRQKNASEKVKEISWKAQHRLHSRYARLMGRGKTKQQAMTAVARELAGFVWAVGVEVERLRASRPARAV

SEQ ID NO: 352928 - protein, 424 aa, unidentified
MSKHIYRTTAVKAANWEWIAEQARTEARVVFGVDVAKEDFVGALMRPDRAVIVTLKWCHPDETRELVKRLITAVGAERLEVVQEPSGTYGDALQRCWQEAGVAVYRMSPKRTHDAQELYDGVASLHDAKAAYLVGRLHLDGASQRWWEPAVERRELQAAVAELELHQSSYQRHCNRLEAELSRHWPEVLKLLELGSVTLLQLLIEYGSAQAVASQAEAAAALMRRSGRVGLLEQKVEQVLASAATTVGVPCLEQERRYLRALAGEALHSYRGFQRTRQALEQWVMSEPQLAPMAALVGRVTSAVLIASLGSPRNFPSAGSYLKGLGLNLKEHSSGKHQGQLKITKRGPGRARRYLYLAVLRWLQREPLINAWYQAKVRRDGGRLKGKAVVALMRKLAKAVWHVARGCPFDAEKLFDRQALSGSH

SEQ ID NO: 352929 - protein, 362 aa, unidentified
MSKIRFIGLDVHAGTIAVAVAEPNGEVRSLGVIANCLAAIRKLVAKLGPVKQLKACYEAGPTGYVLYWQLTQLGVSCEVIAPSLVPTKAGDRVKTDRRDAEKLARCYRNGDLTAVWVPDAAHEALRDRARQRLGKFLLRHGAQPPADIKKKWTAKYMTWLHDHVHFDQPALAATLTDYVQEVHHAGERMARLEKAIDEAVASAPEQIRSVIAALQALRGVAQMTAVTIVAETGSLSRFSNPRQLMSYSGLVSSEYSSGNRIQRGGITKTGNAHLRRVMVEAAWAYQHKPWVGGFLLKRQQGLDQNVKDIAWKAQWRLCTRYKKLAAAGKNKPQIVTAIARELLGFAWAIAVETEPHPQRQAA

SEQ ID NO: 352930 - protein, 391 aa, unidentified
MSLYLGIDIAKRRHVALLLDDRGAITTKAFKVDNNRAGFDGLLDRLAGLDQPVMIALEATGHYWLALYDQLTGAGYTVHVLNPLQVHAYRRSGIRKSKTDRIDAFWIADYLRIGALHSTPQPVDTYLQLRQLSRFHSSLTSQIDDIKRRILAVLDRIFPEYETLFSDVFIATSRRLLAEAVTPEDFATFDLHELADIIRRTSHGRLGLAKAQELQALARRSIGVTFLMDAAQLELNCLLAQLDFLEAQVNDVATALAELVAALPHQFLTTIPGIGPASAATLLAEIGDVNRFPALENLVAYAGIVPAVYESGQFQARQAHMPKRGSPHLRRALWLAAHLARLHDPELRAYYDKRRAEGKPYGVVMGAICHKLLARIFVILREQRPYIVRSP

SEQ ID NO: 352931 - protein, 351 aa, unidentified
MTDPILAIDLGKYKSVACLYHPATAEAEFRTLDTSRSELTRLIARARPAVVVIEACTLSGWVHDLCGELGVPCRVANTAAEAWKYKHAKRKTDRDDALRLAQLAALGQLPEVVVPAKRVREWRALIAHRQALVGQRVAAQNRVRAVLVGQGLPAPRGAKAWTAAGLAGMAQFARPLAQCGPDELWRGLLDLALTAYRQAEELAAVAEARLDAIGTADARVRLLDTMPGLGPRTAEAVVAHLGDPKRFRTGKQVAAYGGLVPRQYQSGEDDRRGRITKRGPAVLRKLLVQCAWAMLRYNRWARAVFDRLSRGRARRKQAVVALARKVLVRCWAMLRDGAAWRGEPEPVVVAA

SEQ ID NO: 352932 - protein, 378 aa, unidentified
MQKGRKPAMKKNIRKAKSPTRSTKTKLRKSDRVTIGMDVGDKTSRYCALDGEGEVLVEGGCPTTKKGMAQMFGAMAHCRIAIEVGTHSRWVSRELKKFGHEVIVANARQVKLISQSSRKNDKLDAQMLARLARMDPGLLRPIRHRSEEAQKDLMTIRIRAVLLEARTGLVNAARGLTKATGERLASCDADQMNVEKLEGLPADLGDLLKPLLEEVESLTEKIKGCDRKIEQIARDRNPETKLLRQVSGVGPLIALTFILTIEDKERFEKSRDVGCYVGLRPKQSESGEGQPELRISKEGDVYLRKLLVQGAHGIMAERAPDTDLKRWGRKLAGRGGKNAKKRAIVAVARKLAILLHHLWVTGEVYEPLRKNKALAKAA

SEQ ID NO: 352933 - protein, 407 aa, unidentified
MEVVYRCCCGIDVHKKMIAACLNKGGKQELREFGTMTNEIKVLANWLLEAECEMIAMESTGVFWKPLYNLFELMGLDAIIVNASHMKALPGRKTDIKDAEWIADLLRHGLLRASYIPSREQRELREIARYRKSLIEERSREVNRLQKILEGANIKLDSVVTDINGKSARKLLDKIIANETPDAQEVAQLIHGSMLPKLDQIMPSIEGITTPLQRKLIAQIIDHIDDMTKRIADMDDLIKGYMEQYEEAIAAIDELPGIARRSAEVIIAEIGLDMSRFPSAAHLCSWAGVCPGNNKSAGKRSHGKTTKGNKTLKSILTQCAKAARNSKGSYFSAQYQRIAARRGKNRATVAVAHSMLIAIYHVLKNEVAFNDLGSDYYDNFNREHKIRGYLKRLQALGWSPELATVPA

SEQ ID NO: 352934 - protein, 349 aa, unidentified
MRIIGGLDVHRSQITYDWIDTDTGQHQRGQLAPAHREHLRVWLEQFRDRPAAFALEGCTGWRYVVEELQRAGIAAHLAEPADTSTLRGPKRHAKTDRTDARHLRGLLAAGRLPESWIPPAHVLEARTQVRCYKALLDEHTAWLQRVHATLFHHGVPAQRNLLAADRRARLDRGSGLSPAARQLVAVALRTLDHLDAELDRLRAELTWFARRQPGCQALDGLYGIGPVTAVAIWAELGDPARFTSSRHAVRHTGLDITVYSSDGKRTPGHLARQGPPVLRWALFEAAKCAARASSPDHAYYLQAKGRLGGNRATLAVARKLARRCYHTLGTLGGLAYAPPSDTPDLGRVA

SEQ ID NO: 352935 - protein, 356 aa, unidentified
MTNAIPMDVIIGVDTHKDVHAAAAISAAGVHLATTTVPANSKGYGALEAWAKSMGTVQAFGIEGTGSYGAGLSRFLRERGHTVVEVNRPNRQLRYQQGKSDAADAESAARVVLAGQAAGQPKSGTGTVEMIRHLKIARDTAVKARTQAMQTLKAIIVCSPDALREQLDQVSGKMTLLRRLAALRPGPLTSTLASAKASLRLIARRWLLLDAEVKQHDAHLETLTIARAPELLEAHGMASGTAAEMLLLVGDNPERIHSEAAFAKLCGACPIPASSGKTIRHRLNRGGNRQANAALYRVVITRMRGHQPTLDYVRRRTAEGKSRSEIIRCLKRYVAREIFGYLCTKPAPADLAAISS

SEQ ID NO: 352936 - protein, 343 aa, unidentified
MQAITTIGLDIAKSAFQVHGIDAEGKVIIRRQLKRRYILAFFQKLPPCLVGIEACASSHHWSRELKALGHTVRLMPPAYVKPYVKRQKNDAADAEAICEAVTRTNMRFVETKTPEQQSCLMLHRTRHLFIRQQTAVINAIRAHLAEFGIVAPVGRHGVEALLEVAADVSDKRVPEVARACLSALGAQLRRLKEQILEFDRMIMAWHRSSETSRRLDELPGVGPALATALVASVADPKAFRSGRDFSAWIGLVPKQHSSGGKDKLGSISKQGDRYLRSLFTAGALAVIRYAKIHGTQHRPWLTALLARRPTKVAAIALANKIARMAWAMMAKGERYKEPVALAA

SEQ ID NO: 352937 - protein, 400 aa, unidentified
MRVVFGIDVSKVSSEVAILVNGEKVHNYTMSNDAIGFSRLLGDLKTVHKPEIIFEATGVYSRRLQAFLDEHSYAYTRLNPLEAKKQLDSLRVRKTDQIDAEKLAQSQFVLNRKPTYIQEEVYQDLRDLSRFYQNLTEDIVRAKNRLHKVLQVTFPELETILSTPTGEQYWNLVIAFPCKDFVLELSKDELSKSIRLSTSKRISDKRVAYLAEKLTALANQSYCAVKKNSPIMEEVRYYAKELLRLSEQRQAVLDEMVELAQPLPEYDILLSIPGIAETTATSIIGELGDIRRFQSANQINAFIGIDLRHYESGNFIAKEHITKRGNPYARKILFKCIHNIASASHTNPCHIADFYEKRKRQSQMTSTKPHTIASIHRLIRTMYYLITHNKLYDYISTQNQ

SEQ ID NO: 352938 - protein, 419 aa, unidentified
MKDNITKKVKHINKKTLIVALDIGKMVHYGYLRAPNGEEVKSFPFNNCRDGFNECWYKVCQFKRAQRLKDVVVGFESTGPYAEPLFHFLRKKPVHLVQVNPLHSKKLKELTGNSPCKTDKKDPHVIADIISLGHALTLVVPEGAAAHLRRLTQARERAIQRRTAMLNQLQHLVFVLFPEFLNIIKNVHSKSSLYLLQHHPTPQNIVALGNESLALILSKVSRGKITRERARKLFEAAQASVGITEGRESILVEVKHLIAAIEHEDQLINGVEQQMNDYVKEIPYSHSMLSIKGMGIVTVAGLIGEVGDFRAFSTIAEIMKLAGLDLYEVSSGNHRGRHHISKRGRALMRKLLYFAALSVVRKKGIMHEDYQKMLARGMPKIKALVAISRKLLRLVFALARDHTVYVNNYKQLRTLEIAA

SEQ ID NO: 352939 - protein, 349 aa, unidentified
MSLFVGLDVSQRLTHLCVVDADGKRVWRGKCATDPTILAQTIRAQAGSDARVGIETGPLTPWLVHALRAAGVAMICVEARHAHAVMAAAQVNKNDRHDALALAQLVRTGWYRAVHVKSYPAHQLRAVLAARAQLVGMVTRVSNHIRGVMKIFGLVVVGVRGTAFAARVEELVADRPEVQSIVAPMLGTWLHLRSQVAAFDRQLLAVAKTRPACRLLMSIPGVGYVSALAFMGAIDVPERFARSRAVGAHLGLAPKQHQSGEVDRLGEISKCGDAYVRTVLVEAANSLLIRCRKPSPLREWALTLEKRSGPKKARTALARKLAVIMHSVWRSDPAVMGSRAMRAAGTLMG

SEQ ID NO: 352940 - protein, 347 aa, unidentified
MSTVYEGRQIVGLDLHRRRSVLVRMTEAGEVLETTRISNDPEYLRQVMERAGEQPEVVLEATYGWYWAADTLAELGASVHLAHPLGVKAFEYRRVKNDERDAKDLADLLRMGRLPEAWIAPPPVRELREIVRHRAKLVSVRSQCKAEIHAVLAKCGVQITMTDLFGVSGRELLDRVALPTPYRARIESLRRVMDALEFEIEVFAGLARVRLVADPGYAALQTIPGIGQVLAAVFLAEIGDVHRFAAPEKLASWCGLTPTHRESDAHVHRGRITKQGSRLVRWAAVESVQTLPKTTLVGAMRDRVADRRGHNIGAVAAARKQVGFVYYALRDHHVRALQPNHHQASAA

SEQ ID NO: 352941 - protein, 355 aa, unidentified
MKQQAIQYVALDVHQATLVVSVRDEQGSIVMRATVATEAKAIVGLVRGLGSRVHIAFEEGTQAQWLHDVLTGYAERVIVCNTRGRGEIGNKSDRMDADRLSELLRLGGLKPVYHGASALLTLKELVRSYVALVEDGTRVMLRIKALFRARGIKTPGASVYRQSKRKEWLARLEERGARTRAEALLTELDVLQELRPKAKAAMITEARRQPGWKILRSIPFLGPVRVAQILAIMATPWRFRTKRQAWPYVGLAVVTRSSADQEFAEGKLRRRKRAPLTRGLNRNHHPLLKSVFKGAANAAAGQEGPFKEYYEACVARGVREEMAKLTLARKIVAIALRLWKTGEVWDATKLNVQAT

SEQ ID NO: 352942 - protein, 373 aa, unidentified
MPRYSTAFGMDVHLRSTTVCALDAETGEAVTRRFRGNPWGEVAEWMSGFPGPSLAAYESGYLGFAPQRELSGLGVDCVVAAVSKVPRSAADLSSKNDRNDAARMAKAILSHDVTPVWVPSPEIEGLRDLAGAHDAATARLAAAKQRLLAFLARRGYAYGGTTPAGNPRRYWTYDFLRWLDKVRPADDGGIRALAALRNEVEAAAETRDDLLAEYRAAVAAGPLSAEVEALQSIKGCGFALAAAFASEVGDFSRFRSGRQVTAYFGLAPKQRSSADSVRLGGISGAGNALVRRLAVEGSWSYVQASHQPKLMPKGSGVPLEVRMHGRKGSERLLRRREEMLARGMPAAKANAATAAELVRWLWALGMMCREGAE

SEQ ID NO: 352943 - protein, 427 aa, unidentified
MKYNQNSKIMQITEKTLIIGVDIASEVHFARAFDFRGVELAKVLRFTNDELGFKEFASWVEEIKSKNHKEKVTVGMEPTGHYWFNIAPFLKDHNMKIVLVNPFHVKRSKELDDNNPTKNDRKDPKTIAMLVKDGRYMEPYIPEGVYSELRTAMDTRWHIVKQLNVIRNKVQRWLSIYFPEFRTVFGDWEGKAALTVLKEFPLPKQIIEKDIAGIVARWKQDKIRAVGVKRAAALVEAAKSSVGVKEGIISAMNDITMLLEDYDLKRDQYERVMALVEQLSKQIPGMEEILKIKGIGLILAAGFVAEVGDIKRFEHSKQIQKLAGLNLKENSSGKHKGKTTISKRGRSRLRAILFQGMLPLVAQNAAFKELHEYYTTRKGNALGKKQSLVLLCCKLIRVFYALLTKGTEYNSEKMMSDIRRNNTSEAA

SEQ ID NO: 352944 - protein, 413 aa, unidentified
MEVVYQRCAGLDVGKDEVVACTRVPAGAVGGGRRQEVRTYKTFSAGLAALGDWLGDQGVTQVVMEATGQYWKPVWYVLEERGFELLLVNARHVKILPGRKTDVGDAAWLCELLEHGLLRGSFVPPPVIRELRDLTRYRKRLIQTHTAEAQRIHKTLEDASIRLGSVASDVLGVSGRAMLRALLAGERDPAALAELARGRLRNKLPELREALRGRFDAHHALLLRLALEHVEQLERSIAALDAEVDRVIAPFARARDHLDTITGVGKRAAECIIAEIGVDMGVFPTAGHLASWAGRCPGNNVTGGKRRSGKPTKGNRWLGEILVECAWAAAHSRDTYLAAQFWRLARRIGKKKAAGAVGHSILVIAWHLLDGDCDYAELGGDFFVQRDADRARQRAVAQLQALGYHVTLKQAAA

SEQ ID NO: 352945 - protein, 378 aa, unidentified
MTQGLSDPLAKRGVLRLMRLPVTAGAGPASAIWPDQKPVRPTGGVTHHSLAKRIPHPGRQPIANPHEGGLRKMLADEVDSVIGVDTHRDTHTAQILAAKTGALGPSTTTGADSLGYRRMLSFAEKHAPGSRAWAIESTGSFGAGLTAHLRKQGERVVEIDRPKRPARRNGAKSDELDALRAAREGLGRNHLSEPRRRGEREAIRVVLRTRQSAVHARSVAICQLKSLIVTAPEGLRSSLRRLGDQDLASRCARLRITSAQPIDHQMTVRALRCTARSALALEAEAAELEAELQPLIKAICPQLIAERGVGTISAAELINAWSHPGRIRSEAAFAMLAGVAPIPASSGQTVRHRLNRSGDRQLKPGPAHDRDVTSPTRP

SEQ ID NO: 352946 - protein, 341 aa, unidentified
MNTVTLIGIDLGKHSFHLHGQDEDGRMVFRKKCSRQQLFTLLGNTPRSTVVMEACAGAHWMARRIETLGHQAKLISPQFVRPFVQGNKNDFADAQAICEAASRPSMRFVSVRNEAQQTVSALHRVRESLVRERTGVINQLHAFLLEFGISLPRGQAIIRRLPAVLAGHELPPRLVALLERLQTHFKYLDEQIAQIERELCQQLREDERSQRLLEIPGIGPITASVLMTELGDAQQFGSARQFAASVGLVPRQYSTGGKPTLLGISKRGDKNLRRLLVQGARAIMQRVEQRTDRLGIWVRELLARRHSNVVACALANKLARIAWAILANGTNYRSQQAVAAA

SEQ ID NO: 352947 - protein, 349 aa, unidentified
MKTIVKQIAGIDVAQDELVVCLGKMYDDWTPELYAHKTFANTAKGFISFTEWVTRLTDVSVPVRFVMEATGVYHESLAYYLDEQGLEVSIVVPNKISNYARTLTVKTVTDKTASEAIARFGLERNLDQWSRPKGLFKKLRQLTRERSQLVDERTVLKNQLHAEQAQAEPYKKSIERIKKRIILLDKQEKEILEELRSLIKTDNEMQQLVILLCSLPGIGILTAATVLGETNGFDLIRNKRQLTSYAGLDVKEKQSGTSVKGKPRISKKGNKHLRKAMHMPALAAIGHDERFKAIFARLISKHGIKMKAVVAIQRKLLEMMYTLYKTNKSYDKNYLQNQTVQSIENTTKN

SEQ ID NO: 352948 - protein, 419 aa, unidentified
MITNHIIPEGAVLVAIDIAKARNDVLIQTDARRRRKRLVVLNTRAEHDRFIDLLRSFDRPIVTGFEATGNYHRALAWRLVDAGFEVRLISSMALSRQRESIFNGWDKNDPKDAQVILHMLATGLSQYYQDPLVAGVSDIEELSKTHEMVSKAKTETLHRILTHYLPLYFPEIERFRNGSRNDWFFAFLEQFPIPASITSLEKEAFVSAAWDVVGRKVSKARLIADIYETARESMALPIPIDSRAVAMFRMVLAEMRSLIRQRDQIEGEAEAMLAGTSDYEALKQIPGIGPINALTILAEAGDLRRFGHHRQFLKFCGLDLSTHQSGTFRGQTKLSKFGNARLRRALWMAAQVAIRQRQNSFRDKYARYIAKDPTNSDLKRKAYTAVTAKMARVVHAVIKGDTPYRPFFEGSEPRGRTPI

SEQ ID NO: 352949 - protein, 344 aa, unidentified
MSVAIVGVDLAKNIFHIHAVDRHGGVVFRASRKRSDWVEHVCERIEPKAIVAMEACASAHHWGREFQARGFQVRLIPGQFVKPYVKSNKNDRIDAAAIAEAAVRPGMRFVTVKSRRQQDLQALHRVRDELMHQRTAKANQIRGLTAEYGIVAPVGLKTLRSAIPVWLEDASNGLSDLFRTILLGLQDDLMCLVDRVDQLSKQIERIAAEDPIARRLSGLRGIGPLGATALAIQLGDGRQFKRGRDFAASLGLVPRQHSTGGKARLLGISKRGDAYTRKLFVHGARAVIRHHKADNDPLNRWLHHQMSRKHPNVVSVALANKTARIAWAIARGAEYRPELAARTN

SEQ ID NO: 352950 - protein, 345 aa, unidentified
MEIKSIGIDLGKTTFHLIALGNRSQVVIRKKFSRSQLLQYTGNLSSSLIGMEAGVGSHFLGRALREQGHEVRLIPAQFVRPFVKSNKNDYRDAEAIAEAVERENMRFVPIKTEDQLDLQALHRVRDRLVARRTSVINQIRAFLLERGISFPKGPASLRRQMPEILENADEKLSTRMRRRLDFLWQEWKGLQLQIEMLNADLEEIASTDAGCLRLQQIPGVGPLVSTAVVSAIGNGAAFQKGREFAAWLGLVPRQWSTGGKAKLLGISKRGNPYLRKMFIHGARAAVLRVKRKESTLGKWMSGLETRAARNVVIVATANKLARISWAVLASGENYHPTHKTLAFST

SEQ ID NO: 352951 - protein, 406 aa, unidentified
MRSDTITAVGIDVSKGKSVVAIRRPGGKVVKPPFLVNHNAEDFRKLILLMHKVGGNIRIIMEHTGMYWRPIAIALQQAGFFVSVTNAILIHRFSDNSLRNVKTDKADALKIANYGLTFWSELREYSVEDETRQMLKTQSRLYERTSGVSVALRNGLISLLDQTFPDINKLLQPTYRNIRGHFKWVDFVKHFWHRDCVAGMSSNAFMAAYKRWCEKSGYRYSSVDAEKIRQYAKGTVATFPKSESTKVLIVQAVDSLNAVYDSLQILRDEMYRLASCLPEFHVVMAMQGAGEITGPMLMAEIGDVRRFTSKNALVAFAGVDAPPYQSGAFESKSRHVSKRGSPHLRRTLFQITTVVLRRADPQNAIYSFMDKKRSEGKHFYVYMVAGAAKFLRIYYARVKECLNNAD

SEQ ID NO: 352952 - protein, 347 aa, unidentified
MDQIIRIGMDTSKHVFQLHGVNAAEEPVLRKKLRRQDLITFFGKLPPTVVALEACGGSHHWARLLQSLGHQVKLIAPQLAKPYVKRGKNDAADAEAICEAMSRPTMRFVPVKTADQQAALMLVGVRDRLIRQRTQLINVIRGYAAEFGLIAPTGLCRVGPLLDRVKTDETLPALARELFEMQATEYAQLQARLEEIEDRLMAWHRAHEISRRLAKIPGVGPIGAAMLVMKTPAPEAFRSARHFAAWLGLTPKDHSTAGKVRHGVITRAGDEALRSVLVVGATAVIRQLRRGQCAPPSPWLVALLQRKPSKLVAVALANKIARIAWKLMVSGEPYATQVAPIESGAAA

SEQ ID NO: 352953 - protein, 433 aa, unidentified
MMSEVQNSILPNAAPEVNFFCGFDWARNDHYFVLKDRSHRVLDEGYFENSADGFQNFFGRLDAHRNGEPVALIIEGNRGSAMTVLSLVPWITLYPVNPSKTRKLNELDGSGRGKDDPRDSHLLCDHLIANYQKLRAENECDTDILCLRELVQSEEELIGDCTRFKCRIMAQISHFCPGLADIVSGKLDKEAYTEYLLRFDPRQPASDATIKKHLKKYHVRGSRVVEKFLEKHRALQVLPMAKELLAIHVDKLDSLVRQLQAIQKELCSSQSEISALFATLPNAEIYLSLPGLGERLAPRMAALFGKNPEKNYANKHEVNAYFGQSPVTESSGGKDKKRKQAGEREKKQVNKRRSCNRFARQTTYLWSGATARLREVNAPWQRAFLQRCKDRGDKTATRYRKLGKKMLAILYTCLVTEKRYSEEVYLSNVHSKC

SEQ ID NO: 352954 - protein, 322 aa, unidentified
MQPFQLGIDVAKAKLDCALRLESGKFRHKVVDNTPAGFKALDTWLAKEGAVALQVCMEATGIYWEAVAEHLAARPETTVSVINPAQIKAFGASQMVRTKTDKVDAKLIAQFCAERTPEPWQAPTPAEKTLRALVLRLDALQAMRTQESNRLEVARESVAEGIAQHLKWLDDEIARISKAIRDHIDNDPTLRDKHRLLDSIPGLGERTTAVLLAFLPEPARFENARQAVAFAGLDPRQHESGSSVRGKPRLSKVGHSFLRKALYMPAMVALHRTDWGKVFRDRLAAKGKPPMLIIGAMMRKLVQVSYGVLKSGQTFQPGLHGA

SEQ ID NO: 352955 - protein, 342 aa, unidentified
MEWTVAVGIDTHKDGHVAVALDRFGGQLDSFELPATSGGYLAFCQWAHELGEPAFVVEGVGSYGAGLARFLASAGCVVYECERPRRGERWRGKNDLIDALLAARRLLSGERLARPRGHGGRREDLRLLLLERRSAVRARTATLNQLQAIVVTAPDRLRARLGRGNGEQLSRKAARLRAAGGDEAVVRSVLRRLGRRVLNLDAELAQLDRELEAIVSALAPELLAECGVGPVCAAQLVVSSGDPARMVSEASFAALAGTSPVDASSGRQRRHRLNRGGDRQLNRALHMIALSRIRGHDETAAYYQRLLTSGKTSREARRCVKRMLARYFHRKLKALPALALTT

SEQ ID NO: 352956 - protein, 426 aa, unidentified
MKDTNIDTDPEPPYAAHIGIDWADKRHAIALQVAGNGKIEESWLDSDPESVHAWARSLGERFGGAKIAIGVELSKGALIEELRGYGSIDIYPLNPATTCRYRGAFTPSGAKDDMPDARLHLELVRQHRDKLRLMRPKAGADRRVELLNSGRRKLVEMRTDLCNTLRSTLKGYYPLALEVGGELGTPISCKFLLKWPAFGELKRARRATLRAFYYANGSRRADTIDGRLEKIAAAEPVSEDPDLIGPMAAFATALARQIQTLAAEIGKLERQLKAAYAAHPDHEIWSSFPGAGPFLAPRLAAAWGSDREAYGTAGDMQLYSGIAPVTERSGNSTWVHRRYSRPHFIHQTFWEYAKQSCLHCGWAQLYVDAQIARGKKHSTAVRSLAFKWIRIMAACWKQGEPYDDAQYLRALQRKNSPLAANLPAAA

SEQ ID NO: 352957 - protein, 328 aa, unidentified
MKAFIGIDVGKEKLDISWLRDVVKSKKKTKIFKNNPQGYQELASWLIKNTNLKAQDIVITTEPTGVYSEPLMYFLYEQGFILLHVNPGKAKQYASSLGLVHKTDKSDATMLARYGHDQQHSLLSWQPEPVEARELKVMTRRLEALEQDLRREENRYEAVGFSGASTRVTQSIEDMIAVLKTEMGKLKNDIDEHIDRHPQLKKNRQLLQSIKGVGEVISRMMVSLMACKQFKNAKQLACYLGLIPELNESGKRAGKTTLSKEGPGYIRAKLYMAAVVAVQHNPDIKAQNKRLVEQGKTKMQAIGAAMRKLTHICFGVVKNQTEYQPQAI

SEQ ID NO: 352958 - protein, 352 aa, unidentified
MNKYNQVMPEGKTVFIGIDMHRNKWHLTAVVEDEVVFSGAMPADPEALLKFLKRYCNNPIESVYEAGYFGFWLYELLNDSGIKCTVTPPTLVPMEYGNHVKTDKRDSRKLACLLSRNILKKVWVPSPQQLAHRQVLRRRQKLIGDRMRMQHRIKSELCFYGITVDKPRGAWPAYFVNQLKDISFADPFQQQSFWVLLEEYEYLNQLVEQQTKLLKELAASENYEKQVRLLRTIPGIGPVSAMSLLLELGDISRFARAEQLAGYVGLTPAQYSSADKIRMGRITRCGKNSLRAVLTEAAWTAIKKDPELRSFYENLKFRRGAKKAIVAVARKLLLRCRRILLENRSYCLKKAA

SEQ ID NO: 352959 - protein, 344 aa, unidentified
MAQYAALDVSQETTAICLVDESGKVRRQAKVATCPETIFRWFAENASGLVRIGMETGPLAVWLWNELDARGLPVVCMDARHANAALKMRPNKTDRNDAAALAQIVRTGWFKHVRIKSRTSYEIRSLLAAREVLVRVRVKLENEIRGLLRTFGVLFGKAAGGFARRAHEIVAGELDASPPMRLVVENLVQARLTILDRIKVLDRQVLAVARTNATARLFMSAPGVGAITALSVASAFDDAERFKRSSSAGAYLGLTPRRYESGEVSWNGRISKHGNKLTRTHLYEAATTLLTRTVRFSRLKAWGLRLAKRCGFKKARVAVARKLAVILHAMWKTNTGFRWSENAA

SEQ ID NO: 352960 - protein, 411 aa, unidentified
MEVVVEHCAFLDVHRDTVMACARTPDGVGGRNEEVEQFATTTSQLLKLSEWLVERGVTLVGMEATGVYWKPVHWILEDEIDQVWVINARHMRNVPGRKTDVADACWGASLIEHGLVRPSFIPDRPTREQRDLTRYRKSVIEERGREAQRLHKVLEDAGVKLSSVASSVLTKSGREMIDALVGGQRDSAVLAEMAKGRMRSKIPQLQDALAGRFNEHHAMLCKAMLARIDQADETIDQLTSQIEKLLDPHEAAVTLLVGIPGVSYRTAQVILAEIGTDMSRFKTAGHLSSWAGMCPGNNESAGKHRSGRTRHGSKWLRTALVEAGQAAGRSKNTYLSAHYARIRGRRGPAKAAVAVGHSILVIAWHLLSTGEQYNDLGGDYFDKRRSSDAHQRRLVKQLEAMGNKVTLEPAA

SEQ ID NO: 352961 - protein, 330 aa, unidentified
MKKFSHFIGADLSKRSIDFYCLSKKSYLRIENSAKGFKELITWIKQLNLDLADTCIVMEHTGMYGLLLEHFLHDQKIIFCKVSALEIKRSGGLQRGKSDKVDAMRIATYGSEKHAKLIPQSPSTKALERLKLLQTTRHQLVKQRAGFICLVKEYKNIGISKGDIILKVPLDMIAGFDKQIDKLDAEIKKVIHTDEKLAQNYYLLVSVKGIGKVIAVAILVKTQNFTRFTDPRKFACFCGIAPFEHTSGSSVKGRTRVSHMADKEMKSLLDLAAKVAARYDKTLKEYYETRVQQGKSKMSTFNVLRNKILYRAFAVIKRQTPYVEVYGKAA

SEQ ID NO: 352962 - protein, 419 aa, unidentified
MIEAVWERCAGIDIGKKYVVCCVTVGAAGAKATEEIRQYNTTVAELEKLRDWLQENQCTHVAMESTGPYWKPVFNLLEAHFTVILANALQVKSLPGKKTDRKDGRRLAHFLRHNLLEASFIPPLAIRQLRDLTRRRRKLMGAGASERNRVQKVLEDANVKLGNVLSDVFGVSGQAMLEALLANNGTPQQIAEFARGALRRKVPEIVAALEEHRMTDHHRFLIRQSLDHMAFLEEQVVGLDSEILRQLKPFQKEFENLQTIPGVKATAAASILAEVGVDMKQFPTGHHLASWAGICPGNNESAGKHKSTRARKGDTWLRGTLTESAWAASRQKGSSFAARFRRLAPHRGQKRALVALGHNLLIVVYQVLLTGQPYRELGSTYWEERTHQARVRHHLRCLRALGALAPGANFTEVPVNPAA

SEQ ID NO: 352963 - protein, 411 aa, unidentified
MDVVHERCAGIDISKADVKVCVRVPSSARRRRSEIRTFTSMTNDLLAMRDWLVAQSVTVVGMEATGDYWKPVFYLLEDGFEVQLLNARHMRNVPGRKSDVADSEWIAKLIEHGLIRASFVPPEPIRQLRDLTRYRTVVVRERVREAQRLEKLLEDAGIKLSAVVSDILGKSARAMLEALVAGERRPQVLAELALGSMRGKKPLLAEALTGRIGAHHAFLVRAMLDRVDEADAMIARLNRQIEAQVALFRRVITLLDGIPGISTRVAEVIVAEIGADMSRFPTAAHLASWAGMCPGNDESGGRRKSGTTRPGDAWLRAALGEAAMAASHTKGTYLAARFRRVASRRGKKRAIVAVGHSILIATWHMITSDTEYRDLGGDYFIERTGKTRVTQRLVGQLSQLGWRVNLTPATA

SEQ ID NO: 352964 - protein, 345 aa, unidentified
MELHTIGIDLGKTVFHLVGVNLRGEVVVRKKFSRKQLLHFTANLQVELIGMEACGGAHFLGRALREQGHEVRLMPAQYVKPYVKTNKSDYIDAEAIAEAVGRPKMRFVPIKSDDQLDLQSLHRVRERWVMRRTAVINQIRGLLLERGITLRKGRCHVDEALPGILEDASAKLSGALRVLLAQLKLELDHLQMRIDQADAVIKKTAGENEACRRLVAIPGIGPITATAIIAAIGNGAAFKKGREFAAWLGIVPGEYTTGGKQKLLGISKRGNSYLRRLFVHGARAVLQQSAKQSSGLSSWLAQLTTRTHRNVAAVALANKLARMAWAVLAKNEPYRPPMLVGPAAA

SEQ ID NO: 352965 - protein, 422 aa, unidentified
MSKFSINEQLTQDSTDSTRTLHAGIDLALEKNVVVVINANGERLDYFSFPQDRGGYDYFQRRMKSISLKQQASGWVVAMEPSNYFWKLIASELEEKGVTYHLVNPYTVKKHREGDQLDRSKDDRRDAVQIAELSRNGHYTKTHLQKGKYAELRQYACLYDQTTQAIHREKQVLWGLVGQVFPELFHIFKKLDGETSRALLMSCACAATICQMTQEEFITGTRSMYTGKKLAISRVRSAYQMAATSIGITEGLPAIQLAIRMHLSQLQAFQNQLKQVTDAMTACFVTLPEASYILSIKSLSAISAALFLAEVGDPSRYQAAAQWVKLAGIQPTPNNSGKKQRNRTPMSRQGRPHLRTMLYYTCLRMVQHDPHFAQLYFDFQRRPKNPLTKMQALGALMNKLLHLLWALIHNQTFYNSSFAQSI

SEQ ID NO: 352966 - protein, 354 aa, unidentified
MAIVGGFDVHRGQITFDYLDTETGEVTTGQVRPATRQTLRSWLGRFAGLTDVAFAVEGCTGWRFVVEELVRAGVEAHLAEPAETATLRGRKKRAKTDRTDARLMRELLRQQRLPESWIPPAAVREVRTQARLDVALLAERRAWRQRIHAQLFHQGAPAIAKLLTAEGQAALAQAALSPAGREVVDTALAAIESLTALLDPLRARLQATGARQPGCRALTAHDGIGPLGGTIIWAELGDCRRFARADQAVRFAGLDVTVRSSDSRRAPGRLARQGAPALRWALYEAAKSASHATAPDHPYYLAARDRLDGKLATLSVARKLARRCYHTLRDLGDDAWPTTANQAAPASTAESAAA

SEQ ID NO: 352967 - protein, 344 aa, unidentified
MDHIAIDLGGRESQICVMSADGEILLEERRPTRGLGKVLAGRTPGRVVLESCAEAFAVADAARKAHHEVVVVPATLVRSLGVGSRGLKTDVRDARNLAEASCRMKRLPSVHIPAMASRERKTACGLREVLIGSRTKMINAVRGWLRSSGLGPMVRGTVELFPTRVRAHVKSREGTVPAAIERVLVMLEKINEEIEAADQELEAAAKIDPVCVRLMSVPGVGPLTAVRFVAAIDDVSRFDRASAVQSYLGLVPGENSSSDRRRLTGITKAGAPRVRWVLIQAAWSAWRWRKSDPMVRWALEVEKRRGRKVAIVALARKIAGILYAIWRDGEQSAYDPTRGAAQSG

SEQ ID NO: 352968 - protein, 378 aa, unidentified
MYRILKIGMDVHTTNYTLCALESKLGGDHTLAIIKVGPDYKNVLDFIRKIKEKMDPKGQDNIEVECGYEAGCLGYSLYQQLTACKVNCRILAPTTMCTERGPRIKTDKRDAKLIADCLSNGGFKAVYIPTAQDNAVKEYIRMRDDHKQALKKIKQQINALCTRFGFSYDGTYWSGRHLKWLEGLKMSELVREILNEYLLTYNELTAKIERYDERIREISEQSEYREKARKLECFLGIKTHTAMALIVETGDFKRFRKGNIYAAYLGLAPGEHSSAESGGKLGITKAGNSHLRRLLVEAAGGICKGAIGKKSKDLAVRQKGNPAEVIAYADKANIRLRSKYYRMIRHGKKRNVAVAAVARELACFIWGMVTDNIYENAA

SEQ ID NO: 352969 - protein, 324 aa, unidentified
MFFIGIDLAKSKFDVALIADSAEPQKPKQRVFQNNNSGFAKLLTWMDRRATGEVHVCMEATGTYFEDLATFLVSHHIKVSVVNPSCIAAYARSCSLRNKTDAADACVIADYARAKHPSPWTPPSPASKELRELIRRLSALEQSRQDEQNRLSAGVSSPVVRGSIKKSILFLEKQIKQLQELIRQHIDSDPGLREDLELLVSIVGIGEKTAATILGELPDHSNFRSAKQVSAFAGTCPRQYQSGSSVRGRTHMCKIGNGRLRRALYFPAMVAAQHNPIVKDLYERLIAAGKNKKCALGAAMRKLLHIIFGVLRTRRAFDPCFRAA

SEQ ID NO: 352970 - protein, 315 aa, unidentified
MAMPVPVSKPIVGVDVAKNELVIYHANLDLLEAIPNTKAAIKKWLRALPGSVAIAIEATNIYHLEFADLAYEAGCVIYMVGGYELNHYRKSVKVRAKTDALDAQLLARYLRKEADELRPWTPPSPLYRQLLSLFRRRAALVQARVSLTQSWANEPLLKASFAEQMKSMQRLEGLIEKMISDRLKEAGLLGQLKRCMSVEGIGFLTGARLITSFQRGDFRNADAFIAFLGMDLRVSKSGQKDNRRSLSKRGDSEARRLLHNAAMAASRTAAWKEFYQTQRARGYSTTQVLVMLARKLARVVFALLKGQNEYQPKVG

SEQ ID NO: 352971 - protein, 342 aa, unidentified
MKDSIYDHYLAIDWSIKNMAIARMTKKSNKITVIDVDSDIEDLQAYLKNLRGTKILTIEETTTSQWLYTELREYVDRIIICDPNRNKLLNEGAKTDKIDASKLVQLLKAGLIKEVYHSTDKFLYLRRIVSGYEDLIKAGVRLKNQRYSLLRICGKSGNEKIGSRFGGQGEQFVLECLDRQIEAYEKDKQGYEMQFTKLARSYSEIKHQKSLPGIGVINAVKIVARVVTPYRFPDKGHYLSYTGLIKLAKISGGRSYGKRNPRYSRQLKSVYKSGVLAAIGGNNPINDYYNSLIQDGYAQHNARQKACRRLAILSLGVFKSGKRYQPYRRNHVKGAKEGTSSL

SEQ ID NO: 352972 - protein, 424 aa, unidentified
MKFKMQDKQNQLIERISDQHLVVGVDIAQQTHVARAVNYRGIAVGDPLSFKNNEAGFASLLDWIHQLKTTKGLDTEIVGMEPTGHYWLNLSEWLYERKIDVVSVNPHLVKKNKENRDNTQSKSDKKDALVIADMIKNGYYSFVRPTTESFEKLRVLMSNRDAVVKRYVSTANQINRWIDILFPEFRQVFKDVKCKGSLATLRLFPTPKELRSLEAQDIVKGWRTVMKRQPGIKKAEALIKLAKNSVGNDKAHSAYKLHLKQLLEEFELATTQLEIVDKEVSEALENITFANNLLGIKGFPKILLGGILGEAGDLSQFAHGNSLLRHGGLHLVEASSGKWKGQIVLSKRGRSRLRRFLYLATMCLVMNNPEFKELHAHNVNVKKMKKMKSIMKLIGKFARMIVGIARSNEPYCPEKLQPIAPLAA

SEQ ID NO: 352973 - protein, 345 aa, unidentified
MEYYAAIDVSLELSSVCVVDETGKIVRETKVASEPEALVALFNDTGLEFTRIGLEAGPLSQWLHAGLTAAGLPAILIETRHVKAALKAMTVKTDRNDARGMAQLMRIGWFRPVHVKAVPAQEIRALLTGRKLLLGKLQDVELGIRGLLRGFGLKVGRVSKGRYEARIQELVTGHPMLEPVAAAMLQARASLRAEYGKLHRMLLGIVRNDMVCRRLMTVPGVGPVVVVTYKTAIDDPTRFRKSKNLGPYFGLTPCRYQSGEVDWTGRISKVGDATVRTALFQAANAMLNRLTRFSALKAWALRVAKLRGVKRAKVALARKLAVVLHRMWVDGTDFRWRKAPAQVTA

SEQ ID NO: 352974 - protein, 378 aa, unidentified
MGDHSEAFVAFDTSKLRNAVAIADGGRGGEVRFLGEIENTEAAIAKLVKKLAGKYQRLRFCYEAGPTGYGVYRQITSLGHECSVVAPTLIPKKPGDRVKTNRRDAVSLAKLLRAGELTAVWVPDRHHEAMRDLTRARETAKQDLQRKRQQISAFLLRQGLHYPESKSTWTKRHMNWLASQKFELAEHRIVFEEMMEAMRQAQGRVARLEAAIGAAVPDWSLAEVVTALMAMRGLDLVSAATLLAEIGDLSRFQSPCELMAYLGLVPSENSTGDKVKRGPITKAGNRRARRILVECSWSYQHPPRLSKKKQVKVDAVPPAVREIAWKAQCRLNRRYRALVKRGKLKTVAITAVAREFAGFIWAVARAAMTPTTAGTGAR

SEQ ID NO: 352975 - protein, 335 aa, unidentified
MQIYGIDFAKDKFDVSFLAPTLKNVSNKPAHKVVRNNESGITKFIKTLPADAVLVAEHTGVYGDRLLKHCTESHINIAYVGGYVIHTYKSAPDRAKTDMLDCAVLREFGERFTDKLIYKTFPKKELYELKQLARHRTMLVEDRKRYVTADKGEDCRPCRSMQVKESMERIMKILTEEIARTEKQMLDIIRAHEELSRNYDIITSVKGVGLITAVELIVKTENFTTIKTASQYAAYAGTAPYEKSSGKMNKGAHVSKIGNRRSKTLLYICAESARMHNKEIKLYYERRTIIDKKPHFYVLNAIVNKLLKIIFSLVTKGQMFDSDFIRKDPRVIKDN

SEQ ID NO: 352976 - protein, 387 aa, unidentified
MGAVLIGVDPAKRSNTIEVINASEKTLATGRFDNSTVGYREMRALARKWPDRVWVIEGATGVGLHLAQRLVSDGERVLDVPAKLSTRVRAMDTGHGRKNDPADAHAVAVVGLRSPGLREVSLDDETVALKLMSERRRDLVRSRTQAMSRLHQILMQLIASGAPKQLTVAQAKALVVTVRPRDAVGKTRRQLAVDLIDDVVVLDRKIKAMEARLSEAVAATGTHLTEIVGIAAVTAATIIGEVGNVSRFATSNHFATYTGTAPIEASSGEIVRHRLSRAGNRRLNSALHIAAMANKRHDPRGRAYYERKLAAQKGHMGALRSLKRRLSDVVFRVLLEDQARANPGGQMGATLTASAVDQIPKANTSDKPQPGFTAEATPTRRPAKAAS

SEQ ID NO: 352977 - protein, 338 aa, unidentified
MKLKRIGVDLAKQVFQVHGVDSHEQVACRKQIKRSGLLDFFRQLEPCRVVMEACGGSHYWAREFRALGHDVRLIAPQFVKPYVKGGKNDANDAEAICEAGSRPTMRYVPIKSEEQQAALSVHRIRSRAIRARTALVNEIRGLLGEFGLIEARKGVAATRALLARTLEESSGLPAAMRELMGELQDELQEKDHRIALLDRLIQQQARQDERVQRLMQIEGLGPISATAMVAAVGDARQFKSGRQLAAWLGLVPNQHSSGGKERLGSISKRGDTYLRTLLIHGARSVLNASAKKTDPRSIWINEVKCRRNTNIATVALANKNARIIWALLSKGERYKNAA

SEQ ID NO: 352978 - protein, 366 aa, unidentified
MREQNERSRITIGLDLGDRRHRFCALDGKGQVVEEGTLSNKRESLSELSRRYRRALVVMEAGCHSPWISRHLEGAGCEVIVSNPRKTRAIYQHERKSDRRDALMLARIARMEPALLYPVQHGSEQAQQDLLRIKLRDSLVRARVGVINSLRFTLKSLGYTIANPSTERFHKVIEEQVPESVGSVIAPSVQALKELSFRIKLLDREIATLARSKYPETTWLEQIPGVGPITALYYVLKIQDPARFERVRDVGAFIGLCPRRDQSGENDPQLRISKRGDSYLRRLLVSAAQYILGPFGPPSALRQYGLALASGGTPRAKKRAVVAVARKLAVLLLTLWKNKSVYQAFPLSRDGEKMRTSDLERLRCIA

SEQ ID NO: 352979 - protein, 405 aa, unidentified
MQNVYERCCGIDVHKKLIVACFRNGRKAELRKFDTLTSSIKELGNWLLDNHCQMVAMESTGAYWKPIYNILELLNIDVMVVNAHHMKSVPGRKTDVKDAEWIADLLQHGLLKASYIPDREQRELREIVRYRKNLVEERSRELNRLEKTLEGANIKLSSFVSDLSGVSSRNLLKQALIGEVNQENIGDLIHSSMQSKKSVLLQAMDGVLSRIQKQLVKAILDHIDDMTKRIKDLDNIIDDHMKSYEDAIKKTDEMPGIGKRSAETILAEIGIDMSRFPSAAHLASWSGLCPGNNESAGKRKSGKTNKGNKYLKTTLIQCAKSASKNKDSFFHAQYQRLVVRRGANRATVAVAHSMLIAIYNMLKNNVPFKDLGSDYYTKFNTEAKAKYYMKKLQALGVSVPVSLAT

SEQ ID NO: 352980 - protein, 341 aa, unidentified
MANAALIGIDLGKQCFFLHAQDRRGNQVWRKKATRKQLYELLATCPACVVAMEACAGAHWLARKCQSFGHQPRLIAPQFVRPFVKGNKTDFADAQAICEAACRPAMRFVALKTTQQQTLLALHRVRDALVTERTATSNQIHAFLLEFGISLPASALAITRLPLLLDDPANALPPLMVALLHRLHRRHAQLAQEISELDTQIKRQVIEDDAGRRLLTIPGIGPVTASNLLAMAGDMDGFKRGRDFAASIGLVPRQHSTGGRPTLLGISQRGDKHLRRLLVQGARSVMRVIDRRHDALGRWAQELLRRRHSNVVACALANKMARIVWAILAKGGEYRAQPVIA

SEQ ID NO: 352981 - protein, 340 aa, unidentified
MHANIIGVDLAKSVFQIHGEDEAGNVVFRQRLRRAQVLRFFEKHPPALIGMEACGTSHYWGRELEKLGHRVKLMPPSYVKPFVKRNKTDERDAEACCEAVRRPSIRAVQIKSVDQQCAGALHHSRDLLVRQRTQLGNSIRAHLAEMGVISAQGLIGFAKLAEMVQAEDEKIPITLRPCLELMLQQWQGLDQAIHKLEAKVIEEVKANPTTRRLMEPPGIGPITVHATLAAIGDGSQFHSARAFAAWLGLTSKQHSSANKKRSGGISRQGNKVLRRAFVLGASAMIRQLRSRPDRASPWLRGIMARRPVKVAVVAQAAKNARLVWAMLVSGEHYRARSSAV

SEQ ID NO: 352982 - protein, 343 aa, unidentified
MKYIGLDLHKKSIFATVLDGDGKILSKTKIGSKSRDILYYLKSQGKKDELSVAMEASYNWPYYYRAAEEAADTIVLAHPLKTRIIGEAKIKTDKIDSSVLAYMLKADMLPAAYVPSRAAMENKLLLRARISLVRIRTQIKNKIHAIVDRNTDSYFGLENMTDIFTKTGIKILRDTTICPTDHKILIGYLDLISEIDKKIKDIESQIDKKSIEDKDIELLKTIPGIGTFTAFLIKSEIDDIERFASKEKLSSYAGLIPSTHSSGERLHHGRIVKQGNKFLRWALTEAAQTSIRCSEYFRYHYSRIRSRKNANSATIAIARRMLEIIYVMLKENREYIEKPVDIK

SEQ ID NO: 352983 - protein, 359 aa, unidentified
MTSMQDAPQRRRVVVGVDTHKHLHVAVALDELGGRIEARNFAADRSGYEQLIDWASSLGREVMFGVEGTGSYGAGLASAIRRRSIGVLEVLRTDRRDRRLRGKSDTIDAENAARAVLNGQASAVPKSADGTVEMIRLVKVAKDVAVKARTSAMISLKAVLVNAPAELREQLQPLTKMALIRRCAALRPGPVTNPTTAAKHTLRAIARRWLALDAEIKTHQQILNRLTTELVPDLVAAFGIGADIAAEMLIVAGDNPERVKSEPAFARLCGVAPIPASSGMTTRHRLNRGGHRQANSALYRAVIVRLQYHHPTQAYYQRRTAEGRTKAEIIRCLKRLLAREIWSHLRPLRQARQPLVLAA

SEQ ID NO: 352984 - protein, 456 aa, unidentified
MPDYFFGIDVSKGYSNFVMLDSSKRCVEDDFQLDDTFDGHQKLYSILSEFCVRHPKANIFAAVESTGGYENNWFDVLTRFQAQLPIRTARLNPCGVYNNSKAALDRNITDKISAENVAKYIIEHPEKVRYQLQDPLAPLRKQWGFIKMLKKQKTQLLNQLESNLYTANPEILAYCKDSTPAWVFSLLQRYPTASKLAKARKSSVALIPYVTPQKAKNLIEAAKHSVASATDEITSQIIKATVQQIRQLSKVIDAQTKAMTDKCSIPEVELLKTFIGIGDDSAVGLILEISSIKRFKSAKHLASFFGLHPVYKKSGDGSWGYRMSKKGRIAPRQILYMVAMVAIQSNPLIREIYEKHTEKGMEKKAALGVCMHKIIRIIYGMLKHNKPFKPEIDRKNREKQNTQGEKKICRDKSRRYQTHDAKAPISRRQAKKREERKQSQSDNNAKCGIKAPVPIL

SEQ ID NO: 352985 - protein, 433 aa, unidentified
MKGVSEMNLTQDAKICQVTETTIIIGVDIASETHYARAFDWRGIELGKVFSFENSAEGFRSFSLWVSGLATKADKHHVLIGAEPTGHYWFSLGVYLRDNGIKMVLVNPYHVKQTKELDDNHPSKTDRKDPKTIAKLIIEGRYNEPYIPEGVYAELRVSMNCRWRIIRELTAAKNQIQRWLKIYFPEHKDVFGGFDCMSSLMILRAAPLPTDVLALGADGINAVWRKAKLRAVGMKRATRLYAAANDSIGSVDGSAAARMELNLLLDDYEAKQRQYDAVMAVVEELCSQIPEVAELLKIKGIGLVTVAGFFAEVGDLRRFDSPRQIQKLAGLAIRENSSGKHKGRTSISKRGRAKLRAILFRAAIALAAKNPEFREIHSYYTCRANNPLKKKQSIIAMSCKLIRIFHTIVTKGCEYDPAKLLADIHRNQLNAAA

SEQ ID NO: 352986 - protein, 397 aa, unidentified
MIAVGIDISKAKSTVAVIDSDGTVLASPFTMAHTQPEMEAFVSYLKGLGEPTTILMEYTGHYHYPVLKKLQDEGFPVCIVNPYQMKKYGDVEIHKAKTDKKDALRIAAYALEKSYKLVPYSSMEQKYEDLKFLSRQYNQRISYVAKLKVQLIALLDQTMPGITRILPLNSRNPEKCALLLFIKRFKSFDEIQRIGKARFLASYDVLAKKASERSASSKGLSIYELAVDSITTRGEDPYIWLSQNQCVDLLSATQNAADEIISQMRNIAETIPEYKVLRAMHGVGDRLGPIILAEIGDVHRFHSGKALNSYAGNDAPPYQSGQFESRNRHISKRGSSALRKACYEVMQALKLIKPQDDPVYLFMLKKEQEGKPFNVAKMAGVNKFLRIYYARAMELYK

SEQ ID NO: 352987 - protein, 446 aa, unidentified
MSTPSLPVLDPTAAAIDVGSEQLHVSIAGGPPKVFGTTTGQLYELRDWLLAHGVKSVAMEATGIYWLCPYEVLEKGGLAVVMVNGKYVKNLPGRKSDMKDCQWQATLHAHGLLKPGFVPPEHIRRLQDYLRLRTDHITMAGSHEQHMQKALERMNLKIHDVISDLTGVSGLKMIEAMLGGERNPVALLALCDAQIQKNKAGALRQALEGTWKDEHLFALRQAYELWQFYQKKIAECDQAIGTVLQELAGPEDPKNPAPPATKRGGVNAPQIAGLHGLLWRLCGGKDPSTLPGVADYVLLQLLSEVGTDLRKPWPTEKHFTGWLGLAPGSRQSGKRRGSQKRGRNRAGRLFCVIARSVGRSVDKALGGFYRRLKGRRGGLIANLALARKLAELFWRLMVHGIAYVEQGLKKYEQKVAQTEQRLLQKLASKYNLVLQPKAPGPSTLPT

SEQ ID NO: 352988 - protein, 312 aa, unidentified
MYHIEEELVYMGVDIAKAYLDAAIGNEKRRFANDALGHRELIKWVKQLSAAVQVICESSGGYERALVQALARARIKISLVQANRVRQFARAAGILAKTDRIDAEVLCEFGKVMRPQAVTAAKLEQEQLRELESQRRHLTHLLVMEQNRGARLSDASVQRLNRSLINQIKKQIDQLDLLIKRHIDQSHELSAKAAKLTSISGVGARTAALLLAQLPELGELNRREVAALVGVAPFNRDSGRIRGKRTIYGGRRPVRQGLYMAALVAARHNPILRNFYQRLRAAGKPAKLALTATMRKLLIVLNSALKPDLKYA

SEQ ID NO: 352989 - protein, 320 aa, unidentified
MDAVLGIDIGKAKFHVTLRFDDGTRRRKACANSPAGCAELLAWMARHGAGRVHACLEATGAYGELLATTLVDAGHQVSILNPAIIHHYAKSRLSRAKTDPVDADVIADYAAKEHPPLWTPLPRDVRDLQALVRRLDALIGMQTDERNRAQAGALTPAVQQSIETVLAHLETQIATVRQQIRQHMDQHPGLRAQRDLLITIPGIGEATAALLLAELFNKAFTSARQAAAFAGVVPRAHDSGLHEGRRVMCKLGPGRLRKGLYFPAIAAIRFNPSLQPLARRLRGAGKPPMLIIGAAMRKLIHLAFGVLKSGRAYDPDLVKA

SEQ ID NO: 352990 - protein, 356 aa, unidentified
MEQLTTVGLDLAKDVIAACVLDVHGAVIERRVLRRAAFERWAEQLPSCKVAMEACGSAHHWGRWFAARGHTARLIAAEFVVPFRKGGKNGTADAEAIAIAAGQPTMRFVPIKTVDQQAILAWHSVREGWKEERTALLNRVRGLLAEFGIVIGRSSERLLTALPELTEDSRLPDAMRAMLLEAREQFAALHARLACCDAQIAAHVRNSPAAQRAGELMGVGPLTSSALAATVPDAKVFKNGRQFSAWLGLTPRQHSSGGRTRLGRISLRGNVYLRTLLIQGARSTLQSAINTEPARASRLQRWIIELYGRKGYYKTLVAIANKHARILWAMLAKDERYDTSAWQRHPLNQPLLPGNT

SEQ ID NO: 352991 - protein, 406 aa, unidentified
MRYVGIDIAKKDHQIAAVDEFGNVILKSFSAGNNESGFAKIAEKLEAARIESDECLVGMEATGHYWIPLWEFLDANGYEVVVINPIQTDAFRKVDSLRKTKTDAIDSVLIAEYLRFANPESSKMANPDVEQLRELARFRSFLVEQATQLKNKAIRVLDQAFPEYGKLFSNTFGEASKALLKQCPTPEEVLATDIRTLTRILKENSGGNCGRAKAEAVKDAARSSIGAKFGARALSFEIKLLVKRLSFTQVQIEELEDEISELLHRSDGHWLTTIPGIGDSLAASIAGEIGDPDRFETPKKLIAYAGMDASKYQSGANQDTNGHMSKRGSSELRRALMLAADKVRIYDPYFGEYYDSMKARGKHHYVALSGVARKLAGVCLSLMREQRPYESEPPEHHLPGHLQRQA

SEQ ID NO: 352992 - protein, 386 aa, unidentified
MICVGIDVGKNTHYACVKNDRQITLREPFAVQNDEAGFAKLYAAIRKHPKEKVVIGLESTSIYGENLITFLAGHGYKIALINPIQTNAIRKGSIRNAKTDKIDSRGVCKFLATEEYRLLQPGELQLLELRGLCRFRQTLQKSCTRLKTQLTSYLDLSFPEFYQAFSKVHGKGAYAALMEYPTAKMMGKANVIKLSGVLEKASRGRLGRARAEDLKRLAKQSVASGSRDMSLQIQLTIPQIRLVEEQVKAVEKQIETIYEQVGSIIRTVPGIGTITGAIILSEIGDIKRFSNPGQLIAFAGLDPVVRQSGKFRASSTRMSKRGSPLLRFALVRAAWHISNNNDTFSAYYREKLSHKGGHYRTLGHVAGKLCRVLFKMLRDDMPFNLP

SEQ ID NO: 352993 - protein, 455 aa, unidentified
MAKQKRQMKRKVLVNALEQINPNAAGIDVGAEEVWVAVPPDRDEESVRVFPTFTADLKRLAEWLKACGIETVAMEATGVYWIPLFDILESYGFEVCLVNARHLKNVSGRKTDVLDCQWLQQLHTYGLLSPSFRPPEEIVALRSLVRHREMLVQYRSAHIQHMQKALTQMNLRLTSVLSDITGVTGLKIIRSILAGERDPQQLAQFRDERCKKSEAEIAKSLEGHYKREHLFALKQALELYDFYDRQLQACDAELEAMYQEFEPPADSGTPPPAPRTQKRRKNQAYFDLSLALYRMTGVDLTQIDGVDELTIQKVLSEIGTDMSKWPTVKHFTSWLRLCPNNKITGGKVKQRGVQPTQNRATIALRVAASSLKNSDSALGAYFRRMRARLGTPAAITATAHKLSRIIYFLLKERKPYHDFGADHYEQQYRDRVLRNLNRRAAKLGFRLEPAFQGVS

SEQ ID NO: 352994 - protein, 347 aa, unidentified
MSEYIGIDLHKAKSFVTRVDQRGRVLEQVELRHATGEMQRYVEKVPGDTRIVVEATGNWMWLYELIEERHPDLVLAHPLKTKAIASARIKTDKIDATTLAHLLRADLVPAAYIPPRAVRDTREILRFRASLVRLRTQVKNKIAAILSKNGLTPPTKTAFGVKSRQFLATVAVRPCYRLALDGYLRQLGHLTDEIDQVAQTIETQVATDSQAQLLCTMPGIGAYSALLILSEIGDVHRFPDSRHLCSYAGLVPSVHASGGKTRLGRLTKQGSTWLRWILIELSMHAIKGAPQFRQLYQRVARKHGRNAGRTAVARAMLKTIYAMLKHQEAFRPIEQGRTGQRLGAMAG

SEQ ID NO: 352995 - protein, 353 aa, unidentified
MAGTNDNRDVVGGVDTHKDVHAAAALSVTGQLLGTALFPTTRAGHSQLLAWLTSHGVLIRVGVEGTGSYGSGLMRHLRSAGISVVEVNRPNRQLRRQRGKSDTVDAEAAARAALSGTAAGTPKSQDGMVEAIRLLRLARRSAMKARTQTGNQLHAVVQSAPTVLRESLGGQSLAKLVPVVRRFRWRAPMTPLAAARFTLKSLADRWAALEAELRQLDHQLELLVAAAAPRLVALVGVGTETGGALLVAIGDNPDRLHSEAAFAALCGVSPVEASSGRQKRHRLNRGGNRDANRALWVVVMCRMAKDAITRAYVERRTQQGLSKREIVRCLKRYVARQIYRTMLPTLQHATATA

SEQ ID NO: 352996 - protein, 406 aa, unidentified
MSDIFALDVSMGKSYCVWYRGKHCLKEFSLVHTKAGFNALRDMIKKAQKPIIYFEAIGIYSRVIEHFCETNGLRFCRLNPLELHLKSESLRRVKTDQKDAHRIALTVQENAFRLTVPWKKDYLQLHELSRFYNQLNADWNYRLNHLHTALEQVFPELKQLFVNRTSKLALNIVELFPHPALVRPYSRVKLKNILMASTDKRISKVKAYKYADRLINLAQKSYPAVSGDAIQVEEVRYYARQLIALTHKREEVIKRMESIAQRLPEYILYCSFPGIGKQTAAQLMGELGDISRFDNANQLNAFVGIDIRRYQSGTYLGQDHINKRGNPIARKLLYFTVGNMIRQQHANSNHIVDYYYHLKEKRPHPKLNKVAMVACMNKTLKCLLSMIKHHEKYHYRYTDSMVPVKA

SEQ ID NO: 352997 - protein, 331 aa, unidentified
MHYVGVDLHRRSVVVTVVDEQGQVLQARSFACTEQEVIQAFFRTICPFKAVIEASSSYRWLYDLISPLGQVVLAHPLRLRAIVSGRAKTDKLDSQMLASLLRANLIPTAYVPPERYQRLRDFARGRARLSQRMVEAKNELHTLLRKKNVHVPYVNIFCKSGKRYIGELDLDGPDCVLRDELLRRIAHFEVEIVGLDERLVEVAVEFPEVEALRGLHGIGLYSALLIIGEIGEPWRFRDGRKVGAYAGLTARVSQSGDHCYHGHITRQGSPWLRWILVQGAMKVTRGDRELNNFYTRIRKRSSAKIARVAVARKLAAICWIRLMGWHREQAA

SEQ ID NO: 352998 - protein, 341 aa, unidentified
MTIVGGLDLHRGQLTFDYLDQDTGEVTTGRIVPADRLQLRAWLERFADGQQAAFALEGCTGWRYVVEELERAGITAHLAEPAETAGLRGPKRRAKTDRADARHLRELLLGGRVPESWIAPTHVLEARATIRLYKDLLDERTAWLQRVHATLFHQGVPVIAKLTTPEGTARLADADLSAAGRQAVAVGLRQIQRLTGEMAPLREQFADLSARQVGCRALRETHYGVGALTSVAIWAELGDCRRFRSSDDAVRHTGLDITVYASDGKRTKGHLARQGPAVLRWALYEAAVFAGRASSPDHAYFRQVKQRLDGQRALLSVARKLARRCYHTLRGLGDRAFAPAA

SEQ ID NO: 352999 - protein, 442 aa, unidentified
MLRTIYRRVAGLDVHKKTVVATRMRMTEDDRVVWETKTFGTTTPDLLELHDWLLEWSSTHVAIESTGDFWKPVYNVLEGTFELLVVNAKHVKHVPGRKTDATDSEWLAELMMHGLLKASFIPPEPQRALRDMTRYRTTLVQERARVVNRVQKLLEGANIKLSSVATDIMGVSARAMLDEIVAGQADTTLLAELAKGRMRTKIPELEKALTGKVKAHHRFLLAKQLAHVDFLDEQIEEISAEIGRHMAEMGGPSRPGADAGGGEKPTEGEQPLPPLTWEEAVALLDTIPGVNRRAAEVILAEIGLDMSRFPTADHLASWAGLAPGNHESGGKRYSGRRTKGNRSLSSMMTEAAQAASRSKDTFLSARYHRLAARRGKKRAIGAVAHSMIVMIWHILTSRQPYRELGGNYFDERKKESKVNYYLRRLEQLTGAAVTLGFQPAAA

SEQ ID NO: 353000 - protein, 345 aa, unidentified
MEYGAIDLHMKKSVVRIVDETGTVVVRDRITTSREAFAALFGPRARMRILLESSTESEWVAQVLESLGHEAVVADPQYAPMYGSRSRRIKTDERDVTALAEANRTGVYRRAHRVSATQQERRQLLTVRKHLVESRSSTISVLRSLLRQAGLRLGSGTPSTVEARLARLTIPPALAAQLQPLRELLSTLETELTQLEETVETIASTDDVAQRLMTTPGVGPVIALTFQATLDDPARFGGDARRVSAFLGLVPSESSSAERQHKGHITKAGPPILRSLLVQGSWVIFRGRSAEGAALRTWAHALAARRGRRIAIIALARRLARVLYALWRDGTEFQVGVRRGAASAA

SEQ ID NO: 353001 - protein, 292 aa, unidentified
MYGLKHQKEKRSVDHFAGLDVSVKETSVCIVDDTGKIAREVKVASEPEVLLTVLKNPAYRFKRIGLEAGPLSQWLFSALAEAELPVVCVETRHMQAVLKAQINKTDRNDARGIAQMMRVGLYRPVHVKTLRSQKLRMLLTHRKLLQSKAIAVDNDLRGTLRNFGLKVGMVGTVKFEARIKELVENLPDLATLIEPLLVVRRVLREQFAILHRRLLAIVRDDEVCRRLMTTPGVGPVVALTYRATVDVPARFRKSKAVGAVFGLTCSKYQSGEIDRSGRISRCGDEMMRVMLY

SEQ ID NO: 353002 - protein, 349 aa, unidentified
MRFYTKQHQFYCGIDLHARTMYLCIMDHEGQIHLHRNMPATTQALADALQPYRDDLVIAVECIFTWYWVADLCSRIGVKFVLGHALYMKAIHGGKVKNDKIDSQKIAALLRSGMLPMAYVYPQPMRSTRDLLRRRLYLSRQHAQLQTHIQNTNTQYNLPSFEKRIDRRSNRTTIADRFTDPMVRTTVEVDVALMNALHEQILTIERQINTQVPEHDPVAVHLLRSIPGVGKILALVIFYEIQDINRFPRVGNFISYARLVKCSHESAGKRKTGKNSKIGNVHLKWAFSEAACLFLRRNERAKLYHQRLVSRYGNAKALSIIAQKLGRTVYAMLKRRTPFDAKLFFETVG

SEQ ID NO: 353003 - protein, 356 aa, unidentified
MQTQVTKKIDFKGKELFIGLDVHKKSWSVTIVVEGIEHRTFTQPPDPMALYNYLKRMFPGGIYNSAYEAGFCGYGIHRELNFLGVKNIVINAADIPTTQKDKLQKRDPVDSRKIARSLEKGSLNGIHIFDRELEELRTLNRTRFYLMRDLRRSKNRIKSFLQYYGEPIPLEFDNNQWTLKFVSWLKQVKMQTTSGQDSFSHLIKSYEHHRRQLLDLSRLVRQRIREYDNELYSLLKSISGIGPLTSSALITELGNINRFNNIDQLSSYVGFIPRIRESGETTHTGGITFRCNTFLRTLLIEASWQAIRMDPAMMQYYHKHLVNNKGHKVIIKVARKLLNRIRYVMKNRQPYITGVA

SEQ ID NO: 353004 - protein, 376 aa, unidentified
MLYVGIDIAKNKHDVTALNVQGKTVLKPLTFSNNKAGFELLDLSFRQLNQDCLIALEDTGHYAFNLLNFLHEQGYKVYTYNPLLIKEFAKSLSLRKTKTDKKDAHGIALKLLSDPNREQFQHDNRQVELKILARHIHRLKKKQSDWKVQYTRCLDIIFPELDKIVGKHSEYTYQLLTCYPNPQKRLETGFDKLIEIKRLTASKIQDILSVAPRSIGTTSPAREFEIIEIIKHYKRLIDKAETCVNDLMAEFNSVITTVTGIGGRLGAVILAEIRNIHAFDNPAQLQAFAGLDSSIYQSGQIDLAGRMIKRGSPHLRWALIQAAKACARFSPAFKAYLKTKLEQGKHYNIAIIHLAKKLIRTLFYILKKSCHLTNKK

SEQ ID NO: 353005 - protein, 426 aa, unidentified
MRFYTKPHRYYCGIDLHARRMYMCVLDAEGQIRVHRNGPATPEHFLTTIAAYREDLVVGVECIFTWYWLADLCAQEGIAFVLGHALYMKAIHGGKAKNDKIDAHKIAVLLRGGMLPMAYVYPREMRATRDLLRRRCHFTRKRAELLTHIQNTASQYLLPTLGKIAYHGNRLGVAEQFHDPAVRKSIETNLALIDHYDRLLTELELHLTETAKVHDVNAFYRLRSVPGIGKILALVLLYEIHDIQRFPRVQDFVSYCRLVKCAKESAGKHYGYSGTKIGNAHLKWAFSEAAVLGLRKNPAAQRYVARLAHKHGKGKALTILAHKLARAVYHMLRRGQAFEATKFFAQTAPGDRSARPESDGITRDEVHDASRSGPPRHDLEGGRYPDPPEIKRRVALPRVRERGGAITERAATERHGGGAMSASLSD

SEQ ID NO: 353006 - protein, 318 aa, unidentified
MTNNTYQFNIGIDIAKQKFDVSFSDDKHASFDNTPTGFQSLLKAIKDQSQTRVVMEATGGYEKPLAHFLQAQGVAVSIVNAKRVRDYAKALGRLAKNDVIDAKVIRLFADAVNPKLLPTASETQQALDAQMHRREQLVRQRAQEKQHLETISNKDAIRSIKRTITFLDKEIARIEKAIKALVKADATLTEKGERLSAVKGIGDITALTLIADLPELGQLTNKEISALVGVAPFCRDSGTLIGKRTTWGGRAQVRSILYMAALSAVQYNHPIKAFYSRLLKNGKTKKVALVACMRKLLTVANSMIRNNTEWNPNHGKLA

SEQ ID NO: 353007 - protein, 357 aa, unidentified
MSIVGGLDIHRKQLTFDWVDEQNGKWERGRIAPADREHLASWLTKFDPATAGPVAFAMEGCTGWRYIAEEMAKAGVIAHLAEPADTSVLRGPKRRAKTDKADAKLLRELLAAGRLPECYIPPAQALEYRAMLELYQDLRTQHTGWAQRIQAVCFHQGTTAPGQAGIVRGDRARLHAIIDDQLSISGRLQVNTALAVMDVLADHLDRLRRRLLSSARGLKGARALMHGIYGVGPLSSLALCAWLGGADRFSSSRKAVRFVGLDITVHSSDGKRSPGRLSRQGPEVLRWLLFEAAKTSARACAPGYDYYTQVKDRYDANRACLSQARRIVRHATHILTSLGDDAFTIVAQPAAPTTVAR

SEQ ID NO: 353008 - protein, 343 aa, unidentified
MNEYDGKQVVGIDLHRQRSVIVRQTAEGEQLSAVRIVNDPVALGLQIEKAGPNPEVVLEATYGWYWAADTLQAAGANVHLAHPLGVKGFRYRRVKNDVRDASDLADLLRMHRLPEAWIAPPAARELRELVRYRAKLVALRSGLKAQVHSVLAKAGVLIPVSDLFGVTGRQKLARVPLADAYAQRVISLLELIDVLDAHEARFTARIATELRGDRGYTAIQALPGIGPTLAAVFVAEIGDVQRFTDPAHLCSWAGLTPKHRESDIVVHRGHITKQGSKLVRWATVEAIQRHPAGTKISVDRARIEARRGKNIAKVAAARKLLTLVYYGLRDGEIRAVAQQKAAA

SEQ ID NO: 353009 - protein, 338 aa, unidentified
MRYVGVDLHKHSISVCVMELVGRKRKIIERRRFRCDQEEEMAEYFASLGEYQVVVEATASYEWFVKLVEPTSDRVVLAHPGHLRVIAQSKRKTDKLDAQALAEFLALDQIPEAWRPTPRVREHRTLVRHRQYIVGRRTSVKNKLRRVLSHYNADLKELFTQEGRKYLAKIELSKSDRFVTDLLCEELDQHSERLKQVTNQLKVFAKQAAVAEREAREILDSMPCVGPVTIDVVLAEVGDIRRFGSQRKATAYAGLAPGIRESAGKAKQLGITKQGSGVLRTTLVETAWRLVIKTRCWSTVYEKLKVRCGAKKAIVAVARRVWCVMVSMLQSGQKYKPT

SEQ ID NO: 353010 - protein, 343 aa, unidentified
MARFVGLDVSQKLTSICVVDDAGRRLWRGQCRSDPEQIQQAVQGHAGDDASIGIETGPMTPWLVHELRKRGLNVVCLDARHASAALKMQMNKTDQNDAEGLAQIMRTGWYRSVHVKSLDAHRTRALLGARAQLVGMTTRLSNHIRGVLKTFGILPGAMRGLPFDRRVETLLADLDDLAAIVRPMLTAWRKLREQIAVFDKAVRALAKKDPTCRLLMSVPGIGVVTVLAYVSTVEDPARFSRSRSVGAHIGLTPRQYQSGEVDRSGRISRCGDTLARTLMYEAAVVILSRVKKASGLKDWAQAIAKRCGIGKARVALARKLCVILHSIWRSGEPFRWSAQPAAA

SEQ ID NO: 353011 - protein, 411 aa, unidentified
MEVYCGIDWAEDHHDIALVDRDGKLLARRRISDDAAGLAQLLVMLAEHGDTPDDLIPVAIETPRGLLTACLRATGRQVYPINPMAVARYRDRHTVSGGKSDHGDSVVLASVLRTDLHAHRPLPADSELAQAIAVLARAQQDAVWDRTTAHNKLRSHLREYFPGFLAAFAGARGGIMRPEARTILAAASTPSAAAALTADELRSLLKKAGRRRGIDTEATRLHEAFHGEQMRQLPLVEQAMGRQTLALLRQLDAACTSADDLEQAATASFNQHPDAGIITSFPGLGPLTGARVLAETGDDRSRFQDAKGLKAYAGAAPITRASGKTKSVTHRRVKNNRLNAAGYTWAFSALTASPGARAHYDRRRDDGDGHAAAQRNLFGRLLGCLWHCLTTGQHYDEATAFPGNTKLPTAA

SEQ ID NO: 353012 - protein, 349 aa, unidentified
MSPKLNAAIAVIGIDIGKNSFHLVGLDWRGAIVLRQKWSRGQVEGRLANLPPCLIGMEACVGAHHLSRKLTSLGHDARLMPAKYVRPYSRGQKNDFRDAEAIAEAVQRPTMKFVATKTAEQLDLQALHRVRERLVSQRTGIINQIRAFLLERGVAVRQGLRFLRAELPRILATPCDVLSPRMVRVLEDLAADWRRLDERIERLSSEIEALARRDAGCERLMSVPGVGPIISSAMVAAIGAGEAFSKGRDFAAWLGLVPKQISTGDRTILGKISKRGNRYLRVLFVQAAWVVLIKPKSWQRHGLKPWLEAAKRRLHHNVLAIALANKLARIAWSVLAHGRTFETSKIHAA

SEQ ID NO: 353013 - protein, 419 aa, unidentified
MQEKPGVFAGIDWASVEHQVCLMGGGPPVQRTFAHDALGIGALVDWLVGQADHPQDIAVAIETPHGPVVEALMDRGIAVFAINPKQLDRFRDRFSPAGAKDDRRDALVLASALRTDRHCFRRLVPLDPLVVELREWSRMAEELKEERTRLANRIRQQLWRYYPQALEITDDAAADWFLDLWALAPTPADVARLTEKKIARVLTTRRIRRIAAADALALLQQPALTVAPGTATAAKAHIATAAERARLVNRQLKEVIRRLDALVDQLAGPDVPETDPGQPSEQRDAAILRSLPGVGRIVAATLLAEAHQALQSRDYRALRTLTGVAPVTKRSGKSRRVEMRQACSQRLRTAVYHWARVATQHDPRSRARYATLRARGCSHGRALRGVADRLLAVACAMLKTKTTFDPLRAGAVAAAPESP

SEQ ID NO: 353014 - protein, 432 aa, unidentified
MSSKQQVIIGVDPHKLSATIEVVDPGGVKLGEGRFATDKAGFAAMRGYVNRLEPDRARRVWAIEGANGAGRSVAQRLLAAGERVVDVPAKLAARVRLFDTGHNRKTDALDAHSIAMVAVSSEHRDGLRELCEDGELEAIRMLCDRRDELSRQRIQTVNRIHRLLAELVPGTKKKDLSAQQAKAILVTVRPRDIAGKTRRRMVAELIDDLVRVDRRLKAMKADQAAAVRERGSSLLDLYGIGPAGAARILADVGDVRRFADRNRFASWTGTAPLDASSGEQIRHRLSRAGNRRMNHVIYIAAVVQIRNDTPGRDYYRRKLAAGKTPLEALRCLKRRISDAVYRQLLADARRNAEPAAAVDHIDDQVGSEQAEAAAVGAGPGGHCGATKESSATDLTPHVGTSDKPLHGPAEPTLQPVNAAPEELRNQALQRIP

SEQ ID NO: 353015 - protein, 372 aa, unidentified
MNRILKIGMDVHSTNYTLCVAEPKLEGEPDYLYEVEVDPDYLNIIKIISQLKKKYHDDVLHITCGYEAGCLGYKLCHELEDAGEKCVILAPSTMEMPGGKRIKTDKRDARCIAKCLANGGYHAVHIPSVQDEEIRDYLRMRDDHKKQQKMTKQTINAFCLRHGFKYAHTKWTAAHLKWLQTLSLSNQDRQTLDEYILTYKWFSDKISRLDARIEELAAKEEYVEKVSKLRCFIGIKTREALSLVVETGDFARFAKGNTYSAFVGLTPGEHSSSTDVNRLSITKAGNKHIRTVLIEAAQSICKGRVGTKSKDLFARQRGNDPSIIAYADKANERLRRKYYRMMHKGKQRNTSVTAIARELACFIWGMMTDNIA

SEQ ID NO: 353016 - protein, 355 aa, unidentified
MNDAEYIGMDVHTATISAAVRDSSGNLVMEATLETKAETVLEFVHGLRGSLHVSFEEGTCAAWLHDLLKPQVTKVLVCDSRKNALLRVGNKNDREDARKLSELLFLNKLHPVYHGETGIRTLKELARSYLTLTRDLTRVMNRLKAIYRGWGIACAGQQVYAPRYRAEWLAKIAEAGVRRRAEIYYQQFDALAALRQEVRRELLAESRKHPTMRLLRQIPSIGPIRAALLIALMQTPHRFRTKRQLWAYCGLALRTYDSGEYRFVGGQLKRSKKAVTIRGLNKNHNHDLKNIFKGAATRAAATAGPLQNFYEARIANGMKPPMARLTLARKIAAITLLVWKKGVRFDAEQLKQQAA

SEQ ID NO: 353017 - protein, 355 aa, unidentified
MYIVGIDIGKNHHEASIVSPEGKQIGHSLRFATTHKGADSLMSFIFNNIGNSSCIFGMEATGHYWYPIYSFLKARGYTIYVINPIQSDSLRKMYIRQTKNDSIDSFLIAEVIRFGQFTTTSMADENILAMRQLCRYRDSVISSRTEIKLRISTIMEQIFPEYEKQFSSLWLSTSMGILEKYLTPENIENAPIDELFEIIKDKSHNKLTMKKAISIREAAADTFGIKIAQDAFSFQLKQLIDRMNFLDKQIEALDCQILEYYEKFDCYLHTIPGIGMIAAATILAEIGDINRFKSSSALVAFAGIDPTVRQSGEFSSTHNHMSKRGSPYLRHAIFLAATTCSFHNSPLNAYYKKKR

SEQ ID NO: 353018 - protein, 419 aa, unidentified
MTFHLARGYTGTNKSVDQSSVKYSFGGSAMFYAGIDVAMDKHDCVVLDSDGNVVFEVFTFENSREGFKTLKKVLQSCSKNPKKIKVGLEATGHYSDNLLEFLNSIGFAPVLFNPLHTNLFRKGLSLRKTKTDHVDAHTIAIMLRTEDLKSYSQQSYHLAELKSLTRYRSMLVSDCSRHKISLVRLCQILFPELKNLVPSLHQSSVYTLLSELPSADKIANCNLTHLTALLSSASKGHYGRDKAIEIRDTARASIGIKSVVKELELQQTIELIQIYQQQIEAVEEQINNLMDEIDSPITSIPGIANRMAAVILAETNNFQDFERAEQVLAFAGLEPSVYQSGQLTSTHSKMVKRGSKYLRYAIFNATKYVCHWDPTFKAYLAKKRAEGKPYNVAVSHAAKKLTRVMFHLAKTNKEFVPQA

SEQ ID NO: 353019 - protein, 475 aa, unidentified
MNIKGSKKKNQVLSVNIFEQQEIIAKTEAIKAELKASTWHELETKGKFDKNDKLSFVSDDMLILGCDIGSETHYVRAIDTRGRELSKSAFGFSNTAEGFESMLDWSTKLAAANDKKQIVLGLEPTGHYWFCLTTWLVVKGISVVQVNPYAVKQTKEVEDNSQLKDDKKDPKLIANLVKDGNFGMPYLPEKLYADIRRLSMFRDQLNEDRIRNLNRLHREMKIYFPEYKDAFGKIDGAFSLELLKAAPFPDELAALGTEGMKQIWHEAKLRGRGYANASSILEYARKSVGIKDGADASRQAVKWFVSRIIELDEQLSDIENQLNQRCNEIPYAKNILAISGIGENILSGILAEMGDISRFDNVKEIQKLSGLGLVACSSGKHTGETKISHRGRKRLRYWLFQAAKSAVAHSEEFKELHVYYTTRKQNPLKKMQSLIVIACKILRVIFTILTKGTTYDPKKLLGDIVRPDQSIPQAA

SEQ ID NO: 353020 - protein, 417 aa, unidentified
MKKSCKSQKRRFGVDVASMTHFARAFDFRGIELGKIIRISNDAQGFQLFKLWVNELKENHNKDTVMVGMEPTGHYWFNFAQFLKDSGIRIVLVNPFHVKRSKELDDNNPTKNDRKDPKTIAMLVKDGRYQVPYIPEGLYSELRTAMETRWHTVQGLNTIRNRVKRWISIYFPEFTKVFGAWEGKGALIVLKEFPTPEKVLQKGVDGIIARWRKDKLRPLGLKRAMRLIEAAENSVGVREGLRAAETNLKMLLAEYDMKKQQLEEIMVLVEELIYQIPGIKEVLKIKNIGLVTAAGFMAEVGDLSRFDHPKQIQKLAGLNIKENSSGKHKGQTTISKRGRRRLRALLFQGIMPMVANNAEFWILHQYYTTRAHNPLKKKQSLILLCCKLIRVIFALMKKQVAYDLQKMMNDIRRPVAA

SEQ ID NO: 353021 - protein, 405 aa, unidentified
MVRYIGMDVHREFAQLAVAEDGLVRDEGRIGVTPEALREWAAGLRGDDQVALEATGNSDAIANLLTPLVGRVVVSNPVKTRAIAEAKVKTDKVDARILAQLLAADFLPPVWLPDERTRTLRRQVTRRAHLVRQRTRIKNQVHAILARNLAPTPPVSDLFGTTGRHWLARQDLPADERSCVQALLRQLDFHGAELAAVDRELAVEALGDPVVARLMTIPGIDAIAAISVVAAVGDFSRFDSPDKLVAYVGLNPKVRQSGNSAPVHGRISKAGRAQVRGVLVEAAWSASRAPGPLRAFYQRVNARRGFQTAVVATARKMTVLAWHLATRDEDYAFARPGLVTHKRRKLELAAGAPSRRGNHRQPGAAYNSRQQRNQETAAAERAQRAYEVLVAHWQTRKPAQTPLRA

SEQ ID NO: 353022 - protein, 413 aa, unidentified
MSPGLLLREVPGDRLVVAIDPGKVSNRVWLTTGDRGLIGEPVSLPVLRDGVEELDRLIASSGVVGVPVIGIEATGALHRAWAAEVERRWPGSLRLFAPSETQAARAQLGSRRFKTDDRDCAALVWLLRQGAGRPSAPSAVEALLGAVRHRRQLVDARRVGQQRLHDQLNALCPGLSAPVGHGRALKLEDASGGAVLACAAAFAGRAPSMRSLLARSPGRLSEANARFWIARWKRLLAPPPDAELRAQRLGRDVERWLGLREDITALESQLAELLAGTDGQILTTLPGVAVVRAGAFAAHTLPIERWPDPDQLYSATGLAPASYQSASVTRRGRISRQGLAEHRDALMAIAWGLSQHSAAFAARDCEYRARGFRPIQARVALARHACRLAWRLMISQQPYDDRRYDQARHRRGR

SEQ ID NO: 353023 - protein, 355 aa, unidentified
MRQQAIQYLALDVHQATTVATVREQSGPVRMRATVATEARAILSLVRGLGSRVHVAFEEGTQAQWLHDLLQPHCERVLVCNVRGRSETTNKSDRIDADWLSERLRLGALKSVYHGSPSVGTLKELVRCYTNLVDDSTRVMLRVKALFRGRAIGTSGEAVYRPSQRAAWLARLEGRGARTRAASLLAQLDLLLELRAKARAAMIAEARRQPGWKLLRSIPFFGPVRVALVLAIIATPFRFRGKRHLWPYVGLAVVTRTSSEQEFVEGKLRRRKRAPLTRGLNRNHNRVLKNVFKGAANAAAAKAGPLKDCYDRCVAGGVREEMAKLTLARKLASIVLRLWKKGELWDPTKLTMQTT

SEQ ID NO: 353024 - protein, 366 aa, unidentified
MSEISRNLVCRVGVDLAKRVYQVHGVDGFEKLAVARSMSPDRFFEWCASLPPGCVVAMESCSGAHHVSRRLALMGLDPRILPAQHVGAYRVAGKRSKNDATDAAAICEAASRPHLHPVSVKTAAQQGMLAIHRLREGYKEERTALINRIRGLLAEFGLVFPQSPDALHSALPDVLEDASNELPGELRLALDRNLKHWGLLDAEMAWCEQRITQHARTDARAQKAAELIGIGPITASAVVATVDDFKQFKSAKQFGGWTGLAPSQNSSGGKTKLGGITKRGDVYLRTLLIQGAKSAVMTAHKRKDPISQWLVQLKERVGWQKAVVALANKNARILWCVMTRGERFDPHHLPTRHPVMSGVAHEPATT

SEQ ID NO: 353025 - protein, 372 aa, unidentified
MKKSNTTAQSPKRAAAREAGPKTIGMDLGDKTSRYCMLGAGGETVSEGSVGTTRKAMTEKFGGLWRCRVAMEVGTHSPWVSRLLSSLGFEVFVANARQVRLISESSRKNDRLDAQLLARLVRVDPQLLRPIRHRSEEAQEDLMTIRVRAALVEARTGLINSARGFAKALGERLPVCDTDSMGVEKLEGLPAALREGLRPLLEQVKSMTEQIQELDSTIEQIARTKYPETELLRQVSGVGTLIALTYVLTVEDRDRFQKSRDVGCYVGLRPKQSESGQSQPQLRITKEGDMYLRKMLVQAAHCILSRRGPDTDLKRWGLKLAERGGKNAKKRAIVAVARKLAVLLHRLWVGGEVYEPLRNSQAAASSKKKKAA

SEQ ID NO: 353026 - protein, 408 aa, unidentified
MRTVHERCCGLDVHKKTVVACVLTSTSKETRTFGTMTHELLEFVEWLEQERVTHVAMESTGVYWKPVFNLLEGHDLELLVVNARHAKAVPGRKTDVKDAEWLADLLRHGLLRASFVPDRGQRELRELVRYRRTLIHEKTRLITRVQKVLEGANIKLGDVASNVMGLSGRAMLKELASGNTDAAAMAELAMSNLRPKRQRLAQALEGTVAAHQRFLLRSQIELIEVMEKQIEAINAEVEQRMRPFQAALDLIDQIPGIAQHGAEQIIAEIGIDMSRFPTPGHFASWARVCPGTNESAGRRSKTGTGDGNPWLRSALIEAALGAVRAGRAHPNFFAARYRRLAGRRGPKRAQMAIAHSILIAIYHMLRDGTHFVDLGPEHWDQRHKESVARRSIRRLEQLGYKVTIEAVA

SEQ ID NO: 353027 - protein, 421 aa, unidentified
MDVAKLWVGVDWGTTSHQVCVLNFSGEVQENRSFPASSAGMTAMVQCLLERSKGEPGTVYVAIERPHGAIVELLIRHDFIVHSINPKQLDRFRDRHSVAGAKDDRRDAYVLAHSLMTDSWAFTTVQISQSEIIQLRELLRIDEDLRVDENGLQSRLREQLLRYFPEMLTLIADRADPFLWSLLELAATPEQAAGVKPEQVEAILKKFRLRRLTVATVMSAFQSPRLNVSDGTIQAAVAHIRLLIPRLQLVHQQRIEVGKKLEQLLTILTDGDEDQSQEEQGRHRDAAILQSLPGVGRIVLATMLAEAGTVIARRDLQGLRSLGGIAPITRRSGKQDQRLMRRACDSRLRYAFYHWGRTAVQRDALAKHHYSELRAKGHTHGRALRGVVDRLLKVAVAMLKANTPYDMQKRQRAKAIVGTAA

SEQ ID NO: 353028 - protein, 391 aa, unidentified
MFFIGIDIAKNTHEASIIDSFGKLVSESISFPNSVKGFEKLKNYISYFDIDCDNSIIGMEATGHYWLSLYSVLIDFGFNVVVINPIQSDAFRKMYIRQTKNDSVDSFIIAQIMRFGEFSESSFSNEDTFALRNLSRYRFSLVDECSDWKRKLVAILDQVFPEYSTLFSDIYGVTSKELLSKYPLPEDMLSISTSSLAELLSKCSKGRFGMDKAKEIKEVASNSFGIKFALKSFSFQIKQIINQISFLEEQIKEIEVEISSLISEMCPVITTITGIGYVLGAAIFSEIGDISRFEKASQLVAYAGLDVAVKQSGEFVGTQTKISKRGSPYLRRAIWLAAIVAAFKDPALSNYYQTLRNRGKAHGTAIGAVARKLTNIIFAVLRDNKAYIPNI

SEQ ID NO: 353029 - protein, 368 aa, unidentified
MPRLAIKRRFRKHTQENPMTVTHYIGFDVHKKHINFCAKAADGEIVEEGKLAAQRSVLRQWAAMRPEPWRGAMEATLFSGWIYDTLKPYGERLEMGHPAMMKAITAGKKKSDRIDARKIADLLRCNLLPSCYVATPEIRELRRLLRYRNLVVRESVRMQNKIAGLLMETGTPFQKEKLHGKKYFANLLKNLEEVPESVKDLLRLSRGAMEMFQATQKRLIQHLLANPTLSQRVERLASIPGVGEITALTWALEVGDPQRFSSSANVMSYCGLTAALRSSADKLQRGPISKQRNPWLQTALIEAAKLAPRWNPQLAALHARELERGHRNRATLAVARKLAAYLLAVDKSGQPFQLRPLAISTPALDKAG

SEQ ID NO: 353030 - protein, 365 aa, unidentified
MRIDIGVDLHKTQFTVYAQRGEKSEVNGQYPTTEEGYVSFLRKIGQWKRSGHDIRIGVESTGNTRYFKHRMEEKGYSVVVINTMKFKVINESVKKTDKHDAATIAEFLSKDMLPESRLCSESSEQLRRLLKVRSTLVRTRVTVKNQIHGLLVSLGMEDTKASLQSKRGRQKILDTLAREGNGLVVQPLFETIDRLTENVKIIENEIEKLVAGDKMVELLETIPGCGPVTACTIRAYTDDIKRFSNHKKYASYAGLAPWVQCSNETEHYGRITKRGPEELRTAFVQLVVGIRRSRQSASWRLMERYEAMKTVKGSGKSIIATARKLSKIVWFMLTREEAFNVGLMTDDSLEAKIESMRRTLNKMSA

SEQ ID NO: 353031 - protein, 315 aa, unidentified
MTENTSPVYAGLDIAKASLQLHFQNRQHALPNTPAGHKKLLALLDPCPQAHVVCEATGGYERPVVAALQSAQRPVSILNPGHVRHFALSQGSRAKSDPLDCALLTAYGQAHKPAPAPKPNAALAQMRAFVDWRSQLKEQLVRARQQGEHATDVFILKQQAKLCKHLEAQIATVEKELAQALSRSAPHAQQVKALDALPGVGFITAISVLCHLPELGRINRQQVAALAGLAPWTRQSGPWEGQRHIGGGRAVVRRALYMSAVVLAKQKQTTLGKFYRRLRDQGKPAKVALTAVMRKLLVHMNQTLKEQAGHAPEKN

SEQ ID NO: 353032 - protein, 347 aa, unidentified
MRFYTTQHPFYCGIDLHARMMYVCLLDQSGEILVHRNMKTDPDTFLKAIAPYRQGIVVAVECMFTWYWLADLCADEGIPFVLGHALYMKAIHGGKAKNDKIDSQKIAALLRGGMLPQAYVYPAKMRATRDVLRRRMHLAHTRAELLAHVQNTNSQYNLPAIGKKIAYKANREGVAERFADAAVQKSIEVDLALITYYDELLRDVELTIVNTAKHHDPNTLYLLQTVPGIGKILSLVLLYAIHDVNRFPRVQDFVSSCRLVKCARESAGKRYGTSGAKIGNAHLKWAFSEAAVLFLRDHPAAQKHLARLEKKHDKGKALTILAQKLARAVYDMLKRQGAFDKDKFFQR

SEQ ID NO: 353033 - protein, 347 aa, unidentified
MDATTIAVDLAKHVFELATTDRSGRVLERRRLNRAQFARFLIGHPPTHVVMEACATAHHWGRVAQDAGHRVSLLPPQYVRPFVRRQKTDRTDVAGLLDAQRSDHLHPVPVKTVGQQEVLALHRVRQQWIATRTARINALHGLLGEYGVCVRPTVRRIGPVVGAVLADAEALLPGRLRRALQALLEEIAALTARITGLDHELKDLAADDATMTRLQTIPGVGVLTATAMVGAVAHIHAFRRARRFASWLGVTPREHSSGNRRRLGGITKQGDTYLRTLLTQGARAVLFGARRAVLGGRALPALQAWAVSLAERRGVHRAVMALANRLARIVWAVWSRDVAFAPRTQAA

SEQ ID NO: 353034 - protein, 326 aa, unidentified
MEKFDVNFIDERGKERSKTVKNSLVPISKFLESLPCDCLLVAENTGVYGDLLLYLCNQVGVSISFMSGYTIKHSLGLIKGKSDPVDARRIREYGERFSDKLAYTVYEGETMKELRELYVLREQLVKSRKALTTSETGRKRQPVQSVSVHKHIESVLKTLDAQIAGIEKEMIADADLKQNYELVTSIKGIGQVIATDLLIKTGNFQVIDTARKAASYAGVCPFPNASGTMVGKSKTSPFADKKLKSLLFMGARTAVKHNKEYNLYYRKKQLEGKPHFLIMNNVSNKLLRTVYSIVRSQTPWSETHICLDPRESKQSIKITSSEKKVA

SEQ ID NO: 353035 - protein, 347 aa, unidentified
MTIVEDARVITGGVDTHADMHVAAALDPIGGLLGVEEFPVTPAGYAHLLGWLGGFGTAGLVGIEGTGSYGAGLARHVAAAGIRVVEVDRSDRQDRRRQGKSDPLDAVSAARAAQSGRARGAPKGRDGAVEAIRALMVAKRSARSERTQTINQARSLIVTGPDDLRARFAGHTVAALVSELAALRPRPGEAVGYATRIAVRELGRRAEFLDGQLARLDELIVPLVTSRAPGLLALHGIGPDTAALLLIAAGDHPERLRSEAAWAHLCAVAPIPASSGKVTRHRLNPGGNREANHALWRVVITRMSSHAPTRAYVERRSEQGLSKKEIIRCLKRYVAREVYRHLRTAAG

SEQ ID NO: 353036 - protein, 389 aa, unidentified
MEARTLNHLPTAASHDGAVRCLLAIELSKKSWIVAVNTPLSDKISRHTLQACDWKGLLELIERIRTRVSQTFSRPVEVISCYEAGYDGFWLHRLLEAHGVRNFVIDPASVQVDRRARRVKTDNIDVGRLLRSLMAYLRGEPKVWSVVRVPSITEEDDRRLHRERDRLINERVQHVNRIKGLCAVHGIYDYEPLRPNRLARLEQLRAAGKRELPPRVKAEIARELQRLELVLNMIKTIEAERDAIASAGKSSTHANAKKIQNLTRLKSIGPEIGTTLVGEVFYRQFNNRQQLGSYVGLTPSHFQSGPLSRDQGISKAGNPKARTVMIELAWLWLRHQPNSPLSIWFRERVGTAKGRIRRIAIVAVARKLLIALWRYLETGVVPMATVLKV

SEQ ID NO: 353037 - protein, 335 aa, unidentified
MDLHKTSIVACYLEEDKFQHKSFKIEEIAKFKQSLLLTDNLAFEATTNSSWFYRECKDLVARIVVVNTSEFGVIANSTKKTDKNDAKTLAKYLAKDMLPEVRVKTQEQQEIETLFNARKLLTKQATMLKNQIHGILLGQGVKIKPSELDSEVGLNRITKYGAESSINLALIALTDLLKSLAYKIKEFDRKLSQLGPMLPGFANLKSIYGLGNNTIALLLATIGNIKDFASPNKLASYLGVVPRVRNSNQCVKHGTMTKRGNSLLRGNLTMCALVMIGKNKRLAQFYERIKIKGGHKKAIVATTHKIVKIIYYALKHNWFFSDFCLEKRKLLAITW

SEQ ID NO: 353038 - protein, 428 aa, unidentified
MKNRNIEKIEAITLSTLVVGVDIAKVTQWARFVDYRGLELGKALKFHNDKNGFDSILASIETICKNKRFDDVIVGMEPTGHYWKPLANYLIMHGIKVVMVNPYHTKRAKELDDNSQTKSDKKDALTIAKLVRDGRYYEVYMPQDIFAELRVLTNSRISLMKRHNALKNTITAVMDEYFPEIVKVFKNPLKGKASMQILKSCPFPSLILELGVDGVLAEIKKAVKKTVGRKKAEQLIEIAKTSIGVGYGLVSAKLKLELMIEELELLTKQLAKIETSMDLALVDTGYGEIILGIPGIGVVTAASFLGEIGDPMRFDNPRQISKMAGYNLVEDSSGKSKSGTAISKRGRKSLRSILYQMAIIMVAVNAEMRELYEYLKTRQNNPLKKKQALVVISKKIITVIYNLVKKQTEYKAELVLGEFRKNQIKQAA

SEQ ID NO: 353039 - protein, 317 aa, unidentified
MSGSGEIFVGIDVSKGSLDVGRLPESKIKTYKNDEHGIAEVLSFLKEIKPFLIVLEATGGLEVPLAGALATAGLSVVVVNPRQVRNFAKATGRLAKTDSIDALVLAEFARSIKPEARPIKDHQLQELSALVSRRHQIVDMLVAEKNRLSSAPRCVRESIKNHIGWLEKRLKETDTDLSKKVKSTPIWRENDKLLQSASGVGKVLSLNIMTDLPELGNLDRKKIAALVGIAPFNCDSGKYKGKRRIWGGRARLRRVLYMATMSAIRFNPVIADYYQRLIKAGKIHKVAMVACMRKFITILNVMMRDRTYWRDLSAKIS

SEQ ID NO: 353040 - protein, 343 aa, unidentified
MSVIIGVDPHRATHTAVAISSSEHELGRKKVRSGAHQAEQLLDWAASFETRTWAIEFAGGLGYLLAQQLVAAGETVVDVPATLASRVRVLATGRSNKNDPNDAVSVGVAALRSPGLRRVEAAGHSEVLRLLAKRNTDIGNHRTRVVCRMHALLAELAGGGISKEINASDVDRFLATLAPATPVERARYGLAVELLEDIRRLDAQLKASHQRIRVAVRASGTSVTDLFGVGPIIAAELIGYTGDVCRFRNRDQFAAYNGTAPVEFSSGGRIVHRLSERGNRQLNHAIHMAAICQLRQPHSDGRAYFERKVAEGKTNKEAIRALKRQISNAVYRHLVADARHTAR

SEQ ID NO: 353041 - protein, 361 aa, unidentified
MKKPTQHLIAEVPRRSSRVGMTIGIDLGDVWSHYCTLNEDGEVVDRGRFRTSPSGVEKWFTDLPRVRIAMEAGTHSIWISEQLQELGHEVIVANVRELRAISHSDRKSDPVDAEKLARYARLDPKILRPIAHRTVAQQEALTLIRARNLIVRLRTAAVNAVRGLAKPCGYRLPASSTLCFAKRCVAVLPPGLAQALGPVLEQIAEMTKKIKHYDRLIKRLTETEYPETQALIQVYGVGQLTALTYVLTLGNKERFQRSRDVGCYLGLRPKRSQSGDRDPQLGITKAGNIYLRTLLVECANHVLGPHGRDSTLRQWGLHLASRGGKQSRNRAIVAVARKLAVLLHRIWITQEPYIPFYGVAA

SEQ ID NO: 353042 - protein, 398 aa, unidentified
MTESSDYESVQVFIGVDVGKDTHHAVAINRSGKRLFDKALPNDENKLRSLISDLKQHGQILLVVDQPATIGALPVAVARSEGVLVGYLPGLAMRRIADLHAGEAKTDARDAAIIAEAARTLPHALRTLKLADEQIAELSMLCGFDDDLAAQTTQASNRIRGLLTQIHPALERVLGPRLDHPAVLDLLQRYPSPEKLASLGEKKLAAQLCKLAPRLGKRLAADIAQALAEQTVVVPGTNAAAVVLPRLALQLITLRKQRDEVALAVEQRVLAHPLYPVLTSMPGVGVRTAARLLTEVACRAFASVAHLAAYAGLAPVTRRSGSSIHGEHPSRRGNKALKRALFLSAFAALRDPLSRAYYTRKMSQGKRHNQALIALARRRCDVLFAMMRDGTFYTPQAS

SEQ ID NO: 353043 - protein, 340 aa, unidentified
MKLYGAIDLHSTNNVAVLIDEEDKIVYQKRLPNDLALILKDLSVYQPRVEGMVVESTYNWYWLVDGLMEQGYKVHLANTAAIQQYEGLKYTDDHSDARWLAHLLRLGVLRQGYIYPRTERPVRDLLRKRSQLVRHRTTHVLSIQNLLTRNTGSSMKANQIKGLDVQQVDRLLPDGDLALAVKANVAVMSSAAEQIEILEQRVTELVELRAQFRFLKTVPGIGEILALTIMLETGEIGRFASVGNFASYCRCVGSQKISNGKKKGQGNTKNGNKYLAWAFIEAANFGIRFSATINGFYQRKKAKTKGVVALKAVAHKLCRACYYIMRDQVPFNITKAFGQK

SEQ ID NO: 353044 - protein, 345 aa, unidentified
MEHVAIDLGGRESQICVMSAEGELVLEDRRPTTSLKKWLGKRPPSRVVVESCAEAFGVAEAARALGHEAVVVPASLVRSLGVGSRGLKTDVRDARNLAEASCRMRRLPSVHIPSEASRQRKTVCGVREAFVSTRTKLINCLRGWLRTQGAGPVRSGGAETFPRRFLEHAKARQLEIPPAIRRVVETIMTISLQIEAADAELEKVASEDPVCRRLMTAPGVGPVTAVRFAAAIDDVSRFGKAAAVQSYFGLVPGENSSSDRRKVTGITKAGASHVRWALVQAAWSARRWRKGDALVQWAQQIEERRGRHIAVVALARKLAGVLYAMWREGVDYDPKRGACPVEPTS

SEQ ID NO: 353045 - protein, 366 aa, unidentified
MRKVMAGMDLHGNNVMVGIVDDQGARLQHRRLACELPEIIEFLAPYKAELESIAVESTFNWYWLVDGLRAAGFPVVLANPAKIDQYSGIKHADDKNDAYFLAELQRLKILPTGYVYDPELRPVRDLFRRRMSLMRQRTTLFLSAKSLHQRTTGRALELRRLKAMEPEEAAALYTHPANQLIAQIQKEHIDSLDQSIRQIEKAVLKVALQQPYYQRLQTIPGVGIILGLTISMEVGNVDRFAGPGQFASYCRTVDAKRISNGKTKGDNNQKCGNKYLAWAFVEAAHGARRFDATCRRWYDRKAGKKCTTVATKALACKLAKAAWYVMAKGTEYQAGKIFPGLTEPKAEEISGEQASASKGVGPNPED

SEQ ID NO: 353046 - protein, 355 aa, unidentified
MNQEKYIGMDVHDATISAAVKNAQGKLLMECVLETKAATILEFIQGLRGTLALTFEEGILAAWLHDLLKPHVSRLVVCDPRKNALMRDGNQNDRVDARNLAELLRTNQVKAVYHGKHGTRALKELGRSYLTLTKDSTRVMNRIKSVYRSWAIPCAGTSVYSRRRRAEWLAKLVEPGVRMRAEHLYQQLDSLEPVRQAARRELLGESRKHAAVKLLRQIPAIGPIRSALLVALLQTPHRFRTKRQLWAYSGFAVQTYDSGEYRMVRGKLQRNRERITVRGLNRNHNHDLKNLLKGAAISAIQRPGPLQDFYAALVEKGMRPSMARLTLARKIAAITLIMWKKGVSFDPKQLQRQAA

SEQ ID NO: 353047 - protein, 369 aa, unidentified
MDDIIFVGLDVHKATVCIATAEGSRGGEVRQLGIFENRAEILSKVVSRLSKGGRRLSFCYEAGPCGYGLHRLLTGYGHECVVVAPSLIPMKAGDRVKTDRRDALMLAKLHRAGELTAIWIPDAAHEAMRDLVRARATAVRVLVKARQHLQGFLLRHERIYRGARAWTLAYRRWLTTVRFEHPAQQIVLQDYIHAVQEAETRRDRLTQQIEELLPNWSMAPVVAALQSMRGVALVVAVTVVAEVGDFRRFANPRQLMAYLGLVPSEHSSGSSVRRGGITKAGNALARRVLIEGAWTYRMSARVSRKLHDRLEGLPAAVRDIAWKAQLRLCARYRRLAATGRPKVVVTTAIAREMVGFIWAIARLAQPALV

SEQ ID NO: 353048 - protein, 441 aa, unidentified
MPRFVGCDVHKKQITVCILDAEGRVVARHRIACARDALVCFAERHLQRDDRLAMEATTHTWAVVELLEPCVAKVVVSNPMRTRAIAFAKIKTDRIDARVLAELLWAGYLPEVWQPDAATRRLRALTHRRAGLVADRTALKNRIHATLATRLIPVPYALLFSDAGLAWLAEIGIDPDGRQALDSDLRLLAALKAEIQQLEDRLAQLAYPEEPVRLLMTLPGIDFTVAQGILAAWGPVARFPDADHAAAYLGLAPSTRQSDERCYHGPITKQGNSHARWLLIQAAQHLDHHPGPLGVAFRRLAKKKNRNVAVVACARKMAVVAYHMLRNHEPYRYAIPATTQQKLARLRVRATGKKRRTGPPKGTAPSVNQGTGRSVRIVPSVHQVYASEQLPPATPLDTLPPGERRHLRATTSLPYVEKIQQPQAKPRRSTAQGGKSRLTTS

SEQ ID NO: 353049 - protein, 362 aa, unidentified
MLKYSLGLDISSKEIHCCLSTIDSSQKVSIKGSRTIANTFKGFKDLEDWVIRHRKQKEIPLVICMEATGVYYENCAMYLSKAGFPVSVLLPNYAKRYLQASGVKSKNDKIDAQGLAQMGAEKSLELWEPISEFYYSLRLLTREIENLQEQKTVVINQMHALQHAMHQNKVVNKTLLNRLKLIEKQLEDLEMAIQEHIDSNKEIAEKVRKICKIKGVGIRTVATLIAETNGFKLFKNARQLVSFAGYDIVENQSGSHHGRTRISKKGNSHIRRILHLPAFGVVRWKVGPFEDLYERTYAKHGIKMKSYVAVQKKLLVITYSLWKNDQEYDGKYKNKYNKQEEKELSIQEMAIVGEFQQRLLSK

SEQ ID NO: 353050 - protein, 345 aa, unidentified
MEHHAGIDVSLEWSSVCVVDASGKIVREIKVASEPEVLVEFFKGLSLPVTRIGLEAGPLSQWLHAGLTRAGFETVLLETRHVKAALSAMSIKTDRNDARGIAQLMRMGWFRPVHAKSVGSREVRALLVARKQLLSKLMDLEASMRGILRGFGLKMGVVTRKGFEARVRELSAGQAMLERVTSAMLEARAALWREFEQLHREMLRIVRDDEICRRLMSTPGVGPLVAITFKSAIDDPGRIAKSKTIGALFGLVPKKYHSGERDVSGGITRTGDESVRTALYEAANVMLTRTTRFSSLKRWALEVAKRRGLKRARVALARKLGVVLHRIWIDGTTFRWTKHNPAIAG

SEQ ID NO: 353051 - protein, 343 aa, unidentified
MSINTMIGVDLAKSVFQVHGASTNGEMRFQRKLSRQAFSTFMAQQPPASVVMEACGSAHYWARVLSGFGHEVRLIAPRYVRPFVKRQKNDAADAEAIVVAAQRPEMRFVEPKSEAQQSAAILYRSRQRLVRQRTETVNALRAALYEFGHVIPQGIRHVGRIRAILEAPHSDLPALMREECLAMLEQLAVLNGWIDAKTAKITELAAATPVSKRLQTMPGVGPLVAMAVETFAPDMTSFHNGRDFAAWLGLVPRQFSSGGKERLGRVTKAGQADIRQMLIIGAMSRLNWMGRKAIPESSWLARMMARKPRMLVAIALANKMARQIWAMLTRNEDYKNPMPVMAA

SEQ ID NO: 353052 - protein, 341 aa, unidentified
MAVAGGLDLHRGQLTFDYVDTGTGESWRGRICPADRESLRGWLRRFHGVPDVEFAVEGCTGWRYVAEELQRAGITAHLAEPAETAGLRGRKRRAKTDWADARHLRDLLLDGRIPESWIPPGHVLEARALVRLYKDLLEERTSWQQRVHATLFHQGIPVVPKLGTADGQQRLEAAELSAAGRRAVQAGLRQIERLTQEMASLRRELARLSSRQPGCRALRRAHYGIGGLLSVAVWAELGDCRRFSSSDDAVRHTGLDVTIYDSDGRRARGHIARQGPPVLRWALYEAALYASRPASPDYACYCGVRDRIDGQRALLSVARKLARRCYHTLRDLGEDALAPAA

SEQ ID NO: 353053 - protein, 342 aa, unidentified
MENPVFVGIDVSKARLDVALRPGNKDLSVTNNQSGLAALIKRLRTLQVNRVVLEASGGYEIVAASELAAANLPVVVVNPRQVRDFARATGRLAKTDKIDAEVLAHFAQLIQPQIRPLPDAQSRELMALVARRRQVVEMLTAEGNRQGRAVAALTRAIAAHVRWLRKQLGELDVVLEHAIRRSPAWCEKARLLRSVPGIGNVTVTTLLAHLPELGTLNRRAIAALVGVAPFNHDSGKLRGTRAIWGGRAQVRAVLYMCTLVASRRNPVVQAFYARLLAAGKKPKVALTACMRKLLVILNTMLRDQTPWAAKTAILPRALPAALSAASGQRRRRGHQGTLLGIK

SEQ ID NO: 353054 - protein, 411 aa, unidentified
MQVVYARCAGLDVHKESVSACVSVCEGEDKRQETRTYGTFTGDLLALADWLKEQGVTHVAMEATGVYWRPVWAVLEGQFEQMLVNPHHIKAVPGRKTDTRDCEWIADLLQHGLLKGSFVPPMPIQDLRDLTRYRAELRQSQNRVANRIQKFLEQANLKLSSVASDTLGLSGRRMLEAIIGGQDDPQQLARLAQGKLKRKIPQLEQALAGRVRDHHRFLLAEYLDEWKALGERIQRIEREIDQRIGPFEEAVALWQSLPGVDRVTACNLVAEVGVDTKPFPTAQQLASWAALCPGNHESAGKRMSGKTRDGNKWLRRSLCQAAWAVTRKKDCYLSAQFKRLAARRGVKRAVMAVAHTMLVIGYHMLKTRQGYHELGGDYLERINKHQLQRYYLKRLQRLGLVVTIETAIATA

SEQ ID NO: 353055 - protein, 343 aa, unidentified
MNTKVLGIDIAKNTFQLHGVDGPGKAVLKKRLSRNQLAAYVANLPECLIVMESCGGANYWARVFQSSGHTVKLISPQFVKPFVKTNKNDANDAEAIVEAASRPSMHFVPIKQVEQQDIQSIHRVRSRIVKNRTALINEIRGLNLEYGITVAPGAARVKRSLCAIIADNKNELTPLSRECMQDLYDELVDIEARLKNLDKKIRQLCRQNETCCRILKIPGVGELTATAMVAAVPNAKEFNNGRHMSAWLGLVPRQSSSGDKRVLLGISKRGDRYLRTLLIHGARSALSHYKNTDNDYGRWLTGKRARLSFNKAAVALANKNARIIWSLLNTGEEFNCNVQTDAA

SEQ ID NO: 353056 - protein, 348 aa, unidentified
MILIGCDFHPSWQQVCWLDTETGETEEHKLVHTPGEAEKFYRRFAAPALIGMESTGNCQWFVEMATAAGHEVWIGDAAKIRASDVRQQKHDRRDAALLLQLLVEGRFPRIWTPSSQQRDLRQLLIHRHKLVRLRAQVKNELQHLALNQGVQKKRRLWSAAGQKLLREIPLKPWAGRRREDLLKLMEMLDQQIQLLDQAVQDAAWHDRQARLLMTQPGVGPVTSLAFVLTMGDVSRFPRGKQVASYLGLIPREYSSGGHQRLGSISKQGNRFMRMLLVEAAQVAVRCDPQLRSEYLHRCHQKPKGVAKVAAARKLAIRLYWMLRTQKPYPEIVRIESSSRVPLVVRHGG

SEQ ID NO: 353057 - protein, 339 aa, unidentified
MKITTIGLDLAKNVFHVVCINAQGKEVKKRMLRRNQVRPFFVQLPPCVVGMEACAGSHYWGRQLRALGHNVKLIPPQYVKPYLRGNKNDYNDARAIAEAVTRPEMPTVGIKTVEEQDMQALHRMRSQCVRDRTALSNSMRGLLGEYGIVFTKGAATLRRKIPEVLEDADNGLSLRFRHCLARRYEQLVELEGHIAFYTKELNRLSEQDEACQRLQTVPGFGPIVASAFRSVIGDGRTYARGRDAAASIGLVPRQCSSGGKNVLLGISKRGNKYLRKQLIHGARSVVLQAANKEDSLSCWINRIRKERGWNKAVVALANKMARIGWAVLRYRSQYQPASR

SEQ ID NO: 353058 - protein, 417 aa, unidentified
MEDNPSASPCRYIALDIHKYYSVVAGVDREGKEILSARRVEHVDLENWAIKHLLPKDRVVIESTTNAWHVYDLLEPLVGEVLVANPIKVKQIACARVKTDKKDTFILARLLAANLVPTVWVPPKHVRELRQLISHRRRMAGMHTQVVNRMHSVAHRHHLNHSKGKDFQPKNTLWQRDESLSRLEKMQLELDMETREHLEKQIERMTRELGRMSHEEPWASDMLYLMQIPGCGVVTGMTILAAIGDITRFETPKALASYSGLVPGLEQSGVKLRGKGVTKEGRRELRWVMVEIAWRAVKADPHWKKYFESLQKRMHKNQAIVAIARHLLTMVWYVLTRHEPYSHYTPERIAYKYLTWAWALDKEQRQGMTRPQFARHYLMRLGIGDELERVALNPKFPYRLASTEEVLALRPELLPPE

SEQ ID NO: 353059 - protein, 448 aa, unidentified
MDWLASRCGLRKQLTLELRLPTCFQQALYLLDRRKDDMHYKAKHIYIGIDLHKKTHTAVVVNCWHEKLGEVTFENKPSAFPELIAFVKQFKKRGITPIYGLEDVGGYGRSLAVYLLEQKQQVKEVNSALSYAERKSNPIVQKSDSWDAECVAKILLNKLDILPDANPQDVYWTIGQLVTRRNGLIKALTSLKNQLHMQLSYHYPSYKKFFSELDGKCALAFWHKYPSPYLLKGETVESLAHFLRLTSNNACSTRKAEQLLAWIQADGDTTRTYQEQRDFLIRSHVRDIRFNKKEIARVEGELHNMMKQLDLQLETMPGIDLVTSSALVAEIGDIIRFASADKLARFAGIAPVKMGSGGKHVNLKSRQGNRVLHGLFYNLAVQQVQVSKGSKKPRNPLFYEYFNRKKEEGKTPTQALVCVMRRLVNIIYGMMKHKTAFRLPEQVEKQAS

SEQ ID NO: 353060 - protein, 375 aa, unidentified
MGDYSEAFVGLDTSKLTNAVAIADAGRGGEVRFLGEIENTPSATAKLVRKLSTKYKRLTFCYEAGPTGYGLHRQIKDLGFECVVVAPSLIPKRPGDKVKTNRRDALSLAKLLRADELTAVWVPDGRHEAMRDLTRARETAMLDLRTKRQHVSAFLLRLGRPYPESRKTWTKAHMSWIASQTLEHPQQRLVLEEMMLAIRQAQERLQRLEQAIAAAVGEWSLAPVVTALMAMRGMDLISAATLLAEIGDLSRFQTPHELMAYLGLVPSEQSTGEDVRRGPITKAGNRRARRMLVECSWSYQHPPRVGQAKQPKVDAAPPAVREIAWKAQCRLYRRYRALIRNGKLKTVAIVAIARELAGFIWAVARAVTTARAAVA

SEQ ID NO: 353061 - protein, 344 aa, unidentified
MVVLGTDAHKRNHTVVAVDEAGVEIGSVTAAATPEGHLKLVRWAARWPERRWAIEDCRQLSRRLEADLLGVGESVVRVPPKMMAGVRRSARTRGKSDPIDALAVARAALREPDLPVAQLDGPSRELRLLVDYRESLVKDRTAAQNRLRWRLHELEPGYDPPAGSLNRYKTLDEIEQLLTAHTSMVAELGRREVVRIRELTREANQLERDIGRRVMELVPSLLKIPGCGGLTAAKLVGEAADITRFKNRDAYAMWAGVAPIPVWSANNQRFRLNRGGNRQTNAAIHRIAITQLRIHPDAQAFIKRRLETGSTKREALRLLKRKLANVVYRTLLADVQQPALTTAA

SEQ ID NO: 353062 - protein, 359 aa, unidentified
MTENTNVESPLLWIGVDVSKKTFTAAAMLPWEEKAVYPKDCADFENNRGGDRRFCKWLGELEKEFGGPFGVAMEATGPYSIRLHDNLKRLRPGLHVSICNPLSVSYYMRSLGTNKTDRADAAIIARFAAHRRPARYAEPSADQSELRRLSRDRGFLVDSRTEYRNRIECESDPSSRRRMRSVVATIDKQINDIDAEIEKYLLTKASLECRQEIELMQTMPGVGRLSAAIIYGELGSLARYSRKQLSAMSGVCPTTIQSGTSLHKGGLSRRGSRWLRRILYLDSQQSIARSPAMAAFHGRMLSKQDSSKMSARVACMRKLLLVLRGMVVSGKPFDPNHISTRPTFPVKIINDQEKSEVTA

SEQ ID NO: 353063 - protein, 345 aa, unidentified
MTKVKLEGQDSKSNGIRLSEYENYVGIDWSKTNMAIARLTRSGVQPKVFERPAEIEELKAYLRGLKGKTIVTIEETTVAHWLYLELRDAVDKILICDPYRNKLLSDGPKTDRIDAVKLCELLRAGLLKEVFHTDDELYELRRLVSAYDDLVANGVRTLNRRYSLIQGLGTSVESSSTKLIQKSLEKGIEVYQATKEEYEKKFEWWCKRNKLLKILWDINGIGSIGAVKILATVIDARRFPDCGHYLSYCGLVKLEKISGNRSYGKRNPRYSRVLKSVYKTAALVAIQGQNPFREYYDYLLGKGVAVHNARNAVARYIAKTTYGMLKSGEKYEPYRWRKQEKEVVK

SEQ ID NO: 353064 - protein, 343 aa, unidentified
MTRFVGLDVSQKLTSICVVDEAGRRLWRGQCQSEPEPIERTVRRHGGDDANIGIETGPMTPWLVHELRGRGLNVVCLDARHASAALKMQMNKTDQNDAEGLAQIMRTGWYRSVHVKSLDAHRTRALLGARAQLVGMTTRLSNHIRGVLKTFGMLPGAMRGAPFDKRVEVLLADRDEVAAVVRPMLTAWRQLREQIAVFDKAVRVLAKNDPTCRLLMSVPGIGVVTVLAYVNTVEDPARFARSRSVGAHIGLTPRQYQSGEVDRSGRISRCGDTLARTLMYEAAVVILSRVKKASGLKDWAQAIARRSGIGKARVALARKLCTILHSIWRSGQPFRWSAQQAGA

SEQ ID NO: 353065 - protein, 366 aa, unidentified
MQKSSTMRRTASKIFKERQLTMGLDLGDRWSFYCVLDESGKVILEEKLATTPEAMKHTFARMPGSRVALETGTHSPWVSRLLTQLGHEVIVAHAQKVDLITKSTRKDDRHDAKTLARLARIDPELLGPVRHRSAQAQIHLAAIRARAELVRARTALINAARGLTKSYGERLPKRGAQQISRELGAGLSTELREVLEPLFREIESLNERIKEYDRRIEKIAKETYPETALLKQVKGVGDLIALTYVLTIEDPHRFPKSREVGCFLGLRPGRRNSGESEPQMHISKQGDEYLRTLLVQGAHYILGPFGEDSDLRRWGRKLAERGGKNAKKRAVVAVARKLAVLLHRLWVSGEVYEPLRNSQKAMRAVA

SEQ ID NO: 353066 - protein, 342 aa, unidentified
MQNMMIGVDLAKNVFQVHGASQTGEVLYRKKLSRKQFSAFMALQEPSLVIFEACGSAHYWAREMEALDHEVRLIAPQYVRPFVKRQKNDAADAEAIVIAARQPEMRFVEPKTIEQQSRAAVFRGRERLVHQRTADVNALRALLYEHGHVFPAGIRHLNRMTALIEDEISGLPMLIREECKDLLAQIAEKTARIIERTVKLKTLAAQSDKARRLQTMPGVGPLTAVAVEAFGPDMAQFKTGRDFAAWLGLVPKQHSSGGKERLGRMTKAGQADIRRLLIIGAMSRLTWLGRRTIPAGSWLSRMLARKPKMLVAIALANKMARQIWAMLTKNENYRDPALAVVA

SEQ ID NO: 353067 - protein, 312 aa, unidentified
MEAKFVGIDVSKATLDVDCLPVSTPRQFSNDASGIAGLVEWLVGSGVDRIVLEATGGYEVAVASALAAAGLPVVVVNPKRVRDFAKAQGILAKTDRLDARVLALFAQQIAPPVRALPDAAQRDLAELLDRRHQLVLMRAQEQARLATVLPVARSDVKQHIAWLDKRIGKHEGMLLKRLRANEIWDAKVTLLDTVPGIGPVNLFTLVGRLPELGTLNRQQIAALVGVAPFNDDSGKRRGQRYIRGGRADVRCALYMATLAAKLWNPVIAQMYDRLIAKGKPFKVAMTACMRKLLTILNAILKSKKPWENRVTT

SEQ ID NO: 353068 - protein, 383 aa, unidentified
MDASHFEVEVRGVSLRRKWTLRADGIKVPKVEGVQSSQATGGSDMNRIVVGVDIAKRVFQLHWVEPETGEIVALQLKREKFLEHFANRSRCLIGMEACGGSQHWARSLQKLGHEVKLLSGRMVKPFVVGNKNDAADARGIWMAVQQPEIKAVAVKSEEQQAVLALHRMREQLVKFRTAQINGLRGLLTEYGEVMPQGRAGIKRDIPGALGRLSDRLPAIVIETLREQYARLSELDEQISQIERRLRQWQREDSATQRIAAIPGVGLLSATAAVATMGDARAFKSGREFAAWLGLVPRQTGTGGRVRLLGISKRGDKYLRTLLIHGARAVLTNSKSPPEWLTELMKRRPKNVAVVAMANKMARTIWALLAHERAYQSGYVSRPA

SEQ ID NO: 353069 - protein, 338 aa, unidentified
MKEYYASIDLASRSSWFCIVDSAGNKQLDRKVSNDPQRISRAIRPFLPDLTAVVESTFNWYWMVDLLQDSGAEVKLAHPLYLKAIAYAKVKTDQVDAHTLARLLRMHYIPEAFIYPRELRPTRDLLRRRHRLVNLRACMYRDLQVQFMKHNVVIGRNTIKQIDGRHLRPVLPHTHDRRGALALFHLIDVLDIEIAELEKQVRASVYHHRPVVLPKTIPGVGRTIAPTIYYEVGQIHRFASAKAFASYCRLAPTIAQSGNVTRQGKNRKQGNPRLEWAFSEAAHMAIQRYPAIRDYYNGLVKKKRKRILARSIVAHKIAVAAFHVFKEEEPYRPGILPS

SEQ ID NO: 353070 - protein, 391 aa, unidentified
MNDVNGSVAYGGMDVHYKFSNVTWRDGVGEVVRRERLDHRDRAKLRAQLGRWPSGTPVVLEASFGWGWISDELEWAGLEPHLSNCYKVEQMRKARGLAKTNEKDADLLSLLPAEATRWWEVWRAPPSVRDRREWMRHRAGLVAVQTETKNRIHALFHRHGVFYEETTDLFGGRGRRFLQTLARDGRHAGGVLPPGALETLRGLMRLLVHLRAELATVAWHLHRRLVRDPLVRRLGGIPGFGPILSHTLEAEIGDIGRFRHHRRLASYACLAPWSKDTGEADPTRAPLGRHLGDRGNRTLKWAFIEAAHGAVRHGGRWRVMFDRATQGGKKNRGRGYIQVARELVKVVHLVWSRGVDYCETPPPRPGSRGGRRRRQTSRPGTGQPSRAMVPA

SEQ ID NO: 353071 - protein, 467 aa, unidentified
MIHFERLSRKEKTKLLRSIAAEDPGLDIVHPKAAGIDVGNSAHYVAVSPKLDQEPVRKFGCFTQDLQRLAEWLVSRGIETVAMQSTGVYWIPLYDVLEEYGIRVFLVNARHTRNLPGRKTDVQESQWLLKLHTYGLLNNSFRPPSQILTMRTYWRLRAQHVAEVSTTIQRMQKVLTEMNLQLSNVISDISGVSGMAILRAIVSGERDAQRLAALCDPRIRASHEQIAKSLEGNWRAELVFVLAQQLRNYDHYLEQIRLCDQRLEAHIATLPTRTDPVSTQAEPSPAKQRAKRSKPKGHVPQFQLAAHLNRIAGIDLTLIDGIDVMTAQTIASETGFDMSSWKTEGHFASWLGLCPDNRISGGRVLAKGTRHVVNPVATALRMAASTLLKSQSYLGSQYRRLRTRLGAPKAITAMAHRLARLVYRMLKYGRGYVDKGADFYEQKYREQQILILKKKAAALGLQLMATP

SEQ ID NO: 353072 - protein, 387 aa, unidentified
MQKPHDNSKASPAAFVQDNTLIAVIELSLSNWLVAGLIPGVSREPLKKLEPNPEDLLKLLHGWRDEAIKAGRPITRIAVAYETGRDSFWLARWLRERGIDAHVIHATSVAVSREHRRAKTDRLDTAMLKRGFLGWLRGERGHCTVAIVPTMEEEDAKRPHREREGLVHEQTRAVNRMKSALIQFGVRNFNPKLRKASVKLETVRTPEGKSLPPNTIAALRRDMERLKIIKEQIKAIEQARLQQFEQKPEALANRMVYLLVRIYGLGLETADLLAHELLSRTLRDRKAVARYAGLTGSPDESGSKRREKGLSRSGNARVRKIMIQLAWRMVKFQPDSALVQWFKQRTESAKGSRKPMIVALARKLIIALWRYANDGVIPEGFRLHSAA

SEQ ID NO: 353073 - protein, 347 aa, unidentified
MLIIGCDFHPGFQQVAIFDNQTGEYEEKRLAHREEAEQFYRSLAGQEVRVGMEACGQYPWFERLLAGLGMELWLGDAAEIRSRAVRQQKTDRRDAEHLLRLLVEGRFPKIWVPSLEERDVRQLLVHRHKQVQARTRVKNQLQALALSQGMQKKRKLWTAAGRAELAKLELMPYAAGRREQLLRNLDGLEAEIEQLNRQVEEEVQRRPAAVKLMTHPGVGPVTALAMVLTLGPAERFANGRKVGSYLGLIPRERSSGGRQRLGRISKQGNSFVRFLLVEAGQSAARYDPELGRFYRRLAVRKHRALAKVAVARKLAMRLYRMLREDWTYAQLCRAVRQASPSHSVVES

SEQ ID NO: 353074 - protein, 346 aa, unidentified
MVETAIIGLDVAKQIFQIHGVSADGMVTLKRQLRRSDVLGFFGKLGRCIVGLEACGGSHFWAREIRALGHDVRLIPPAYVKPYVKRGKTDAVDAEAICEAVSRPTMRFVPIKTTECQAALMVLKTRDLLVRQRTQAINAVRGHLAELGIVAAKGLAKVGTLIAIVRDENDQRLPSAARTSLKLLADQIEALTKQVDALGRQIVTEVRQDDTMRRLSTVPGIGPITAATIQALVPDPGAFTSGRHFAAWIGLTPKMHSSGGKEQLGRISKMGNPALRSLLVVGATAVLQHARRGATISPWLTALLARRPAKVAAIALANKMARIVWALLTKGGTFVRKNRVAEHAVA

SEQ ID NO: 353075 - protein, 351 aa, unidentified
MIVIGADVHKRKHTFVAVDEVGRRLGEKTVKATTAGHIAAIVWAREQFGTHLKWGIEDCRNMSARLERDLMSADQKVVRVPTKLMAQTRKSARRRGKSDPIDAESVARAVLREPDLPVASHDEVSRELKLLTDRRDILVAQRTSAINRLRWHVHELDPERGPAPRSLKAAKHQQALHEWLQTVPGLVAEMARAELADIIRLTAEINGLEKRLSDRAEDIAPRLLDIDGCAELTAAKIVGEAAGIARFKSEDAFACHAGVAPIPAWSGASEGQMRLSRSGNRQLNAAIHRIAVTQTRMNGSQGHAYYQRLITVGKTKAAARRCLKRRIARRVYQALLADHQHRNQAPKPVAA

SEQ ID NO: 353076 - protein, 425 aa, unidentified
MKKTDYLSTLFVGIDIGSRTNVVSAIDFNQEYFIRMKPVPNAKEGAEILESLLVDVLSAHHEFKHVIIGMESTGFYGVHIANYLSASDLLSPFGTEVYCLNPKEVAKYKESFNSINKNDGIDSFVIADFARVGRITIKPWRGAQYLALQRLTRHRLHIAECIAREKTYVLNNIFLKFSEFAMLKSEDHPFSNKYGATAEAIIEQYVTNDDIIRASIDELVELIESKSHGRITDPEETAKLLQSAARGSYRLDKVVAKPITLSISSSFNCIRAFEKELKAIEKAIEQTVQGINPLEYQVLKSIPGIGPTYAAGILAEIGTIKAFPNNDALAKYCGIIRKENQSGNFRAEDTKMSKAGNRYLRYYIIEATGSVINHCPEYKAFYGKKFTETTTHQHKRALALTSSKFLRMLFGLLDKTQLYSLEKSR

SEQ ID NO: 353077 - protein, 315 aa, unidentified
MTVVPLAVGIDVSKYEVVIAVTPSGEQWTSPTTPAALDSAMARIAAFEPTVVVLEATGGYEAAVVAAGAAVHLPIAVVNPRQVRAFAQALGRTAKTDAIDAQVLAEFGARVQPVVRPLPDAETQAFAALVARRRQLLDMLSAERQRLDHATTRAVLRDLRTHIRWLERRVTDVDDDLSGRIQRSPLWRVQDDLLRSVPGIGPTVARTLLAELPELGTLDRRAIAALVGVAPMNRDSGRFRGPRMIRGGRASVRKALYMAALVASRHNRPLADLYQRLRAAGKPAKVALVAVMRKLLTITNAMLKHHTAWQQHPVQ

SEQ ID NO: 353078 - protein, 339 aa, unidentified
MKYTPVGVDIAKHLIQVHFIDEHTGEVIDKQLRRQDFLMFFCNRAPCLIGMEACRGSQHWVRELTKLGHKVRLLQAHFVKAFVMGNKNDVMDARAIWMAVQQPGKDIAVKTEEQQSVLVLHRSRRQLVKFRTMQINSLHGTLLEFGKTIHKGRAAMERELPEALERMKERLPPYLITVLENQYNRLNELDSLIEDIEKKITSVARQNETCKRLLDIPGVGPLIATAAVATMGEASAFKSGREFAAYVGLVPKQTGSGGKIRLLGISKRGNTYLRALFIHSARAAALLPKEPGTWITELKKRRPTSVAIVAMANKLTRTVWAIAAHGSKYDKNHVSIRSY

SEQ ID NO: 353079 - protein, 322 aa, unidentified
MSSYSQGRETMEQYNLGIDIAKTCFDVADTDGNLLGRFPNNADGIRKYIRSTASLKPALIAMEATGGYERKLALILHEHGFRVVIVNPRRIRDFARASGQMAKTDKIDAVMIARYAALLSPEQQTPISRKSFQLKDLVSRKRQLVSMRSMEKNRLEHATAHDIKTSINQTIKYLNKQITKTELAIDNMLAADEALSARAFRLATVPGIGHATAAFLVVELPELGSCNKRQIAALAGVAPVNRDSGMFRGKRMTGGGRSQIRTLLYMPTLVAIQHNPAIRTFYQRLVDQGKPKMTAVVAAMRKLLIILNTMLKNNQAWNPDLA

SEQ ID NO: 353080 - protein, 391 aa, unidentified
MTMYFVGIDISKYKHDCCIISAANQKVVSKFTFKNDKSGFEQLNLILNSLSTPEDIKIGFESTAHYALNLELFLENAHHSFMEVNPVLIKEYKKSTTLRRTKTDSVDCESIARWLITVEYKPHSKGFYHAYSLKSLTRLRDRLIRQRSFYLVKITNVLDHTFPEFKPFFNERLSKTALYLLENYGSAEKMARMNSASYDKLRCISRGKFSIQQFLRLKELAANTVGVNNSIFDLELNTLLTLYKSLSDEINTLETEIIKLIEEVHPHYMSIPGIGPISAAVIYAEYGDISNFSNPSQMLAFAGIEPGINDSGTESHGGRMVKHGSSQLRYVLLNACLPLIRFDLTFATYYEKKRAEGKKHRVAITHVAKKLIRVIYALERQDVDFNAQKLR

SEQ ID NO: 353081 - protein, 439 aa, unidentified
MRIASSVPMPNEVPIEQEIVAYVGLDWADQQHVICWQAADSAAVQSAVVQQRPEELQAWVAELRQRFPQGLVAIALEQSRGAVIAALMHFDFLRLYPINPKSLARYREAFASSGAKDDPDDAALLLELLVKHRDRLTPWVPDDALSRELALRVEHRRQLVNLQTKLIQQLRSHLKVYFPQALDWVGELDSLQACDFLQRWPTLAAVQKARPSQLEKFYHQHHCRRPQLIQQRLEQIRQAQPLTQDSAIVPAYSQMVLALVAQLRVLIPTLQQWQQQISQLFAQHPDAALFASFPTAGPVFAPRLQAAFGSRRDRFGSAAEVLQFSGVAPVTKRSGKSRQVQRRWARPKFLHQSFVEFTGLSIPHCCWARALYQQLRARGHRHWAAIRVVAYKWIRILFRCWQDRVPYDEQKYLKSLERRNPTLWAAIQQLPAQPSRKEV

SEQ ID NO: 353082 - protein, 416 aa, unidentified
MAFAVNIVYPVCYGIDVHKKFLVACIATTNGRNQTHHQVRRFSTFTGDLRRLAEWLALNNCKDVCMESTGKYWIPVFNILEKTCNVCLTHPKYVKAIKGKKTDKRDAKRIAELFKCDLVRSSFIPPPEIRQLRDLCRYYMKLVYLTTSEKNRGQNCLTMCNIKLDDVFSDIYGVSATRILERFLEVRSSDFDIAPLLDKKCKANVEDVKAALDGELTFAQAEKLKFIRQHMDGLEELKTALENLIYKLAENYQLKIDLLMSVPGISTPLTAIRILAEIGADMSVFETAKQLCSWAGVTPQNNESGGKKKTTRISRAGAYLKPLLVQIALNVGKSDKCPELKTKYQAIKKRRGGKKAVIAIARKLLTAIWHILSKGEFYNTELYHKADKPPINRVLTPEQAFALLRSKGYQIAEPAV

SEQ ID NO: 353083 - protein, 441 aa, unidentified
MHFRDAEEPVAEPDWAAFIAVDWADQKHDWAMEMPGGNIRERGQVAHAPEALDAWVTQLRQRFGDRPIAVALEQSRGALLFTLSKYANLVLYPLHPRTTSCFREAMYPSGSKSDPLDADIQLDLLVKHRDRLQVWKPDTEETRLLQFLVEDRRRRVDQKTGLLNQLTGRLKLYFPQILRWFPSADSALAWRFLERWPDLQSAQKVSRQKLKAFLTRDARSCPADVDQFINRIREAMPATQDRAVVSSSTVFVQGLVCELQLLRATIQKYEKQIEAIVQQHPDFPIMSSFPGIGKALAPRLIAALGTQRERFPDAGSIQSYSGIAPVREASGKREWVHVRWACPKFVKQTFQEWAQHSMTRCAWARRHYDAQRARGKGHQTAVRSLAFKWIRVLFRCWKDRTPYDENRYTKSLGRRSATPNTDVRIMWKNVGGFSKPAAFSD

SEQ ID NO: 353084 - protein, 380 aa, unidentified
MKQIVSVGIDVSKGKSTVCAMIHPNTIIKESFEVLHTVEEMSMLADYIGSLDGEIRIVMESTGHYHLPVAQFLYQKGFFVCVENAYIIRQFSRIMLHGAKTDPLDAKKLAKYGLAYWSELKPYKFHPSCYTELSLLSKQYQTYIKLLIAAKQNVIHLMDEMLPGFKEALDTASSVQFSKVKYVDFAKEFYHVDMIKTMGKEIFRENYKQWCKEKGYRFQSEKADELFHLAEDGIPTLPTEFPSTRLCMEVATEQVSQLGYALEQILSQMQNLAKTLPEYQTIRQMGGMGEKLCVRFIADIGDVRRFHNGKALVAYAGIDAPPYQSGQYTGTKRRISKRGNSALRKTGYEVMKSLKSHPPKTDTRVYDFIIKKENLSLIHI

SEQ ID NO: 353085 - protein, 357 aa, unidentified
MHTTQQISFAKVHFFIGLDAHLRNWKVTIRLDGLELKTFSMNPSPLELIAYLHNHYPDGIYHIVYEAGFCGFWALRIFRQHDVDCIIVNPADVPTTNKEKVNKSDPIDSRKLARTHENKDLHGIYIPDTFHEELRALMRLRYRIIQSQTRIKNRIKGLLYTQGIQIPLQFSGRARWSHPFILWLQQLQMKTSAGNFTLQNLILQLKEIREHNKNILQQLRTEARHPDIAPIMKALQGVPGVAFITAMYLYTEIMDMKRFANDNHLVSFVGLVPSTQSSDENVYVNGISVRQNPFLRTMMIEAAWTAVREDPAMTLKFKELTKRMKSQDAIIRIAKKLVTRVRHVWLNQEEYVYALVA

SEQ ID NO: 353086 - protein, 350 aa, unidentified
MPRKFDTVVVTIGIDPGKNTLHLVGLDARGEIVLREKVARTKIVSRLANVPPCLIGIEAGMGTHYVTRELLALDHDVRQVPPVYAKPFRQTHKNDFRDAHAVAEAVQRPTTRCVPPKTDEQLDLQALHRVRYRLVGQRTAIINQIRCFLLEHGITVRQRLHWLRHALPDILAQRIDVLSPRMVRILEDLAQDWRRLDDRIEAVTDEIDALSKNTEPCRHLMTIPGIGPIISSAVVAAIGNGTAFACGRDFAAWLGLVPKQISTGDRTILGRITKRGNRYLRMLFLQAARVVLLRPKNWMKHGFGPWLAAAAQRLHHNVLATALANKLARIAWSVLVQHREYEARLSVAAI

SEQ ID NO: 353087 - protein, 334 aa, unidentified
MLRKIEGPNWSPCDWIPVGVDVSEDYFDAAVQMDESLQQQRFARNKRGVNELRNWLKKYDVTDVHIWMEATGHLSSELAEMVYARGWKVTIVNARCIKHFAISQLDMNKRDKADARKILAFAKVANERKFKPWRPKNEVQKQLRDAQIELLGLKKALVCERNRRRSGMTSPEVKRSIDTTIVHLKAQIKLLHKESMRLIRSDWLLKRTYDVLASVRGLGEVTIALLLFRIDFDAFAKGRQLVKYAGLDVLDFESGKSVRKRSRISRIGHSDLRAALYWPAVVAIRDDRATAEFAKAIENRSKSKMIAICAVMARLLRTAFALVRNDRRAIEQGS

SEQ ID NO: 353088 - protein, 457 aa, unidentified
MTSRKRSRPRRDMAPVHSHAAAVDIGATLHVAAVSPRCDPEPVRSFGTFTTDLHRLADWLAQCRVKTVAMESTGVYWIPLYEILDQRGFEVVVVNARDAKNVPGRKTDVSDAAWLQRLHEYGLLRASFRPKGEIATLRGYLRQRERLLEGAAAHIQHMQKALTEMNLQLHHVVTDITGVTGLRILRALVAGERDPDQLAAYRDPHCKAPIASLRAALVGNDREEHVFALGQALELYDVYQAKVAACDQRIEAVLERVKAVSPPPAAPLPPLRPTRRQANEPDFAVREALHAILGVDVTQIDGIGPSLALKLVGECGTNLAAWPSAKHLTSWLSLAPHNKISGGKVLSARTRRSGSRAAALLRLAAAAVGRTATALGAFYRRLSARIGKAKAVTATARKIAVLFYNMLRHGMNYADPGASSYEERYRQRVLSNLRRRAKSLGYILQKADPAPTAMAVS

SEQ ID NO: 353089 - protein, 315 aa, unidentified
MNVNHYIGFDVHKKSVSYCVKTADGKIVDEGKLRATHDVLRQWAGGRPEPWRGAMEATLFSGWIYDTLQPFAAELQMGHPALMKAIAASKKKNDKLDARKIADMVRCNLLPACYVAPVEIRELRRMLRYRNLVVGQATRLKNKMSGLLMEVGAEYNKQRLHGKQYFTELLDTVAEVPESVKDLLRLSRGAMETFETTQQQLLARLRKEPLLSRRVMLLESIRGVGEVTALTWALEVGDPHRFSSVAHAVSYCGLTSALVSSADKQQRGPLSKQRNAHLQTVLVEAAKLAPRWNPQLAALHARELDGEIATGPLWR

SEQ ID NO: 353090 - protein, 400 aa, unidentified
MMTPDDIDVWVGLDVGKSAHHAHALDHDGNTLYDKPLKQDEKAIRTMLGKLSKHGRVLLVVDQPNTIGSLPLTVARNMGIAVAYLPGTAMRRTAQPLPGDAKTDRRDAHVIAWAALKLPETLRDAGPDDETLAALKLLAGHDEDLAHESTRHVNRLRSLLLQTHPAFERALKGERITRDATLALLERYGGPMGVKRAGIEDVKDWAKSNGLRAGRIIDDMFKAIGEQTVTVPGTLMAETIIPSIAHDIKTIRDRRREVGRQVEKLLEDHPLLTVPASMPGIGVRTASNILLGIGGDIANFKSSAHLAAYAGISPVTGQSGTSIKGERPSRRGNKRLKNALCQTAFVASTKHPPSVAYYKRKREQGKHHNAAIICLARRRCDVIYSMLKNGTLYQEPALVA

SEQ ID NO: 353091 - protein, 343 aa, unidentified
MQTVTTIGLDIAKSVFQVHGVDAAGNVIVRRQLKRRYVLPFFQKLPPCLIGIEACASSHHWSRELKALGHTVRLMPAAYVKPYVKRQKNDAADAEAICEAVTRANMRFVATKTLEQQSCLMLHRTRHLFIRQQTAVINAIRAHLAEFGIVAPVGRNGVEQLLNVVADPGDKRLPDVARACVATLGAQLQMLKARILEFDRLIMAWHRSSEASKRLDEIPGVGPALATALVASVADPKAFRSGRNFSAWIGLVPKQHSSGGKDKLGSISKQGDRYLRSLFTAGALAVIRYAKIHGTKHRPWLTTLLARRPTKVVAIALANKIARMAWALMARDDRYREPFVLAA

SEQ ID NO: 353092 - protein, 413 aa, unidentified
METLVERCAGLDVHKDSVTACVRVPDGQGGRQAETRRFTTTTAGLVLLAEWLASFGVTRVGMESTGCYWKPVWQLLEDQVECWLLNAAHLHNVPGRKTDVADAAWVAQLVEHGLVRPSFVPPRPIRELRELTRYRKTQIQERTREVQRLDKVLQDAGIKLSSVATDVLGVSGRAMLEALVAGTHDPELLAALAKGRLRAKLPALREALAGRFRTDHHGLLVAQILAHVDYLDEAIATLSARIQQLIAPYAEQVALLDTIPGIDQRAAEVIVAEIGPDMGQFPTAAHLASWAGVCPGNNESAGKHRSGRTRKGSKWLGGCLSEVAKAASRTKGSYLNAQYHRLRGRRGPGKATMAVAHSILVIAYHVLDQGVAYQELGDDYFQQRHSAEHYQRQLVRQLERLGHKVTLEPIQAA

SEQ ID NO: 353093 - protein, 415 aa, unidentified
MNTIETKKHRIVKDQILIVTIDIGKMTNTGYCRCPSGEDIKPFEFSNNAEGFKKLWDCICWMKRSHHLEEVVVGYESTGAYGEPLVHYFRRKPVKLVQVNPVHTKRLKDLQGNSPGKTDRKDPKVIADIICLGHALSVVIPQGAAAELRRLTLARERSIQRRTALYNQLQELVFVLFPEFLQVMKDVKTKTAQYLLRHYPRPQDIVRCGLEPLTVVLRQVSRGKLARVRAQALYDGARRSVGLQEGTKGIVLEIEEILSALESCSRFIEKLEAEMVSYLRQVPYSDSLLSVKGIGEVTVAGLIGEVGDFRQFGTLREVMKLAGLDLFEISSGKHKGRRHISKRGRPLLRKLLYFAAINTVRKRGVMHVFYQRYLERGMAKTKALVAIARKLLRILFALVRDHCQYSPKEVLQLAA

SEQ ID NO: 353094 - protein, 405 aa, unidentified
MTSDRRIVIGADTHLDTIHLAAITDTGQLLSDAEFRTNPTGYWAAICWARSLGEVVSAGVEGTSSYGAGFTQALQANNIHVVEVNRPDRSARRRQGKSDPLDAHSAARAVLAGHGLAVPKDPHTGALKALLVARRGAIKARTAAIQQIKDLLVTAPAELRERYRRYRTTLRLVEALARCHPTAHEDPTTVSVLTACKTLAQRIEFLERQDRDLTAELDSLTSKLNPALRAAYGVGPDTAAQLLITAGTNAHRLRSEAAFAMLAGAAPIPASSGKTTRHRLSRGGDRAANNALHRIALLRWSHDPRTRDYTACQLAAGRSKKDILRLLKRAIAREMFRHLTAPCPIDDYSDLRPARQAKNITLSAVANHFGVWPNDISRLERGLKRDDTLAADYRRWLKIQLIDAA

SEQ ID NO: 353095 - protein, 355 aa, unidentified
MTSEKYIGLDVHQATISVAVMDARGKLVMESILETKASTLLQFLAGLRGNLSVTFEEGTWAAWLYDVLKPHVAHLVVCKPRKNALLKAGSKSDRIDARKLAELLRGNLLKSVYHGETGVRMLRELARSYLTIVGDQSRVMSRLKALYRSWGIACAGRDVYYIRHRAQWLEKLREPGVRRRAERLYEQLGEMQRLRRLARHDLLVESRKHSISDKLRQIPYVGPIRAALLIALLQTPHRFRTKRQLWAYSGLALEIHTSGDYGYREGQLGRSKKLISIRGLNKDHNHDLKGLFKATATMASMRPGPFREFYLGLLAKGMKPAMARLTLARKIAAITLTLWKKGESFDAEKLKQQAA

SEQ ID NO: 353096 - protein, 362 aa, unidentified
MDTQAINYIISKNYFSFSNYYEVSIMQENIISVDLAKNVFQICVMNSKNEIVTNKKVSRKKLLDVLRQFESTTVVLEACYSAHPWGRAIGELGHHVKLIPPYQVKPFVVGNKNDHNDAIAIIEASRRPKATFVPVKTLEQQDIQSLQRVRELQIKHRTAIANQLRGLMAEYGVILPVGVKNSRKHVPHILEDAENSLTSTARNFIHRLYRELTEYDNQIAEIEQELDSILRQNTDYKLLQTIPGVGPMISTSIISSVGDANYFKNGRQMASWIGLTPKQFASGESSRHLGITKRGDRTLRRLFIHGARAVINWCEKKNDKLSLWIKALSKRAHPCKVIVALANKLARIAWAVLASQSPYKAA

SEQ ID NO: 353097 - protein, 348 aa, unidentified
MDHYAGIDVSLEQSSVCVVDARGKIIREDRVASDPPALIAWFGLLGFGLTRIGLEAGPLSQWLYAAMREAGLAVELLETRHVRDAFKAMPVKSDRNDARGIAQLMRLGWFRPVHCKSLAAQELRAVLTARKLMQSKLRDIENSLRGILRGFGRKVGPTTARSFAGRIRELVAGQANLELIAQALLAAHAVLLREFNGFEKRVRIMAREHVQARLLMTTPAVGPIVALTYACAIDDPARFKSSKQTGAHFGLTPKKYQSGQTDYTGRISKIGDAAVREALYQAAHIMLIKPLKGCSQLKSWAMRIARRAGIRKAKVALARKLAVIMHRMLADAQPFNPTVGTTPVAAAA

SEQ ID NO: 353098 - protein, 380 aa, unidentified
MTRISVGVDVSKNRSTVCIMDQDGKFIMRPFLVWHSTEELDFLADTLKRLNGEVRVIMESTSVYQYPIALQIKERGLFISIVNAYEMRQFANIDFRGGKTGKKDSRTIASYGISYWDKLVEWQIPKDTYFNLDLLNRTYMNAKKHRQIILQELQHYIDCAMPGMDKELHSLNLNTKKDFMLDFVEKFWHRDEIVNMTEAEFTEVFTAWAKKKGYRPGKGKAAKIYAIAKSCIPYYPSNPTVKTILQCIVDKLSGVNRTLVTIVTQMIEEAKKLPEYQIVREMPGVGDPLAARFFGSAGDIRRFKNSKALVAYAGIDSPPDESGDFSSTHRHITKKGSKVFRDTGYEIMMALRAQKRTWEKVRKNPEVYDYMLRKEAEEKP

SEQ ID NO: 353099 - protein, 342 aa, unidentified
MKQYVGLDVSQKETSMCVVNEEGEVLFEGKAKSDPGALTALLRKRAPQAERIGFETGAMASWLWHELRRVDLPVVCIDARHAHAALSVRMNKSDQNDARGLAELVRVGWYREVKVKSEESQKIRAILVARSRLVAIRRDIENQVRSLIKESGLLFPRAIGLQFRNLVRDLLADGHQLLGVIAPLLSIHEQICKQQSKFDDEVRQLARSDETTRRLMTVPGVGVVTALTFRHTIDDPSRFRSASSVGAYLGLTPRRSQSGETDINGKISRWGDRLLRTYLFEAATVLLYRTKKWSSLKAWGMKLAKRIGMRKAKVAIARKIALVLHCIWVDGTSFDWGQAKEA

SEQ ID NO: 353100 - protein, 395 aa, unidentified
MEDPIIACDVSKGKSHIQGFIGLSNPVGNPFVVRHLKSDLKLIKELAKSLEKQAHKKPKFIFEFTGIYHECIAKYIRTLGLDLYAISPLESAKVRKSQIRVTKTDSKDCLNIATVYYTRCIRKFESDNNDIKSLSRRKRDIREEKIRQRGVYHRYLDLVWPCFDEYFDADSKVCDIIVSTYKHPYVIKRRSVNMVTEILLNNGRFSKNRAFDIAYKIKDYASNCVSGVDEKSDYVNALISSYSKINSLKKEIEEINLELDNLLRKSIVYQLLKTVPGIGANLLIQMSAEIGDYTRFKTAKQFVAYIGLDPSILQSGTNDGEHYSITRKGNGIIRSCLYLAVSQMLTQKLDNQITRFYFKKKSSGLSHKVAAVASCRKLACCVFGMLKNGTCFETI

SEQ ID NO: 353101 - protein, 410 aa, unidentified
MEVLYPRCCGIDVHQSFVVGCLSVVESGQRHKEIRQFSTQIGELRAMRDWLVGAGCTHVAMESTGVYWRTVYRQFYGSLEQVVANPQHIKAVPGRKSDVQDAEWLADLLQHGLLQSSYVPPVEQQDLRDLTRLRSTLVQDRARLVNRVLKTLEMAGIKLRPVLSDVMGVSGRSILRALVAGERDPHRLAGLAHPSLLRKHDQLVAALQGGGLQPHHSFLLRELLTVIEALEHSISHVESEIQDRLRPFGETLERVEHITGVGQHTLEVLFAEVGWNMDPFPDAAHLASWAGMCPGQHESAGKRLSGRVRKGNKWLRSALVQAAHAAARTQTYLGEQYRRLSKRRGSKRAAIAVGHSILVIYYHMMKTGEPYQERGVEYLKQMDKQRLQRHLVQRLESLGYQVTVQAPPAA

SEQ ID NO: 353102 - protein, 317 aa, unidentified
MERILGVDVSKDTLDAESLPTKQRRKFTNDAAGIAELVEWARSFDPERIVFESTGHYQRAAVGVLLAASLPAVVVNARQARDFAKALGILAKTDRIDAGVLARFGQVVATVVRPLPTPEIQAFQELFDRRSQLVRMLATEKNHRHAASSEKIIRDIDAHIRQLERRIEDLEARMDRFVENSDAFRARDEILQSIPGVGPQVSRTLLAHLPELGDGDRYRITALVGLAPFANDSGMERHTRHIRGGRGRVRIGLYQAAVVAIRHCPPMKEMYVRLKQRGKASKVALIAVARKLLVLANALIRNMTPYNPANSVCLKPT

SEQ ID NO: 353103 - protein, 392 aa, unidentified
MNPYALGWDNHRKFSKVSLMEQTPEGEIRAVERARLEHNDRESMRAWLSRLDPEIPVALEATFGWPWVADLLEELGHPVHLAHPPVVRALAKHEAKTDRCDSDRLGKFQLRGILPESYLAPPEVRQRRERTRYRMALSALRTAVKNRAQAVLHRHGILHDFSDLFGKAGRRFLEGLTLPEGSRQALKGCLELLDSLTLLIDEVEQWMLKNLEADEIVRLLMTIPGVGLILAHVIRAEIGEIERFPTFRHLASYSGLAPISDDTAGREGPRHCSAACNHVLRWAFIEAVHGVQRTKGPRGFRLRQLYARLCGSGRPKGRKSSAVVAVAHELSKVVHVVWTKRVPYTDAPPPRPGSRPGRPEFKEIPTAKTTLRSNQPRHPMVRRRATAGQTRS

SEQ ID NO: 353104 - protein, 425 aa, unidentified
MVAVMIGVDPHKSSHTAVAIGAAEESLAELRVRACQSQAEQLLAWAQAWPQRTWAVEGAGGVGHLLAQQLLAAGGRVLDVPPKLAARVRLLQAGDTNKNDPNDAFSVAVAALRSPGVREASRDDHATVLKIWSKRYKDLGRARTQVACRLHQVLCELLPGGVPGQITAGQAERNLASITPSGAVETARCQLAAAVTEDLRGIDAAIRDTRKQLAIAVAAAGTSLTGLFGVGPVIAAAVIGDVRAVSRFPGRDHFAACNGTAPIEVSSGGRKIWRLSRRGNRRLNHAIHMAAVTQIRHRHSPGRAYYDKKLAEGKTPKEALRCLKRQISDAIYACLQADARRAASAKSPGGQRGNDSLTSAAGSHPQHQLFGKATPGPATHPTAPADAAADPLPAAFPLSCQPVRAGGRVQDRAKPGRAAAPAGRP

SEQ ID NO: 353105 - protein, 401 aa, unidentified
MKYGVGIDVSKGKSTIAILSIEGEVIEMPFDINHDLTSMSSLEEKLGKIPKEDIKIVLEQTGTYHLPILTYLVDKGYCVIAENALKIKKYLDRSLRKAKTDKKDSLKLAEYACDNWYKLKVNFIEEEKYKELRFLSRQYFSFNDIKVQQKVDFSNLCDILFPGYYQLLKEYNFILGLKIFEKYNDPEKIRNMKEDKFIKDIDKIAQKIGQQRAGRTFAIKVYNLAKESYSSCPSSEYTQLIIDKSVAALILSIESAKEIITKMNELAKTMEEYGSVREMSGVGDRLTPILIAEIGDIRRFKNAGSLIAYAGIDAPPYQSGQFEAVHRHISKRGNKYLRKAGYEVMKSIKSFCNDGNELYNYMLKKESEGKCKKSAKIATLNKFLRQYYGTIKKKYIELGTW

SEQ ID NO: 353106 - protein, 392 aa, unidentified
MGTETSVSQMGLDVHKKFSRVTARSSDGKVAWRQRLEHADRTRMRIQLEHWPKNTPVVLEGTFGWGWLSDELKAAGLDPQLASSRKVAAWRKARGLAKSNRTDADLLSELPSEGERWWEVWLAPPEVRDQREWLRYRMALVRMQTALKNRIHAIMHRHGILHEQSDLFGRNGRRVLNLLVASKDATLPDSGRATLKGYLQLLDHLRRQIAAATRAFRKQVSANPSALRLKTIPGIAWILSYTIMAEIGRIERFRSAKHLLSYSLLAPRADDSGDEDDEAPLGRHVGHVGRRMLKWAFIEAAHSAVRQGGKFRQIFDRRTNGGKRDKNRGYIAVAHELCRLSYVCWQKQVDYSADPPARPGRRRRRKQRSRPELGQPEDAMVVAATGRLQTSL

SEQ ID NO: 353107 - protein, 402 aa, unidentified
MNAVGIDVSKGKSMISVMRPFGEVVAKPFEVPHTVSELRKLTNFLKSLDGESRVIMEYTGRYYQPIARYLHETGFFVSVVHAKLIHDYGNNSIRKIKTDKADAIKIASYGLSEWTTLPRYLPEDDTRLILKTHNRQYNQYMKLKISLKNNLIALLDQTFPGANTLFTSPVREDGHEKWIDFTARFWHCQRVGALSKAKFTTQYNNWCKAKGYHGSIAKAEQIYETASRLVPVLPPTQDTKQLIVQAVSQLNAISFTLAAVRREMLRLASSLPEYPVVMQMHGVGDTLGPQLIAEIGDVLRFRRKQSLTAFAGVDTPPFESGTFVSTDRSISKRGSPLLRKALFQVMGCLLQTAPADDTVFRFLDKKRAEGKHYYVYMVAGCNKFLRVYYGRVKEFLAKLDVA

SEQ ID NO: 353108 - protein, 287 aa, unidentified
MTEITIGVDVSKDFLDAHRHPDGDGRRFANTTAGHKALIGWIGKTVERIVFEPTGPYHGALERALAKAGLPLAKVNPRQARRFAEATGKLAKTDQLDAALLARMGALLQLEVRPVHSETIAELKQLHIAREALVKDRTAAKNRGKAINLAILKRQNAERLKHIERQVTAIEAEIDSRIQADAELARRLEILISIPGIARLTAFVLLIEMPELGHMESGQAASLSGLAPIARQSGRWIGKAFIRGGRANVRQALYMPAKVAITAIMRKLVVLANALLKAGRPWIPKTA

SEQ ID NO: 353109 - protein, 355 aa, unidentified
MLADRIDFVLGVDTHKHTHTAAAVTPAGGLVAHLTVAADAAGYRRLLAFADEQAPGRRIWAIEGTGSFGAGLTTHLLEHGEWVVEIDHPKRPARRNGAKTDELDAVRAAREALAREHLAQPRRRGAREALRVLLTTRENAMRARTKAICQLKDLVVSAPESLRRPLHALPSAALVAHCARVRTNTAHSVEQRYTILALRTTARRALALEAEAAELEAQLEPLVKQAAPTLLDEPGVGPVSAAQLLCSWSHAGRLRSEAAFAALAGVAPIPASSGQVTRHRLNRSGDRQLNRALHTIIVSRQMHHPETQAYVARRTVEGKSPREIKRCLKRHLARRLFRLMEGPGQRCSPDCQLAA

SEQ ID NO: 353110 - protein, 334 aa, unidentified
MKELKSSVGIDISKDSFEVCIKQLKDERSVIKATHSFQNEFSGFENLLNWTLRKVSNPIFVMETTGVYHEDLTHFLYSNGQKVSVVLANKMKHFAKSLNMKTKTDKADAQMIAQYGLERQLEWWEPMMPQMKNLRDLCRERLSLKKDLVRCKCQIHGLKHAHSTLDVVLQVKEQQIGFLESNIQIIENEIIRITKEDKEFSQRVKNIETIKGLRLLTIITVLCETNGFAQFNNIRQVVSYAGLDIAERQSGLFKGKTRISKKGNARIRECLYMPALSATCYNEPIKALYQRVVERNPTIKRKGVIAGMRKLLILIFVLWKKNEAYNAAYQWDAH

SEQ ID NO: 353111 - protein, 419 aa, unidentified
MPHLVPEEFAAFVGIDWADTKHDVCLQAGGSDTRECRQLDHKPEAIDAWARALQERFAGRPVAVGLELNKGPLVYALRKYDFLVLFPINPGTLAKYREAFTLSHAKDDPTDAELQLELLLKHRDKLQPLNPQSPAMRALAQLVEHRRRVVGDKVRLTNRLTSTLKNYFPQVLQWFEDKDTLLFCDFLTQWPTLKAAQLARRTTLEGFFRAHHVRYGTVIDTRIQAIRSATPLTTDEGVIVPNALLVQAFVAQLRVVLQAITDFDHAIAQRAQSHPDFPLFTALPGAGAVFAPRLLVAFGEQRERYASAEELQKYAGIAPVTERSGNKTWVHWRWQCPTFLRQTFVEWAAESIRHSFWARLYYQQQREKGKSHQAAVRALAFKWIRVLFRCWQHRTPYDESVYLTALKHRGSPLLHNLAP

SEQ ID NO: 353112 - protein, 334 aa, unidentified
MKIVGCDLHTRYQQIAMLDDETGELIECRLEHANGEAKEFYTQLTGPVRVGIEATGHTRWFERLLAGLGHELWVGDAARIRASEVRKQKTDARDAALLLELLLSGRFPKLWRPSSEERDLRQLLWHRQKLVWMRNAIGNQLHALAMGEGLCRKQKLFTKKGRAELQALNLDPWASRRRQELLRMLDQTDASLKQFDEAVNEQAAQRAEAKLLMTHPGVGPVTSLAFVLMVGPVARFQRSKQLVSYLGLNPRENSSGGKQKLGSISKQGNPMLRGLLVEAGHTAARLDAELRQDYQRLRLRRGGSVAKVAIARKQVNYTQLVRMQGSSRATLVQQ

SEQ ID NO: 353113 - protein, 463 aa, unidentified
MSKPIIVAADVSKGYGDFIVIDSDKKLLMELFQLDDNKAGHTKLGELLISLKKKHKVKRVLFIVESTGGLEDNWLRMAKQASLSDFVEGYRLNPKLIHHEYRVQKRNSISDGVSALTMAHHVAKNLEYFEPSEIVVDPAYAPARNLIRHITSLKQDCTGHKNSLQQLLYQYLPSLLPFLPANWSQYFLKILITHGGRRAIQLAAKQGFKSVPRVPKGKANQIYDALKDGIDMKETPPLVVATIRSKARQILSLLEEIKELEELLCQVAPVAGKQVEQLCSIKGMGKVSATTLLCFFEDIDRFDQASSMAAFFGVQPRVKKSGDGTIKIGMSKQGNGLVRREVYLLAFRTLSNEPYLKSIYAKFRKQGMTHDGALGVLMHKLIRIMYGILKSGTPFNPGIDQLNQIDPRSKEEAQEAESIVRDDPKRRFQSVSQDAPLSNRQRQKRKKDQESQAAIVAESTGSS

SEQ ID NO: 353114 - protein, 356 aa, unidentified
MTKINKLDFTGQPIYVGLDVHKKSWSVSIFFQQCEHKTFTQPAEVDPLVNYLRRNFPGADYHSVYEAGYCGFWIHDKLKEQGIHCQVVNPADAPTKNKERTTKRDRIDCNKLARSLRSGEIEGIYVPSRSKLEDRSLVRTRQSMVWKQTRCKNQIKAILFFYGIDFSQEATLGHWSRRFINWIESLRMERASGNMALKVHLEELKHLRQIIASLNRAILNLARTEEYKAQVRLLKTIHGISTLTAMVLLTELYEITRFASLDELSSYVGLIPDTKSSGEKEHTGEITKRRNRQLRSLLVEASWVAVRKDPALLLAFELYCKRMRKTRAIVKIARKLLNRIRYVLKNQKPYVPAVVE

SEQ ID NO: 353115 - protein, 356 aa, unidentified
MSVYLGVDFHARTQTVCWCDTADGLIHQRTLDHEHDDVRGFYTQFVVPAVVGLEATGYARWFHRLLEALGHRLLVGDAYVIRKCALRRQKNDRRDAELLLDLLLHGDFPAVHIPPIASQAVLRLLRYRQRLVEIQTKLRNGIQALALNHQLRLGPKLWSKQGQQQLLAIELDDTDVMQRENSLELLVQIRTRIRTIEKELTSRADQDARVRLLRTHPGVGLLTSLAVVHTLEPVTRFDRARRIAAYCGLDPRETSSGETVRMGHISKQGNRLLRHLLVEAAHRAVHSKADADLRNFYFRLMERKKNAAVAITAVARKLVLRLYRMLREDIDYTEFRRRGREARRARKTPSPTAGGC

SEQ ID NO: 353116 - protein, 357 aa, unidentified
MTQSNRISFKGQNIYVGIDVHLKSWSVTILSETSVLKRMSQGADPDALHRFLTSHYPEAEYYSVYEAGFCGFWIHDRLTELGIHNIVVNPADVPTMSSEKLRKTDAVDSKKLAVSLRAKQLKGIYTPDREALEIRSLIRLKNSITKDMTRQKNRIKSQLRYLGIAMPTAYLEPYSHWSKRFLNWLREVEMSTPSGRHTMDILIMQLEALREQKAEMTRKLRALSHTERFEETLNLLMTIPGIGQATGLALMAEIVDITRFSNAEQLAAYVGMIPMCHSSGEHEGVGDITLRKHAILRSNIIEAAWVAIRKDEAMQLCYLNNCKRMVPSKAIVKVARKLVNRIYFVLKRHQPYVNAVA

SEQ ID NO: 353117 - protein, 467 aa, unidentified
MSHRRLVGIDLGIATAHTVRVLDGEGAVVAKRRAWPTAESLSAVEAAALAGCPEGTRLEVVIEPTGPAWLPIAVFFCARGHQVFRVSSQKAADLRRFLSRHAKSNGIDADTLARLPLFDPAGLRPLQLPGAERAALDRRVRAADRLTQAGADHKRRIKDLVRQLLPASPLTGELGVADLAVLERYADPHALIRLGMTRLAALIAKASHRHQGAERALQWQQAAQASLALYDGHPAIDFAGLAAEVATEVRLLRATCAELAAHAAQREARYQQVDPAGLARSLPGIADVGGPALAACMGDPARFATGKKFRSFTGLTPKASETGQTDRKGQPMSKAGSSLLRTTLVRAADTARKQDPQLARIYYLQMTERGKDHLGALCVVAAALAERAWTVMRRGTPYVICDTSGQPVTPQQASTIIARDWTIPPEVRARRRSKKTGKAPRKSSKDSANGAASPAAPLHLVTGGPSS

SEQ ID NO: 353118 - protein, 339 aa, unidentified
MSKLLKNFIGIDISKSYFDVALIVLMHPGQRIHHQFSQCKNGFKEMLQWLAQQGVIINEETIFCMEYTGIYNTGLVNFLVEQKALLWVEMPLRIKRSCGFERGSDDKTSAVKIAAYAFRHQDQIQLWRPLDSSIEKIKNLIAQRDRIVNAITGLTVPVKEMLECGCADEARQLEKLQKNPLKALQKSKDAIEQFILKIVEQDEHIYKKTKQVQSIKGIGKVTAVSLLAYTKGFTTFSTAKQLACYCGVVPFSKTSGSSVRFKPTVSHMANKKLKKLLHLCALSAIKNDPEIKLYFERKVGEGKNKMCVINAVRNKLIHRVFAVVRDDRFFEENYVRKCA

SEQ ID NO: 353119 - protein, 330 aa, unidentified
MYKIIIGVDVSKDVLDIAYFYENGTKYLMQVPNTYDGILTFLKTIKKLTSLKTYKAWLVCFENTGIYSDLLLSTLIALGIACVEEHAMKIKAFSTLQRGKRDDWDAVRICEYAVTYQSKLTLSRKPDETIAKLKHLFNYRSTLVNKKVDLSNCIDEKAEVIKGIIIDHLKDINDNIIATINSKIKEIEKLMLDIVKSVVVLRTNYNLVTSVIGIGPIIGLAVLIKTENFEKFKDSKKFASQIGIAPFPHQSGKSYRNPRISKRGDMEIKALITNGVQAAKIHDPQITNYYVRLSAENKKPYVINNNIKNKLIHRIFAVVRRGTPYVKLVA

SEQ ID NO: 353120 - protein, 346 aa, unidentified
MANNNAKNDVTVLGIDLAKQSFQLHGVDSNGVTVLKKKLARKNLCQFIALMPACIIGIEACGGANHWLRVFEQFGHTVHMIAPQFVKPFVKSNKSDAADAEAICEAVQRPSMRFVPAKSIEQQDIQSLHRIRSQAVARRTAQANQIRGLLMEYGLIIPQGISYVRKSIPLMLEDGNNELTFMFRELLADLYNEMVHLDDRIKTLENKLEAICAQNEDCQRLLSIPGVGLLSATAMVAAIGDINAFKNGRELAAWLGLVPRQHSTGGKPTLLGISKRGDTYLRTLLIHGGRTVVRVADKHQDKRSQWITQLEGRRGKNISAVAVANKNARVAWSLLTHKSTYQTKAA

SEQ ID NO: 353121 - protein, 360 aa, unidentified
MTSTAPASLPQVTIGVDTHKHFHVAHAADELGRPLGSYTMPTTSIGYSDFLAWAQGLGHLEVVGIEGVGHYGAGLGRHLRAAGVRVTEVGRPNRQRRARHGKTDRVDAAGAAAMVLADEDLGDPKTADGITEMLRVLRIARVSAVRARAKAFNALKDLIVTAPAELREQLAGRHKLHLIGACTALATSEIPSTPAEAVSVALNSLAERCLALDAETKALDTQIEALTAHACPALRQVYGVGPDTAATLLVALGDNPERIGSDAAFAKLCGVSPIEASSGKTVRHRLNRGGNRDANRALHVICVVRLRRHQPTRDYLARRIGEGRTKAEIMRCIKRYIAREIYHAVRPTRQEILTRTLAAT

SEQ ID NO: 353122 - protein, 373 aa, unidentified
MPKYSTAFGMDVHLRSTTVCALDADTGEAVTRRFPGNPWGEIAGWMDGFPGPSLAAYESGYLGFAPQRELAGLGVECVVAAVSKIPRSAADSASKNDRNDAARMAKAILAHDISPVWVPSPEVEGIRDLAGAYDGATARLATAKQRLLAFLARRGFVYGGTTPAGNPRKYWTYDFLRWLDKVRPEDDGGVRALAALRNEVEAAAEARADLLSEYRAAVDASPIAAEVAALQSIKGCAFALAAAFSAEVGDFTRFRSGRQVTAYFGLAPSQRSSGGSVRLGGISGAGSALVRKLAVEGSWCYAAARHQPKLMPRDTGVPLEIRVHGRKGSERLLRRREEMLARGVPAAKANAATAAELVRWLWALGMMCREGAE

SEQ ID NO: 353123 - protein, 238 aa, unidentified
MIDLVGRVLDTEQFRATASGYAALLAWMHRHGRLSRVRVEGTGAYSAGLVRLLRDEQVQVIEVDRPDRKTRRFQGKSDPIDTVQAARAALAGERTHPKQGNGQVEALRNLRVTQRSAVDQRADAAIPAVAVALRSLARRHQHLSTEIANLDELLEPLVAAINPALLAANSVGPDVTGQLLISAGENHDRLASEAAFAMPCGAAPIPATSGKTTRHRLDRDGDRQANAALYRVVLVWLR

SEQ ID NO: 353124 - protein, 297 aa, unidentified
MYPTGERWAVDNDEAGIVELVKRLCDLNPTLIVLEATGGLETPAAIALHAEVLPLATVNPRQTREFARATGQLAKTDPLDANNLARYAQAVRPEPQQLPDEQTRHLKALVRRRHQVVKMITAERNRCSTAPPQIKEYIRHNIAQLVQQRDALDAELEQRMRENEAWHAKGNLLESAPGVGPVTSSALVSCLPELGTLNRKAIAALVGVAPLNSDSGKYRGKRKVWGGRADVRAVLYMATLTATRWNPRIREFYNRLLDAGKPKKVALTACMRKLLTILNAMTSQGIPWDPALACPAN

SEQ ID NO: 353125 - protein, 420 aa, unidentified
MKYARVPRLDAPLGVLSAGIDWASADHAVCIVDAGGAVVSRFTVAHTAEGLKTLVSRLARAGVTEVAIERGDGPVVDALLEAGMTVVVITPRQIKNLRSRYGSAGNKDDRFDAYVLADVLRTDRARLRPLVPDSPATVTLRQACRARKDLVRHRVAVGNQLRAHLLVVFPGAAGLFCKLHSAISLAFLARFDCQDRADWLSQKRLAAWLKGAGYSGRTDPADLHQRLTSAPRGATGEEGAASAQVTRALAAVLASLNTQIKALEAQIAAQLARHADGHIFTSLPRSGTVRAARLLTEIGDCRARFPEPQALICLAGAAPSTRQSGKHKAVTFRWAVSKQLRDAVCDFADGSRHESPWAAQIYNAAIARGKDHPLAVRILARAWLYVIWECWHNGVAYDPARHRGLQRLLADQATGTDQAA

SEQ ID NO: 353126 - protein, 343 aa, unidentified
MNTENLAIASLDLGKNCFHFYGQDNLGRHLFRAKVSRAQVFAFIAQLPPCTLAMEACGGAHFMGRFAASCGHQPKLIAAQHVRPYVKSNKNDYVDAEAIGEAASRSAMRFVALKTEAQQALSMLNMTREAFMRDRTATVNRIHAFLLEWGVSLKPTFKSIRALPKVLEELRAPVPVIRLFEQFHAHFNYLDERVKALTKELEGQVAEDDLATRLMTMPCVGPITSSALAAEIGDGKQYKRGRDYSASIGLVPKQRTTGGKPHLLGISKRGDRNQRRLLVQCSQTFINHLDKQTGHLADWVRGLLARHHRNVVVCALANKLARIAWALAHTHGVYEAGPSVQNA

SEQ ID NO: 353127 - protein, 330 aa, unidentified
MEKKELFVGIDVSKSTLDVCLLNEGCRSLEIANSPSSIKRFMKKIEKEFSEVKIHVCIENTGKYSWRLMEIIPEFNVSFYVINPLHLKRSLGLIRGKNDKVDAIRIAGFTKKNHEELKEFIQEREVITTIKVLISERRFRVANRKQLRTKNKDVKELSNKKLAKRLIKDNNMIIKSLTAQIEQIEAEIKGIINNDSELKQVSKTLKSVPGVGDVLSWYFIIKTNEFKSITEPRKLACYCGVVPFENRSGTSIFGKSRVSLLADKRFKKVLHLGAMRAIQMNNDLQVYYQRKVEEGKNKMSVLNAVRNKIIHIVYALIKKQDLFENRLALS

SEQ ID NO: 353128 - protein, 348 aa, unidentified
MKNKSFVGIDISKNVIDVSIFREDTNIKMFPHEVFNNTRKGFGDMCSWLKKSRVVLSQALFGMEFTGCYSLDLEKFLTSKNYSFCMLSTRIVKHHPMGTIDKRDKNDSAKIADFLYRYDGTECAKPYKLPSKAMQQLKQLVNERKFLVEQRTNFMNRMQMFETKEDSAMYESYIKKLNHDIEKIDQEECDLMSKEEDVFDTFQNLLTIPGIGFVNATNIIAITRNFTAFDTARQYARYVGVAPCSHTSGTSVKWRARPSAHCNGQVKADLSMAALRAVEYDVEMQMFYNRKLGGRKDSDTKRKALNAVKFKLIRRMFAIGKQKRKWEVLNTSDDRKNLHIEKSKASEL

SEQ ID NO: 353129 - protein, 340 aa, unidentified
MLHVGVDLHKRQAQVAVVDDDGTVRSNCAVACDRESMLGLFSSLAEPAQVVMEATGNWYWLRDLLAEMEIPVALSHPLKTKAIASARIKTDKLDAATLAQLLRVDLLPRAHLSSPEARLDRELLRHRAVLVRLRAGVKNRVHALLAKHNLVYADGGLFTHKGREWLEGLPLAPVMRSILERMLSLVGMLDLLIQQASAEIGVRAQEDATARLLCTIPGVGYYSALLIAAEIDGVERFPDARHLCSYAGLVPSVRSSAGHTLLGHITRQGSPWLRWIAVEICQKAASRPDFLGDHYRRIARRKGNGGVKVAAARKLLKAIYWMLTGQQTFAEVSRRMTAKG

SEQ ID NO: 353130 - protein, 355 aa, unidentified
MTSTKYIGMDVHTESISMAVRNSVGKVVMESVIETKASMILQFIEGLRGDLHVTFEEGTAAAWLYDLLKPHVARLVVCNPLRNALLKVGNKSDRIDARKLSELLRGNQLHPVYHGEHGLRALKELVRSYLTISKDLARVMTRVKALYRSWGIPCSGTQIYSQLHRVTWLSKISEPGVRLRAAFYFQQLDALRTLRQEVRQELLAESHKHSAWKRLCGIPSIGPIRAAVALGVLQTPHRFRTKRQLWSISGFAIETRSSADHRHVNGHLQKVKKRVSIRGLNQNHNHDLKNLFKGAAVIASTKPGPFQEFYTALLAKGIRPEMARLTLARKIATIVWIVWKRGVSFDAQYLKPQTV

SEQ ID NO: 353131 - protein, 400 aa, unidentified
MVDIDAVGVFLGLDVGKQTHHGRGLTPAGKKVFDKQLPNSEPKLRAVFDKLTARFGTVLVVVDQPASIGALPLTVARDAGCQVAYLPGLAMRRIADLYPGEAKTDAKDAAVIADAGRTMPHTLRTLDLTDEVTAELTMLVGFDQDLAGEANRTSNRIRGLLTQFHPSLERVLGPRLDHPAITWLLERHGSPQALRKAGRRKLVEVVRPRAPRMAERLIDDIFTALDEQTVVVPGTGTLDVIVPSLAKSLAAVHEQRRALEARIEALLEAHPLSQVLTSMPGIGVRTAAVLLTTVGDGSSFPTAAHLASYAGLAPATRQSGTSIHGEHAPRGGNRQLKRAMFLSAFAALHDPASRSYYDRCRARGKTHTQALLRLARHRISVLFAMLRDGTFYQPRSPRPA

SEQ ID NO: 353132 - protein, 349 aa, unidentified
MNMSIVEATRSITGGVDTHLEVHVAAVLDHVGGLLGVESFAVGPAGYEELLAWMESFGEVGKVGVEGTGSYGAGLARFLTRHGITVIEVDRPNRAERRRSGKSDPLDAAEAARAALSGRAKGLPKSRDGSVEAIRMLLVAKRSARQARVKALVQMRHLVITAPEELQHRLKGLTTSRLVIAASRLRGDRSSDPVVAGAKVALSALAHRIQSLDLEIADLEARIFVLVEQTAPELLGRFGVGPDTAASLLVAAGDNPERLHSEAAFAHLCGVSPIPASSGKTNGHVRLDSGGNRQANSALWRIVIVRIAHDPRTTAYFERKMKEGCSKRDVIRILKRYVARELYRYLPRG

SEQ ID NO: 353133 - protein, 482 aa, unidentified
MKKRNIFQNRSQQLLRLFEKAGNRLKVMCVPIDYAKKDHIVMFCNGYGDIMRKPFSVKNTLEGVKYLIDQVMRSCRQRHIKKEYVFFGGEDVNSYAENFANALRTKGFLVANVNAHDAKKQRENLQASTDRIDLMGIAMMLLNLRAKCSSAQDGIYRNLRTLVRHRKKLVVMKTEVKNRVHTLVDRLFPGFLNEKNTGINPFSKSSLALMEDRFSAQQIRRRQKSTLIKILKRCATPDAEKIAAKLHSYVTQVITTPDEYAATLQLSLQHHIKHYRCLQENIDQLLSEIALVLAQTQAAFLTSIKGVGIVLAAGVGSEIGNPFEQKPLNNLTSYCGIIPRVKQSGGIEGHTHTGRVSKRSNHLLKDYVVQSAFHIGIRGPQPLLQDYKRREAAGQHADFGIGRRFLRMAMCLMRSSQVYLPPKLRSPKTQMQERAGYYLTAWPLLRDKWKKAHAHQLAFAKDQPLGQWRQVVQELYDINLKL

SEQ ID NO: 353134 - protein, 341 aa, unidentified
MEEYIGLDVSMKETSVSIRRAGERIWRGKCASDPRTIAELIRKRAPAVKRVVFETGPLSIWFYHSLRTEGLPAICIDARHAKAALDMATNKTDANDADGLAQLAEVGFFREVRVKGFDSMLTRTLVAARTRLVRITTELSNQIRGVMKTFGLLVPAGKGSTFEKNVRSLLADQDGLASIVLPMLEAWRGIRIRAAELGRQLVRDARQSQACRILMSIPGIGAITATAFSTAIERPDNFKKSRSVGAWIGLTTRRYQSGEVDYDGHISRRGDCHLRGLLYEAAAVILTRSSTDSTLRTWGRKLRERIGFKRAAVAVARKLAVIMHTMLTSGELFNPNAGAAA

SEQ ID NO: 353135 - protein, 372 aa, unidentified
MTIFLIKISLTVEDAMKKNTKLNFTGQQLYIGLDVHKKSWNVTIILNGFQVKKFSMNPSPKELYNYLTKHYPGAEYYSVYEAGFSGFWADRQLRDLGIKNIIVNPADVPTKSKERRRKTDRIDSGKLARELSVGHLEGIYIPDEKIEAFRILVRLRRQLVTDQTRIKNRIKSLLLFLGEKVSEDIEEKHWSKKYITALKNLPIREANSKKALLELLETLESLRNQIASVVKQLRKYVAEDEEANKIITLLRSVPGIGFVLSIILYSEIIDIKRFKRLDDLATYVGLSPAVVSSGEKEVTLGLSKQKNKYIRNYLIEASWTAIRKDPALQMAYGKLIQKMPKNKAILRISKKLLNRIRSVWKNQQPYLLSVVQ

SEQ ID NO: 353136 - protein, 363 aa, unidentified
MTSMTITTAVVTGGVDTHGQTHHAAALDLVGRQLGDREFPTTPAGYRALLKWLQGYGHLERVGVEGTGTYGAGLTRQLRAAGVTVVEVDRPDRKARRAKGKSDPLDAYSAARAALAGTATGVPKTRDGRIEAIRALRVARSSAVKARSQATNQLKALLVTAPAQLREQLRTLSTTALVATCARLRPTGDIGDPARATKTALARLARRHQYLSAEIGDADTDLRTLVIAASPRLIALPGVGTEVAAQLLTTIGDNPERLHSEAAFAHLCGVAPIPASSGRTHRHRLNRGGDRAANNALYIVVLGRLRYDSRTRAYAERRTTEGLSKPEIIRCLKRYVAREVFAVLTARAVEDPVATTTTMSTAA

SEQ ID NO: 353137 - protein, 338 aa, unidentified
MKTTTFGVDLAKRVFQIHWVDMETGEVGRQQVKRDQLRTFFANRAPAVIAMEACGSAHYWARQLASLGHEVRLISAHFVRPFVKRNKTDVADAHAIWEAAQRPEMRFVAVKSESQQSVLTLHRVREQLVKVRTMQVNQIHGLLYEFGVAVPANRHSLREAEQALAQLADTLPAMVIDTLREQLQRIGVLTKDIAEIERRLMVWQRENEAAKRLTAIPGVGLLSATAAVATIGDPRMFRSGREFAAFLGLVPRQSGTGGRVKLLGISKRGDVYMRTLLIHGARAVLARGKHLSEVLQRLLERRPFNVAVVALANKIARTIWALLAHDRAYEPGDAARAA

SEQ ID NO: 353138 - protein, 382 aa, unidentified
MAIDSDGQRLLSRRVANDETALLEVIAAVTTLADGGEVTWAIDLNAGGAALLITLLIAAEQRLLYIPGRTVHHASGGYRGEGKTDAKDAAVIADQARMRRDLQPLRASDDITVELRILTARRTDLVADRTRAINRLRAQLLEYFPALERAFDYSKSKAALILLTGYQTPDALRRAGTARLAAWLRKRKARNADTVAATAIDAANAQHSIVPGQQLAATVVARLAEEVMALDTEIGDTDAMIEDRFRGHRHAEIILSLPGFGVILGAEFLAATGGDMSAFASADRLAGVAGLAPVPRDSGRISGNLKRPRRYDRRLLRACYLSALVSIRSDPASRTYYDRKRAEGKRHTQAVLALARRRLNVLWAMLRDHSTYQPTAPNAAAA

SEQ ID NO: 353139 - protein, 391 aa, unidentified
MTKPKTKTVNDFSRCLDPLDMDATLIAVIEMSQSSWLVAGIVPGVERQPLKKLAIDEDALLSLLKRWRAEAEKNGHRITRIAVAFEAGHDGFWLARWLAAQGIEAHVIHASSVAVTREHRRAKTDRLDTELLKRGFLGWLRGERGHCKMVAVPTLAEEDAKRPSRERETLVGEASRIITRIKSAFVRLGIRSFNPKLKAAAARLETLRTPEGAPIPPNTLAALKRDLERHQIVKKQIRELEQTRLEILTQAPAKGPNVMVLLLARVIGIGVETADMLVREVLSRTMRDRRAVARYAGLTGSPDESGAKRRDKGLARSGNARVRHGMIQLAWRFLLFQKDSALAQWYRQRTANAPSTRKPLIVALARKLLIALWRLARDGVVPEGVQLRPAA

SEQ ID NO: 353140 - protein, 376 aa, unidentified
MEHDSTLYVGLDVHKDSITVAYALGSGEVEVLGKIGTTKADIERLCKRLQSKASRICVVYEAGPCGYGLYRQLVQKGFDCIVCAPSLIPRKPGERVKTDRRDAVKLVRSLRAGDLSAVYVPTVDDEAFRDLARAWVSAKDDLKRARQRVKAFLLSHGVRYTGRADWGPAHRRWLSAFSFDSLWQQLAFDELRRTIEDRLAQCARLEAALREAVVNWRFYPVVLALQTMRGVQFTTAVGILAELGDLSRFAHPRQLMAWLGVTPCEHSSGDKRSQGSITKNGNSYARKLLIEAAWSYQHPARVSPEIQRRHEGIPKPIVDRAWDAQVRLCRRYRRLVARGKQKNIAVVAVARELSGFIWDISRLAMSLAIPRDVVTA

SEQ ID NO: 353141 - protein, 341 aa, unidentified
MTKITTIGLDLAKRVFQVHGVDATGAVVLRKRLRREDVLVFFTQLPACRVGMEACSTAHHWARELQALGHEVRLMPPQDVKPYVKRNKNDAADAEAICEAVGRPSMRFVPVKTIEQQSVLALHRSRDLLVRQRTALANAIRAHLAEFGIIEAQGLHKLERLTQIIEDETDNRVPVEARDALSALVALVNELNTRIDAIEKRIRTWHTASKASRRLATIPGIGPIIASALTATVVDASAFANGRAFAAWLGLVPRQNSSGGKDRLGRVSKQGNGQLRRLLIIGAQAALQCSKSLRAHPWVAALLARKPRLVAAVALANKIARIAWAVMSKQEDFRGLAATPA

SEQ ID NO: 353142 - protein, 372 aa, unidentified
MSANTITWVGMDAHKNSIQVAAWIPGQSEPVEWSEDTTAEAIRRLGRRLRRLAPGEVRACYEAGPTGYGLQRLLGVEGVLCEVVAPSLTPVKPGVRIKTDRRDARKLGELLRAGLLTEVHAPSETDEALRDLCRCRDDVRVDLLRARHRLSKFLLRRHLIYRQTKHHWGSRHVAWLEQLRFDDTMSQATFDSYFLAVQQLEERLRQLDARLAEFGAQEPYREPVAALRCFKGIDTVTAVCLVAELHDFRRFRSPRQLAAYVGLVPSENSSGEREQRGPITKTGNRHVRRLLVEASWHHRHRPALSRPLRARREGQPARVLAIADRAQERLAARFRRMSEAGKVHPKTIVAMARELCGYLWAVLHPFAPPARG

SEQ ID NO: 353143 - protein, 426 aa, unidentified
MLNSQINKIQAITSDTLIVGVDIAKNIQWAQFINFRGIEVSKHICFENNYSGFNSIMEKIEEIKSKNNFLSVIVGMEPTGHYWKTFATFLHNNGIKVVQVNPYHTKKAKELDDNSQTKSDKKDALVIAKLIKDGRYSAIYFPEGEYANLRNLSNTRLEVSRLLNICKNRIHACVDEYFPEFETVFKSFIKGKVALHILKRIPFPTDILELTLEDIISVIREAAKKSVGKKKAEELIRAAKVSIGVKVGLEGARIRLNNLLEEYELYHNQLEKIEKEMAQELEKTGYKDILTSIPGIGIISAASFIGEIGDPKRFSNPQQIIRLAGYNLVEDSSGKHKSKTMISKRGRKILRTILYKISLIVVCKNQEIKLLYKYLITRKENPLKKKQALIVISGKMVKIMYSLIKKEEVYDKEKVLGIYRKQQIVA

SEQ ID NO: 353144 - protein, 354 aa, unidentified
MELHTIGIDLGKTVFHLVGLNPCGEVVVRKKFSRKQLLHFTANLKVKLIGMEACGGSHFLGRALREQGHEVRLMPAQYVKPYVKTNKSDYIDAEAIAEAVGRPKMRFVPIKSDEQLDLQSLHRVRERWVMRRTAVINQIRGLLLERGITVRQGRGHIDAALPGILEDASAQLSGALRVLLAQLKLELDHLQMRIDEADAMINKAAGDSEACRRLVAIPGIGPVTATAIIAAIGNGAAFKKGRGFSAWLGIVPGEYTTGGKQKLLGISKRGNSYLRRLFVQGARAVLQQSAKQSSGLSAWLAQLTSRTHRNVAAVALANKLARMAWAVLAKNEPYRPPDVGRCGDNVTGLQMTPG

SEQ ID NO: 353145 - protein, 349 aa, unidentified
MLADELDYVVGVDTHLDEHVLTVLAAPAGAVLAKQAVPANARGYREALRFVEEHAEGQRAWAVEGAGHYGAGLARFLAGRGEPVLEVSRSPRAERRLRGKDDSLDAIRAARALLSSETLALPRAGQRREALRLLLIARRSAVDVRREALVQLRSVIVTAPERLRDDLRGLPVGRLLERCCRLRRSRCASADELATRLVLRSLARRIETATAEAGELEAEILGHVRALAPKLLDEPGIGPIVAAQVIIAWSHPGRVRSEAAFARLAGVAPIPASSGQTTRHRLSRGGDRQLNRALHTVILHRRLHDPATKTYIERRVAEGKTRREATRLLKRYLARHLYRVLDNQASLMT

SEQ ID NO: 353146 - protein, 337 aa, unidentified
MKITLIGIDLAKNVFQVCGVNQAGKSVFNRAVKRAQLLSFLAQHPAVQVAMEACSGSNYWGRTLQRLGHKVLLIPPKHVKAFVTGNKNDRNDAFAICEAANRPRMVFVQPRSIEQTDMILAHRVRERLVGQRTTLINQLRGLLQEYGIVLAQGKEKLRNQLPDILEDAENELSMAARACFQQMLNEWAQLDESIAGHERSIKRQCKETAACQRLTGIKGVAEITATALVAYAGNGAQFHSARHFAANLGLVPREHSSGGKQKLGGITKRGNSYVRRLLVQGAWSIIRHLDRSTDRLSEWAKQLIQRRGKHVAALALANKLARISWAMLYKQQDYKAV

SEQ ID NO: 353147 - protein, 343 aa, unidentified
MTHYVGLDVSQKLTSICIVDATGRKLWRGQCASDPEQIERAIGRHGGEDVRVGIETGPMTPWLVHELRGRGLDVTCLDARHAKAALKLQINKTDQNDAEGLAQIMRTGWYRAVHVKSFDAHRARALLGARAQLVGMTTRLSNHIRGVLKTFGMLPGAKRGQRFDRRVESLLAERADVALIVRPMLVAWRQLREQVAGFDKTVRTLVKSSPACRHLMSVPGIGVLSVLAYVSTVEDPARFRRSRSVGAHLGLTPRQYQSGEIDRSGKISKCGDTLARTLMYEAAVVLMTRVKRASGLKDWAQAIARRSGAGKARIALARKLAVIMHHIWRSGAPFRWPAPSASA

SEQ ID NO: 353148 - protein, 344 aa, unidentified
MNSTTIAVDVAKSVFEVAVSEEPGLVRERHRLSRARFRQFLAEQPSATVVMEACGSAHHWARQAEAQGHRVVLVPPHAARPYVLRNKTDRTDAKGLLEAFRNDDLRPVPVKSETQQALAALHRLRSTWVATRTARLNTLRGVLREFGVMIPTGAHHVVPHVRALLEDVDSGVPGLLGDALGKALREISELEERIHAIERQLERAAEPALLIRRLRTIPGIGVLTATALVAAVGDVQRFPSARHFASYLGLTPREHSSGQRRYLGAISKQGDTYLRMLFIHGARSVLHHAKSKTAPAPDRLRRWAVQVERLRGHNKAAVALANKLARIAWAVWRSGNDFTTAPAA

SEQ ID NO: 353149 - protein, 309 aa, unidentified
MTPKNYIAIDISKDTLEVLDQQSKKSCTFRYRPDALQELLQWIQGHKTPLVVCEATGGYERELLAMLREHGVPAALVNPSRVRAFARSEGLRAKSDPLDAALLLRFAQSKALEATPPLSPLQLTLQALLDRRSQLSEDLAREKNRLEKCPQCIRRSIQKMIRNLEKEIDRTDQQIEDLIAGDQTMSEQNQKMQSVVGVGKVTAWSILAYLREITTLSRNKLVALAGIAPFVKDSGKYKGKRKIDGGRAKVRRCLYMAAQSAAVHNPHIKAYVERLRARGKPYKCAIVAAMRKLLLHLQSILQIPEKCLA

SEQ ID NO: 353150 - protein, 371 aa, unidentified
MNSIVYVGMDVHKEQYTLCCYSYDTDKVEYKQTMPSDYKLVLKYMEQIRSRYEGEVSFVCGYEAGCLGYSLYHQLKDHAVDCKILAPSTMAITNTHHVKTDKRDAANIARCLAFHTYSEVYVPNNDDNDVKEYIRMRDDQKLYLKKVKQQILAFVLRQGKRFEGGKTYWTIAHLKWLKTLELSDLQREALDEYLLTYEYLTEKISRFDERIEELASVERYEEKVKHMSCLLGIKTHTALSMIVEVGDFERFEKAPKFASFLGLVPSEDSSDTRVNRYSITKAGNSHLRRLLVEAAQSYTRGNVGHKSVALKQRQKGNPPEVIAYADKANERLRRRFYKMTLNKGVNRNVAATAIARELACFIWGMMTEHVS

SEQ ID NO: 353151 - protein, 405 aa, unidentified
MNAVGIDVSKGKSTVTIRRPGDVVVLAPRDYCHTQSSINDLITTIKSLEGETKVCMEHTGRYYEPVASWLSSAGIFVSAVNPWLIKDFGNESIRAPKTDKADARKIARFALDRWAKLPQYNRMDELRNQLKTMNRQFGFYMDQKTAMKNNLIALLDQTFPGANSFFDSSARSDGSQKWVDFVYTYWHVDCVRGKSLEDFTEHYQKWCKRKGYNFNLRKAEEVYLATADLIAVFPKDDNTKLLIRQAVNLLNVASETVETLRIKMNQAASQLPEYSVVMEMDGVGSTLGPQLIAEIGDVTRFKHRGALTAFAGVDPRPNESGDYKRKSNPTTKKGSPQLRRTLFQIMDGLIQRSPVDNPVYAFMDKKRAEGKPYYVYMTAGANKFLRIYYGKVNEYLSPPEGSKDS

SEQ ID NO: 353152 - protein, 312 aa, unidentified
MEKLSYGGIDVSKDRLDVVVLPEGWFFSVSNDTAGWTELVARLRPLAVCAIGLEPSGGYERGIIRALLAARLSVRRINPNKLRQFARARGVLAKNDRLDARLMAEYVAIMPTRAVQRDDAVDRLAEVVTMRRQLCDEHVTVENQTAHLEDAMLRRLSKRRLVRLEADIRLLDKRLAEMVATNAAFAQLYELLTSMPGVGPVLAFTLIALLPELGKMGRKQIAALVGLAPYDFDSGKLRGHRSIYGGRMPIRNVLYMAALSASRYNPALKTFSNRLAHANKKSKVIIVAVMRKMITTLNAMLRDNATWQPQSN

SEQ ID NO: 353153 - protein, 423 aa, unidentified
MENTAARKRKQVPEGYLIIGVDPHKKRHAAVAITQDFTTRDKFKFDNTREGLEIMLRRVRTEMMKSGCRGVMFAIETGGHYWRNLAYALDEQGIPFRFINQFTLKRRREGKDLNRRKNDYRDSEVAAQLLCTGEFTETKVPQGVYAELRTAHNAYRRLVKERTRIINLVKGLLDALFPEFTHVFKDPCGLTSMSVLSICPIPMVIAGMTEAEFVATIEAKHQGRLMRRKLRTLNYMARTSIGIEAGARSVSSEISFLVEKLELIRRHIRIIGQTLVRLVDETEEGKYLLSIRGLNYIAVAGLLAELGCFKAYRSAKQMIKMAGSNPTESESAGKRGAHTPMSKQGRPVLRYCAWTSVIPMLRLNEDFRAWAKQRRERPAHANPLNGREVVGAALNRLLRLAFAMVKSQTYYQVSKLELALVAV

SEQ ID NO: 353154 - protein, 344 aa, unidentified
MYFIGVDHHKQASVMTILDEDGQELKNGRVINLREKVKQFLEGYHPFTAVLEAGRSSYVMANLLRELGGEVKMANAYQVKAIAHARIKTDKRDSRTLAHLLRADLIPEVYQRGEWNRRAQRVMRLRAYWVAKQTEVKNKIRALLAQQKEEIQLEVGKREEGLFSGKGVEFLTKLPLEDPDKMVLDDLIQGYQEVQAHIQRTDGLVRVLYGEIEEAARIDTVPGFAATLSVLVAVEIADVKRFPTVADLHSYAGVIPSTYASGERTHHGRITKQGSAWLRWAALEAAYPAIKKDLSLRVLYNRLAKRKGANVAKIAVARRLLTIIYRVLTEKREYFPDKMKISAA

SEQ ID NO: 353155 - protein, 354 aa, unidentified
MTSTKYIGMDVHKESISIAVLNFAGKVVMECVIETKASTTLQFIHGLSGDVRVTFEEGTWAAWLHDLLKPYVTELVVCNPRKNALLKEGSKSDQIDARKLAELLYMNKIKSVYHGEHGLRMLKELSRSYLTISKDLGRVMNRLKALYRSWAIPCVGTQVYAPRYRSEWLSKIREAGVRRRAELYYQQLDALRLLRQQARKELLAEARKHSATKLLRQISGIGPLRAAHLVALMQTPHRFRTKRQLWNYSGLGLETHDSAQYRVVEGQLQRSKKPVTLRGLNTNHNHDLKAIFKGAAMRASTCDGPFRDFYEALLAKGRRPTMARLTLARKIAAITLIVWKKGVSFDANYLKQAA

SEQ ID NO: 353156 - protein, 341 aa, unidentified
MNVAGVLYGGLDLHGDNVFCSLLNEARQVVFERRLPNDLETIREALEPFRKRIRSLAVESTYNWYWLVDGLRGLRYDTRLANPARMQENIGLKVANDRTDARFIARQLVNGILPEGYVYPPETRGVRDLLRRRLRLVHERTAEWLSLEGLIARHTGQDMGMRALESCKLGELLAGKPEAQLMAQASFRHIAFLDREIKGLEKAAMSALPDAAAYRRLMTVPGIGPVLARTILLETGPIARFPHAGNYASYCRAVRSVHTSNDRKKGVGNDKCGNKYLAWAYVEAANFAVRYSPELRAWFQRKQTRSGKRVVAVKALACKLAKACFFMLRDEKDFEVKKLIG

SEQ ID NO: 353157 - protein, 368 aa, unidentified
MGAYVGLDVHAKFCFYVAQDEEGRELGRGEVPTSRDGMIAIQRILELPDGTPVALETGTVSFFVARQLAAVGFRPVVVDASEVRKKAWRPTQKADSRDALELCEGLRRGIYRTIVHVPTRDISLLREILSRRRHFVRLASAEINASKRILRANGLGSVPFRVHAEVSWDRLFQKLAGHDEVLSFLRRHRSAWAELHRHAEELEEELAIAAAPFEKQCRLLQTVPGVGPIIALTTIAAFADVQRFPSAKHAASFAGIVPTTHQSGERSLHGHITHRGSPELRAMLCEAAQNAARPNHPLNPFFRRIAVGSGSKRAVTAVAHRLCRILFSMLRHERPFDPARLGIEMGPFVHTSTRLYRLRPAPRSPHVK

SEQ ID NO: 353158 - protein, 347 aa, unidentified
MIVVGIDPHSRLHAAAAVDEQGRLLEGIQVGSGPGELARLQAWIERLPRPRLVAIENARGYGLAIVRLLLAQGEELVDVPATLTSNGRRGSGQRGKTDQGDALVVARIGLRDQDRLPRLDATLLDDELKLLADTRDQLIVEAGRWRNRAHALLRVSSPGYQSKTGALASAGSVRRARTIAKRSVAEDPVRGRLAVQALDRLASLERDAGKLEREIRELLRVRGCTRLLAIRGVGPIVAATILGETRGIGRFRSAAAFAAHSGTAPVPASSGRTQRHRLNRGGNRQLNRALYTIAMVQARWDPAARAYLDRKLAEGKSAAEARRCLKRHLANVIYRAHTADTEAATLT

SEQ ID NO: 353159 - protein, 416 aa, unidentified
MKDLLEVCCGLDVHKEMIAACLLSGSLGTEPKEEVREFSTLLSGLEEMRGWLKENNCRDIAMESTGVYWFPIYNVLEAGAEEDFQFNITVANPYHMKNVPGKKTDIKDSRWIAGLLRAGLLEPSYIPPREIRELRDWTRYRRTLVQEMTGHKNRIEKQLQACGFKLSTVLTDIFGKTGMDLIRKLCEAGSIDSEEILNLLHGTARKKLDVIRQAVNGRMDGHDRAFLSMLVRNYEQSLKEIEDVEKEIYACAQKYEAGIALLETIPGISGMTAITMVSELGTDLSMFPTSGHLCSWAGVVPGDNESAGKKKSNRLKKGNPYVKCVVCQCAWAATRARKNYLREWFYRLSKRRGMKKAVIALGHKLLVIAYNILTTGEAYDENRFAEVQKRVDESKKMKLIAQARKYGLVLTDAAAT

SEQ ID NO: 353160 - protein, 478 aa, unidentified
MEQKEAGQPPRRLVGIDLGIASRHSVRVLEADGQVVGRSSCVPAVESLAAVERAALAGAPAGTRLAVVFEPTGPAWMPIAVFFARRGHAVYRVSSAKAADLRRFLRRHAKSNGIDAETLARMPLADPGGLQQLELPGPGAAALDRRVRACGRLTEAASKHKVRIKDLVRQLMPMTPLTGDLGKADLAVLERYADPRLLLAAGDGELTRLITTASGHQQGSQRAGQWRAAAAAAAELYGDHPAVPYDELAAEVATEIRLLRAIQAELAGHAAAREQHYRQVDPGQLARSLPGFAEISAPVLVAAMGRPGRFRDGTKFKSYVGLAPRASQTGETDRKGQPMSKAGPSQLRSAFVRAADTARRQDPQLARIYYLQMTERGAPHLKACCIVAGHLAERAWATLNRGTPYVICDNNGNPVTPAEAKKIITDNWTVPEDIRKRRRNRKTAGKAPQAALTRPDKRGDLPHPRSSRPRAKAVNPTT

SEQ ID NO: 353161 - protein, 473 aa, unidentified
MNSGYVGIDVSKGYSDFVILNQELQVLTKPVQFDDTRDGHQRLIRWLGRCMAAHKLERIYAGVESTGGFEDNWYASLMEAGKELPLHVARLNPSTVKNAAKASLSLQTTDALSAVHIARYLIRYADEITWDTTLTKYRSFRSFDGHIRLLVRQRTQLITQFRQLLYSCFPELQRFCKHGIPNWVLELLKAYPSPQKLARARAQTVAKINFISLKKASQLIDYAKQTVAARRHEVDASLIASMACQIQESQAQITALKEKLVATCAGEQTRLLETISGIGCYSAASLMIQIEDIRRFACPGKLSGYFGVYPSLKESGDKQSVARMSKKGRAAMRATLYMCANSAVLKDPHLKAIYHRHRGKDKSHKQALGVVMHKLLRIIWGVLSSETVYDQMVDQVNQRKQKQFATPREDAQQQEMASKRREQPFDEAAPISPIATKKRKAYQQSQVSKAEQVRDIEIRPKKDKKILKNILEI

SEQ ID NO: 353162 - protein, 331 aa, unidentified
MGNVTTVGIDLAKSVFSLHGVDASGAVVLRKTVSRARLMEVVAQHPACLIGLEACSGAHEWARRFQELGHTVKLMAPRFVAPYRKNGKNDGNDAEAICEAVSRPSMRFVPIKTLEQQAVLCLHRVRQGFVEERTATINRLRGLLAEFGFVIPQKAAEVRRRATEWLEQLPPRAACAVRDLREHLRVLDARVKEYERSIETHARDHEHAKLVQQRLGIGPMTASAIVASVGDVREFKNGRQFSAWLGLVPRQHSTGGKQRLGHITGRGDPYLRTLLVMGARSVLQRASSQTDPLSRWALAVRVRRGYHRACIAVAAKNARVVWAMLNQRAST

SEQ ID NO: 353163 - protein, 410 aa, unidentified
MTVIAITQNTPVLVAIDIAKARHEVLIAVPGKKRRRRLTVLNELVDFTRLITALKDYGRPVRAAFEATGNYHRALAYHLATAGFEVKLVSSVALARTREALHNSWDKNDPKDAQVILHMMEIGNEQFYHDPLVRGTNDIQELSKTHDIVSKSKTELWHRILTHYLPLYFPEADRFHRSSRSAWFFAFLERYPSPHFISAMSKDAFTADAWDVVGRKVAKERLLADIYETSKVSVGLPVALDSDAISMFRLVLGEGRSLIAQRNQIEARAVALLKDLPDYQLLTSIPGIGPINALTILAEAGDLRRFGHHRQFLKFCGMDLATIQSGTFRGQTKLSKYGNARLRRTLWMAGQVAILQRTNSFRDKFERYISKDRQNTHLRRKAYTAIAAKMARTVHGIIKNGEPYRPFFEG

SEQ ID NO: 353164 - protein, 354 aa, unidentified
MTKGNTLTIGIDLGDEYSEVCVLDLEGEVSEEGRVKTSEAAFHRRFARLEPCRTVLEVGTHSPWVSRLLQSLGHECLVANPSALHKKGRKKSDKVDAEKLARWGRSDPEMLAPIQHAGAEIQADMAIVHSRRSLVEARTKLINRARGLVKSYGGRLPKCDADYFAGKVRPYVPSELEPAVEPLLQSIALLTEQVKTLEEQIEALATDKHGHATAPMRQVKGVGPITSLTYALTIRDPERFSRSRQVGPYLGLTRRQDQSGDSDREHSISKAGNVYLRRLLVQSAHHILERGPDTDLKRWGLGKAAGGQRAKRRAVVAVARKLAVLLHHLWLTGEVYEPLRQREVKASSPTPGAA

SEQ ID NO: 353165 - protein, 392 aa, unidentified
MMVSVGIDVSKDKHDCFIVNSEGEILADVFTIPNNMDGFHYLLQRIQDCANTQNKIKVGLEATGHYSYNLLGFLLDNGLPTYVLNPLRTNIYRKSLSLRKTKTDRVDARTIASMLLSDAGLKPYTDTAYHNEELKSLTRYRFDKVKERAKLKSSIARLVCILFPELEKLVPSLHIASVYALLEEFPGAKQIAAAHLTRLKTLLETASKGHYKRDMALEIRDAARNSIGSWMPAKSLELQHTIRLIRELDDEIAEIEKQIQAIMDELNSPITTIPGIGFRMAAMIFAEVGDFTRFDSPDKLLAYAGMSPSTYQSGQLKNCYPHMEKRGSRYLRYALYNATKYVCHWDPTFAAYLAKKRAEGKHYNVALSHAAKKLVRLIFAMEKSRQPYRLVA

SEQ ID NO: 353166 - protein, 416 aa, unidentified
MLKIIHKICCGIDVHKKFVVATIGTTNETGITEYQTKQFSTFTVDLLALRKWLVEHSCREVCMESTGKYWIPVFNILETECNVVVANPKYVKGIRGKKTDKKDSIWLCDLHKHGLVPSSFIPPLAIRQIRDLMRYRVKLTNFKSSEKNRIQNSLTVSNIMLSSVVSDTFGKSSIRIINHILKNPGDTDFDVVPMLHSSMKKNAKDITKSINGNLTKPQAEKMAVCFSHLHSIEKLKLEIESAVFKLIEPYQEQISLILTIPGIKNIYTAIAIIGEIGVDMSVFQSSRHLCSWAGLTPQNNESAGKKKSVRVSRAGVYIKPLLVQCANAAVKSKDFPYFRVKFEQIKYRRGHKKAIIAIAHMLLNCIYHMLSKNEPFDYKRYRIETVSKPKPLLKFTAEQAILLLESLGAQIILPTA

SEQ ID NO: 353167 - protein, 343 aa, unidentified
MQIRSVGIDLGKTTFHLVALGDNGKVLLKKKFTQRQLITFTANMQTSLIGMEACSGAHFLGRALRDQGHDVKLIPAQFVKPFVKSNKNDFIDAEAIAEAVDRQNMRFVPIKTDDQLDLQALHRVRDRLITRRTSVINQLRAFLLERGLVFAKSPAKLRERMPEILENAEEDITPRMRNLLALLWNEWKELEQQLADLNHEVELIASSDAACMRLRQIPGIGPLVATAIVAAIGNGAAFRKGREFAAWMGLVPKQYSTGGKAKLAGISKRGNKYLRKILIHGARAVVLRSKRERIAMGAWMTSLETRAPRNVLIVATANKLARIAWAVLSTGQDYRAVPEALTA

SEQ ID NO: 353168 - protein, 381 aa, unidentified
MKTVAGLDVHKSSIFMCILNEQGEKIEKKFGVSTREINQLSVELKSHYVSEVCMESTGIYWKPIWHLLEDHFRLYLVNPQFLKQLPGRKSDVKDAEWIATALLKGLVRNSFVPNAKIQQLRQYGRRINELNKDIVRCEQRIDMILQSCNIRISNYVSNTDGKSYKKVVESLINGERNADKLVALIHGRTLNKYGRETVRDSLEGNVGQADIDLLRQYMEVLQLYQRQKQESLTAMIQLCRKHYNQAFMLLQSIPAIKEQSAAIIISEIGTDMSLFATAAALVSWAGLRPRNDESAGKIKSRKITHGNKYLRKALMESAWGALRTKGSVFYDKFWRLRGRNKQQNKCTVAIARHLLVIIWSLLSKNAYFDNDYMHKNISCRA

SEQ ID NO: 353169 - protein, 393 aa, unidentified
MPRKRILVKSIDTSISYQVIGIDLAKHLVSVCLITDAGEIFGIDRLTYDDLLKSAERMSPTLFCMEPCPEVHYLAEKLQGYGHHTKVIDGAAVKEYIKTHFGGQKTDLNDAQAIAFLSLDTNLPEITPKNTSNSVLSSIQAVREQFRKEYIQSFVSLKGICQRWGLPISKGVMNKNKVEELVSESKKIPQEVKDWLLELLQSCRELQKRLNKISKYLKEYADNDEICQKIMSVPGIGPITATRLKATIGDIQRFEKPKSIVAYYGLVPKSKATGHNEKKGGITRRGDRVARSLLIEGAGVVLNLAAKGYLRSKPLNKWIEKKRKLKMPWGKLCCALAAKMLRIVRAILIQGTSFNAKIAGVARCSLPKESRNNVMGNNKLSEIPSPNGSVYIH

SEQ ID NO: 353170 - protein, 347 aa, unidentified
MDQQCHYVGLDVSLETTSICVIDDAGAIIWRGKCSSDPNTITAMVRQHAPGAVRVGLETGQLSNWLTLSLRRRGVPVICMDARHAKAALSLQINKTDANDAFGLAQVVRTGWYREVAVKSMDAHTLRMLLVARSRLVSQRQATANTIRGLLKTFGLVVARGGKGLFPVRVREQIAGNPALIAIIEPLLAVWYAVRDQVAMLDRQMLARARNDQVARRLMTIPGVGVVIALAYTAVIDDPARFRRSVSVGAYLGLTPRRYQSGEVDTTGHISKCGDSLLRGYLYEAAAVLLHRDARVSILKSWGLALAKRIGMRRAKVAVARKLAVIMHRIWSDHSEYRWTAIPPTAA

SEQ ID NO: 353171 - protein, 343 aa, unidentified
MEHYVGLDVSLKQTSICVVNQVGSVVREGVVDSEPEAIATFVRSKAPGAVRIGLETGPTATWLWTELKQLGLPVICIDARHAKAVLKMQINKSDRNDAAGIARIMQTGWFKEVRVKDLDSHSVRALLASRALLVKIKRDLENQIRGLLKNVGLVIGRAKFNVFAVRAEELIEDRPELIAVVGPLLKARKAIEQQTDDLDRKVLKLARYDAQVRRFMTVPGVGPITALCFKATIDDPTRFKRSRSVGAYVGLTTRRHASGEIDWTGRISKCGDAMLRSYLFEAAGVLLTRVPKWSALKAWGMRLAKRNGLRKAKVAVARKLAVILHRMWIDGTEFNWSKKEVAA

SEQ ID NO: 353172 - protein, 414 aa, unidentified
MALPESAYYVGIDWGSSEHAVCVLTEAGRVKTEFAITHTAVGFADLIRRLGKLGQAEDIPVAIERPDGRLVDQLLEAGHPVVPVKSNAIKAWRDAEVLSGAKSDPGDAMVIAEYLRLRHHKLSAARPFSGHTKALRTVVRTRDDVVRLRVMATNMLSALLDAFWPGAKSLFADVESPIALDFLTRYPTPASAAALGEKRMAAFCVKHSYCGRRTPAELVKRLRSAPAGVTGEIETEAGRDAVVALVTVLRTLGTVKKDLDRSVAAHLGQHPDGRIFTSLPRAGQVNAAQILAEWGDSRTAYDGPDAVAAFAGVAPVTKASGRMRGVSYRWACNKRLRQAVTTFADNSRHESAWAANVYQRARGRGMDHPHAVRVLARAWIRVIHRCWLNHEPYQPDRHGGLQRLTTPQPLAQAV

SEQ ID NO: 353173 - protein, 424 aa, unidentified
MQNTAARKRQQVPGGYLVVGVDPHKKRHAAVAITQDFTTQAKFKFDNTREGLEMMLERARVEMLKSGCRGVIFAIETGGHYWRNIAYYLDERGIPFRFINQYTLKRRREGKDLNHRKNDYRDSEVAAQLLCTGEFVESVIPQGVYAELRTSHNAYQRLVKERTRITNLVKGLLDALFPEFTQVFKDPCALTALSVLSTCPIPRVIARMEEDDFVATIEARHKGRRLMRKKLRALHYSATTSIGINAGARSLSYEIAFLVDKLELIRQQIRIMEGALIKLVDETEEGKYLLSIRGLNYIAVAGLLAELGCFKSYRSAKQMIKMAGSNPTESESAGKKKSQTPMSKQGRPLLRYCAWTSVIPMLRFNPDFRAWAKQRRERPVHANPLSGREVVGAALNRLLRLVFALVKNQTYYLDIKPALTSIAA

SEQ ID NO: 353174 - protein, 453 aa, unidentified
MAQRKQKIIVKPGPSREPLTITHPNTAGIDIGSASHYVAVPPDRDDEPVREFPSFTVDLNALADWLQACGVDTVAMESTGVYWIPLFELLESRGFKVLLVNARHVKNVSGRKSDVLDCQWLQKLMTYGLLRGAFRPAEEVCVLRALWRQRGMLLKGQARHVQHMQKALTQMNIQLTNVISDVVGETGQKILRAIVVGERDGQVLAAMKNARIRAGADEIAKSLQGNWRAEHLFALKQALDMFDFIGTQLAECDREIEQQLQRLHVHEGEPAKGKKRGRARNAPKFDLRTQLFKMCGVDLTRIDGIDVTTALAVISETGADMSRFPTVGHFASWLGLCPGTKITGGKVMSGKTQRVANRAAQALRLAAAALRSSKSALGAYFRRMCGRMDKPKAVTAAAHKLARLIYTMLTKGEEYTDQGQDYYEERYRERVLRQLAQRAEKMGMKLVVGEQPV

SEQ ID NO: 353175 - protein, 329 aa, unidentified
MGTSEARQWVGIDVSQAKLDVALRPAGCYWQVANDELGWQRLLSELQAVTVALVVVESTGGMERGVVQVLQRHELAVAVINPKRARDFSKASGRLAKTDRIDASMLAHFGEALQPLPKPLASEHQEALSDLVHRRSQVIEMLNSEQRRRHSARNRTAQADIEAHIDWLKQRVKALDGEIAQLCQADETRQQRYEWLTSVPGVGRVVATTLLALLPELGQLSTKRLASLVGVAPFNFDSGKLRGKRHIVGGRALVRSTLYMAALVAIQHNPVIVAFYQRLLSAGKPKKVALIACAHKLLGVLNALVTQGQAWRNPKDTELAQTATPATSG

SEQ ID NO: 353176 - protein, 325 aa, unidentified
MTQISEKQKLDCIGIDVSKEKLDICYTNNSKGRFLNTKAGFKKLIKSLPSNKDILVVLEPTGGYERKIIYALQTAGYNVAHAHTFKMRNYAKAMGIYAKNDPLDSYVIKSFGQDMYPKDKLQILYKKTTEFKKLENWLTRSKQLVKTIASEKQRHEKSINNDISKSHIRIIKTLEKELKKVDEKIQKLLEQAELLEKSETYKKVKGFSHACANALLIYLPELGQVSNKRIAAIAGTAPFCRESGKFKGKSKISGGRAKLRSIIYMGVLSATIHNKIISKFYNRLIKKGKPHNLAMIACMRKMLCILNAMVRNNTQWDNNYRGCSS

SEQ ID NO: 353177 - protein, 339 aa, unidentified
MQVTTVGLDLAKNIFQVHGIDDHGEVAFNRALRRAQVLAFFERLEPCLVGIEACGTSHHWARELIKLGHNVKLIPPAYVKPYVKRGKSDAVDAAAICEAVTRPTMRFVEVKTPEQQAILSVHRTRDLIVRQRTQTVNMLRAQLAEFGIVLPKGVYHALQFAKDCVDGEPLNLTRDAQEVVFDLCDQLLFLHAKILRHSRHMTQIAKSEKRVALLRTIPGVGPITASAIVATVGSGKQFNNGREFAAWLGLTPLNRSSGGKERLGHISKMGDQYIRRLLVLGMTSRIRTIRSEPEKFDPWFADILSRKPSRVAAVAMANKTARMIWAVLTRNEPYKVRTV

SEQ ID NO: 353178 - protein, 337 aa, unidentified
MDHVAIDLGKRESQVCVRDGTGQIVEEKRVRTRELGKVLGGRPRSRVIVETSAEAFGVADLAKEHGHEVRVVPSAIVRLLGVGARKLKTDQRDARALSEASCLRDLPSVHVPSALSRRLKEQCTAREALIGCRTKLTNTIKGLVRSELGSVAARGGSPRFVSKVRAQVPSQPQLEWLVAPIEALNAQIHQADRELLAIAKEHPVTRLLMSMPGVGPVTAIRFVSALDDATRFSSASEVASYLGLVPGENTTGFKPVRLGITKAGPSKVRWALSQAAWCLWRTRPNDPLVKWAKRIAERRGRQKAIGALSRKMATILWAMWRDGKRYDPPRAVSGSSD

SEQ ID NO: 353179 - protein, 389 aa, unidentified
MKIFVGIDIAKLNHFAAAISSDGEILIEPFKFTNDADGFQLLVSKLESFDKNSIIIGLESTAHYGDNLVRYLVAEFYQVCVLNPIKTCQMRKNNIRKTKTDKVDTYVIAKTLMMQDDLRFISFYDLDMMDLKALGRFRQKTIKQRTRLKIQLTTYVDQVFPEIQYFFKSGLHQNAVYALLKEAPSPKEIASMHMTHLANLLKVNSHGHFTKEQAKELRVLAQKSVGANDSAISIQITQTIQQIELLDSQLDKIEAEMTDIMKFNDSVIMTIHGIGYINGGMILGEIGDIHRFSNPNKLLAFAGLDPSVYQSGNFQAKTTRMSKRGSRVLRYALVNAAWNVVRNNATFKAYYDAKRAEGRSHYNALGHCAGKLVRVIWKMLTDEVEFNLE

SEQ ID NO: 353180 - protein, 343 aa, unidentified
MQISTIGVDLAKNVFQIHGVDKDGKVVISRQLRRKQVIEFFSNIPPCLVGMEACGTAHYWARELTRLGHTVRMMPPSYVKGYVRRSKSDAADAAAICEAVTRPSMRFVPIKTAEQQAALMLHRTRDLLIRQRTQLINALRAHLAELGLVAEKGREGVVELAAIISDERNSHALPPAMKQALQAILDQLTALQQQVGQLDRCIHAQHRASDVSRRVETVPGIGVIGATAITSTVTDPSVFKTGRDFAAWIGLVPRQYSTGGKEKLGGISKQGDRYLRRLLVIGATAVIQHARRHPEKHPWIMRLLAKKPAKLVAVAVANKMARIAWAIMAKGGTYRAPALAAAA

SEQ ID NO: 353181 - protein, 441 aa, unidentified
MATCMVLPMNQDKLHRILNGVPFSSHQPVLLSWMQQSKELGWSAIDKLRRVRKHPTYPLRFLPSRTERRLGTQRCQHALICAANAHLCKPTPVQAHPSTLDFVAAGGLMATTVFDCPQVCAPASSPRAFFGVDVASAHLDICSYGSSAVKRIANTPAAISRWLGCVPPGSAIAMESTGRYHQALAAGACAAGFAVYLLNPRDVRSYARGLGARGKTDRLDAQVIARYGAHEHHQLRLWQPVTLQQQALDELLRRRAVLVNCQQKLRMSAADCPAVLATLAPLMQEFDRALKAFDRQIRAAVQAVDTHGQAFDCITSVPGIGLLSGAALLGVFRRLASASADAVIAFLGLDPRPMDSGHKVGLRRLSKRGPPEWRRLLFNAAMSGSATKAWKGCYEHERTKGLSGTAALNVLARKMVRVAFSLFKSRTRFELAVLQNHAQSA

SEQ ID NO: 353182 - protein, 411 aa, unidentified
MQVIHERCAALDVHKKTVVTTILKTQADGSVQEWTRTFLTMTADLLALDDWLRSHGIEIIAMESTGVFWRPVFNLLEEGRQVILVNAQHMKAVPGRKTDVKDSQWLADLLRHGLLKASFIPPKPVREVRDLMRYRKTIVQERADEVNRLQKVLETANIKLASVATDVLGKSGRSMLDALLDGQDDPEMLAELARGRLRAKLADLRKALDGRVQPHHRLLLTRILAHIDFLEESLAQLQAEMEQYLDPFEEAMELVQSVVGIDETAAASILAEIGTDMTRFASEKHIASWAGVCPGNKQSGGKRLSGKTTKGNPYLRAILCEVAWAIAHTKDNYLSAFYHRVARRHGKPKAIMALSHKVLVIIYHILRTKKPYTDLGADYFDQRDRGRIERHHIHRLEQLGYTVTLIPKEAA

SEQ ID NO: 353183 - protein, 387 aa, unidentified
MIYVGIDIAKETHVAAAVDSDGVIVIEPFSFSNNHEGFKLLKSKLDSLDKSNLLIGLESTAHYAENVIFFLHGCGYELAVINPVQTAAMRKTGIRKTKTDKVDSLLICKTLMVNSFRRYTENDIKTLKLKSLCRFRQNLKKSKARLKIQLTSYVDVIFPEPQYFFKSGLHIKSCYELLKVYSSPDDIAALHLTKLSNILTKASRGRFGKQDAESLKSLAKSSVGVKNTYISIQITQTIAQIELIESQLNELETVIETAMDELDSVIMTVPGIGKLNGAMILGEIGDIKRFSDSSKLLAYAGLDPVINQSGKFNAKRTRMSKRGSKILRYALINAAWNVSLNNDTFKRYYDSKVAQGNSHYSALGHTAHKLVRVIFKLLNDNITFALV

SEQ ID NO: 353184 - protein, 300 aa, unidentified
MVIHYIGADVHCNNTELCIERNGRIVARHSLKTAAEAIRRVLDGLGGQKHLTFEEGPLASWLYRSLKDQVDTLIVCDPRQNKLIAAGGDKDDRIDAAKLARLLRGGYLHPVYHSDDLERITLKRWVALYHDRVKEATRSINKVRACCRLYGDRVPRRALRDPAVRAAWLAGLESDLADQVRLLWMDYDSHARQVRQARAQLVRRAQAYPIIGYWSALPGVGLIRATTLFAYLDTPWRFQRKNQIWKYCGLGLQRCSSGQDRHGRARPARLQLVWPRNARLKNVVVGMALSAIRSRDNLSI

SEQ ID NO: 353185 - protein, 428 aa, unidentified
MSENSTTHPEPEFVAFVGIDWADQKHAWCSQRAGATQREHGEVEHTPEMVEVWVSQLAQRFGPGPIAVAVEQVKGALVYMLSKYECLHLFPVPSTMSASMRKSLYPSGSKDDPRDAELLLDLLLQHRNKLRRLMPDDEVTRRIQNLVEERRNLVDEKTTQLNRLTGYLKVYFPQMLEWFEKLDTKLVCDLLERWPSLEELQKVPPAELRKFFGQHRGRHQELTERRLEGIGQAMPAIRDRAVLEAKRAMVQVSAQLLRILLEGIANLDSKIEEAASAHPDFFIFESLPGAGSALAPRLLAAFGSQRDRYGSAEEVQKHSGIAPVMEKSGKKKWVHFRWACPKFLRQSFHEWAGHSISQSTWARAYYQQQRGRGKDHHAAVRALAFKWIRILFRCWQDRVAYDENKYLAALARRGSPLSSVLTVTAATL

SEQ ID NO: 353186 - protein, 462 aa, unidentified
MPGRDEIASSGKSRGQLAGLPIIRWNVAGIDLGSERHWVCAPTRDRSGREVASFGATTAELLRMGEWLKARQVESVAMESTGVYWIAPHEVLEAQGLQLLLVDTRQLAQVPGRDKKSDPTDCEWIQRLHSCGLLRGSFRPEEGVCMLRTLVRDKANLVAESGDWLRRMQKSLDQMNVRVHRAVSDLDGATGMAILRAIAGGEQDSQKLAKLRDRRCSKTEQEIAEQLSGHWREDHVFSLQQALKMYDAVQERIAAYEQEILRKLGEMEREEPHEPTAPPLQNANKARTIKNRGQEAKRQALYRMSGVDMTQIDAIGVETVEVVVSEYGSDLSRFPTEKQFVSHATLAPRVPKSGGKPVKKKKRNSASTRVAAALRMAALSLRHSQTALGAYYRRIAQRRGGDIAVFATARKLATLVYRLLRWGQPYADEGAAAYENRYRQHRIGRLAATAKELGYQLTPVSA

SEQ ID NO: 353187 - protein, 434 aa, unidentified
MEEITDEPLYRDRVCGIDIGKAGLVATIRVPSDANPARRAAETRSFGTTRREVLALADWLRCWQVPAVVMESTGDYWKGPFYRLEAEGLECVLADAKQVKHLPGRPKRDPSDSRWLAACFERGAVTACFVATEEFRVIRLHTRYRRDLTEERTREKQRAEKLLESAAIKLSSVVTDLHGVTGRDIMDHLIAGETSPKVLAQLARARARRKIAELEAALEGAEFFTPAHAALLATMLDRIDHLHAEIARLTEMIEHLLAPHEEQLAQAESMPGWGRRSAQDALAETGTDMSRFPTPSHLASWAGRTPLDNSSGKRKGKAKSKKGNRYLAAVTGETAVAAGKTQTREGARYRRLARRRGKAKAQVALGNTQLKVYHALLSHPGTRYQDLGPDYYERQAGTRRQIAHHVGKLAALGFEVTLARLPEPDPTGPDNQAA

SEQ ID NO: 353188 - protein, 349 aa, unidentified
MPILADQVDVVIAVDAHTDSHTAALISPLGAVWGELTVPADGHALHRLTSWVERTVDAPRRHWVIDGTRSHGVGLLRQLRKAGERVAEAPRLKRGSRRGRGKSDALDAIAIGRAVLAAPTLAEPRADGIREALRLLLVTRRHYSDYRTATVNLLKSLILTTDEQVRDQLRRKTTTAQVRHLLTLTVPVDGPYHIRISVERMIDLARRIADLDKTLAQNKKELTALVKQSCAVLLEQVGVGPVTAAALLCAWSHHGRVRDEAAFASLAGVNPIPASSGRTVRHRLNRGGDRTLNAALHTIALVRRRVDPTTQNYVARRTTDGKSSREINRSLKRYLSRSLFRIMEATATL

SEQ ID NO: 353189 - protein, 321 aa, unidentified
MSDSVTVGIDVSKLTLDVHVSPAQLHQTVSNNESGFAELKTLLSMQQVSLVLLESTGGYEDAVVCFLQSLGYDVSVINPRQARDFARSMGRLAKTDRIDAEQLAQLASVIHARPDRERFVKKITDDRRRKLACMVARRRQVVNMISTEQQRKSAASNYSTDSINKVLSFLRSELKSIDADISLHVRSHFADISGLLASFKGIGPATIGVLLGEVPELGRLNRRQISALIGLAPFNRDSGFMRGRRTVWGGRAMVRNALYMPTLSAVRFNPAIRVFYMRLISQGKPRKLAQVAAMRKLLCIINAMLSSGTMFNPALHPGPGA

SEQ ID NO: 353190 - protein, 376 aa, unidentified
MIKTDVQYPTVHLAIELSRSVWLVAARLPGVEKPSLHRIGGGDTAALLALAETLRARAAAKLGAPVRVACCFEAGRDGFWLHRLLTAEGLAAHVLEPTSILVSRRARRAKTDRLDALGMPRVLAAYLGGDRQVCSMVRVPTPEEEDAKRPHREREDLVRERVRLENRIAALLATQGVRERPSLRNWERDLAALRTGDGRPLPPHLRAELDRLRRRLVLTLELIREVEAERDAALAAEPRDAVGRKIAALCRIRGVGPNFAAVLTREVFYRAFANRRQLAGYVGLTPVPHQSGEADRDRRISRAGNPRARTTLIQLAWLWLRYQPDSAPARWFRDRVGALRGRTRRIAIVAMARKLLIVLWRYAETGLVPEGVEVAA

SEQ ID NO: 353191 - protein, 346 aa, unidentified
MKILALDLGKYKTVGCDYESESGAHQFKRGCTTPTGLAKLVQEVKPDRVVLEVCSIAGWVCDLLWSMGIEVQVANTNDDAWRWRKVKQKDDRRDALKAARLSAVNQLREVYIPAIEVRQWRALITYRQQVIRRRTKLKNHIRDLLLREGQILGRGSSCWSQVGLAALAAQARPFSECGPAELWRGELQLELEQLREIQRQLATVTAQLDKIGAGDARVQLLRTIPGVGPRLAEAIVALLDQPRRFRKASQVSGYIGMVPKAMDSGETERRGHITRQGSRLVRSLLVEVAWAGLRHNAWVRQTYQRLSGGKQARKKIAIVAVGRKLLVKCWAMLRDNRAWDWQPQIT

SEQ ID NO: 353192 - protein, 339 aa, unidentified
MPLYVGLDLHSNNNFLAVINKQGKRVDHKKLPNDPELILEVLRSHRGKIGGVVVESTYNWYWLVDALMEAGYAVHLANPSAIQQYSGLKHADDQHDAFWLAEMLRLGILPEGFIYPREERPIRDLLRKRRHLVKLRTSLIISLQNIISRNCGVPFKGSDVKRLKEDRVSPLLEGNEDLALAGKASKETIDYLTRQIQRIEATIVKRIELRESYRYLLTLWGVGKILALTIMLETGPISRFAQVGNYVSYCRKVPSQWTSNEKVKGKGNKKNGNKYLAWAFSEAAEFARRHHAEARAYYNRKMQKTNFMVAHSALAHKLARAAYYIMKDQVPFMPEKLFG

SEQ ID NO: 353193 - protein, 421 aa, unidentified
MNMTSKSAQFAALIGIDWASQRHALCLYDCATAKRESSILEHTPEAIAQWARGLQERFKGKKIALCLEQSKGPLIYALLEYPFFVLYPINPATAARYRMAFKTSRAKDDPSDAQVCLELVLHHREKLNPWLPNDAPTRELSCLLQHRRAAVDLRTLLTNMLRDALKSYYPQALELAGQDLFAPLGCQFLLKWPSLQELHKARKESVRKFYYAHNCRRMDVIEKRLDAIAQMTPLCRDLALLEPAMVQVRMLARQLLQLGGALKEYDSKIEQLFAQHSDALIWESFPGAGPTLAPRLACAFGTQRSRYQSAVAIQQYSGTAPVTEKSGKNQHWVHRRWARPHFTHQSFFEYASQSVLHCSWAKLYLKEQMARGKAYPTAIRALAFKWQRIMFVCWRDRVPYDETIYRQSLQRRGSHLARKLN

SEQ ID NO: 353194 - protein, 385 aa, unidentified
MGSQTFIPRDYDVFSGLDVDKRSISVTFTDHDRFLKSLRMPYSAEHLLNHVRKHFPNKKVAFVYEAGPTGYGLYDGIVAQGYPCLIAAPSMIPKAPGQRVKTNRLDSKALSENLRGGQLKSIHVPSPTYRQLRHLTQLRDVLVSELVGMKQRIKSLLLFEGIEFPPAPPGSQWSSIVKNKLRKLPCSGMVRFKLDQLLDSLEFNEKQVLKAIREIRRYCQNDPELSQCMKYLMTLPGIGWITASQLLARIGDWRELNNIRQLGGFLGLVPTEHSTGERTDRGSITRTGDERLRSKLIQASWSAIRQDGELREFFRTVCRKHPREIASRVAIVAVARKLSVRIAVVLMKQRPYEVREKVHSAPLTQEETSPQGTTRREPEPGEKNS

SEQ ID NO: 353195 - protein, 418 aa, unidentified
MNLFVGLDVSSEKLDVCFLSDDDNLTILEEITLGNDIDGATIVKEKVIDFQEAYGFHKIVMGMESTSMYSFHPAMFFNQDKELKGLNTVVTIENPFRINQFSRMFDEDKTDRNDAFRIADFLRIQRFTTSPIKEEKYMALQRLTRTRYQLIKQLVRTKQHFLENLTYKCNTLTRELNELDGTTSVFSATVISLMTDDYSLDELAEMPLEDFATLLQEKGKGRFKNPKNLAKAIKRAIANSYRLGTIAQESIDVVLSILVREIRALEASIKDLDKAIEQLVVIIPEYQCLTSIPGVGKVYAAGMIAEIGQIERFEDQTKLAKYAGLSWKVKQSGNYQSEYTPLTKQGNRYFRYYLVEAANSVRRYLPEFQEFYSKKFKETPKHQHKRALVLTARKFTRLVDMLLRNHQLYAPPRSVIDK

SEQ ID NO: 353196 - protein, 494 aa, unidentified
MVKYNKKPAHKTIDHKITKQNPNYLKQINPYVAGIDIGSRSHFVAAPVSCNAKGDLEIGVREFSSFTPDLEALADWLKKCRVTSVAMESTGVYWIPLYELLESRGFDVNLVDARHVKNVTGRKSDVTDCQWLQQLHACGLLAPAFRPTDKILPLRSYMRQRNTLVAEVATCVQRMQKALTQMNLHLSNVLRDITGLTGMTIIRSILEGGRDPKKLAEFRDPRCRQPIEVIEKSLTGNYRAEHLFSLKQAVESFDFYQKQILDCDRKIEQALIELNPHSRESGEPTSGMDQKLSALKPRTYKSKDGNALYFDPNKHLVSILGADITKIPGIEANLAVKILSEVGADMSKWPSAKHFTSWLGLSPNNKISGGKQLSSRTQRSANKAAIFFRLAANSLYNSETSLGGFLRRGKAKIGSPKAITATARKIAVIFYSMLTQGKEYVEAGLDYYEKRYKERLVKGLKKRAAQLGYALSPIIEQLEETEDTRQTDLLTGVT

SEQ ID NO: 353197 - protein, 432 aa, unidentified
MKYKMKQKQNQRITRITEKTLVVGADIAKKIHVARAVDFRGIELGKDCVFHNDQEGLTKLASWMKELGRIHEKTDIVFGIEPTGHYWFPLAAFLKEQGIQIVVVNPHHVNKSKELEDNSQTKSDYKDAKVIADLIRNGKYSVPNLPTKEYAELRILMNFREKVMVSLNQVKTRITNWLDRYFPEYPQVFKDWEGKASLMTLRQFPTPEEIVSIGARGVLAHWKTEVRRGVGIKRAEQLYKAATVSIGLTEGLTAARIELASLLEQYDLYCKQEESIVAEVIQILEKIPGTKQMLSVPGIGVLTVASFLAEVGDLNNYDHGQQIIRLAGLNLTENSSGKRKGKTGISKRGRSRLRGILFRAMLPMVAKNEEFKALHEYYTTRSQNPLKKKQSIIALCGKLVRVLYTLGTKQKEYNAKDVLGPVRQAQLQQSAA

SEQ ID NO: 353198 - protein, 376 aa, unidentified
MNEKLRFLGLDVHAETIAVAVAEPNGEVRSLGMIANREDSIRKFIRKLDSPEHLRACYEAGPTGFVLYWQLTQLGVKCDVVAPSLVPKKPGDRVKTDRRDALKLARSHRSDDLTAVWVPDEGSEALRDLVRAREAAKQDQLRAKHRLTKFLLRTGQRPPLGVKAWTEKYVEWVQQVRYTHPAQEATLLDCLNEVQHMEERVKRLEQSIVEVIQLAPAPMQEVVRGLQALRGIAHISAVTIVVELGNITSRFESARDLMGYSGAFPSEDSTGKRIRRGGITKSGNAHLRRIVVESAWSYRHRPAIGARLRRRQEGLPAEITEIAWKAQNRLHKHYMTLMARGKEQRKTMTAIARELLGFIWAIGIKAEAACKQQMAA

SEQ ID NO: 353199 - protein, 395 aa, unidentified
MQETTQHDAVDVGRGRHHAVALDRNGKRLYNKALPNDEVKLRALIAELKTHRRLLFVVDQPSTIGALPVAVARAEGVLVAYLPGLAMRRIADLHAGETKTDARDAAIIAEAARSMPHTLRSLRLADEQLAELTMLRGFDDDLAAQVTQTSNRIRGLLTQIHPALERVLGPRLDHPAVLDLLERYPSPSALAAANEKTLANRLTKLAPRMGKNLAAEIVQVLNEQAVIVPGTQAATIVMPRLAQQLAALRKQRDEIAAEVERLVLAHPFWPVLTGMPGVGVRTAARRLTEAAQKAFATAAHLAAYAGLAPVTRRSGSSIRGEHPSRRGNKVLKRALFLSAFAALRDPVSRAYSSCKIQQGKRHNQALIALARRRCDVLFAMLRDGTIYPPKSAPDA

SEQ ID NO: 353200 - protein, 355 aa, unidentified
MTGETAMTLYIGVDLHPHQQTIAWCDTRTGETGTADLENDPETVRQFYSTLPESATVGIEASARARWFENMLFETGHKLFVGNPVLIRKRATSRHKSDQRDAELILQLLLREEFPNIWRRPLESESILDMLRLRQSLVRQRTGIYNRLQALAHDVGLPKGRIRTKSFQKLLKGVLMDEVSSIRREQLFSLVEKLTEQIGELDEWLKKKADNDSSVQLLLSQKGVGNLTALATVHTLGDVSRFARLSKQIASFAGLDPVEKSSAGKTRFGSISKGGSRLLRHQLGLSAQIACRSDAKLKSFYKRLSRKKPKPVAKTAAARKLLVKLSIMLRDQITADEFDQRGRTVGNARLTTDLK

SEQ ID NO: 353201 - protein, 354 aa, unidentified
MQNDRQSSETVILGVDTHLDIHVGAVISQAGKLLGTHIIQTNQAGYLELLDWARSFGSLERAGIEGIGTYGAALTRYLIKNSIYVVEVNRPDRSKRRLEGKSDPLDAENAARTVLSGSSKAIPKMQSGACEALRIISVARRSAVKACTQAINQLRALLVSAPQDVRDKLWKSKPHECVTACINSEVSEHSPLRIALCSTLRSLAKRWMALTEELNELDESLDKLTRKYASNLRSQFGVGPQTAATLLAVAGDNPERLKNEAALASLCGVNPLPASSGKTVRHRLNRGGSREANNALWTIALVRMRSDPRTRIYVDRRTGEGLSTKEILRCLKRYIVRELYPLILSDLAYANRRS

SEQ ID NO: 353202 - protein, 356 aa, unidentified
MKYVGIDVHKKMCQAAVLDDEGELLDQIRFLNNKEEIKDFAMKLTTFKDDVKAVVESTGNLWVQIYDILEKFGFEVFLSNPGKTRLIAEAKNKTDKIDAKVLARLLRADMLFTCYVPGEEIRNLREFLRARVDFVKNKTQVKNRIHSILDKHGLRFPWTPFSKKSIVWLREQDLGDMDNAIIKGQLALLDTLDEQTLILEDKIAAMGMDDPRVSLLMTMPGIGYFAASMLVAEIGDINRFGNDKKIASWAGLAPRISQSGGTLRIGRVGQGNTKISGLLIQCAHNARMHDPRFKRFYDRYQKRRGKGKALVAVAHEMIRIVYFMLKNNEPYRGQNVEMTKRKLKRMKYRATVGLQT

SEQ ID NO: 353203 - protein, 349 aa, unidentified
MQMIGCDLHARQQTLAILDTETGELREGVLEHAGDQVREFYTNLPRPARVGIEATGSMQWFLELMEELGIECQVGHPARIRAAEPRKQKHDRRDALLLVRLLSEERFPSIWMPSLEQREVRALLLYRHQWVRIRTRVQNALQAIALSHGLRRGTGLWSKSGLHAIGALPLPPYSSERRDALLRLYRQLQAEIDQLDKMVASCAEQRERARLLMTHPGVGPITALATEAILGDAARFADGKAVASYVGLIPSEFSSGGRRQRLGELTKQGSPMLRFLWCEAAGHAVRKDEQLKRFYRRKLAQKGFGKAKVAAGRKLGIRLWIMLRDNINYQEFCRRARQTSDAHAEMPAR

SEQ ID NO: 353204 - protein, 409 aa, unidentified
MRYYLGVDWADQTHAVWVVDEGGTKVAMRTVPHTAEGLTEWGRALDEWRAQGIELWAAIERPEGRVVDFLLDHGVVVYAVNPKTLDRARDRFRQSAAKSDPFDARVLADFLRTDHAHLRAVQPSSEAAQELKLLTDDYQRQIRQQTRLVNQLTTTLKAYYPRGLEVAELTTGLAREFLQAYPTPATITALTERQWQRWAHAHRLSETRTQQLWVVLQRPQLPVPPHVVRAKARLMQSLVAQLMVVMEGVGAYREAIEDFFARIPAAQWIRTLPIGDHGITAPTLWARLGDAPGRWESFRHLQAQAGTVPVTIRSGKQQVVRFRFACDKSLRYIIDHVAFLSLRWSEWAHAYYAGQRARGHSYRQALRALSAKWLKIIFVMWERQIPYDEQYHLAMMTRQQLRQRQEKVA

SEQ ID NO: 353205 - protein, 323 aa, unidentified
MSTSLPPVTPIGVDIAKAKFDVAAWVNGKYKTKVFPNTPAGFAAFLSWLCPFAPGHVCLEATGRYGEALATFLVEHEVLVSVVNPAQIQAFGKAELNRTKTDKSDAKLIARFCHRQQPPAWQPLPPAVRQLQALVRRLDDLMAMRQMEHNRQDGADTTVQASLSRVLALLDAEIAQTRAAIHDHFEQHPGRRAQRDLLDSIPGLGATTSAVLLACLGDIHRFDHAKQVAAFAGLSPAERQSGKHQGQTRLSKTGDAFLRKALYLPAVVAGQHNPVVRAFCERLKAKGKAGKVIIGAAMRKLLTLAYGVLKSGQPFDPKWALAK

SEQ ID NO: 353206 - protein, 341 aa, unidentified
MDEYIGLDVSLKETAISVRRDGKRIWRGKCPSDPTLLAEMLRKRAPTAKRVVFETGPLSVWFYHALSAERLPAICIDARHAKAALDMAPNKTDANDADGLAHLAEVGFYREVRVKGYDSMLVRTLVAARTRLVRITTELSNQIRGLMKTFGLIVPPSKGGKFEDNVQRLLAGQEELARIILPVLEAWRSVRIRAAELGRQLVASARQSEACQLLMSIPGVGVVTATSFTTAIEDPANFKKSRSVGAWLGLTTRRYQSGEVDYDGHISRRGDPHLRGLLYEAATVILTRTYADSDLRTWGLKLRERIGFKRSAVAVARKLAVIMHAMLKSGELFNRTSSVIA

SEQ ID NO: 353207 - protein, 346 aa, unidentified
MLYAGLDLSRKRLDFCLLDERGERVETGAAPPDADGLRGLAGRVGRFGEPVRAAIESMNGARFVHDQLELAGWQVEIADAVKVKGLAPLACKTDRIDAWVLAELARRDLVPAIWLPDPAVRAERERARFRLHLVRHRTSLKQRVHAVLLAHGKPCPVSDLFGVSGRALLDRLALPEPWAGTVAASLQLIDELDSQIAGCEAELQRLGADHRYVPLLLTVPGIGWVLAYTIAAEIGDISRFPTPTKLAGYTGLCPRVYQSGNSDRRGALSKQGPKYLRWALIEATMHASRHPLYRDRYQQTKQRLGRQRGAKVAQVDLARRLSHAIWHMLTRNQPFAPASAPDPLAA

SEQ ID NO: 353208 - protein, 405 aa, unidentified
MFDSENVGVFLGLDVGKTTHHGHGVTPAGKKVFDKQLPNSEPKLRAVFDKLTAKFGTVLVIVDQPASIGALPLTVARDAGCQVAYLPGLAMRRLADLYPGEAKTDAKDAAVIADAARTMPHTLRSLELTDEITAELTVLVGFDQDLAAEATRTSNRIRGLLTQFHPSLERVLGPRLDHQAVTWLLERYGSPAALRKAGRRRLVELLRPKAPRMAARLIDDVFDALDEQTVVVPGTGTLDIVIPSLAASLAAVHTQRRAMEAQINTLLEAHPLSPVLTSMPGVGVRTAAVLLVTVGDGTSFPTAAHLASYAGLAPTTKQSGTSIHGEHAPRGGNRQLKRAMFLSAFACMNADPASRTYYDKQRARGKTHTQALLRLARQRISVLFAMLRDGTFYEPRTPKNVELAA

SEQ ID NO: 353209 - protein, 333 aa, unidentified
MLPSNCGTATPYILRNTVGLDISKLTFDASAMVGNAEYSAKFDNDSKGLDQFSDRLKSLGCQNLHICMEATGNYYEEVADYFAQYYSVYVVNPLKISKYAESRFKRTKTDKQDAKLIAQYCRSAQESELVKRQKPTDEQYRLSRMIAAYAQIKSECAAMKNRHHAAKDEEAAKAYAEIIKAMNEQLEVLKEKIKEQTEKPNCKEGVKRLETIPAIGRMTAAVLFHHLTSSKFETSNKFAAFAGLSPQQKESGTSVRGKGKLTKFGNRKLRAVLFMPAMVAYRIRAFPDFIARLEEKKKPKKVIIAALMRKLAVIAYHVHKKGGDYDPSRYKSA

SEQ ID NO: 353210 - protein, 420 aa, unidentified
MESYKVAGIDVHKKMLAVVITDAAAEGEFRFERRKFGTLDSDLKELSTYLAERGVREAVMESTAQYWKPVWRQLEAQCKLYLAQAQSNRAPRGRKRDFADAERLVRRHIAGELILSFVPDAEQRLWRTITRTKCQLTRDRVRLQNQLESLLEDARIKLDSCVSDLLGVSSRRMMKALAAGETDPAELAKLADRALQAKPEQLVDALAAATTMSPLHRQILGLFLDRLELIEQHMETLDQSIATALQKHKEAVVRLAEVPGYGPDSAQQVIAEVGPSAATFPSAAELASWVGCCPGREESAEVSKSNRSPKGNRQVRRVLTQVAHAAVKTKGSVFQALFRRWMPRLGYNKAMWAVVHRLCRLTWKILHQGVRYEERGQLPDPKLVRARKNKLVRQLRELGYEVQLTSPAGQPTSPTARAIA

SEQ ID NO: 353211 - protein, 401 aa, unidentified
MRSIGMDVHRSFAQVAIHEDGITAKSFRLELEHDAVVAFGKDLRADDEVVLEATGNTAAIVRLLTPFVARVVIANPMQVKAIAHARVKTDKVDAAILAQLHAAGFLPEVWAADDDTLALRRLVSERVAVVRSIRRAKSRVHAVLHANLIPKYEGHLFGKGGRRWLVKAPLPKTERDLLARHLDALDWLNGRLASLETALIRFSLDDPRMRKLMSVAGISSVIATAVVASIGDISRFSSPEKLASYFGLTPRVRQSGDRGAIHGRITKQGNATARTMLVEAAWSAASVPGPLRAFFLRIKDRKGANVAAVATARKIATLIWTLLAKEEPYRWARPAFVAMKMRKLELRAGAPKQHGNKPGPGRDYWIKEIRHREMELVANAEASYARMVEAWREKPPKPKTT

SEQ ID NO: 353212 - protein, 374 aa, unidentified
MKEFSKYVGLDTHKDTIAVAVADAMGGQARYFGEIANTPEAIRKMVQKLCPDGEVISFCYEAGPCGYDVYRQISKLGHHCDVVAPSLIPTKPGDRVKNDRRDSEKLSRLSRAGELTPVWVPNQEQEAMRDLTRARQDMKGLEKTTKQRLNAFLLRYGCIYESDKSRWTQAHFRWLEKLKFDIPVQQIVFQEYVDAVKQAEARVAGLVKEMEKAMDGWLLAPVVEALMALRGIKLISAMTLMAELGDITRFDSPRQLMSFLGLVPSEYSSGQSRRQGGITKTGNGHARRVLVEAGWCYRFPARKTAHLQRHAEKCSDEVQAIAWKAQKRLCGRYTYLLGRGKLKVQVCTAVARELAGFIWAIACEVMNKNIKCAC

SEQ ID NO: 353213 - protein, 420 aa, unidentified
MKSACNTLPDQPLNDVTAGLDWARDDHAVCIVDGRGRQVARTVVEHTDAGLHDLIGFLGRHGAGEVAIERPDGPVIDTLLGAGLTVVVISPNQVKNLRGRYGSAGNKDDRFDAFVLADTLRTDRARLRALTPDHPATTALRRACRARKDLVTHRVGLANQLRAHLRNVLPGAVSLFADIDSEITLAFLTRFDTQDRVDWLTTKRLADWLTKVGYSGRTDPEVLHARLRTAPRGISGPDATTQAHTTHALVAVLTSLVEQIKTLSTQISHQLAAHPDGHIFTSLPRSGRVRAARLLSEIGDCRARFPTPESLACLAGAAPSTRQSGKLRAVGFRWSCDKQLRDAVTDFAADTRHANPWAADLYQRARARGHDHPHTVRILARAWLFIIWHCWQDNTAYDPTKHRALQTILNTQPTPETEAA

SEQ ID NO: 353214 - protein, 369 aa, unidentified
MQKILYVGLDVHKMSISVTTAEEGRDGAVRFIGTIPNTTADVTKLAKRLAGEGSRLAFCYEAGGCGYGIYRQLVDLGHDCTVAAPTLIARKPGERIKTDRRDSQKLAMQHRFGDLTAVWVPDPVHEAIRDLVRARMDAVMQLMRARQQCLAFLLRHGRNYGPGKKNWTLRHRRWLATQTFEQTTHQIVFQDYVEAVWSAQDRRDQLEARITTMLPDWSMAPLVEALRTIRGIDLISSVIFVAAVGDLGRFETPRQLMAYLGLVPSEQSSGSRIRRGGITRAGNGEARRMLVEAAWSYRYQPRVSSGKTDVIERQPKPVRDIAWKAQVRLCGRYRKLAVGGKKPTVVVTAIARELSGFVWAIGLEAGLIS

SEQ ID NO: 353215 - protein, 344 aa, unidentified
MATYYIGADVHTNNTQLAIEQRGRIVARYSVPTTIPAISTVLSSLEGRKIFAMEEGPMAGWLYRNLNQEVETFVVSEPRRNKLITSEGDKDDKIDADKLAALVRGNFLKAVHHTGDDHRAHMKHWINLYHDRIRDGVRDINKIRACCRMHGVRIPRKVVRNPVRRQAWLSGLDNPVLKAQLHMFWIGYDATKEQVEIAKKQFSSYARKYPIIKSWCKLPGVGLIRATTIFAYLDTPWRFKNRAKLHKYCGVGLVRASSGTDKKGRPKPPRLKLPWAVNRRIKNAVLGAATSAIEKSDNAFKDYYMRMLSHGITPANAKHSVARKLVSTMSAMWKTGSEYDEKLL

SEQ ID NO: 353216 - protein, 469 aa, unidentified
MSNKHTISQNSGKPRNGLTHRNKLGFIDPTIAGIDIGANLIHVAIPNTKKKADVFEFGTTTPELRRIAQELKKSGVKTAVMEATGVYWAPLYEILEDLGFNSVLVDAKAVKNVPGRKSDVHDAQWIQTLYSNGLLRAAFRPPRERLALRAFVRQRQSIIKTRQRALLHMEKAMQLMNIKLSGALSDIGGFSGMEIMRAILNGERDPVKLASLRNKKCKKLEEEFVAALTGNFRKEHIFSLKQAMDLYDFTGQQLNECDQNIKNELEILPTITDKPLPKRDKDKKANGKYKKAQKPRKNTISFNVKELLWQKSGIDATCLDGIEENSALLLFAELGGTDVSSWSRDKEFASWLKLCPGNNISGGKRRKSKKQPCANYISQCFRLASLSAKKSDSALGAKIRCISGRADKPKGIKAGAHSLAVLYYNMCKYGWDYHRKGAADYERAHNERRLESIKRSARSLGYDLVPKAA

SEQ ID NO: 353217 - protein, 328 aa, unidentified
MTGWLAFDVGARRHAYAARINGKEETGQVDNTPEAIGHFLARQQARCGQLRVVMEATGIYYLDLAVQLAQTGVEVMVVNPKAAHHFAKAMSQRSKTDALDARMLLAYLQRMDFVPWQPPAPQVLELRQLGRHLSRLAEQKVRLKNQLHALHSTATSPQVVIEDMQDALAMLERRIERLSADAMARVRADAALAEPFDALDSIIGVGPVSALALLAELLVLPREMNSRACVCHAGLDVRIHRSGSSVELVPRLSKHGNKYLRHALYMPAMTAIVHDPHAKAFRDRLLARGKKKMQALAAVMRKLLTAAWALLRNPQNYDGAKLFASLNP

SEQ ID NO: 353218 - protein, 489 aa, unidentified
MAKTKRKQSTFERLRRGELNRKQRRNLARRLAGNDPGLTIIHSNAGGIDVGNESHFVAVPPDRDANPVQEFGCWTADLKRMAEWLKACEIDTVAMQATGVYSIPLYDILTGHGIQVVLVNAQHTKNVPGRKSDVQECQWLMKLHTYGLLRDSFRLEERMEGVRTIWRLRDRHVKDASRAVQHMQKALTKMNIQLANVISDITGVSGQAIIGAILEGERDPWKLADLKHEMVKASREEVARSLEGNWRVDLLFELQQAVDSYHFVHQQMCACDRQLESFLASLPTRILERPNQPDGAPAATAKKTKKPRKPKKARRNQPTVDLTTELKRICGVDLTSIDGIDVITAQTIVSEIGTDISKFKTEDHFASWLGLTPAKDITGGKIIGRGRRKVQNRVGGALRMAATTLIQSKTYLGARYRHLRQRLPSYAAAIKAMARYLAVLVYRVLTHGEAWVDRGAAKFEQNRSERELRSLTSKALAKGFKLVPIPVTS

SEQ ID NO: 353219 - protein, 359 aa, unidentified
MHTQYTHADFAGQALNIGLDVGLKHWDAAFYLGQAYHKTVPFPPDPPALMRYAQRTFPGATVRVVYEAGYFGFWIHEALVKLGAECLVVNPADVPTADKERRFKTNRIDAVKLGRSLANGDIHGIYVPGHRAQQNRSLVRMRSTFVRKQTRVKCQIKAYLRYYHIEHSEELSDRYWSRAYIRWLESVSLEFDSATEAFKMLLKELLDLRADIAQITKRIHRLALEDHYRTDVLLLRAIPGISVTAAMIFLSEVVTITRFKGLDPLASFFGLVPGQNSTGETETDTGLTPRRNAALRYMIIECAWIAQREDPALLKAFTEYCTRMPKNVAIVHIARKLLNRMRYVLIHQEPYVTGVLANG

SEQ ID NO: 353220 - protein, 377 aa, unidentified
MSEITRLMELIVRVGVDLAKNLIQVHAVDASGRCVASRTVKRDQFMAWCSQLPQGCLVAMEACSSAHHWARRLRAMGLDARLIAAHFVTPYRMEGRSGKNDANDAAAICEAASRPSMRFVPIKTVEQQGVMSLHRVREGLKEERTGCINRIRGVLSEFGLVFAKSPKALRAGLADVIEDASNEMSMTARLVVQRAYEHWRELDEHLRWCDRQIGQHVRSSPEARRAAQINGIGEIGASATVAGVGDFKQFKSGAQFGAWLGIVPSQNSSGGKTSLGRITKRGDEYLRTLLIQGAKSAVMSAGKRDDPTSRWLVQLTARVGWQKACVAMANKNARILWAVMTREQRYDPRHVSVKPQAQVPVSQHAATAPRPQPSCPA

SEQ ID NO: 353221 - protein, 479 aa, unidentified
MNQDAYLGIDVSKGYSDFVLINARRETLEPSFQLDDNRKGHDQLQLLIKQFQQRFSIQTFYCGLESTGAYENNWHAMLSELSKSLPLKVARLNPAVVKANRDAMMDRNTSDELSAYAVADYLIAHADQVRYSEAGSSKFDSLRRVYKYHQLLKKQAGQLNNQLQQLLYVTMPEALRFVRSGFPGWLLLLLQKYPTSKHIAKVRLSNIEKIPFIKKEQAVTLHRLANQSVASGISEYEGPLISSLAAELLHKREQIGVQKKVLESFCDDDRIGLLCSIPGIGHYTAVCMLLEIEDINRFATAKKLASYFGVHPVFKQSGDHTGAFRMSKKGRAGMRELLFLTAKTAARCDTHIKSLLEHHTSQGKKYRAAIGVIMHKMLRIVFGVLTSKTKYDAAKDQQQQQIKKPTVEDQQKDKMQRQRRYQSLNMAAPISTRNLIKRKALLKSQSCSTTNLSENKMGDEGRALKSAQHEINQKCLQQT

SEQ ID NO: 353222 - protein, 345 aa, unidentified
MSEVRTIAIDLAKNVFEVAVSERPGKIAGRHRLRRDGLLAFMAQQPPSTVVLEACGSAHYWARSLRQIGHHAVLLPPHLVRPYVKGRKTDRTDAAGLLEAFRCAEIEPVPIKSPAQQAIVALHRARAAWMQTRTARLNLARGVLRELGVFIAVGASQVVPMLDSLTMADDDHVPTSLRPMLSTLAAEIRELEARVGQVERELAALARQTPAVLRLQSVPGIGLLISTAMFAAVGDPQRFRSGRRLASFLGLTPREHSSGDRRSLGAIHKRGDTYVRMLLSHGARSLLATAPKANETDRLRQWGHAIAERRGMNVATIAVANKLARIAWAVWSKDLPFEPTLLSAP

SEQ ID NO: 353223 - protein, 352 aa, unidentified
MRTSHQNAPETISTIAIDVGKNTFHLVGLDKRGVIVLQQKVTRHQLGRRLSNIPRCLIGMEACSGTHYLARQLTALGHDVRLIPAQYVKPFLKGHKNDYRDAEAIAEAVQRPTMHFVSIKTPEQMDLLALHRVRSRLVGQRTGVINQIRGFLLERGITVRQGPMPLRKALPEILSASSDALSPRMINLIGELIQDWRRLDERIAAVSSEIEALAKQDASCQRLMSVPGIGPIISSAVVAAIGNGAGFKQGRDFAAWLGLIPRQESTGDRTILGKISKRGNKYVRTLFVQAAHVVLARRPSTARQGLWPWIERASKRLHRNMLAIALANKLARIAWAVLARGQAYQPRITANA

SEQ ID NO: 353224 - protein, 464 aa, unidentified
MKVAKVNQQTRRVKKTRAPSFPIINPNAAGIDIGSAEHWVAVPEDRDEQPVRRFACFTQDLHAMAAWLKQCRVETVIMESTGVYWIPVFQILETHGFEVKLVNAKHAKNVPGRKTDVLDSQWLQRLHTYGLLSGSFRPDDAICVLRSYWRHRDTLVSYVSSHVRHMQKALTQMNVQLHKVISDITGVTGMSIIRAILNGERNPLKLAQMKNNRIRSTTETITKALEGDYRQEHLFSLKQAVELYDFYQQQIQACDREVQAYLSQLDGIDIASNPIPPSRRRIQKHKGNQPDFDLRTHLYRISGVDFTQIDGLDVLNVQTILSEVGLNPDAFPTVKNFTSWLAICPNNRITGGRIKSRSTRKAANRATEAFRMAAYSLTHSSSALGAFCRRMRARDGSPKAITATAHKIARIFYQMWKYRTPYKDLGADYYEQRYKERVLSGMKKKAKQIGYFITLTPMPQPAVS

SEQ ID NO: 353225 - protein, 363 aa, unidentified
MEKVASTVFGYHHRRSGEEKMDKPRFFVGIDIASATFTSAVGAMNDKWQIVVRPETFNNEFDSFAKYLKWLQEHGVQPENSVICMEATGVYNEVLAHFLVANRYLVSIEPPLKVKRAFKPAGHKSDPVDSTQIAEYAYRFWDELSPWAPRKEVLEQIKTLLTVREQLVVQRTGHLNALHALKRKAIRTSLAETIHERTIVELKKHIEEIETEIRRLIAQDPDFRSMVGLLISVPGVGLLLAAHMLIILQTAPEPYSPKSLAAYIGICPYTDSSGSSVYHKPTSRHYGPPVLRKLLCLGARSVSAHNPHFRTYFARKTQEGKPKQLVINNIANKLLDIMVAVVRSKTPYIPNYRSVSPGLLIRP

SEQ ID NO: 353226 - protein, 331 aa, unidentified
MVYAGVDVHRKRSQVSLVDGDGKELLNRNVDNGSDAMLEILEDLEPGTPVAFEAAYGWGWLADLLEESELEAHLVHPSACKAIASARLKNDKVDARMLAHLLRTDLLPEAWVAPKEVRDLRVLLRHRASLVRVRTSLKNRIHAVLADEGLKVEGEKLWSDEGQQWLAAARVRDMHRLVVDDCCGMLDALAIPIKRLEADIHRLAKADPRVEALCDLPGVGVLTAMTLVSEIGDIKRFPTARKLCAWAGLTPSVRNSDTKVRHGHITKAGPASVRWVLTEASYHARRFPPFAATFEAMTKRRGKHIAGVAVCRKLLARAFHILKSLEAAQVQ

SEQ ID NO: 353227 - protein, 349 aa, unidentified
MILVGCDLHTRKQQVALLNTDTGELRDQELSHVGDDVERFYAALSPPVTVGIESTGYSLWFHALLQRLGHTLLVGEAAKIRAMVVRKIKTDRRDARHLRDLLKDNRFPVVWIPDPTTRDLRALVKHRLRLVRIRTMVKNGLHAIALNQRLALGPSLWSRQGLAQLQALVLLPHTRRRREDSLELLHWLNRHIDELDLHVATAAAADPAARRLMTHPGVGPLTALTTVLVLGPVGRFPSSKHVVSYIGLAPAISASADKYRLGHISKQGSALLRWVLGQAAPLATRGDAALKRIYFAVLRRRGRPKAKVALARRLLIRLYVMLRDQIDYDEFCRRGQTRREGLELARTPV

SEQ ID NO: 353228 - protein, 343 aa, unidentified
MTQYVGLDVSLKETKLHVLDEAGNRVWRGRCATEPAAIAAAVRRYAPAALRIGLETGPLTTWLWTALTTDGLPMVCLDARHAKKALDMKVNKTDANDAEGLAHLVRAGWYREVRVKSRGAMLARALLRARSQLLSMSLALENQIRGILKTFGRIVPKGAGGLFEKNVRALITDDAEIAAVIMPLLQARGMARSKCAALDRRLIGSVQADVTCRRLMTMPGVGPLTAVAYVAALEKPNTFKRSRAVGAWLGLTPRRFQSGEVDYDGHISRRGDNQLRALLYEAAAVLLTRVRRESALRRWGLLLWKRLGFKRAATALARRMAVVLHAMWKSGTPFNPTLGATTP

SEQ ID NO: 353229 - protein, 343 aa, unidentified
MYYIGLDVHKKTISYCVKDAAGCVQQEGRIGSTRRELDAWIGTLPQPRMIAMEATIFTGWIYDHLLPHAEKVKVAHPLMLRAIAAAKRKNDRIDAGKIADCLRCDFLPECHMASTEIRNRRRVLRYRGLVLRQAVQMKNRVSGLLMETGVSYNKLRLHRMGYFAELMSTNEEVSESIRPLLRLCREHIDRSIRLNTDLLRSLEQDPLLADRLRRLRTIPGVGPITALTWALEVGDTSRFRSIKQAISYCGLCSAEKSSADKVMRTPISKQRNKHIQQVLVEAARLAPRYSDELALLHEKERQRGNGNRATLAVARKMVALMLAVERRNTDFVPAAEFRRSTAA

SEQ ID NO: 353230 - protein, 335 aa, unidentified
MKVFYLGVDASKKKLDLCLRSNGKDILYDVIPNDLSSIKSWLTRTFEKFFLSEDSLVVCAEHTGQYTYPLVCATKSIGVYLCLEDAAKIKYCHGIPRGKNDKIDACRIAMYAERYNDCLQPYTASELIIQKLKNLSTERSMLVADRAKYQSQLKDQVDYMEDSIYIAKCNRVEGIINTFTDYIAQIDLEIKELINQAPVIAHQMDLLMSVDGVGERIALKMIMETDAFTSFTDPRKFCCHAGVVPFVYVSGSSQRSKNRVSNRADKSIKHLLHMAALSVSQVKNSPLKKYYDRKVEEGKNKMSVLNAVRAKLVTIMFAVIRTDAFFSRNYQNSLA

SEQ ID NO: 353231 - protein, 356 aa, unidentified
MGQNGSVDIPFNKSGVGIMKITTIGLDIAKSLFHSYAINHTGRLIRKKQLKRKQLLAYFAKLEPSIVVMEACGGANYWAREFIKQGHQVKLIAPQYVKPFVKGNKNDYNDAQGIAEASQRSSMRFVPIKSLEQQDLQNVHRQRERVKKERTALANQIRGLLAEYGIVIKKGISTIRNELPSIIEEAENDLTVMSRALFNELLEEFHAMGDLLEHCDTKIKIANKNNDICTRLGDVLGIGDITSSALYAAAGDGKNFVNGRHFSAWVGLVPGQHSTGGKPRLLGISKRGNSYLRTLLIHGARSVLRHSENKNDRFSLWAQALLKRRGQNKACVAVANKLARMAWVIMAKGETYRPAM

SEQ ID NO: 353232 - protein, 360 aa, unidentified
MKTNTLSHAVKSSTPSTPEAQARIQQLKLGVDWHADHLRVARMCDGQSPQPAQRFTHAAFLEFVRKQLTLADQVLVVYEAGPGGYHLHRQLTALGVFCYVVHPEKLDPRNTGVITDKTDSRELVLKLDRYVNGNARAMSVVRVPTPAEEQRRSLSRQREQLRRERQRLAAQGRSLCLTQGLRLRGDWWKQTLSLPQWLEERLSVWRQLIAAVEAQLETSTQQVEALSPKERPKGLGPLTLGLLIAEMCDWQRFKNRKQVGSYTGLCGGVSSSGPSHCDLSITRTGNARVRWALIELAWRMVLYQPQSKAVQRWRHLLLNPKAAARQKKRALVALARQLAVDLWRWQTGKVTPEQLGWVMV

SEQ ID NO: 353233 - protein, 369 aa, unidentified
MADRITYVGLDVHKESIVVAVAAGGLRGEVREYGRIANTPTALDRLLRKLGGDGTRLRFCYEAGPCGYGIQRRLSAQGHECAVVAPSLIPKRAGDRVKTDRRDAASLAKLHRAGELTAVWVPDARHEAMRDLVRARLDAVHSLRRARQQLSGFLLRQGCHYGRPAWTKLHRRWLAGLKFEQAVHHLVIEDYIAAVEAAAARRDRLTAQIEAMLPDWALAPVVAALQTMRGMALVNAATLIAELGDLTRFANPRQLMAYLGLVPSEHSSGASVKRGGITKAGNGAARRLLIEAAWSYRFPARLSRELLLRQENQPKPIRDIAWKAQVRLCGRYRRLARTGKPANVVTTAIARELSGFVWAIARQVTVTAG

SEQ ID NO: 353234 - protein, 419 aa, unidentified
MKSTKTKKVKKINDKTVIAALDIGKNVQYGYFRAPNGNDVKPFPFYNSKKSYNAFWEKLCQFKKQQGLEEIVIGFESTGPYAEPLFHFLRKKPVKLVQVNPVHTKRVKELTGNSPNKTDKKDPRVIADVICLGHALTLVVPQGPAAQLRRLTHARERSIKKRTTDLNQLQDLMYVIFPEFLDIMKGISTKTARHLVRNYPSPEAIVQIGIEPLTTIMKKVSRGRISTDRAKALYNAACHSIGIIEGKEAILIEIEHLISRIETEDEFVKNIENQMLEQLEHIPYMDSILSIKGIGHVTAAGLIGEVGDFRKFTTISEITKLAGLDLYEISSGRHKGQRRISKRGRPLMRKLLFFAAINVVKSKGIMHKKYQQMLDRGMLKMKALVAISRKLLGLIFAIVRDNMKYVENYSDNHYYKLAA

SEQ ID NO: 353235 - protein, 345 aa, unidentified
MSTTGVDAFAGIDVSARELSVALRREKGEDKPAMAKFSNRPSGHKALIAHLLGAGRRVRVCLEATGNYSLDLALTLQAHRQVEISVINPRRARRFAESLGQRSKTDPVDARVLCEYAARMPWVAWQPPSSVALHLRAVARAIADLGVIHTQQNNRAQASAASQALPVLVVKEMQRHQKYLEQRMTRLRREALRLIAGDSELDRRFRLMLTTTGIAEISALHILGELAVLPDMLDARQWVAFSGLDPRLFKSGKSVEKRPRISRGGSRHLRRALYMPALVALRRDLYLRGFYQHLLARGKARMQAVVAIMRKLLHALFAMFRTNQPYDGSKLCALHLPVCAVAACA

SEQ ID NO: 353236 - protein, 347 aa, unidentified
MQFYTKTHEHYCGIDLHTKMMYVCILNNSGEIVLHQNIPTNPARFLKLIEPFRQNLVIGVECIFSWYWLADECERQGLAFLLGHALYMKAIHGGKSKNDKLDSEKIARLIRGGTFPMAYVFPAELRPSRDLLRRRNYLVRRRSEVLAHVKLTNYQYNLPAFEKHIGKKGNRVDLAERFKDPAVRKNVEVDLAVADHSHLLINQLEAYIIRHVKQFDPRTYYRLQSVPGIGPVLALVILYEVGDISRFPTVQSFCSYARLVKCPKESAGKLYGYGGGKIGNAHLKWAFSEAMCLFMRESDRAKAFVAKHEKKHGKGKAMSILTHKLGRAVYFMWKRKDAFDEKYFFKT

SEQ ID NO: 353237 - protein, 338 aa, unidentified
MNIVFLGIDLAKNFFQLCGLNQAGKPVYTKRTGRKELLQTLANIPACLIGIEASTGAFYWQREFEKLGHKVKVISPQYVKPFVRGQKNDGNDAQAIAVALMQPTMQFVPPKSPEQQDIQALHRARQRIVNHRTATVFQIRGLLLDRGIPIGSAVSRARRAIPLILEDAENGLSSRMRRTIAELYDLFNDLGRRIHFFDKEIETVFRQSEACQRIAKVKGIGPETDTAVAAAIGKGTEFKNGRHFAAWLGLVPRQHSSGDRQVLMNMTKKGDKHLRTLFIHGARAVVRVATNNNDGHMNQWVNQLKERRGFNKTTVAVANKNARIIWSMLRNDTGYQVV

SEQ ID NO: 353238 - protein, 346 aa, unidentified
MNITTIGIDLAKSVFQLHGIDSSGKVQIKKQIKRAQMAEFFVSLKPCLVGMEACGSAHHWARKLESFGHTVKLMPPQYVKPYVKTNKNDAADAEAICEAVTRPNMHFVPIKSTEQQAILSLHRIRQGYVKARTAQANQIRGLLAEFGLEIPQGIGYISKRVPDIIEDASNELPGILRVEIQSLLEHLNELDTRADNCEKKIVAWHKQSETSKKLEAIPGIGPLTATALIASIGDAKNFKNGRQVAAWIGLVPRQHSSGGKQNLLGISKRGDVYLRTLLIHGARAVIHHSAKKENLTDSQKWVNQLAERRNKNVAAVALANKNARIVWALLNHNRDYQDNHKMLVAA

SEQ ID NO: 353239 - protein, 346 aa, unidentified
MLYAGLDLSRQRLDVHVLDEEGRTVEVLAVHPDADALRTLANRILRHGQEVSAVIESMTGSRFVHDTLERFGWDVMIADAVKAKGVAPLAAKTDKIDAHVLAELGRRDLVPEIWLPDPAVRAERERARFRLHLVHHRSALKCRIHATLMTFGHTVPVTDLFGTSGRALLAGLALPEPWATTLATSLAMVDELDQRIDECGRELARLGADHPYIPLLLTVPGVGPLLAYTIASEIGDIARFASPKKLTGYTGLCPIVRQSGNRDFRGPLAKNGPKYLRWALVEAATHAARHPHYRDRYERNKKRLGRQRGAKVARIDIARQPAEAIWHVLTKNEPFAPVGPAILLVA

SEQ ID NO: 353240 - protein, 309 aa, unidentified
MIAFGIDVGKHFLDLARYDHASIERFDNSPRGIKTLLLRLTEAQHPFVVIEATGGYELPVLRAIARQGIAVSRVNPRQARNFARAQGLLAKTDALDARLLADMAACIPHKLVQYAEPEPWQTQLAAFVGRRTQVVQSIQQHERQLEHIHIPELLRVAKRSIQALKRELDTLNQRISEISSPKLTPAWQSIKGLGPIVQATLLSMLPELGSLSRQQIAKLVGVAPLNRDSGTLRGRRAVFGGRVHIRATLYMATLVAVRWQPEFKAHYQQLRARGKPAKVALVACMRKLIVVLNARIRDEQIGRPTPIYA

SEQ ID NO: 353241 - protein, 343 aa, unidentified
MDHFAGLDVSVKVTSVCIVDDTGKIVREVKVESEPEALLAVLKNPAYHFKRIGLEAGPLSQWLFSALAEAELPVVCVETRHMQAVLKAQINKTDRNDARGIAQMMRVGLYRPVHVKTLRSQKLRMLLTHRKLLQSKAIAVDNDLRGTLRNFGLKVGMVGTVKFEARIKELVENLPDLAGLVEPLLVVRRVLREQFVILHRRLLAIVRDDEVCRRLMTTPGVGPVVALTYRATVDVPARFRKSKSVGAVFGLTCSKYQSGEIDRSGRISRCGDEMMRVMLYEAAQSMMWSKKWSWLKAWAMQIARRRGMKKAIVALARRLAVILHRIWVDGTEFRWTREQAVAA

SEQ ID NO: 353242 - protein, 391 aa, unidentified
MFLLGIDIAKLNHVASCIDSSTNEVIFSNFKFKNDFKGFSALLNKIKSFDAKNLIIGLESTSHYGENLINFLFIHDFKVALINPLQTSHLRKANIRDAKNDNLDSLNIAKSLLFTKLNFVSKKNIECFSLKKLTRFRSNLIKQRSKAKIQLTSLLDLLFPELQYLFKSKIHSKAIYSLLKKYPSTEEIAALKDDEISNLLYASSKGHFKKEKSIELKSLAKTTVGIKDTSISLHLIQLIELIELYTKQIKDIEIKLTDIVNNLDTTLLSVPGISIIACAIILGETNNFENFSSSKKLLAFAGLDPKIRQSGNFNASSCRMSKKGSPYLRYALIFTAWNIVRHSEKFNKYYSLKCSQGKSHYNALGHVAHKLVRILFTLIKKNISYQEEKLE

SEQ ID NO: 353243 - protein, 342 aa, unidentified
MKDSIYDHYIAIDWSVKNMAIARMTKKSNKITIIDVPSDVVELQTYLKNLRGTKILAIEETSTSQWLYTELEDYVDKILICDPYRNKLLGEGAKTDKIDAAKLVHLLKAGLMKEVYHSAEKFIYIRRVVSGYEDMVKAGVRLKNQRYALLRTCGKNGKEKDINLGAQGEQFVLECLDRQIKAYDEEKKGFEKEFVRLARKYPEIKHQKSLPGIGTINAVKIVSRVVSPYRFADKGHYLSYAGLIKLEKISGGRSYGKKNPRYCRQLKSVYKSGILAAIGGNNPINDYYEYLIREKNYPEHNARNSACRRLAILSLGVFRSGKKYQPYRRDRVKGNKEISPDL

SEQ ID NO: 353244 - protein, 366 aa, unidentified
MRTVFGIDVSKASSEVAILVNGERVHGYTMPNDIIGFSHLLKDLKTVSNPEIIFEATGVYSRRLQAFLEENSYDYTRLNPLEAKKQLDGLRVRKTDKIDAEKLASSQFVLNRMPTYVQEKVYQNLHDLSRFYQNLTEDIVRTKNRLHKVLQVAFPEIEILLSTPAGEQYWNLVSIFPTKHWVLELSEVELKETIRQSTSKRISENRVDNLAEKLVGLAKQSYSAISKTSPMIEEVKYNAQELIRLTNRREQVLEQLIELAKPLPEYEILLSIPGIAETTATSVIGELGDIRRFTSANQINAFIGIDLKHYESGDFLGQEHITKRGNPYARKFCTNVFTISLQLAILILAISQISMRNKKTIADNFN

SEQ ID NO: 353245 - protein, 394 aa, unidentified
MYFVGIDISKYKHDCFIVTEAGEVIKDTFTFDNTRTGFDQFFSILDGLGPKNEIKIGLEATGHYMNNLMKHLSVKGYSFVLLNPIIVSRFRHSETLRRTKTDKVDAKLIAQVIASKDFSSYPLQAYHFPDLKTLTRLRDRLIKQRSLYLVMLTNQLDLSFPEFKEFFDGRLKSKTAQFILTKYGISSRIANMNSQSFELLRKVSHGKFSYAKFAKLKELAKNTIGCSSEIDEMLFALTINLYQSIDEAITEVESKIIEIMEKLDSPTASIPGIGIMSAATIIAEYGDISRFANDGQMLAYAGLDCGRYQSGTSDFPGRMVKHGSGYLRQVLMNVAETCMIHVPSFYDYYLKKRNEGKSHRVVLSHIARKLVRMIYKLETSRTHFDLSVFNSQHQ

SEQ ID NO: 353246 - protein, 412 aa, unidentified
MTATNQFAAHVGLDWADKKHDVCVQFKKGERVFHVIEHTAEALDVWLTELHQKVKGRIAIALELKKGPVVYALQKYPFITVFPVHALSLARYRQAFSPSGAKDDPQDAELALELMLRYPQKIKAIEPDNADIRLLQQLVEQRRQLVEDKRRFVNRLINTLKQYYPQPLEWFSHRGSLLLCELLIRWPSLQQLKRARHDTIRNFLNAKGGRAMALTEQRVVSIDNAIPLTTDPSVIEANALMATALATQIKVVSEIIKTYDERIETLFDTLPDSGLFKSRPGMGPCMGPRMLAALGDNRDRFNSAEEIQNYAGIAPVTERSGQKSWVHWRWLCAKFVRQTFVEWAAKTVNSSYWARLYYQGLREKGKSHQSAIRALAFKWIRIIYRCWKTRTQYDEAKYLLALEARRSPLLKP

SEQ ID NO: 353247 - protein, 408 aa, unidentified
MGASTGMLSAGPPTTYPPLEVRSMRRAKKGGPGPSHLLMTPDHAGNVVGVDPHKRTLTATVIDARGGILGSGHFRVSGEGHRELEAWARQFGQVARWGIEGAASWGRHTAMFLSSRGHDVRDVCANRTSRADRARQRGKSDMLDSERIARETLAHSLLPKAFKRAGADSGPDEHRQLLALWNNQRRSILTGRQHLVGEAEYLLCELPLELREELPDTKAIRPRLAALARRNRRRRYDAPTRLRLQLLDSYRTQIRTLDREERQVVAQLEALVDQSGSTLGELCGLSTRSVAELLVEVGDPRRFTEGGFARFNGSAPLPASTAEGPGEPIRYRYNPGGNRRINAILYRMAVTQLRCEPRAQRLYANARAGGHTKKEARRILKRHLSDVIYRRMIRDLETQLTDQPLLAA

SEQ ID NO: 353248 - protein, 355 aa, unidentified
MDSRKYIGMDVHQASISIAVRDANGKLVMESVIETKAATILECIRGIRGNLWVGFEEGTSAAWLYDLLKPHVAQVIVCDPRKNALLKTGNKNDRVDARKLSDLLRAGLLTPVYHGESGVRTLRELARSYLTVTKDLTRVMNRLKALYRSWAIPCAGEKVYSPRHRSAWLEKLSEVGVRRRAEQLYQQLDMLLQIRREARRELLRESRKHPAQELLRQIPRLGPIRVALVIALVQTPHRFRTKRQLWAYCGLALQTRSSAEYRFTGGQRQHSQKLPALRGLNSNHNHDLKNLFKSVATNVSTSTGPLGDFYRSLLVKGMKPAMARLTLARKMAAIVLTIWKKGERFDPEQLKRQAA

SEQ ID NO: 353249 - protein, 372 aa, unidentified
MKQKILHIGLDVDDTQYHGSALNQTTGEVLDFKCRPNLKGLLSQLDKLHKYFPGSTFKLCYEASYIGYTLQRDLVENGYHCDVVAPTSIPSPRGKQVKTDRIDAAQLVQFYANDLLTLVTIPEPEQEQDRDLMRSRQKLLEQQTELRKHVQALLRRNGRHYKIETQNKTHWTLRHYCWLERTIEASSGSLKVNLELLLRQLKGVNNILTEYRQQIEALAKTPRYEPLVQALTCYKGIKNLFALTMITEIGNVKRFPHPRQLVSWIGMDIREYSSGGKHNRFGITKHGNRYLRTAFIEANQRGYRTARITKDLKARRKSTDPEFISIADRCLRRLNKKGNRLLVAGKHPNKVKVACAREMVGFVWESLHKAAA

SEQ ID NO: 353250 - protein, 358 aa, unidentified
MNQYFGCDAHKRYSMFVAMNDRGQTGRPVRVEHSREIFRRFLEALPPGSPIAIESVGNWYWMIEEMERAGHEPRLAHAGKAKLMMGQINKTDKLDAAGLAMLLRNGTLPSVWIPPGELRDQRELPRMRMSLVHMRTVLKNRIHATLAKYALDIAEVSDIFGVTGRKLLQARLEELPPYTRRSMETQLELLDQLEGHLRTCEEQIRAVVQATPEMKLLMTIPGIGQILAVVMAWEIGEITRFPGPDHLASYAGTVPRVKSSGGKTFFGRVRPDVNRYLKWALIEAANVVQMNQGHWPNRHVVRLYQRVRERRGHAKAIVAVSRHLAEAAYWMLKRNEPYQEPQRPISSTQEKARPSHES

SEQ ID NO: 353251 - protein, 342 aa, unidentified
MRSVKRGGRSCHFMSALVCGLDVHKDSTYATILNHEGKIINQMRMDNEKVLSYLAHYKVNRVAMESSTAIAPLYRKLASKGFDVMVSHPKKTRYIAEAKIKSDRVDSKTIAELARLDALPLAYVPNEETAKLREKVRRRAFLVRQRAKLKVKIKIVLTYEGIKPPLDHGLFTLKGVEWLHSLSLESVDSYLRIMNTFSREIKLLSKQLVGLAEEDEDVKLLMTVPGIGYYSALLVKSEIGDINRFPFGERLCSYAGLVPSTYASGRVVRHGGVTKEGSRWLRWVMVQAAQTHVRSFDSTITRMYSRVAERRGHRVALTAAAHKLLLVCYSVLRNKRPYYDQA

SEQ ID NO: 353252 - protein, 346 aa, unidentified
MDHVGIDVHKKESHICIVAEGGELIERRVRTEVGRLAELFEKRPHARILIEASTDSEWVARCLEGLGHEVVVADPNFAPMYATRRRTVKTDRRDARALADACVLGAYRPAHRLSDAQRHVRGRLGVREALVRTRTRYISLIRARLRQDGWQVPTGSAEGFGRRVLALRLPGRLLSEVAPLLAVMRHGDRQLAYADERIAAFTATDPRVRRLRSVPSVGPVTAAAFVAALDDAQRFRRAHEVEAYLGLVPQEWSSGESQRRGRITKAGSRRVRWLLIQAAVSMRRLRDPRTAGLREWAERIAARRGRKIAVVALARRLAGILFALLRDGTVYESRLGQARRQPAVPA

SEQ ID NO: 353253 - protein, 390 aa, unidentified
MFYLGIDIGKFHHATALLTHEGKVVATLSCFPNTQDGFQELLTLITCHLPAGEELRIGMEATGPYWIPLAEWLKTKGWPPVVLNPIKTSSLRNYGVRGSKTDNIDSVLIANALRFEGSQPQKVSPKHSEELRHLTRLRADMVKDRTRLVLRVTSQLDRLFPELLCSFSKTISPSCLALLTEAPTPDRVLALGEEKLTALLRKASGGKLGVGRAKEILGKAASSIGVSSPALEEVLVLLMEQINLIDRQLKTLDRRIADLYDQAGLFFTTIGGVGAVTAATILGEFGSVDRFTKATQMVAFAGVDPKLRNSGQHQGQVHISKRGSPYLRRALYLACQGAVRNDGYFKSIFQRHRDNGKSYKEAIVAVMNRFIHVLYAIWRDNRPYSPLTPA

SEQ ID NO: 353254 - protein, 331 aa, unidentified
MFPVGIDVSKNTLDLCMLYDGIKGRIKTRNIQNNRHSVENILRWLRLQHCGPEDVHVVMEATGVYHERLATELHDAGFRVSLANPHRSREFARGMGIMTKTDKVDAYMLACYAFLKKPHRWEPPAPEIRYLGALLRRRDVLLGDALREENRLEKYLSTDTPADIISSCRRMAQLLREEVSNIERQIKAHIKASPALRRDYTLLNSIKSVGPQLGMHMLVVLRSHNFVSAEQAAAFLGVVPIEKRSGTSVRRRPRMSKIGPPQLRAKLYMSALCGKIYNKRMRNIYDEMCLRGKPKMVAIGALMRKLVHWCYGVLKTGTVFNDEDLKPVLST

SEQ ID NO: 353255 - protein, 364 aa, unidentified
MNKCHSNTELSSHEETRCQFNGGTEAIKLGIDMHQDFCVVVLQEDGASPKPPQRFQKQAFLRWAAKLARSGAEVHAVYEACGFGFALQRQLSALSIQCHVVCPQKLDEQNRRVKTDGLDAKALCLKLDRFVEGNRSALALVRVPTEEEEQKRAIHRQREQLVKARKQLEAQGRSLMVNHGLESVKSWWKRGNFAALQVPTWMKELLQNSQPILLTLQQKISTLTLQLQAAAAPTNPRGLGQMTSVIIDREIGDWHRFSNRRQIASYTGLCPGEYSSGQTRLQSCVTKHGNPRLRAALVELAWRMVRFQPNYKPIVKWRQILAKGALATGAARKKAIVAVARQLAVDLWRIKTGRLRAEELGLIN

SEQ ID NO: 353256 - protein, 377 aa, unidentified
MDAPNDFKMSHTGLCQSKSVEETSMTNITTIGLDLAKSVFQVHCADRDGQPVMRKKLRRAQVLEFFRKLPPCLVAMEACSSAHHWARSLQDLGHEVRLIPPQYVKPFVKTNKNDATDAEAICEAAMRPTMRFAPIKSAEQQAVLSLHRARDLLVRQRTMLINALRGHCGEFGIITSVGACNIGKLIEIIEDREDKRIPELARETLLLLIEQMRAVEVRIGALEKKLKAWHRTNEASCRLETIPGIGLITATALVATIGDASQFQSGRQLAAWLGLVPKQNSSGGKDRLGRISKRGDRYLRRLLVHGARAVLRWTRARKQERSGWVQALLARRPTNVVLVAMANKTARVVWAMLRREQTYRVLPQNDAMIHSAAVSGA

SEQ ID NO: 353257 - protein, 408 aa, unidentified
MDVLHPRCAGLDVHKDSVVACVRCVSTPVHREVRNFPTTTSGLGALADWLAAQACTHVAMEATGVYWKPVWHLLEGRFELVLANAQHIRNVPGRKTDVNDATWIADLLAHGLIRSSFVPPARIQELRDLTRTRKQLVREIAQHTLRIQKVLEDANIKLASVLSSILGQSGRAMLTAIIAGEADPERLAALAVGTARRKHPDLVEALRGRVTDHHRSLLQLHLTLIGALEAARSEVDAAVGKALAPIQAHAETLTTMPGVSEVVAHVIVAEIGIDMARFPTAGHLVSWAGLCPRNDESAGKRRSTRVRKGANWLKTTLVTAAWAAVHKHDSYLRAQFLRIKARRGPKKAILAVAASMLTAAYFMLRDGVAYHDLGAQHFDWRDKTKTIRRHVRRLTDLGCQVEMRAHAA

SEQ ID NO: 353258 - protein, 313 aa, unidentified
MGSSIGVDSHKCSLAAAAVDELGRVIGVREFPNDPDGHRALLEWAQGCEAPRAIGVEGSGNYGAALCRALCSAGEQVHEVPATMTFRERRRKGSQGKSDPVDAVAIARVVARGDVLPSPRRVQALADLKLLSDYRDQLLCARTQLANRVHRDLVILRPGYQYVVPNLVGAKHLSRAASLVRHDLSVRADLVRRRLAELRRLSKEIAETKARLREALAESGTTLTEVPGIGPLIAAKILGEVGDVDRIRSQAAFAMMAGTAPLIASSGMSSRHRLNRGGNRKLNFALHYMALVRYRSDDDDGPRARRSRKPCGV

SEQ ID NO: 353259 - protein, 452 aa, unidentified
MQKQAGKVKTKRLQLECIESNAAGIDVGATEIYVSVPQDRDPQPVRCFKSFTEDLRQMAAWLVHCGVTTAAMESTGVYWLPPYEILEDAGVRVCLVNSKHVKHVPGRKTDVQDCQWLQYLHSVGLLRASFRPESEVCAVRSLSRHRSSLLENAALHVQHIHKALTQMNLQIHHVLSDITGQSGMAIVEAIVDGEHDPARLAALCHQRVRSDRQTVIKSLVGNYRSEHLFTLKQSLQAYRYCRELMTDCDREIEQRIRQLNGKVHLPEKAPPPDPRVHRRSKNEFTFEMVPELYRIFGVDLTAIPGISALTAHILLAEIGPDLSRFPNVAAFASWLALCPANKKSGGKVLSSKTRQSNSRANTALRVAAQTLGRSRTHLGNFYRRLRGRLGAPQAITATAHKLARIVYHLLTTGQAYDESVFLHEDQRQAQRQEKHLRKQARSLGFQLTPIPA

SEQ ID NO: 353260 - protein, 341 aa, unidentified
MKNLFIGVDFSKEKVDVAIIFADGLTETAARVFNEFKTTVSGYKQLVKWVEQNSYGIDSSLWLFCGENTGDYSKGLCNFLYGKGYDMWLENAKSIKDASGLRRLKSDRADASMIAEYAMRNYDKAIMYEPLSESLAQLRELFLYRQMVVRHRCSFQVRRGEKRLTMEKSPIKTMISQSGRHIVSELNKEVEKIDKRIAELIKSDDELTEVFTIVTSVPGIGTQNAVCLMVYTDNFRRFNYDSRKIACYYGIAPFGKDSGTSVHSDPRVHYMANRQIKAMLTQAALAAVNFNPVMARYYMRLVERGKKKQVALNNVKNKLVHLITAMVRNRQLFTTEYKITA

SEQ ID NO: 353261 - protein, 348 aa, unidentified
MNVIGVDYHPSWQQICWMDTETGETDEKKLEHATGEAERFYRQLPGRALIGMESTGNCQWFVELLGRLGHELWIGDAAKIRASEVRRQKNDRRDAALILKLLVEGRFPRIWTPSSEEKDLRQLLIHRYKLVLIRAQVKNELQHLAMNQGVTKRQKLWSKTGEKVLRELPLAPWASRRREDLFKVRGMLDEQIALLDVAVKEAAEKNEKARLLMTQPGVGPITSMAFVLTMGDVQRFRRGKHVASYLGLIPREHTSGGHQRLHSISKQGNRFLRMLLVEAAQSAVRYDPEFRREYLHRCHGKPRGVAKVAAARKLAVRLYWMLRTNTAYPGVVRVESSSRVPVVVRSNG

SEQ ID NO: 353262 - protein, 405 aa, unidentified
MQVYIGIDWSENKHDVCFMHETGEVLLILQIQHTMAGFRELDQAGQSLGLSRQEVVIGLETAHNLLVDYLWDQGYAQIYVLPPSVVKSAQKRFRQSGAKDDPWDARLIADLLRTDHHRYTIWQPDQPLTRQIRAEVRFANQLGRELVRDENRLRALLVRYYPAILDAFPHLDSLVFLAFLQTYPTPSQADALPFEQLQAFLRAHHHTHTHRWPHIYAGLHAGHPHANPALEAAYSPLALAQARIVETLLRSRQACLARLGNLFQQHPDHEIYDSLPQAGALLAPALLAKLGDDRHRFPSPAILQAVAGTCPVTNRSGKHVHVYFRSACDHEFRHITQQWARLTLNASPWAATYYHLVRPHCKTDSDAIRRLANRWLEILWRLWIDRKPYDEAFHLKQHTLRSHAR

SEQ ID NO: 353263 - protein, 401 aa, unidentified
MISVGIDVSKEKSTVCILKEYGEVISEPHEINHTETDLKALVESISELNEETRVVMEATGAYHLPLLTYLKNHGIFVAVINPLIMKKYSAIGLRKGKTDKLDSIKIANYGIDNWFKLTDYEATDEVYSELKLLGRQYSHYIAMRIESKLVLSNLLDRTMPGIKNLLKNRSDKPEKDKLNDFVKEYWHYDNITQKNERQFINSYLKWAKNKGYHQSETKAKQIYALAQEGIPTLSSSTPSTKMLVLEAVRVLSEIDRTLSMILSQMQELASSLKEYNVVRNMPGVGDTLAPRLIAEIGDLRRFYNKKALIAYTGIDSPPFESGQFVANKRHISKRGSALLRKTGYEIMKCIKSTKPKDDPIFLYMLKKEAEGKSKKVAKIAALNKFLRIYYARVKEVYNTQV

SEQ ID NO: 353264 - protein, 322 aa, unidentified
MYEVILALDWSKSNMAIARLDKDRDTPRVFERPTDIAYLKKYISNIKESKSVTIEETSSAHYLYSELIELVDEVIVVDPYRNRLLLDGPKNDKRDAANLAMLTRSKNLMKLVHHEISENYEIRKLISAYEDLIKASVRAKNQLAAYELNNTKRMPTDSFVISQIKQTIICIENSRKEYEKKFAELAKNHKDIKRIAKIDGIGIKSAVKIVGVILDAKRFSNYRKFLAYCGLVKYRKVSGDRDYGARITRYSRTLKTVFKMAALTAITNDTPFKEYYENLISKGVFSHNARNCVARLIAKTVLAVIKNGVKYDGKIIKQKIGN

SEQ ID NO: 353265 - protein, 407 aa, unidentified
MIFVGDDWAEDHHDVWVMDADGRRLVFQRFDEGVEGVSGFHALVADFVSDPVEVVVGIETDRGLWVHALVGAGYQVYAINPKAAARYRDRHSISGAKSDRGDAKVLADLVRTDRHIHRPVAGDTPGVEGVKVIARAHQNLIWEKRRHTNRLRSFLREYYPAALETFTSLTDRDTLAVLAVAPSPSKGARLTIPQIRAALKKGGRQRNLDRRAAEIQEGLRGEHLRTSDAVEAAFAATTRSAVAVITAITDEISRLEETLEASFGEHPDADIYLSMPGLGVVLGARVLGEFGDDPNRYTSAKSRRNYAATSPLTKASGKYKTVSARYVRNNYLYNPIIRWAFSSITTSDGCRAFYDERRAKGDRHYQALRALANRLVGILHGCVKHHTLYNEDTAWAHRQPAIENLAA

SEQ ID NO: 353266 - protein, 407 aa, unidentified
MELTTIYKRVIGLDIHQAQITACALIEMPDGSTRFEQRQFGAFKRDRRELAKWAASLVPEEVVMESTGIYWKSPYAALEEVGIQAKVVNARHVKNVPGRKTDIGDAQWLAMLARAGLLRGSFVPPAQLRELRLIARQRNNLINQLIGEKNRLHKILADGGVRLGVVVSDLHGQSARVMVKAIIRGCSPHEVLDCASRRLRASREELFDAIQGELTDSHRFVLAETMQHIEEIEARIGRFDARLLDGLKAERNTLALLQTVPGIDLIGAAMLLVETGPDMAAFGTADRLASWIGICPGNNESAGKRKPAKARKGNPFVRRLLCEFAHAACRTKCVFKPKFESLMPRRGYKRSIVAIAHSIMRTIFFMLKRGEHYKDRIVDYEAMAVERNAPRWIKALTKFGYINPASA

SEQ ID NO: 353267 - protein, 416 aa, unidentified
MEVARDEDAVIERVAALDIGKAELVCCVRLPGPGKRRLQEVRTFSTMTRSLLVMADWLTELGVKRVVMEATSDYWKPPFYLLEGSFQTWLVNAKDVKHLPGRPKTDRLDAAWLCKVAEREMLRPSFVPPPPIRVVRDLTRYRVDLIVARTAEKQRVEKLLEDALIKVSVVASDIFGVSGRDMMAALIAGERDPARLAALARGSMRAKNAALQEAFTGRFTEHHAFLLTKMLERIDRLTADIDQVEARTQEQIAPFAAAVARLDEIPGIGAVTAYAIIAEIGVDMTRFPTHLTSWARFAPGVKESAGRATGNGGTGHGNKYLARALGEAAVAASHTPTFLGERYRRLARRRGRPRAVVAVGRSILVIIWHLLNDEDATFHDLGPDWYDTRMTHDRRMRNHVRELHKLGYRVTLDATA

SEQ ID NO: 353268 - protein, 411 aa, unidentified
MQVINQRCCGLDVHKRSITACRLKWLGSSWEREIRQFGTMTKDLLGLGDWLAQEGCTHVAMESTGVYWKPVYNILEGQFELLVVNAQHLKAVPGRKTDVRDAEWIAELLAHGLLRGSFVPPVDVRELRELTRYRSSVVRDRARTLNRLQKVLEGANIKLANVVSDIDGVSARQMLEALVAGERDTEQLASLAKGRLKEKREQLVEALSGRLKPHQSFLIAEHLAQVDYLEGAIERLSQEIEERLRPFEQEIGWLDTIPGVSQRTAEVLWAETGGDMSRFASARHLASWAGMCPGNNESAGKRRSSRTRKGSPWLRHCLVEAAHGAAHTKNKYLSSQYHRIGARRGKKKAQVAVGHSILVIAYHLLTRKQPYSDLGANYFDERDRQAVTKRCVVRLQRLGFQVSLEKLPVAA

SEQ ID NO: 353269 - protein, 344 aa, unidentified
MEHFAGIDVSLKDSSVCVVDAAGRIVREAKVASEPEALVAWFRGLGLKVTRIGLEAGPLSQWLHAGLSEAGLETVLLETRHVQAALSAMVVKTDRKDARGIAQLLRMGWFRPVHRKSADAQEVRALLVGRKLLQSKLRDVELSIRGILRGFGLKVGEISKGRFAARIRELVAGHAMLETVTGAMLAAREALLAEFMRLHRRMLAIVRADAVCRRLMTAPGVGALVSITFRTAVDDPGRFRSSKAVGAHFGLTPKRYQSGETDVIGGISKVGDAMVRTALYEAANAVLSRPTRFSTLKRWAMEVARRRGLKRAKVALARKLGSVLHRMWIDGTEFRWGKEAPVAA

SEQ ID NO: 353270 - protein, 369 aa, unidentified
MTNPYNLFVGIDLGSQSHHVSVVDRDGTLLGERKFEHDGQGIQQLLTWLAELAGGASPETVAVALEAPRGAIVDALLERGYCLFSINPKQLDRFRDRYSVAGAKDDSRDAYVLGNSLRTDLSHFRRLRPDHVQIVRLRELSRASDALQEDWRRNANQLWSYLQRYFPAILKFSSAADDVWVFDLLEQTQAQSKLAAALPIEELAKLLRRRRIRRFSAEKLYRALQDRLPLAAGVEEALAEQVLLLLPRLRLLHQQRSEVDHRTDRLLVEMAQENFPEHRSVEILRSIPGVGRVFIATVFSEAGRPLLDRDYHDLRLLAGAAPVTWRSGKTEIIRICKRILAPNKSMLVCAVRAIRTPEVCVVSVIGSWN

SEQ ID NO: 353271 - protein, 315 aa, unidentified
MTRMRHMENTPNLICVDVAKSELVLFDGKKTWAIPNEKEAINSVLKEFPKHRIVCEPTSIYHLELATLAFKNRNEVSLVNPKEIKNYRDCRAFRAKTDRIDACAIYEFSIRHYEALRLWKPPAKQLEKLYKLISQRSCVVRNRVTLRQVFGQDQAIKPVISETTTLVEVLESQISEIAKSYEDYLRFSPMPGVGPLVCATLVYLFNRYEFADDDAAVAFVGIDLRVSDSGKYKGYRRLSKRGDPLIRNILIQGGFGLMISKAASQAKRKFDAAGRHRTEQGVIAARKILRTAYVLHNTKTDFDLSKWHWMVDNET

SEQ ID NO: 353272 - protein, 356 aa, unidentified
MSREVKYIGMDVHKEAIVIAVLNSSGQLVMESIVETKASSLLQFIHGLQGELHVTWEEGTWAAWLYDLLQPHVQQVLVCDPRRNALLKEGNKSDKIDARKLADLLRTGMLRPVYHGEHGLRTLRELARSYQTISKDLIRVMNRIKALYRGWSIPCAGTQVYAPRYREEWLHKIEQVGVHRRAELLYQQLDGLQTLRRTLRPELLAESRKHKAAKLLRQIPCIGPIRAARLIALMQTPHRFRSKRQLWTYSGLGIETRDSAQYRFVRGQLQRAKKPQQIRGLNRNHNHEMKEIFKGAATRASCGVGPLRDFYVALLDKGMKPEMARLTLARKIAAIALTLWKKEERFDGEQLKTQAA

SEQ ID NO: 353273 - protein, 454 aa, unidentified
MILRMGIDIAVRAPHQASLADDRGELLWSGHRFSTTAADLEQLWARLPDGAVANEITIVIEPTRNAWVPLAAWFRRKGARVVLVSAERSADLRAYYAKHTKSDRLDSVLLARLPMLHPEGLHHERGLGPGDPLRRATKMHSTLVKRRTTSLARLDALLEILGPQWHAAFAGLGNKTTLRFLAAGYAEPHTVRRLGRARLARFFYRHSRGAFGDAEADQILSASRASLDLWDQDISFPDLAEDIAVEARLALALTEEIKELDERIAVLVRDRDPHGIITSAPGVGAVTGAVILGRLGDAGRFQSLAAVRGFSGLVPSLDASGVSGRHGRPTKRGDALLREALFISANQARRLDPTLAAKYHRLMVDTGKHHNSALCHIATTLLTRVAACWNSQTPYQLRDAGGRPVDSAEARAIIAERYTIPEHIRACRSTTNGTGRRSKESRRAPSTGPSSTPR

SEQ ID NO: 353274 - protein, 415 aa, unidentified
MGYKVAGIDIHKKVLMVVVMLIQAGGLVEKIERRRFGTTTPELEKLAAWLQALGVQEAVMESTAQYWKPVWGALEGKIPTLNLAQAFSNRARRGRKDDFRDAERLVRRLVAGELVLSFVPDPEQRNLRTMTRMQVHLTYDRGRLHNQVECLLEEMRIKLSSVLSDLFGVTGRHILGAMAKGETDPRKLAAWAGNRLQCTAKELVAALTGHVQPMHQRLLGLYLERLKLIDQQIDELQHMIAEALQSEQDAVQRLAEVPGFGADSAQQMIAEVGPQAATFPSAGEMSSWVGTCPGQNQSAEENHSSRSAKGNRYARRVLTEAANAAVKTKGSHWQVVFRRLLPRLGYQQAAWAVAHRLCRVVWKILHDKVRYVEQGVNRDPKARAHRARTLARALRQLGYNVELTPLTPAPAPTSP

SEQ ID NO: 353275 - protein, 385 aa, unidentified
MQMIVEQSRLAPFGLPFLGFRELSEGEQSVTAPYDYHIGVDYHKSYSHLVVQDSAGKTLRSGRVKNDRQSLGSFLERYRENSHAVVEATRNWMVMYDWLDDICDDVVLAHPLKVKAIADAKIKTDKIDATVLAHLLRADLVPEAWAPRETARELRIALRERMFYVRLRTMVKNRIVTVFDRYPEQTAQLKKLGDLFGKAGRQQLAAVSVSEIDRIQIDRGLEFIGDINNRIKQSEATIRAMTKTNANVKLLKTIPGIGEFFARLIDAEIDDIARFRSAKRLAAYAGLVPSTYSSGGKTYHGKIIKQGNKWLRWAFVEAVAPAVATDPQLRAQYEHLKFRGANKARVAIARKLLTIAFQILRDRRAYERRGANGEEGASSTISRLS

SEQ ID NO: 353276 - protein, 400 aa, unidentified
MNTEYDVWLGLDVGKTNHHGCGLNPSGERVYDHELPQDEAALRDVITTLQHEHGRVLVIVDQPNTIGALPVAVARDCDADIAYLPGLAMRKAADLYPGQAKTDARDAFIIADTARTMPHTLRSVDRESDVLANLKVLAGTDEDLAHDITRAINRLRSLLLQIHPSLERVFKGTVLTRAIVLDLLVRYRGPAGLRSAGKSGVKRWAKNHTRKDPSALIDAIFDALAEQTVTVPGTAASESVVPRHAMRIKALKAERKEIEAEAEELADSLPLLQVLTSMPGVGVKTASQILLAAGDFSAFRTPGHLAAYAGIAPVTRRSGTSIRGEFPSRAGNKRLKNALFYSAWVASCHDPLSKAYYDRKRAEGKRHNSAVMCLARRRLNVLFAMVRAGAFYEQKTPAAA

SEQ ID NO: 353277 - protein, 343 aa, unidentified
MMRFVGLDVSQKTTAVCVVDGNGARVWRGQCLSTPDQIDTVIRQHAGAHARLGIETGPMTTWLVHELRGRDLDVVCLDARHARAALKMQLNKTDQNDAEGLAQIMRTGWFRSVHVKSFETHRARALLGARAQLVGMTTRLSNHIRGVLKTFGLLPGAMRGLPFDRRVEALLEGRPDVAPVVQPMLCAWRQLRVQIAAFDKAVRDIVKANPTCKLLMTVPGIGALTGLAYVSTVEDPDRFKQSRAVGAHCGLTPRQYQSGQIDRSGSISRCGDILTRTLLYEAAGVILTRLKRACSLKDWAEAIAKRAGNGKARVALARKLAVILHSVWRSGEPFRWTDGAVAA

SEQ ID NO: 353278 - protein, 413 aa, unidentified
MTEENFAWFAGIDWGSERHQACLVDAQGRIVGEREFPHGGKGLADLCDWLLSMCGAADTVAVGIEVPHGPVVDTLIDRGFVVHAINPKQLDRLRDRHSVAGAKDDRRDAYVVGDGVRTDRRLFRRVHVTDPRLVELRAWSRLAEELTEERVRLSNRVHHELWRYYPQMLKIADGDVAATWVLDLWDLAPTPARAHRLRAAPVEKLLKHHHIRRIDADAVLRNLQEPAIKVGKGVAEAASVHLRSLFTRLRVVNRELRQADAKLDALCAAIGETDADSGEGLQRQDVMILRSMPGIGRINLATLLCEGSGPLSRRDYPALRTLCGAAPVTKRSGKSHIVIMRYASHARLRNVVYHWARVATQHDPKSRERYAALRRRGKSHGRALRGVADRLLGLACVLLQRQTPFDPNFAQAK

SEQ ID NO: 353279 - protein, 410 aa, unidentified
MYGKAGPMIYAGIDIAKNDHVVGATDERGREAAKPMKFANSASGFDRCAAYLDGLSESKSDLLVGMEATGHYWLPLFCRLQDEGYAVVVINPMRTDAMRRFKGSSRVKTDMIDCALIAETLRCGGFQPSRLGDEAMIELRQLTRLHQALKESVADLKRQVIVALDQVFPEYDSVFSDTFGESSKAFLKRCPTPEECLAVRADSLARTLERASRGKLGRAKADEIKGIAKASCGIGLATSAFSFQIKLLIDQIDFIEGQVSEVEARIRAGIEEVEPLILTIPGIGYALGAQIVSEIGDVRRFRNASSIVKYAGINPSVSQSGKFSSEESHITKQGSPYLRRALYLAAMAQLKLKSPFYDYYAKKRADGKSHREALVAVARKLVHVIYAVLSKQEPYDPNATKNPELASRSE

SEQ ID NO: 353280 - protein, 337 aa, unidentified
MDYFAGLDISMDETHVCVLDREGVVVRESKTASTAEAIADELAKAPSCRRIVFETGRMAPILFHGLSQLGLPVVCVESRHAYQALKSLATHKTDRNDARGLAHLARTGFFKPVHVKSLPAHAIRSLISARKKLVGQRVTLENQIRGLAVVFGIRLPRALTAAFIDQALKASEGVAGLSVAMRGLIAARTAVMTAVAAIDTDMRRMARASAACSRLMTIPGVGQLTALAFVAAIDDPSRIRRSRDIGAYLGLVPWRYQSGEVDYVGSISKCGDRRVRTLLYEAANVMLTRYKGQLKLKDWAFAIARRSTMRKARVALARRLAIIMHAMLRDGTEFVLT

SEQ ID NO: 353281 - protein, 364 aa, unidentified
MKKISKKQRAFAAESKPEKIVGLDLGDRYSHYCMLTASGELMEEGRIRSTIAALEKQFANEPRMRIALETGTHSPWVSRLLECHGHQVIVANARKIPVITASESKNDRNDAEQLARMAAFDPKLLHPVEHRSLERQQDLNLVHTRSVLVRARTMLINSVRGLVKSGGGRLPACSSAAFPGKAREVIPEVLKMACEPLLEQIAQMNRGIGEMDRQVEGLDKKYPEISILRTVPGVGPVVAACYVLTLDCAEAMETNRQAGAYLGLRPRQQQSGDSNPQRGIAKTGNNYLRSLLVQSAQYILGRFGPDSELRRWGLKLATSGGKRGKKRAIVAVARKLAVLLLSMWRNRRKFEPFPQAAAGLTVAA

SEQ ID NO: 353282 - protein, 319 aa, unidentified
MTKVVAGIDVSKQHLDVHVDGVDRRFENTASNWKGLHGFLRTHSVTRVVMEATGRYHRSVHQSLHERGYEVLVVNPRNTRHFALAFGELAKTDRIDAAMLQRYGQALTDLAPVAPQDACIAQLQDLLVTRDRLIDSRTALKLVSQSGLTPVAVTRAKSAVESLKEQITGIEEDIKILIEGSDDHAQAFTILTSITGVGPITAAALIAWMPELGTIGNRQAAALLGVAPYARDSGTSSGNRHVRGGRRRPRDGVYMAALSAINWNPDLRSFAERLRNAGKAHKVGVVAVMRKLIVLANVLLGQQRSWTPQPPVTAAETNA

SEQ ID NO: 353283 - protein, 343 aa, unidentified
MEHFAGLDVSVKETSVCVVDDTGKIIREVKVASEPGTLLAVLKNPAYHLKRIGLEAGPLSQWLFSALAEAGLPAICVETRHMRAALKAQINKTDRNDARGIAQMMRAGLYRPVHVKTVRSQKLRMLLTHRKLLQSKAIAIENDLRATLRNFGLKVGMVGTVKFEARIKELVENLPDLTVLVEPLLIVRRVLREQIGILHRRLMAIVRDDDVCRRLMTVPGVGPVVALTYRATVDVPTRFRNSKAVGAVFGLTPSRYQSGEINLTGAISRCGDEMMRAVLYEAAQVMLTRTIKWSWLKAWAMQIARRRGMKKAIVALARRLAVIMHRIWVDGSEFRWTREAAAA

SEQ ID NO: 353284 - protein, 325 aa, unidentified
MRQSEKPLGEDTVAHFVGIDVSKDTLDIATRPTGEQWRIDHDADSVATLLDRLRRLRPALIVLEATGGLEVFLAGELAAAGLPVVVINPRQVRDFAKATGRLAKTDRVDAHVLAHFAEAVRPAPRPLADESAQALGALISRRRQIVQMLVAEKNRLSAAPKSIRSDIQKHILWLTRHLQDLDEDLTQTIQQSPLWREKENLLQSASGIGPVSSRTLLSDLPELGTLNNKQIAALVGVAPLNHDSGKWRGKRIIWGGRASVRCALYMSTLTAVRYNPLIKTFYQRLQAAGKPKKVALTACMRKLLVILNAMLKHRTPWQINLAPTS

SEQ ID NO: 353285 - protein, 518 aa, unidentified
MARTSRKRRRSTPRPDVLHRPRGVFSPRVQKVGPEHFGIVCVDCAKARSKWMLADYYGKVLVPPAVVAHTQAELDAAVRQVRQAQAQHDLRDVLVSIERTGRYHHPVRRAFLSAGYDTRIVHPFTVKQFRLPADPGTKTDDTDLAANHRAAVNGFALSEPASDRLSQQLQLLTRHRRDQVQKASTLCCQIKEHLQTAMPGYGAMFSSLWDCPVPLRLAMHFGSSQAILQAGLAGLAQLLRQQNLPFQRRTLQRALDWASGAAPADSMAAEHVQIAMALEQDRTGKQQEILQRERQIAQCLTATPYVLLLVLPGINVVCAGDFAGEAGPIANYASPRCITGRSGLYPSRYQSDQVDHADGPLVKCANRRLRFAILQAADCLVTNNHHFGDLATAWRKQGANARLIRVRVGCRFARIAFQIVAGRRGFHHPAMREHHYVLDKLLRFHVEHATPWDQIQADLQAARRWLAPRDYQGQAVPLRRQLDELTPRRRGAQQLGQILSVVLAELGARTVQSEPSGT

SEQ ID NO: 353286 - protein, 382 aa, unidentified
MQPIDTVNPTILLAIELSASTWLVAARVPRLEKPLLHRIDGGDTAALLALISSLQARAARGLDATIGVVCCFEAGRDGFWLHRLLTAHGVICHVLEPTSILVNRRARRAKTDRLDAEGMLRVLAAYLRGDHQACSMVRVPTPEEEDAKRTHREREKLVQERLRIENRIEALLFTQGIRKRPSLRSWERDLAVLRTGDGREIPRHLRAELDRLRRRLVTTLELIREVEAERDQAAKTKPQDQACRKIAALSRIRGIGENFAAVLTREVFYRSFDNRRQIASYVGITPMPYQSGGMDRDRRISRAGNPRARTTMIQLAWLWLRYQPGSELAEWFRERVGTLAGRTRRIAIVAMARKLLIALWRYAESGVIPAGAEIRAEITVTA

SEQ ID NO: 353287 - protein, 389 aa, unidentified
MNKVHSHNERDTTIQTTLVAIFLSMELSRSTWLVTSMLPSSAGKMSKYSLKAGDVVGLFDRIAHLRAKASKRTGQSFPVVAIQEAGLDGFWLHRVLEREGVESHVVDAASIAVSRHRRRAKTDRLDGESLLRSLLAFKRGEPRVCAMVRPPTPDEEDRRRNSRERAALIAERVKLVNRVKGLLYCQGVFDFAPLKQDRRQRFEETKTGDGRPLPAHLKAEIGRLLDRLELLLAQIKAVEATRDTLVANAASKGAEHRVAMLRQLRGVGPDFAEVIYSEGLYRQFNNRRQLASYAGLTPTPWQSGQVSRDQGVSKAGNPRLRTVMVQLSWFWLLHQPKSALAQWFQERVKLDGGRRRKTAIIALARKLLIALWKYLQFGEVIEGAVLKAS

SEQ ID NO: 353288 - protein, 418 aa, unidentified
MKSIKAEKIKTINEKTLVVALDIGKKVHYGYFRTPKNRDIKPFPFYNTGQSFNKFWEKLCRFKEKHMLDEVVIGFESTGPYAEPIANYLRKKPVKLVQVNPMHTKRIKELTGNSPNKTDKKDPRVIADVISLGHSLTTVIPEGAAAQLRRLTHARERAIERRTAMSNQLQDLIFVIFPELIDIVKPSTKTGIYLIKNYPDPERMVSIGIDTLCNIVRKISRCKLGIDRAEKLYYAAKKSVGITEGKEAILLETSHLVSNIEAENRYIEGLEEQMVMYLQQIPYSQSILSIKGIGNITAAGLIGEVGDFKKFKTISEVMKLAGLDLFEVSSGKHKGRHHISKRGRALMRKLLFFGAINSVKSHGIMHAWYQKMLNNGTPKIKALIAVSRKLLRIIFALARDNTQYDKNYNINHELKLAA

SEQ ID NO: 353289 - protein, 359 aa, unidentified
MDVMEGSRHRVVGGVDTHKDLHVAAVVDEQDRVRGSRCFATTRQGYRQMLAWMRSFGDVQRIGIESTGSYGAGLLRFMQGSGIEVLEVTTPDKHDRRRRGKNDDLDAQNAAHAAFAGKRTVTPRSRDGMVESLRVLTVCRKTAVAARRVALQIIQTTIVSAPDGLRDTLRAMTRMQLVRTLAAWRPDLTAYRDVEAAYRISLKSLARRYLELHDEIADLDAMIGSIVDDLAPELVAHNSIGHTGAAQLLLTAGDNPERLRSEASFAALCGVSPVPASSGKTVRHRLNRGGDRAANSALHIIAIGRLRTDPATKAYVAKRIAGGHSKLDAIRSLKRYIAREVFHIITRRHREINQTRIAA

SEQ ID NO: 353290 - protein, 350 aa, unidentified
METNLEMCVGIDCASTEHEVCLSKMLSDKEVLKVASLTISNSKNGFVKLEKWMLKQRLVKDTKIVMEATGVYHESLAMFLFDQGWNVSVVLPSMSKSFSKTLKQKSVNDKLSSYMLSIMGLEKKLDKWKKPDPLFRRLRNLTRERGQISAEQTAVKNQLHAESCGAWPDKGAIKRMKDRLKMMSRQLKEIENELKLWIEKNPGLKKKVENITSIHGVGLITTVSVIAETDGFNLIRNAKQLVSFAGLDVIEKQSGTSVRGKSRISKKGNSYLRKALYFPAISAVKKEGPYKNLYTRIFDKTGIKMKGSVAIQRKILILMYILWKTDKKYDINYHINELGQPRRATLHELA

SEQ ID NO: 353291 - protein, 390 aa, unidentified
MPKFNDLSRSLVALDQDSTLVAVIEMSSASWLVGGLVPGLSREPRKKLSPDAQALLRLLYQWCAEAAKAGHVIERICVAYEAGRDGVWLARFLRDQGIEAQVIHPTSIPVSREHRRAKSDRLDLGLLQRSFLGWLRGERKHCSMVAIATREEEDGKRPLRERESLTGETTRLVNRMKSLLAVHGIRNFNVKQKKAGEKLSALKTAAGDALPPEALAELKRTLERLRLAKQQIAEIDARQERRLEEAPQAGLNPMILILARVHGVGRMTAEALVREVLYRPMRDRRAVARYAGLTGSPDESGKKRREQGLAKAGNGRVRRMLIQLAWRLLRHQPESALVKWYRERTADGRGDIRKVMIVALARKLLVSFWELVTTGKVPEGMKLHPAQVAG

SEQ ID NO: 353292 - protein, 343 aa, unidentified
MQTVTTIGLDIAKSVFQVHGVDAAGQVLIRRQLKRRYVLAFFGKLPPCLVGIEACASSHHWSRELQALGHTVRLMPPAYVKPYVKRQKNDATDAEAICEAVGRANMRFVPTKAPEQQSGLVLHRTRHLFIRQQTSVINAIRAHLAEFGIVAPVGRRGVEELLNVVADPNDKRVPEMARACILALGAQLRRIKEQILQFDRMITAWHRSSETSRRLDDCPGVGPALATALVATVADPRAFRSGRNFSAWIGLVPKQHSSGGKDRLGSISKQGDRYLRGLFVAGALAVIRYAKIHGTKHRPWLTALLARRPAKVAAIALANKLARMAWAMMAKGERYKEPVALAA

SEQ ID NO: 353293 - protein, 321 aa, unidentified
MVILLAMKPSKKRGETMSKEYNHYIAVDWSIKNMAIARMTGKSNKVTVVDVPSEIEDLKLYLGILRGSKILALEETTTSQWLYTELKGHVDRLVICDPVRNHLLSEGAKTDKIDAVKLVQLLRANLLKEVYHSAEGFLELRRLVSGYDDLVKAMVRLKNQRYSLLKTSGLTGEESTGTRLKGTVKQRVIEGMERQLECCKREKDIYEEDFEKLARKHAEIRHQKSLPGIGIIGAVKIVSRVVSPGRFIDAGHYLSYAGLVKLERTSGGVVYGRKNSRYSRGLKSVYKMGAVTAIGGNNTIHDYYEPNYRRKNNVDETSQGN

SEQ ID NO: 353294 - protein, 274 aa, unidentified
MTDDTIGIDISKATLDIHRLSDGKAISFSNCPAGFKALSKFCAKTAVTRVVYEATGAYHSGLERALGAHLPLVKVNPLQARRFAQAQGVRAKTDAVDAKMLAVMGDAFALEPDEPASKIQHDLKELRAFRSALVKDRTRIMSRLKVQTLSITCRQSKARLAQVDRQIAEINAAIGRLIHSSDRLAHSMKILRSIPGIGAVCAATILIEMPEIGSMDRKQVASLTGLAPMTRQSGQWRGKSFIQGGRKIVRDALYMPALVAMRHNPDFKAYDLRP

SEQ ID NO: 353295 - protein, 338 aa, unidentified
MIVIGVDVHKQSLTAVAVDEAGRMLDERTVAGANDGLVAWASSVSDERLWALEDCRQLTRALERELLAAGEELVRVPPKLMAPERRAGRARGKSDPIDALAVARAALREPRLDRPRPGEELFRELKLLVDHRDDLVDERRRGQQRLRWHLHQLDPSLLVPAGALDRTLQLDRVGRWLSRRQPEAQVRVARELVARCRSLTRTILELDRELEQRIKQTAPTLLELPGCGAITAAKLLAEIGPIERFQTDAQLARHSGVAPLEASSGRVRRHRLDRGGNRQLNCALHRIAITQARVHPPGRAYLERKQAEGKSRREALRCLKRQLARVVFNTLKASPALT

SEQ ID NO: 353296 - protein, 352 aa, unidentified
MSVKKLFIGMDLHKNSSTFCVKDYDGELVASEKVATNKSEVLGFVNQFKEHNLSLAVEPVSQWYFMADILQQAGVDVHLANPLKVKAIASARIKTDKIDAGVLADLLRTNLLPEAYFSDKEMRMWKELVRFRLSLVNLRVQAKNKIHAILGKNGCISKFTDTFGKAGRVCLAELQLPEHFRNSLDEYLATHDYLSEQIKRAEKNIEAVVVGNKLMTLLTTIPGVSYFSALTIMAEIGDIHRFPSAKQLMGYAGVVPSTYASGDKVVHGRITKTGSRWLRWIMIEIAHKQLRCKRKPGLGWYYAKIKKNKGSKTAAVATARKLLAVILRMLVDERPFKSPLEVREAYRKNVVR

SEQ ID NO: 353297 - protein, 343 aa, unidentified
METITTVGLDIAKSVFQVHCVDANGDVVLRRQLKRRYVLTFFQKLPPCLVGIEACASSHHWSRQLQALGHTVRLMPPAYVKPYVKRQKNDAADAEAICEAVTRPNMRFVPTKTPEQQSCLTLHRTRHLFIRQQTAIINSIRACLAEFGIVAPVGRKGVEQLLEVAANVDDTRLPEVARACVAAMGAQLMALKAQILAFDRRIMAWHRSNETSKRLDAIPGVGPALATALVASIADPKAFRSGRDFSAWIGLVPKQNSSGGKDKLGSISKQGDRYLRSLFTTGALAVIRYAKIHGTKRRPWLTALLVRRPTKVAAIALANKIARMVWAMMTRGERYKEPVALAA

SEQ ID NO: 353298 - protein, 337 aa, unidentified
MKITTIGLDIAKRFFHVVCCNEQGRLVKKKMLKRAQVLSFFQQHTTCLVALEACATSHFWAREIRKCGHQIKLIPPQHVKAFLVGNKNDYNDAIAISVASKQHHIKSVCIKSVEQQDNQAQHKARELAVRQRTALCNQIRGLTAEYGIILNQGVNTIRKSIPLILEDENTGLSGAFKAVLKQLETQLSNLDSCIETYSTLIVETAKNNDICQRIQTIPGFGPMVSSAYFNEVGNGSNYKRGRDVSASLGIVPRQHSSGGRDTLLGISKRGNSYLRCLLIQGAKAVVSRAKTKNDKLSQWINRLVQTRGHNRACVAYANKMARMAWAISASGESYSPV

SEQ ID NO: 353299 - protein, 362 aa, unidentified
MAIDDSKRTLVLGILQPGADAPETRSIPNEPRHVQRLFARVKREGPVRVCYEAGPSGYDLYRQLAALDIPCQVMAPALTPRTPGDRIKTDRRDAAKLVRLFRAGELTPIRVPDEAAEAGRDLLRCREDVQEDLLRWRHRLGKFLARHGRVYREGRNWTQRHWAWIRSQHFTLPTLERTVVEYRCAVEPLLARVAALDREIAALAETAPYREPVGWRRCFRGIDTLAAMTRLAELGDVPRFPPPRELMAYLGLVPSEASSGDRTQRGSITKAGNTHVRRILVEACWHYRHPPRLGAAVARRSQGQPPAIRAQAWKAQLRLHRRYRHLVGHGKRPPVAVVACARELVGFLWAALTQTEAVALAA

SEQ ID NO: 353300 - protein, 346 aa, unidentified
MTIVQTARMITGGIDTHGEVHVAAALDEVGSLLGTESFGANPDGYSALLDWLTGFGPVGKVGVEGTGAYGAGLARFLARAGIEVIKIDRQNRQDRRRQGQSDPLDAVQAARAALSGRARGKAKSRDGAVEAIRVLVVAKRSARQARVKALSQMRQLAFTAPDQLQSRIKGLPIPKLVAVAQGLRPTRSTDPVMAATKASLSSLAHRVGDLGEEITRLDAMITPLLQTTAPELLSVYGVGLDTAATLLVTAGDNPERLRSEAAWAHLCGVSPLQASSGKVSRHRLNRGGDRQANRALWHIVITRLASDPDTQAYMERRVKEGRSKREVVRILKRYVAREVYRHLPRG

SEQ ID NO: 353301 - protein, 344 aa, unidentified
MESTTIAVDLAKNVFEIAVSRFAGKVAERHRLSRKKFLRFFAQRAASRVLLEACGSAHFWARELSKLGHEVVLLPPHLVCAYRSRHKKTDRTDAKALLEADRNEEIEPVPVKTVEQQGVTALHRLRSAWMATRTARLNAVRGLLREHGHFIAQGAKNVVPRVHELIEDASNDLPDPMRLALAEACEEIRDLERRCAAVTQQLEALARTIPAVEHLLSVPGIGPLTATAMVAFVGEIHRFPSARHFASYLGLTPRVHATAKSRHLGHISKQGDEYLRWLLIHGARSCLLAAKRSQKRKPLYTWALQVQKRRGHNKAAVALANKIARIAWTVWREDRDFTIVRQAA

SEQ ID NO: 353302 - protein, 340 aa, unidentified
MNEITTIGLDLAKHVFQVHGVDASGVTVVRKRLRRSEVLAFFTRLPRCLVGLEACATAHYWARELQTIGHEVRLMPAQYVKAYVKRNKNDAADAEAICEAVQRPTMRFVPVKTAEQQAALLLHRGRERLVRQRTALVNALRAHLAEYGVIAPLGLRNVARLIAIVRDEIDTRLPAPARQVLEVLATQVEQLEAAVAALEKQLIAWHKANPVSQRLATIPGIGPIIATAVAATVVEASGLRSGREFAAWLGLVPRQHSTGGKARLGGISKRGNRYLRRLLINGASANLLRSKATNADPWVIGLRRRRPSLVVAVALANKTALIAWAVMHRQENYQRMAAAA

SEQ ID NO: 353303 - protein, 348 aa, unidentified
MRFYTTKHQYYCGIDLHARVMYLCIISSDGEIVLHRNMKADPESLLKAIEPYRPDIIVGVECIFTWYWIADVCAEEGIPFTLGHALYMKAIHGGKAKNDRIDSGKIAAMLKGGMFPMAYVYPAKMRATRDLLRRRNYLVRKRADLIAHVQNTNSQYNQPAFGISNITHKCRREEILGHFTDPDVYMSMRVNFDLIDQFAVQIRAMEKHVLDNAKNHDPQSLYLLRTIYGIGKVLSLTILYEIGDIDRFPRVQDFASYSRLVKCARESAGKRYGTSGSKIGNVHLKWAFSEAAVMFLKGNPEGMKYKKRLERKHGKAKSLSILAHKLGRATYYMLKREKAFDMNKFLRA

SEQ ID NO: 353304 - protein, 315 aa, unidentified
MKSNTLVTSETQVHIHQLKLGVDWHADHLRVARMCDGCSPQPAQRFTPNAFLAFVQKQLTLADQVLVVYEAGPGGFHLHRQLSALGVQAYVVHPEKLDSRAKGVVTDKTDARELALKLDRYVNGNTRAMSVVRVPSPAEEQRRALSRQREQLRRERQRLAAQGRSLCLTQGIRLRGEWWQAALTLPDWLEERLAVWRRLIEAVQQQLEVLTRQVEALAPAERPKGLGPLTLGLLLAELCDWSRFTNRKQIGSYTGLCGGGSSSGQSHCDLSITKAGNARVRWALIELAWRMVLYQPQSRAVQRWPSWACWCRPDP

SEQ ID NO: 353305 - protein, 457 aa, unidentified
MKKKVPPVRILGVRLASLPLIKKLTTEVRNMKYNQNERILQITEKTLIVGIDVGSETHYARAFNFRGVEFGKVLKFNNDVEGFEELAKWSGKIAKEQNFSKITVGMEPTGHYWFSIAEFIKEKGMKLVLVNPHHVKKSKELDDNNPSKTDRKDPKTIAMLIKDGRYMEPYIPEGVYKELRTAMETRWHIMKELTAIKNRVCRWIHIYYPEFNKVFADWEGKAALLILNECPTPKKVLEKGIEGLIAIWRRHKIRTVGRKRAVKLIESAEFSVGCREGLVSAENDLLMLLEDYHRKTEQLERTLALIENLAMQVPGFEKLLEIKGIGLVTAAGFIAEVGDVNRFEHPKQIQKLAGLSLKENSSGKHKGKTTICKRGRKRLRYYLTFGIMPLLSKNEEFRQLHQYYTTRENRPLKKMQSLVALSNKLIRIFYALLTKQTAYDPQKMMNDIKRAELLKVA

SEQ ID NO: 353306 - protein, 369 aa, unidentified
MTSIIYVGLDVHTSNYTACCYSMDDDRAFAIVQMNPDYREILKYLNRVGNQHGGNCKFVCGYEAGSLGYSLYHQLTSSKIDCVILAPSTMPVTPGNHIKTDKRDAEKIARCLAYHSYSAVYVPDDEDNAVKEYIRMRDDGKDALKRVKQQIIAFCTRNGKQFEGKNYWTKRHEDWLSTLDFGHAILNETLREYLAQYYTLTERVDVYDARIEELSHMERYEESVKKLCSFNGIATHTAMCLLVEVGDFHRFEKATNFAAYLGLVPGEHSSAENKNHLGITKAGNRHLRRLLVESMQCQGRGKPGHKSKALKSRQSGMPPEIVSYADKANERLKRKFYRIALHSKHNVAKTAVAREMACFIWGMMTENYT

SEQ ID NO: 353307 - protein, 348 aa, unidentified
MEPIVNLPVIGLDIAKNVFQLHIVDAETGEIQRRQLKRAKVTEFFAKCQPSLIALEACGGAHHWARTLQAQGHQVKLLPAKHVKAFLLRDKTDALDAQAIWVAAQQPHIRGVSVKSEQQQACLALHSMRQQIMKMRIMQTNALRGLLYEFGIALPAGHNKLLQSIQGELAIAQQHSKLPDIVVVSVQEQLKRIDAMQDDIDQLSKRLSDMLKQNQQMLAVQAVPGVGILTATAIVATVGDVSTFKSGRQFASWLGLTPRQVGTGGKTQQKGISKRGDTYLRTLLISGARSIVGRSLPTGWIERLLQRRHFNVVVAAVANKMARTIWAVLVKGKAFDQVKWNPTQATSA

SEQ ID NO: 353308 - protein, 366 aa, unidentified
MTHPTCTPATLLTSVQLPTTMGLDLSDRESHFHVMRGDGVSLETGKVATERGDLTALFERWKGCRLVIEAGGHSPWISRLGKDCGLEVVVANPRKVELISKSAKKTDRTDAETLARLGKSDIELLAPIQHRSKEAQEHLAVQRARIMAVSTRTMLINNVRGVLKSHGYRGPSCAPQCFAARARKELPAELEPALGLILDLIVKADVVIKAFDKKLECLGKEHYPVTELLQGVKGVGPIVSLTYVLTLDDPERFKSRAVGAYLGLVPRLKNSGASDPQLHITKAGDREMRRLLVLAANYILGRFGPDCDLRRFGLRIAGDGGDKKAKKRARVAVARKLAVLLHHLWKTGAVYDPFHLAKKRGDPVPA

SEQ ID NO: 353309 - protein, 369 aa, unidentified
MSHEVKYIGMDVHKEAIVIAVLNGSGKQVMETIVETKARSILQFIHGLRGELHVTWEEGTWAAWLYDLLQPQVEEILVCNPRRNALLKEGSKSDKVDARKLADLLRTGMLRPVYHGENGLRTLRELGRSYQTIGKDLTRVMNRLKAVYRGWGIPCAGTRVYAPRYRGEWLGKLPQAGVRRRAELLYPQLDGLQALRREVRREFLAESRKHKAAKLLRQIPCIGPIRAGLLIALMQTPHRFRSKRQLWTYGGLGIETHDSAQYRYVGGQLQRSKKPQQIRGLNRNHNHAMKEIFKGAATRASCCTGPFHDFYAALLAKGMKPEMARLKAIEALRKPKGGETDRPSPTRSRSPGVSSVTFRAQPPNLRFAP

SEQ ID NO: 353310 - protein, 344 aa, unidentified
MDYFAGLDVSVKETSVCIVDDAGKIVREARVASEPEALLQVLTNTLYRLKRVGLEAGPLSQWLYSLLAEAGLPVICVETRQMRAMLKAQINKTDRNDARGIAQMMRVGLYRPVHVKTLRSQKLRVLLTHRKLLQSKAIAIENDLRATLRNFGLKVGMVGTVKFEARIKELVENLPDVAVLVGPLLVVRRVLREQIGILHRRLLAVVRGDDVCRRLMTVPGVGPVVALTYRATVDVPARFKNSKAVGAVFGLTPSRYQSGEIDRTGGISKCGDEMMRVMLYEAAQILLVRSAKWSWLKAWAMQIAKRRGMKKAIVALARRLAAIMHRIWVDGTEFCSTRQEAAAA

SEQ ID NO: 353311 - protein, 435 aa, unidentified
MSSNEKSNQNPPPAAQAVPAPEAWIGLDWGNKKHAFALQDRSGQSQRGFLEHSPENLHQWLRQIGQRYGGRPVALAIEASRGAVIHALLNYAWLTIYPVNPITSARYRVAFTPSGAKDDQPDADVLLELVRDHAAKLRPLEVQDPHTVKLTELVQVRRDIVDRRTQALNQTTSLLKTYYLLKTYYPQALELTGELNTGMALDFLSRWPDLISLKAAKPATIKRFYYQHNVRSTQRVQERLEFIQKAEALTTEACRVSVAVLQVRHLVDQLRAFGKHIALFDQEIHNAFREHPEAALYRDLPGAGPQLAPRLCAAFGTLRSTYPDPASLQKNAGVAPVRVKSGNQLWTHWRWQAPKFLRQTFVEWAGQTVVYCPWAAHYYERMKNKGKKHAAILRALAFKWIRILWKCWKDRKPYDEAAYLKQLSHRKSPNALPTT

SEQ ID NO: 353312 - protein, 447 aa, unidentified
MAMRKRDDDEVFPNAAGIDVGGSSHWVAVPRHLAEQAGCEPVREFGPMTDDLNAMADWLLACGVDTVALESTGVYWIPLYEVLERRGLTAWLVDARQMKYVPGRKSDVQDCQWLQKLMSLGLLRAAWRPGDEVCVVRAVVRQREVLLTEQANWVQRMQKALVQMNLQLSEVLSDVMGMTGQAIVRAIVAGERDAKTLARHRHGRVKASEHDIERALSGNWREEHLFVLGQALAMVDSLAQRVLECEAKIEALLAPLGRHEVALSGPAKRRSKNTPEFDARTALARWAGVDLTRINGLAVTTVMTILSEIGPDLGGFANVKHFCSWLGLCPGTKVSGGKVLSARTRRSTNRVRQALKLAAMSLARNDSALGAFYRRLCGRMDKPRANTAVAHKLARLVYFMLTRGEAFVDQGQQRYEEQQRERSIAALRRRAATLGFQITPTAPTPTP

SEQ ID NO: 353313 - protein, 351 aa, unidentified
MTHYIGLDAHTQSCTFQGITERGKPSRLEVVKTSATELKRTVQLYPAPRIVCLEEGTSSEWLCEVLRPHVEKIYVVQPTTRAHFKSDAEDALDLAQQARRGPEAVIYKPDGLLSELRTAMRNYEECQNDVVRARNRFVAAFRARGVQLPKEYSEDDSREALLELLKAPYSTHAEALAKRMDAAIQAREEAATWLVQASKKVDAVRWVSSVVGIGQIRAAQIVAVVVTPHRFPRRSKFKSYSGLALRRYNSAQWRENDQGDLEWNTRSRKAQGLNFNRNPILKRVFFGAALTVKRMPDHPLGAHYRQLLAAGKDEQLVKATIARKIALATLAVWKNKEVYDPAKHVARLEPA

SEQ ID NO: 353314 - protein, 458 aa, unidentified
MYYIGLDVHMKTISFCVKDAAGHAHMEGKIGSTRHELDAWIMTLPQPRMIAMEATIFTGWIYDQLPPHADQVKVAHPLMLRAISAAKRKNDRIDAGKIADCLRCDFLAECHMASTEIRDRRRILRYRGLVLRQAVQMKNRVSGLLMETGVSYNKLRLHRMGYVRELMSTNEEVSESIRPLLRLCREHIDRSIRLDTTLLRSLEQDPLLADRLRRLRTIPRVGPITALTWALEVGDTSRFRSIKQAISHCGLCSAEKSSPNKMMRTPISRQRNKHIQQVLVEAARLAPRYSEELALLYERERQRGNGNRATLAVARKMVAMMLAVERRNTDFVPAGEFRRTAAAQKPSREGKSIRIHRCAGCQVAQITGRATEATPEALFGLFRDWQRTQTQSSATAQRSLRQQMDVRFCPVQEPIAERHTCAAIDPDQTDHAVSRARTEISRFSVDKDLHGCRIEGRA

SEQ ID NO: 353315 - protein, 420 aa, unidentified
MVYLERGYNLKELPWSKTVSNSFLFKEACMILVGVDVAKDKHDCYIMTSEGEVLFKSFTIANNMEGFNQLYEKILSVIDNFDNVKIGLEATGHYSYNILGYLLDKGLTPYVINPLHSNLYRKSLSLRKTKTDKVDSRIIASMLMSDVSLKPDSNTLYHNEELKSLTRYRFTKVQERAKLKISISRLVTILFPELEKLVPTLQMNSIYALLYEFPSAHAISKAHLTRLTNLLNTTSKGHYTKDKAVLIREAAKNSIGSNMPAKSLELKHTIKLIKELTSEINEIEEEIKIIMNKINSPILTIPGIGLSTGAQILAEIGDFKNFSSPDKLLAFAGLSPSTYQLGNMYSSNAKMEKRGSKYLRFALFNAAIYVSYWEPTFSQCLKKKRVEGKHYYVAISHVVKKLVRLIFHLEKTNERYSTVV

SEQ ID NO: 353316 - protein, 330 aa, unidentified
MNTTTPVLLALDIGARKHAFASEHDGRRIVGTVANDPQQLRAFLKDLMRPNGTLQVLMEATGIYYLDVALIAEELGAQVSVINPRTAHNFAKALGQRSKTDALDAVMLLDFLKRMPFTPWQAPAKPLLELRHYGRYLVQLTEESTAARNRLHALSSTTSSPAFLRADLKRSIASLERRIERIRAQAMALIKADEWLKMRLDALLTIIGVAEVSAIALLSELAALPSSLSGRACVSHAGLDPRLHESGTSVHKPVRISRHGNKYLRRALFHPAMAAARHDPMAAAFRQRLLDKGKKKLQAVVAIMRKLLTAAWALVRNPATYKPEKLYAGA

SEQ ID NO: 353317 - protein, 328 aa, unidentified
MCTLGIDVSKNKIDLCLLTAGPGGKKKHKVLTNEPAVARKVVDWLNAQKCVPESVTVVLEATGIYHENLAYGLHEAGVSVCMANPCRVREFAHGMDILNKNDAVDAFVLACYGELKPPAVWVPPSPEVRKLRALLRQRDALREDVQRTVNRLEKANSTSTPQEVIRSLERTKSWLNEELARIEKLITDHTDNDPGLKADLDLLKSIKGVKDQVGREMLALLKDGMFKSASQVAAYLGLTPVEKTSGSSVRGRPHMSKTGPSGVRAKLYVAALTASRWNKQAKAIYERLVAKGKAKKAALGAVMRKLVHLCFGVLKTRLPWDENYVATA

SEQ ID NO: 353318 - protein, 372 aa, unidentified
MSKGTRFVGLDVHKDTIAVAVAEPGGEVRSVGVIPNDAEAVRRLVRKLEGPEHLHVCYEAGPCGYVLYWQLAKLGVRCDVVAPTLVPVKAGDRVKTDRRDAEKLARSLRSGDLTAVWIPDAEHEALRDLVRAREAAKSDQRRARQRLLKFLLRRGCTPPSKMRAWTDKHRAWVMQLKFEQRALEETLTDYVTEVDRQRERIARLDVALDEAIAKVPASMRAVIDALQGLRGISKLTAATIVAEVGQLSRFERATQLMSYAGVVSSEHSSGGKTWRGAITKTGNAHLRRVLIEAAWTYRHRPRIYGALRERQQRVAEPIKAIAWKAQHRLHRRYRQLSDKGKQHQKVVTAVGRELLGFIWAIGVHVERPTVSS

SEQ ID NO: 353319 - protein, 350 aa, unidentified
MLIIGCDYHPGFQQIAFVDTDTGELKERRLEHREQAEPFYRDLKQQKLAVRVGMESSGHSRWFERLLHELGFELWIGDPAEIRTKRVRKQKTDRQDAQLILQLMLENRFPRIWVPDAENRDLRQLLWHRHRLVQMRTRVMNQLHVVPLNEGLRRKKALWRPAGRKELESIALAPWASRRRQDLLELLDQLTPKIQELTHALEEEVEKRPVTRLLMTHPGVGPLTALAFELVIGTPDRFQCGKQLASYIGLVPEENSSGDRRRLGHISKQGNVLLRFLLVEAAQVTVRSHPEWRSKFFHLAMRRGRKIAKVAMARKLAVHLYWMWRQGCDYSQTQKLGSHAGEPGHLDGEQ

SEQ ID NO: 353320 - protein, 429 aa, unidentified
MNSTQNKKIEQVKETTMIVGIDVGSEKHYFRAFNWRGIELTRKPVAFSNSMEGFNSFYNSVVELMQKNELKEALVGIEPTGHYWFDLGQFMGEKNIKFVMVNPHHVHKTKELDDNSPSKNDRKDPRVIAGLVRDGRYFYSYMPTGVYAELRNASNRRFVLVEEQTRAKNRLQKWVAVYFPEYKGIYTHIDAKGGLLVLKQAPTPKEIVRLGVEGIIKIWKDAKLRGNGHKKAMLILNAAMKSIGLKAGLTEARMEIQDLIEDYELQTKRLERVNDLIKELCQQVRYADKLLEIKGIGITTVAGFIAEVGDITRFDSTKELQKLAGLELVADSSGKHDGKTKISKRGRKRLRYLLFEAAISVVGKNEEFKEIHRYYTTREKNPLKKMQSLIAVACKLIRVFHVILTKGISYDASKMLKDIRRPGEQLKAA

SEQ ID NO: 353321 - protein, 370 aa, unidentified
MNSILYIGIDVHKESYTIGSYRTRDDEVKFVQKIKADYKMVLKYLEQLRRHYGEDTEFMCGYEAGPLGYRLYHELNNRGVICVIMAPHTLGVTNNNRVKTDKNDARNIARSLAFRLYSEVHVPTAEDEEIKEYIRMRDDMNNNLKKTKQQILAFVLRQGYRYAGKSYWTIAHVKWLKSLEFDGFVQETMSEYLITFDYLVSKLERLTERLEEIAASDRYAENVNKLKCLIGVKTYTALSVIVETGDFRRFAKPDHYASFLGLVPSEDSSGENQKQGAITKAGNRVIRRLLIESSQSYARGAIGHKSKELTRRQMGNSPEVIAYADKANERLRRKYYRLILQNNKVRNKAVTAVARELACFMWGLMTDNIA

SEQ ID NO: 353322 - protein, 400 aa, unidentified
MISVGIDVSKEKSTVCILKPYGEVVSRPFEVCHVEKELSELTSMLLRLNDDIRVVMEATGIYHLPVLSYLKEKGLFVAVINPFEMKEYRCQGLRRVKTDKQDAITISNYGIDHWYRLKDYEAEESVYAELKLLGRQYRHYMRMRVESVLELTHLLDYTMPGIKTLLKGWNETNGKDKLGDFAEEYWHYDNITKKPEEQFIESYLKWAKEKGYHQSQDKAVKIYALAKEGIPTVSSDTPSTKMLVQEAVRVLREVDNTLMTILTQMQALAKSLPEYPVVRAMGGVGNVLAPKLIAEIGDVRRFHSGKALIAHAGIDAPPYQSGQFMGTERKISKRGSSSLRKIGYEVMRCLKTHKEPADAAVYRFILKKEREGKSKRAAKIAGLNKFLRIYYARVMEVYQK

SEQ ID NO: 353323 - protein, 312 aa, unidentified
METKFVGIDVSKLTLDFDCLPVSASQQFANDSVGIAALVALLQDSGVERIVIEATGGYETAVVSALAVAKLPVVVVNPRQVRDFAKAMGHFAKTDKLDAKVLALFGERMKPPLRTLPDEAQRALADVLNRRLQLVTMRAQEKGRLATVPAVARKDIEQHIAWLDKRIAKLETDLGGRLKKSPVWCHKAELLDSVPGVGDVTTFSLLADLPELGTLSRQKISALVGLAPFPDDSGKRQGQRYIRGGRAEVRCVLYMTTLSAITHNPPIKAMYERLTKAGKPFKLAMTACMRKLLTILNAILKKNETWKIQPSS

SEQ ID NO: 353324 - protein, 337 aa, unidentified
MIVIGVDVHKYSLTAVAVDEVGRTLAELTASDEHALLAWSMSLPVERLWAVEDCRHVTRALEKALVSASEQLVRVPPKLTAPQRRSGRVRGKSDPIDALAIARAALREPRLDRPRAGEERLRELRLLVDHRDDLVDERRRAQQRLRWHLHELDPLLGVPAGALDRPVWLDRIARKLARREQTLQVRIARDLVGRCRTLTRAILELERELAVMTAQTAPALLKLPGCGAVTAAKLLAEIGPIDRFQTDAQLARHGGVAPLEASSGRVRRHRLDRGGNRQLNCALHRIAVTQARVHPAARAYLERKQAEGKSRREAIRCLKRQLARVVFNTLKTSPALT

SEQ ID NO: 353325 - protein, 367 aa, unidentified
MKDSITVVGLDVHKNSIEIVTADADGAMEVRRFGRIGGTMDALDRAVRKLVSRGSTLRFVYEAGPCGYEIYRHLTGKGFSCKVVAPSKIPKKSGDRIKNDRRDAETLARLERAGELTSIYVPREEDEAMRDLTRAREDAVQSLKTARHQLNAFLLRYGKRYPGKAPWAPVHMRWLSDIALPHPSQQIVLQEYISTVLVGTERTTRLTDQIVRLLPEWRLYPVVKALQALRGVAPIVAATTVAEIGDLSRFENPRQLMAYLGLVPSEDSSGESTHRGSITKTGNGHVRRALVEAAHAYGFPARVSRHLLKRQEGLSETVLAIAWKAQVRLCGKFRRLMARGKLKNKIVTAIARELSGFMWAIAREVEV

SEQ ID NO: 353326 - protein, 375 aa, unidentified
MVKLYMGLDVHKEKTVIALAPAGSQDVEHYGNCSSDMVRLAGSIRKILRKYDLSKAEVSICYEAGPCGFAIARHLLGKGFDVIVVAPSLIPTKKGDRVKTDKRDARKLARTHRSGDLTPVHIPDPADEVIRDLCRARTDAVDDSVRNRQRLLSFLLRNGHTYTGRSNWTETHLRYLRSLELNNPVQRLILEEYLQAVDAGFERISGLEEHIRDQMQSWHRLPFVHALQGLKGFEFISSMVVASELGDITRFDHPRKLMAYLGLVPAEESSGDHRRQGPITKCGNSHVRWMLVEIAGSYRYAPKVSKALSIRQEKLPREVKELSWRAQKRLCKRYSRLTMRRVHANKIKVAIARELCSFIWELAHLMAKMPQRKAA

SEQ ID NO: 353327 - protein, 462 aa, unidentified
MGHARARKIPAQLAEDEEYQLRHERVAGIDIAKAKADVCTRMPPQRGGGRRASRVEDVPARAREILALAVRLAADGVELVVMESTSDYWRMWYYLLEGAGLSVQLVNPAHARQLAGRPKTDRLDAQWLARLAEMGLLRPSFVPPPEIRALRDLTRTRLQLVRDRAREWQRLEKLLEGALVKLSSVVHSLAKVQSARAILEAIAGGERDPGTLAALAHPNVKGGRASVAEALEGMALGGHHPMLIRVHLDHITLLDRSIDAVEDEIEAALDAIPAAWGTDAGGETGPDAGRGPDPAILPAAERLAEIPGISPALARAIIAETGLDMTRFQTADHLVSWAGLAPVARQSGPRSRKPKKGQGDAYLRGYCTQAANGAASTDTFLGERLRRLSRRLDGNRARCAVARSILVIVWHLLASPDDRFADLGPGWHQRKADTDRRTRSLLNQLRALHPDAEITITPATAA

SEQ ID NO: 353328 - protein, 424 aa, unidentified
MKFKMQDKQNQLIERISDKHLVVGVDIAQELHVARAVNFRGIVVGDPLTFENNEDGFARLLQWINQLITKKGFDSTIVGMVPTGHYWINLSKWLFAQDIEAVTVNPHLVKKNKENRDNTQSKSDKKDALVIADMVKNGYYSFIRPTSKAFEKLRVLMSNRDMTVKRLVSTINQINRWVDIVFPELRQVFKDIKGKGAIATLRLFPTPNELRSMKAPDIVKGWKTQMKRQPGLKKAHQLIELAKHSVGTRQALDAYKLHLEQLIEEFDLATAQLERVEKEVTDVLKRIPYARKLLAIKGISEIALAGILGEAGDLSGFAHGNSLLRHAGLHLAEASSGKWKGQIVLSKRGRSRLRRFLYLATMSLVMNNPDFKELHANNVKVKKMKKMKSIMKLVHKLARVLVGMAQKNESYRPHKVQPIAQMAA

SEQ ID NO: 353329 - protein, 341 aa, unidentified
MNNNTVIALDLAKSVIQIAKVSKHGEILFNKAQSPDKIRQIIANTSPCIVAMEGCGSSLYWARFAEQCGHQARIMSPRLVKPFIKGQKNDANDALGVAIAAIQPNMTFAPVKSLEQHTIQSINTSRRFLDKSLTALSNHIRALAYEFGVTTPKGKKGLRTRVAELLSPESELLTTPLKQLLLCTWEQYQKTEAALKAVTKQLEQFTKPIEACKRLKELEGVGPKAASLLYAVIGNGNAFPNGRAASVYVGVTPGQHSSGGKTVLLGITKHGDSSLRATLYQGALSVISALKPKPKTVKQRWLIELVNRVGVKRACIALVNKTIRTAWAMLKHGTRYEPNYL

SEQ ID NO: 353330 - protein, 379 aa, unidentified
MKKTYYIGLDVHKDSIAIAYTWEGSRSAATYHGQCGGSNLAAERALRALAKKLGVGFKDLKVCYEAGPTGFVLARRLRQLGLECVLMSPSKTERKPNEKVKTDKRDAKNIAKLYRNGDITEVRVPPALDEAVRDVCRARTDASNDLSRAKQRLNSFLLRNGIRYSGKARWTPAHMRYLRELALPCAVQKIVLEEYIQAIDSNLERVERLADRMKQLLPDWEWKPVVEALMACKGFQEVAAMTVISELGDLRRFDHPRKLMAFLGLVPDEHSTGTKRRQGAITRCGNSHARWMLVECSQHYRKSPKVSAVLARRQEGQDKKVRELSWRMQNRLHKRYVKLRARGKRDNKVIVAIARELCGFIWELQNKLDLPIPQATDLN

SEQ ID NO: 353331 - protein, 423 aa, unidentified
MSYRIAGIDVHKKMLAVVVSDVEVDGEYQFERVRFSSSPEHLRFLADWLMAQQVEEVVMESTAQYWKPVWGALERYWKPICQKREGAGPMSGTLHLAQAQSNRGRRGRKKDFPDAERLVKRLVADELVLSFVPDTEQRLWRAVTRRKYQLTRNHVRLQNQLEGLLEECHIKLSSLVSDLLGASARRMLKALAEGETSPVALAAMADKNLRATQAQLCDALGACTELKPIYRRLLKMFLEELQFIDQQISELDQELASLLSRHHDAVVHLAEIPGLGVDSAQQIIAEVGAGAATFPSAKQLSSWVGACPGEEESAEVTKSHRSPKGNRHMRRILNQAANAAAKSKGTIFEIVYRRLVSRLGHNQTIGAIAHRLCRLIWIILHRGVRYEERGPSVNAKTRRHRTNRMIRELRNLGYRVEPLVNTV

SEQ ID NO: 353332 - protein, 337 aa, unidentified
MNIHYFIGIDIAKATLDWAVYDGKKMVLQTSTPNTIAGIKTALRLLKTLSDWKPLEAIFCMEHTGIYNAHLLDFLHKLRFPIWLESSLQIKKAGGLQRGKTDSIDAQRIAEYAFRFRDQFRLWEPPRQVVQKLALLSAARQRLIRVYNQLAGPLAEQQSFIDPTLQKQLSKSCQASLTALEKERKAVEKAIDALIEADPRLGRLFELVMSVPGVGTATTTEIVIATNEMKTITDPKKMACHAGVAPFNYQSGSSVRGRPGVSQHARKRLKSLFHLGAMAAIRAKGELQDYYQRKVKEGKNKMLVLNAVRNKLIHRVYAVVARGEKYDKNYLSSFAKP

SEQ ID NO: 353333 - protein, 343 aa, unidentified
MEYYVGLDVSLKQTSICVVDQTGSVVREGVVDSDPEAISVYVRSKAPGAVRIGLETGPTSTWLWTELKRFGLPVICIDARHAKAVLKMQINKSDRNDAIGIARIMQTGWFKEVHVKDIDSHSVRALLASRAMLVKIKRDLENHVRGLLKNLGLVIGRAKFNVFAVRAEELIEGRPELIAAVRPLLEARKAVEQQVSELDRKVVKLVRRDAQVRRFMTVPGVGPITALAFKATIDDPARFARSRSVGAYVGLTSRRHASGEVDWTGRISKCGDAMLRSYLFEAAGVLLTRVPKWSAVKAWGAKLAKRNGLRKAKVAVARKLAVILHRMWIDGTEFNWSKKEIAA

SEQ ID NO: 353334 - protein, 341 aa, unidentified
MGEVSTVGIDLAKSVFQVHGSDPSGTVMFRKKLRRDQVLAFFSTLPRCVVAMEACASAHYWAREIAALGHDTRLIPPAYVKPFVKRQKNDMADAEAICEAAQRPTMRFVPGKSAEAQASAVVFRTRDLLVRQRTQLINALRGHLTEFGYIVRQGVGHIARLVEIIGDATSDVPAQARPVLTVIAQSLQALQAQIALLDREIANRAKADPVAKRLMTIPGVGPVTATALVALAPAASTFRRGRDFAAWLGLVPRQHSSGGKERLGRTTKMGERSLRRLLILGASSATKVAARDPDKAGAWLASMLTRKPRMLVTVALANKMARTVWALMAHGGSYRAPAAAV

SEQ ID NO: 353335 - protein, 467 aa, unidentified
MGRPKQLDRKTMQLPKHLQRLNLNAAGIDIGSKSHFVAVPEGTDDEPVREFECFTADLYRLADWLISCGVTTVAMESTGTYWIPVFEILESLNIEVKLVNARHVKNVPGRKTDVLDCQWIQQLHTYGLLEGAFRPPEQICELRAYIRHRMNQVRYSSAHIQHMQKALTQMNLLLHNVVSDITGVTGMRIIKAILDGERDTQILASMRDKRCKNSIATIAKSLQGNYRPEHLFSLKQAVEALEFYEAQIAECDREIESLLASFDSVTKNSLPSQPEEDNKSSKSQCATPAFNLQTELCRVAGVDLTKIDGIDTTTALKIVSETGFDMSRWKSAKHFASWLGLSPGSKISGGKSLSGKTKPVVNRAAIALRMAASSLYRSSCALGAYYRRMKARLGAPKAITATAHKLARLVYSMLKYGTDYTDVGQEYYEQRYKSRVIQNLKKRAQQLGYELVETMGVNKKFIVTQIQ

SEQ ID NO: 353336 - protein, 406 aa, unidentified
MELVTLYKRVVGLDVHQAKITVCAIIEDETGDVTVELAEFGGFKRDRQALAEWVSTRGPEVVVMESTGIYWKSPYAALERVGIVATVVNARHVKTVPGRKTDWADAQWLATLARSGLLRASFVPPAKLRELRQVARQRQQLVGILAGEKNRVHKVLSDGGIRLSVVVSDIHGVAGRAMVKALIEGQSPAEVLMLAGNRLKADRGELLDALDGDLTAEHRFVLRELMAHVQELEQRIDRFDRHLLNELEPYRTTLALMQTIPGIDAIGAALLLVEIGNDMDAFGSVDRLASWAGLCPGNNESAGKRKSGRIRKGNPWVRRLLCQFAHAASRTQCAFKSKFEALRLRRGHKRAIVAIAHKILKTVFLLIRRQTHYRDSAVDFEAMSVTRNAPRWLKMLKKHGFIPAAA

SEQ ID NO: 353337 - protein, 340 aa, unidentified
MFYVGLDIHTKHISICALSDTGRVAHRSRVRSIEEMMQILKGLPDRFEVCYEASCGYGHFHDLLRPLAARVLVAHPGRLRLIFRSKNKNDRNDAERLAKLLYLGETPTVHVPSLEVRTWRELINCRSQVIAKRTRAKNTVRALLRGAGVMVPKQPGLWTKKGLAWLRQLALPTLSQQLRRDLLLEEIETLIRQVRRIEQQLSRQAQHTPAVAQLRTIPGVGMRTAEAVAAFVDDPHRFRHAKAVGSYFGLVPCQDQSGDKNRLGHITREGAPVVRQLVAEAAWQALRRSPTVCAYFERAQRSDPQRKKIALVATAHYLVRVMWAMLKRGTVWEEKTAKAS

SEQ ID NO: 353338 - protein, 428 aa, unidentified
MFFHFKNPTIILHYGDTLIAGVDIAKESHYARAFDYRGVEYGKYLRFENNREGMTKFLNWAKDLMERHKKNKLIVGIEPTGQYWLCFAQYLKDNNIKVVLVNPFHVKMSKELDDNSPTKSDKKDPKTIAMLVKDGRYVEPIIPEGVYAELRVAMDIKERLNKQIGMTKNQITRWLDIYFPEFNTVFSDWEGKAALITLREFPTPEKIAKKSAEEIISIWKKEVQRGVGEKRAIKLIETAKESIGKKQGIKMAEYEIKTLIEQYEFLKKQIEEIEKKMEELIVEIPGVKELLEIKGIGVNTVAGFIAEVGDIEKYEHPKQIQKLGGLNLIENSSGKHKGETTISKRGRKRLRSVLFNAVMALVAKNEEFRELHKYYTTRAQNPLKKKQSLIVLCNKLIRIFYVILKKGVKYDPIKMMKDIKRPGLQEAA

SEQ ID NO: 353339 - protein, 340 aa, unidentified
MTITIGIDPHKGSHTAVAINSNEHVLDEIRVRSCSTQTDRLRDWADRFEGRTWAVESSHGLGYLLAQQLVAAGETVVDVPPVRASRVRVLGSGKSQKNDPNDARSIAIAALRADDLTIVCADDHARVLKLLSKRHRDLGRLKNKACCRLHALLLEMVPGGAGFRISAVTRVNAVIDAFEPVDAMGRQRQEIASELAGDIDRYNNLLDASKQRINTALAASGTSLTTISGVGPICAAMIIGESGNIDRFTSKHHFASYNATAPVEASSGPKVRHRLNQRGNRKLNWALHVIAISQLGRDTLGREFYDRKVAEGKTSKEAIRALKRRLSDVVYRHLVADARQ

SEQ ID NO: 353340 - protein, 341 aa, unidentified
MPAIGIDTHKRTLAACAVDDVGSVIDERTFGCDPAGFVELAAWAGDVAPAARIGVEGSASYGAPVAHHLIAAGFTVREVPPQLSRRERGRSRRPGKSDPGDALAIARVTLREPDLPPVRLEDRSTELGLLADARDDLVHAQTRARNRLHAHLVVLLPGYGRTVAQLVSGRQLEAIERALDGQAGVRAELARALLAEIRELGRRAAELERSIAVLVAGHPLLELPGVGVLTAGRLVAEAGDVERFRSPAAFAMLAGVAPIPASSGETQRMRLNRGGNRRLNRALYTIALSQAWHHEPARAYIARRQAEGKTWPEALRCLKHRISRPVFRLLQAGQFESVPAA

SEQ ID NO: 353341 - protein, 339 aa, unidentified
MDKYAVSGIDVSAKELWVGLQREGGKNEPERKFANTPSGHQEVKRYLRRAAARVRVCLESTGLYGLDLGLCLQADSRLEVMVANPRAVKDFAKALLERSKSDPIDTWVLTEYAARMPFRRWQPPSPAALSLTALARRIHALTESATREKNRLHALSATDTSLRVLVTELKRSLQWIERSQARLTRAARKVIAAEPRLERRFRLLLSLPGVGESSALQLLGELALIPADAEVRQWVAYAGLDPCECSSGSSLRKRPRISKVGNRHLRRALYMPALTAAHHDPAFGSYYRHLQQRGKCKMVALVAVMRKLLHAVFGMFKHDALFDGTRVCPSLAVPTGVAA

SEQ ID NO: 353342 - protein, 371 aa, unidentified
MREASTFVGLDVHKNTITIALLRPGQISPLEWSIVNETGAICRMIRRLGREAEGELRCCYEAGPTGYVLQRQLTRAGIDCRVIAPSLIPVKPGSAIKTDRRDARKLAELLRAGLLTEVKPPSEDEEAVRDLTRSRDDAQRDLTRARNRLSKFLLRRGCVYAVGHKPTWSAKYRAWLRALPFERPADQVIFEDYLLAVEQTEGRLDALTDRIESFAQQAPWAAPVQALRCFHGIDTVTALALVAEIHDPRRFAHPRQLMSYLGLVPREHSSGMRERRGGITGAGNRHVRRLMVEAAWHYRHKPIVGRALRLRRREQPPKLIALADRALRRLTLRQRRMLHQGKHPNLVTIAVARELVGFVWQVLHPARLAQA

SEQ ID NO: 353343 - protein, 344 aa, unidentified
MHTAVAVERATGELIGKRTVQARERGHGELVSWARSLASERVWALEDCRHVSGSLERFLLARGERVVRVPPKLMAQARRGARTRGKSDAIDALAVARAFLREPDLPIAMLAGVEREIRLLADHREHLVGERTRIQNRLRWHLHDLDPDLEIPAGALDRYCWLDRLETFIGGRDDEVLVAIASELVETCRELTRRINELERELEALLAHEAEELLDVVGCGTLTAAKLVGEVAGVERFAGDAKLAKHTGTAPLLASSGERQRHRLNRSGNRQLNCALYRIAITQARMHPPARAYLERKQAEGKSRREALRCLKRHLARVVFNALKDMERRKLYEATTPALEPDLT

SEQ ID NO: 353344 - protein, 358 aa, unidentified
MKKIVIGIDISKEKIDATAIDVRDIQLGVVKLGYQVYENRPMGFRRMLVWARHLIKGIGLEDVLFCCETTGGYDRCLCDYVYAKGLDIWREGALQIKRSMGVRKGKDDKADSLMIAEYAMRHIDKAVIYETPDEKVRELKALFLYRHKLVQERTEKKVRASELKATAAKSGSMRFIVRDAMKCVRALDRSIRECERQILALIDGDEELRRNYGHIDSVPGISIVNATAFIAYSNNFRSIPTANRMASYWGCASFRERSGTSVDKKAYVRCYSSPLLKATLTQAAECTIKEHGIYRDYYLRLEKEGKPHGVIVNNVRNKLIHLVFSLVTNDMDYEKNHEFLREKRKSEQGRSALLEIIN

SEQ ID NO: 353345 - protein, 460 aa, unidentified
MCSGDEPEVSAVMEPQEIEDEEHEQILERVAAVDVAKASGMVCTRVPDPGRPRRRRTRVWQVDATTNAVLELAEHLAAERIEKVTLESTSDYWRIWFYLLEAAGLQVQLVRAQDLRRAPGRPKTDKIDCVWQAKCTEKGLLRPSFVPPPEIRVLRDYTRMRTDLSRERTRYYSRLEKLLEDALIKVSAVASSIDTRSVRDMVEALIAGERDPAVLAGLARGRMKIKHDKLVQALTGRFDAHHGELARILLDQIDALTAQIERITTRIEELIAAIPEAQGVDPDGTTGPGAGFAPGSPVLPAVDRLDEITGIGRDAAQVIIAEIGLRMAAFPTPGRLVSWARLTPQTMQSGSRSRSAPTGKGDPYLKGVLGSAAAAAARTGTFPGQRYRRLARRRGKLKALVAVARSILVIVWHLLADRAARYHDLGADYYISQIDKHRKARSHIRQLEALGYTVALTPAA

SEQ ID NO: 353346 - protein, 402 aa, unidentified
MNSVGIDVSKGKSMIAVMRPFGEVVCSPFEVPHTSSELSALARRLKSLDGETRVVMEATGNYHLPIAIVLHKAGIYVSVVNAMLVHDYGNNTLRRAKTDKKDAIKLANYGLDRWLSLPKFTPEDEIRMLLKTCYRQYQQYSKVQTMLRNNLISLLDTVFPGVNRLFSSPVRADGSEKWVDFVETFWHCECVSGLSQKAFEKKYQKWCQKHGYHFREAKALEIYTSACGTVGVMPKAETTHLLISQAVSQLIATSTSLAELKKEMLRLAESLPEYPIVQRMYGTGPTLGPQLMAEIGDVRRFHSKKALVAFAGIDAPPNDSGQIAGNHKAMSKIGSSALRRTLFLVMGVYLQNAPVNEPVYQFMDRKRAEGKPYRVYMMASANKFLRIYYATVKAYLDSLEAT

SEQ ID NO: 353347 - protein, 476 aa, unidentified
MKNQNIYRNNNYALKETLSNYKPEQLLYIPIEVGKFNHKASIVNFFGDIVVKLFEFPNKKHGLDFFVKKLNFATTSSNAQKIFLGCESCGHYHLNLVHHLKQLNFPIEIINPRDTRKENPNKNSKTDNIDLGAIARVLISNKGGRQIVPEGVYYNLQRAARTRRKFVQRKTSSKNIITGLLDRIFPGLWDKDAPIFSDRWGKASMLLLERYPHPHRIIRLGEERLARFLRKNNTKLGIDSAHKIIDAAKDSLTKPLAELHMDIFALKSHIKCLNLYNETIAQLEQEIACLLVQTPGIYLLSIDGISVIFAGEFTAEVGDINRFAYANQIISFAGSCSKVFESAEYQAQGLHISGRGSKFLRSTLNQVALALNAWCEPFHLYYTNKALQKPDKPGIARIATGNKFVKLAFALMKYEQLYKPRGLLLDEKNYYSNLWSKIIRKLSGFNLTNISQENNYLLKIKKYLEEKYALTLSTKL

SEQ ID NO: 353348 - protein, 340 aa, unidentified
MQVTTIGVDLAKNVLQVHGITATEEVVFNKPLRRAQFLPFFAKLEPCLIGMESCSRAHHWARELTALGHEVRLIPPMYVKPYVKRGKSDAIDAAAICEAVTRPTMRFVAIKTVEQQSLLSLHRARDLLVRQRTQLINNLRGLVAEFGIFIPRGLARVIGFAEDITLGEVLNLPDIANEVIHNLCEQLMALHKRVRWYEDCVKQVAKEDASVRLLRTIPGVGAVTASAIIASIGDGHQFRNGREFAAWLGLTPVNKSSGGKEKLGRITKMGDQYLRSLLVVGMTSLVRQARSHPERASKWLTSLLERKAARVATVAMANKTARIVWAVLTRNEPYSPRAAV

SEQ ID NO: 353349 - protein, 318 aa, unidentified
MAEPRYAGVDVAKDTVELALGPSASVERFANEPSGHEAIAKRLLEHKVALVVLEASGGYEFALACALQAAGLAVAVINPRQARDFAKAMGYLAKTDAIDARVLAQLAQVIDAHPNRERFVKVLADAEQQRLQALVLRRTQLISMLTAERQRLATSHAAARKSIEKLIAAIRKQLEEIEAQLAAHIERHHADLAALLQSAGGVGPATTAVLIAGLPELGTLDRRQIAALVGVAPFNRDSGKMRGKRMIGGGREQVRRALYMAALVATRFNPVIRCFYQRLLDAGKPKKLALVACMRKLLTILNAMVRSGNPWDQSLHAA

SEQ ID NO: 353350 - protein, 347 aa, unidentified
MRFYNTQHPFYCGIDLHARMMYVCILDQSGEVLVHRNMKTDPEAFLRAIAPYRPDIVVAVECMFTWYWLADLCAEEDIPFVLGHALYMKAIHGGKAKNDKIDSQKIAVLLRGGMLPQAYVYPSEMRATRDLLRRRMHLARKRGELLAHVQNTNSQYNLSAIGKNLAYQANRDGVAERFADPAVQKSMEVDLALVSHYDTLLRDVELTILKTAKQHDANTLYLLQTVPGIGKILSLVLLYEIHHIDRFPRVQDFASYCRLVKCAKESGGKRSGTSGSKIGNAHLKWAFSEAAVLFLRDNPDGQKFLARLEKKHGKGKALTILAHKLARAVYYMLKRKVAFDMKRFLSD

SEQ ID NO: 353351 - protein, 422 aa, unidentified
MRVIYERCAAVDVGKDVIAVAVRLPGDGPDGRQTIKRTFKTFYGVLAEAARWMGSLAVTHVAMEATGIYSMPVYHALIEHGGFETVLVCNAGHVKNVPGRKTDFSDAEWLVHLLECGLLAGSFIPPAEIKAARDVIRYRAKVAQQRVSEIARLGNVLQDAGIKIDSVASSIATKSGRAMIEALIDGERRGMVLADLAKGKMRAKIPDLAMALEGRFSDHHALMCRLHLDHIDHLEAMLARLDAQAEAMMTPFQAARDLLTTAPGIGPLSAAAVISEIGADVREYFPDDAHLASWTGLCPGNHESAGRRRSGRRRKGNQHLQSILVECAWAAVRHDGYLKSLYHRHVMKWGGYRSQLAKKKAIVVVAHALVVIIWHILATGKPYHELGAGYFTRRLDPERETRRLIARLEALGHRVTLEDAAA

SEQ ID NO: 353352 - protein, 354 aa, unidentified
MDRKGAESRMEKLMLGIDVSKNTLSCTLLDPATRKPLWQAEVKNTKEGIRELLGRTQSESPWVLEPTGRYSLCAAQMAKDAGRSVLLAPSRRAKSFLQSVQSRAKTDRIDSSGLALFALSQPLPPYPLKSEKLSELNQLLLARRGIAQAITSLEQRIQDLPYAGATLKEAVLSLKTRLEELDQKIEAVGQEPDFAKDHQRLDDVPGIGPVTAAALLSRLKERSFGHSDQFVAYIGLDIGVRQSGKMKGERGLTKQGDAELRRLLYVCALAAVRKKGSPFKLQFDKERQKGLPKTAAYCAVARKMARLCWSLVHHQSDYDDQFVYQQIHPSKRAGSEPSPATTSEDMRSKEKDPI

SEQ ID NO: 353353 - protein, 461 aa, unidentified
MSLNPSTQEPEFAAFIAIDWADREHAWAMQPAGSTQRESGNLAQTPEAIAAWAMQWARRFPGRPIAVALEQSRGALLYMLRQYEHLVLYPIHPSTSYDYRKAVFPSGSKDDPKDASVLLDLLTLHRDRLRVLAPDTEPTRKLQALVENRRHLVDERTAQTNRITSQLKLYFPQVLRWFDDLSAPILRAFLQRWPTLPSLRGEDPETLRAFFHQHGCRSTARIEQRLREIAQSRDAVSDAAVIEPCVLMVGALLAVVAALNDGIGALDKSILQLTPSHPDHFIFASFPAAGAAMAPRLIVAFGSRRERYESASEVLSLSGIAPVMQASGRQRWIHFRWAAPKFLRQTFHEYAALSIQHCSWAKEFYRNQRAKGKGHHAAVRSLAFKWVRILFRCWQCRQPYQAALYEAAREGRALPVERRSRATAPAGHTALRRAIPTPSGKPQDAQLKSAGQILKSLLDRA

SEQ ID NO: 353354 - protein, 347 aa, unidentified
MSISMIGLDTAKSVFQIHAVNESGQIELRRKLRRSELIRFFEKQEACTVVMEACGAAHHWARVLTGLGHKVKLIAPEAVKPFVKKGKKNDAADAAAICAAASHPDVKFVPAKSLEQQGVLTLHAARSLLVKQQTMLANAIRGLATEFGLTVPKGIGKLGELMTLVDTDETVPETAREAVQGLFDQTHALAEGIEALETKIVDHARHNETARRLATIPGIGPITASLIVATVVDISLFKTARDFAAWLGLVPRQHSTGGKTRLGRITKTGNREIRKLLVLGATSMASRASQWNSAVGAWTRAALERRPFRLVTVALANKMARIAWALMTRKEVYHAKGRVAAAADAVA

SEQ ID NO: 353355 - protein, 342 aa, unidentified
MVNYMGIDHHKQYSHLTVMDEEGRVLKQGRVLNYRAEVEEFLRGTEEELKAVIEAGRSSYNMVDMLEELGVDVTIAHPKHIKLIAQAKIKTDKRDSRVLADLLRSNMVPEVHKRSEETRKAQRVLRQRVFFVGTMTRVKNRVRALLAQQSEEVQKALGLERELFGRKGLATLRGLDLPAADRALLEGLLALHERLAELVKASDKLVADLQKQMKDAQLIITVPGFGPFFSVLVATEIEDINRFEGPEKLHSYAGVIPSTHSSGERSYHGKIIKDGNRWLRWAAIEAVWPAIKSDNDLRAFYYKHAVKKNANAAKVATARRLLTIIYKMLKERRAYVSYPRTH

SEQ ID NO: 353356 - protein, 363 aa, unidentified
MKVEKAKEPRCVGIDLGKRTYEVAIVEKGGVTISNGKTCVAGRQALYKKLRPNDKVALEAGNLAFIIAKEIEASVGCQVYVLNPSHLALIYGSMKKTDKEDSLKLAHIIEDFQEERLPVVPVPSDKEMGRRKLLACYRRAQQSRIREINKLHGLFLAQGITTMTKENLSTGNSRKEAIAVLTGIELEESKYLVACLDLHEQQMQALQGQIKKESHGDEVIERLQSVPGVGPMVAFAFVSHVGAERFENASQVSNYLGLVPRVYISGETVRYGRITKRGNGYLRALLVQAAWALTRTKQGGKLKERFEYMTVEKSVSKKKAIVAVARRMAELLYALMRDGTNYENRPFTGEKKVEELAQLAMSA

SEQ ID NO: 353357 - protein, 332 aa, unidentified
MENFYFIGVDVSKKKLDFCVMFEGKVVHEEETANHQSAIMSLLHHLEEDYGIDNTRMLVCAEHTGQYTFPLACACKTVECKLWLENAAEIKYSSGVQRGKNDKVDAKRIAIYASRFQDKVQYYERPTEDIERLKQLESERTLYMTDLAKYKGQMKDQKDYMPKALYERKMKRLQALMDDLEEAIQAITDEMDEVIASCPVLFRQQELLMSIDGVGRVVAINMIIATEAFTRFDDPRKFNCYAGVAPFSYSSGSSQHSKARVSHRADKVMKRLLHLAAVAVTHRVGGELKKYYERKVAEGKNKMSVINALRAKIVARMFAVIKRNEKYKPILS

SEQ ID NO: 353358 - protein, 477 aa, unidentified
MRPTCRGRLTVVCFNPSTKLTRVRPAELIVARSKELSTRRKFVSYFAPLVGLGEDEERLLREVGTGMQVVHERCCGLDVHKKTVVTCILITLANGEVQRHIRTFSTMTAGLLALSDWLESLAVTVIAMESTGIYWRPVFNLLEEGRSVILVNAQHMKAIPGRKTDIKDSEWLADLLRHGLLKASFIPPAPIRELRDLTRYRKSLVQERAREVNRVHKVLETANVKLSSVATDVLGKSGRDMLSALIEGTTDAQILADLARGKLRKQLPQLQQALDGRVQAHHRLLLKHILAHIIFLEETLEQLQQEIEQHLGPLEEAMTLLMSIPGIAALAAAAILAEVGDDMTRFPSAKHLASWAGVCPGNKQSGGKRLSGKTTQGNATLRAMLAEVVWVLSHMKDNYLSAQYHRLARRLGKKKAVVAVSHSLLVIIYHVLSTKQPYSDLGADYFEQRDSTRLTQRSVRQLEALGYTVTLVPKEVA

SEQ ID NO: 353359 - protein, 410 aa, unidentified
MDLLRREVPASSLVVAIDPGKAFNRVWLTSGEQGMIGEPVSLPVLREGIDELERLIASSGVGGLPVIGLEATGALHRAWATEIERRWPGSLRLFAPSETTAARAQLGSRRFKTDDRDCAALVWLVRQGAGRPAEPQLVEALLGTVRHRAQLVDARRVLQQRLHDQLNALCPGLSAPVGHGRALKLESPTGQAVLACAAAFAGRAPSKRSFLARAPGRTSDTTALFWTERWKRLLGPPLDAELRARRLGGDLRRWQGLQQDIALAEEQLAVLLAKTPGQILTSLPGVAIVRAAAFSAYTLPIERFASPEHLYSATGLAPASYQSSTITRRGRISRQGLPEHRDALMGIAWGLSRSSEAFRARDAELRARGFRPIQARVALARHACRLCWRLLQSQHPYDDRRYARARRRGR

SEQ ID NO: 353360 - protein, 323 aa, unidentified
MQGKDMPEPSATTRVYVGIDVCKAWLDVYIHPFGHAFRVSNDLLGLRLLKKTLAPHAVALIVMEATGKYHRQAQRTLHAAGFRVAIVNPLRSRLFAESLGALAKTDKIDAKLLAIFGQSLEPNALPPSSEALEELQEIVRARHAATTDLTALGNRLSEAKSAFLKTELKRQVKTLETRIKRFNIEIVKRIKSDATLLRRYEILLSIPGLGPVAAAALLVELHELGQVSKKTIAHLAGLAPLADDSGDRTGVRHIRGGRAFARLALYMPAIAAIRCNATFKAFYDRLLDAGKKPKQAITAVMRKLLILANYLIRENRTWQPINP

SEQ ID NO: 353361 - protein, 314 aa, unidentified
MSNKVVMGIDVSKSRLDCFGLPLEQAWSCDNGPGGIEQLVCRVRELGCELALMEATGGYETQAATALAAAGLRVAVVNPRQVRHFAKAMNKLAKTDRIDARVLAEFALSINPQVRPLPDEGTRELSDLLARRSQLVTMRTQEKNRMLQAAPALRAGIKTHIKWLDVEITKLEVDLTAKLRASEAWCDKRDLLLSVPGVGSTTTLALLAELPELGQLNRQRIAALVGVAPLNDDSGKRQGRRFTWGGRAAIRSVLYMAALSAMRHNPVIRVFYQRLRANGKPFKVAIVACMRKLLTILNAMVKQNKSWQPTSQLA

SEQ ID NO: 353362 - protein, 359 aa, unidentified
MKNTLNHALKTTTPPTVETQVRIPQLKLGVDWHADHFRVVRMCDGQSPQPAQRFTPASFLPYVQKQLTLANQVFVVYEAGPGGFHLHRQLTALGVTALVVHPQKLDPQHKGVVTDKTDARELTLNLDRYLRGNLRALSVVRVPSPAEEQHRALSRQREQLRRERQRLAAQGRSLCLTQGIRLRGEWWKAPLTLPDWLEQRLAVWRQLITAVETLLEELTEQVEALAPKARPKGLGPLTLGLLIAELCDWSRFKNRKQIGSYTGLCGGVSSSGQSHCDLSITKAGNARVRWALIELAWRMVLYQPQSKAVQRWGHLLLNPKAATRQKKRALVALARQLAVDLWRWQTGKITPQQLGWVMV

SEQ ID NO: 353363 - protein, 321 aa, unidentified
MQTIPVTVYAGVDVAKATLQLHLQGRQAEFTNQAAGLVQLCRKLKTIPHVHVVCEATGGYERLLVQAMHQVQIPVSVTNPAHVRAAAQAQGQRAKTDRIDAALLTDYGQRYQPKLTPPTTASQDQLVALTQWLTQLVQAQALAKTQAEHHQAAFVCGRHTKLMAHYQSQIVAVEKQIRALLAQDAQLQQRVDCLDDIKGVAPRTAWLVLAHMPELGQINRQEVAALAGLAPWTRESGTMKGVRCIGGGRPEVRLALYMAALSAARCNPVLKPFYQRLRAKEKPAKVALTAVMRRLLVYMNHQLKALHTKQTNTPIQNAKIP

SEQ ID NO: 353364 - protein, 343 aa, unidentified
MQAVTTIGLDIAKSVFQVHGIDAEGNVLIRRQLKRRYVLAFFQKLSPCLVGIEACATSHHWSRELKALGHTVRLMPPAYVKPYVKRQKNDAADAEAICEAVTRANMRFVETKTPEQQSCLMLHRTRQLFIRHQTSVINALRAHLAEFGIVAAVGRKGVELLLAVVTDTSDQRVPEVARVCLAALGAQLGRLKEQILEFDRMIMAWHRSNETSRRLDAIPGIGPALATALVASVADAKAFRSGRNFSAWIGLVPKQHSSGGKDKLGSISKQGDRYLRSLFTAGALAVIRYAKLHGTKHRPWLTALLARRPTKVAAIALANKIARMAWAMMARGERYKEPVALAA

SEQ ID NO: 353365 - protein, 392 aa, unidentified
MFIVGIDIAKRFHEASVIAQDGSLVRKALRFANSQAGYNKLMNMVRGLNEPVVFGMEATGHYWMTLFTHLRNDGFTVHVINPIQSDALRGMYIRKTKNDAIDSMIIADVIRFGRYCETSVQPGDLQAMRELCRQRFYIIDMASDLKRKVLALLDQVFPEYEKLFSDTFGASSMELLSQYTTPEEMLSVSTEKLAELLETASRGRLGLAKAEEIQEAAKNSFGIVLASGSFALIIRQYIEQIRSLESSIAVFDTEIARLLAGFDTQLTTITGIGSTLAAVILSEIGGDIKRFSSPAKLAAYAGVDPTVKQSGDFTGTRMKMSKRGSPYLRRAIWLASTVAAFKDPAIHALYERKRSEGKDHMTVIGHVCRKMVSIIFAVLRDNTPYSPAVISD

SEQ ID NO: 353366 - protein, 434 aa, unidentified
MSLSVFKEIGPMKIVHPICCGLDIHKNIVVATIATTDSNGITTYEQSTFSTMNRDVIKLRDWLLSHNCRFACMESTGKYWIPIWNILESEINLTLAHPKYTKAIKGKKTDKKDSKWISDLFKHDLVINSFIPPADIRQLRDLSRYRYKLTYIKVSEKNRIQNCFTMSNIRIDSVVSDPFGKSARLIMNDILNNPGFKPEDAIPNLKKRLKKKESQIIEALQDINVSSDQHLKMNIAYQHLDQIDEYIKTIEQYLERLVQPYDSLIDLLCTIPGLQRRSCITIISEIGVDMSQFIDAKHFASWAGLAPTNNESANKKKSVRISHAGVYLKPLLVQVALNSIRDSSNNYFTLKYNILKKRRGHKKAIIAIARMILVSIYHILLTGETFHPYDFDELKNPIIKEQSSSKSLNEEDAINYLKSLGYSVNKLGLTSINE

SEQ ID NO: 353367 - protein, 411 aa, unidentified
MNPVVGLDVSKGESEVQAFLDKGKPYLRSFSIKHDLDGLRSLLEFLEDLKNKTGAQPSVVLEATGHYHAPVVQFLEEHQYLLIIVNPLISHRAKSSSLRKVKTDAIDAYRLCELYYKEDLEPYKKRGIQLLNLRNLTRQHENITGMYAQTKLQFQAVLDQVFPEYRGVFGDLYSVVSLRILQEYPASEDILTISDDALANRIKELCKSRSKRWAVEKSQKLKAAAARNPFQKTLYQSHLLSLSMYINMLIQYKEHLSELDAEIDTLAKEIEEYKIIQSIPGIGEKIAATIISEIGEIDRFNHPKKLVAFAGVDPEVFESGKFKASLVRITKRGSSRLRHALYMAVRSGIRDCRKQKTTDEIIPRNKKLRAFYDKKREEGKLYKVAVIACVNKLLHWIYAILKNRTTFQDIA

SEQ ID NO: 353368 - protein, 362 aa, unidentified
MFRPHTLYIRIRIVRKVSEPAFAMKDQDVTDVIRRKQQTAMRYIGIDVSKATFVVAYSSDKGGEIRTFNNTTTGIKQFIGALPKDSSIHCVMEATGNYSAMLLYLLNVAGIAVSMENPLKIKNFARAMLSTVKTDKIDARLIALYGEKMNPQPFKIQGEAILRLRQKRTVIRQLTKQITAMSNLRGSLACLPVPDKGATHTVDETIEFLEKRRDRLQSELTDLVEVEFSRQLALLTTIKGIGITLATALIITTGGFTYFQNAKQVSRYLGICPTYEQSGTSVNIRGHINRNGDVYTRGLLYVAAWTASRFNTKCGETYTRLRQNGKPGKLAMIAVANKLVRQAFAVVTHDKEYVDGFVSNRP

SEQ ID NO: 353369 - protein, 335 aa, unidentified
MNQARTHIGVDVGKESLDICYPNGNKEHIKNTKRCRAKLIKEAKRLGAIISFEATGPYEESLEVDCLSAGVPAVRLDAWKTRKYAESQGILEKTDAIDCEMIRDYAASLRLEKLHFVREMSEGYRRLKRASGVRRNLIKAKVLIANQLESVMDADIKASIVRLVDSIDRQIEKMDDACSAAIASDEKMNALSKRFEQVVGIGPVLINTVFATCPDIGSFTAKGIAKFAGVAPLENKSCTIKKKPKPRRGRRDLRNALYMAAVSACHSNHLLQSMYKGLLARGVPKRVALVALARHIIILMNYIAKYPDFNPAIDPKKAAILASPKRKPGRPRKNP

SEQ ID NO: 353370 - protein, 436 aa, unidentified
MEVRMVNTPSAGMNNEPVDCFIAIELSKSGWVVGFQTPLSDKTSRYQVKAGDANGLLELIERVRTRVARQLSRPIEMMSCYEAGYDGFWLHRVLEAHGIHNHVLDPGSLQVNRRARQPKTDRIDADRMVRALIRHLRGEPEACSVVRVPSIELEDAKRLHRERRRLIAERVQHVNRIKGLCATQGIYDYSPLRKDRLTRLDDLHTGDGRVLPPQLKAEIVRELKRLELVLEMIATVETERDAILTNPASTHVNAGKIKMLAKLKAIGPEFATTLVGEVFCREFVNRRKLGSYVGLGSSPFRSGSLDRDQGISKAGNPTARSMMIELAWTWLRYQPDSALSIWFRERVGTLKGRPRRIAIVAMARKLLVALWRYLETGLVPTGAVLKASSCATWVARAQWAPALDASSTVNQKHIALKIGVAMRSMPHYAPPLREIS

SEQ ID NO: 353371 - protein, 382 aa, unidentified
MQTIDPVNPTILLAIELSTSTWLVAARVPGLDKPRLSRIDGGDTAALLALISSLRARAACGLDATMGVVCCFEAGRDGFWLHRLLTAHGVVSYVLEPTSILVNRRARRAKTDRLDAEGMLRVLAAYLRGDHQACSMVRVPTPDQEDAKRTHREREHLVQERLRIENRIEALLFTQGIRKRPSLRSWEHDLTVLRTGDGRKIPRHLRAELDRLRRRLVLTLELIREVEAERDQVTKTKPQDQAHHKITALCRIRGIGENFAAVLTREVFYRSFDNRRQIASYVGITPMPYQSGGMDRDRRIGRAGNPRARTTMIQLAWLWLRYQPDSELAEWFRERVGTLAGRTRRIAIVAMARKLLIALWRYVETGVIPTGAEIRVETTVAA

SEQ ID NO: 353372 - protein, 427 aa, unidentified
MKYAPIQVLPDVPAGRVFAGVDWAAADHVACVVDMAGRILDRFSAAHDKAGIEMLITRLRENGAAEVAIERGGGVLVEALLAAGLTVVVVSSRQVKNLRARYRSAGGKDDRFDAFVLADTLRTDRARLRPLVPDTSATLALRAAARARRDLVAHRVAACNQLRAHLAVAFPAAAGLFFDLASPISLRFLARFGSQDAAAQLDEQAITAWLKTVPDRGKTAPASMLCARLRAAPEGVTGEDGAAHAVITAALTATVGMLAAQIKVLETEIGARLAAHPDGHIFTSLPRAGTLRAARLLAEIGDCRSRYPGPQSLAALAGVTPVTRESGTHTSHAFRWAVNRSLRDAVCDFADGSRHASPWAASVYQAARARGKDHPHAIRILARAWILIIWRCWQEGTAYDPAKHTALQRILDQQAAQAAAASPGDTQ

SEQ ID NO: 353373 - protein, 308 aa, unidentified
MTFAGIDVSKTHLDLALVSNSPKPTRLRFPNSPEGRQALLAALAHHNPAWVALEPTSAYHLPLLKLLAENRLQVALVNPYHLAAFRKAKGERQKTDRQDALLLARYAQVYHEDLRAYTLPPETLRELKALVGYREDLAGRERTILNQMEAAEWAGSKEVLALLQKELACVKGLLGEVEARIQALLATLPEAEVLMALPGVGPQVAAAVLALLPPELWGRAKRAASYAGLIPEREESGKSVERSQLSRKGPPLLRRKLYMGALVAVRHDPEMRAFYHRLLSRGKRKKQALLAVAHKLRSCKDLCVRVRV

SEQ ID NO: 353374 - protein, 342 aa, unidentified
MSEVSIIGIDLAKRVFQLHGACTNGAVIYRKKLTRVQLLAFMSQQPKCTVAMEACATAHCWGREIEKLGHTVRLIAPNYVKPFVKRQKNDVADAEAIVEAASRPTMRFVALKSEAQQARAMLFRTRQMFIGQRTQTINALRGHLAEHGVVAPKGAIHVKRLADAVADETMGLPEEVRELAQVYLAQIEGLNVQITALDQRMKGAAKEAEAARRAQTMPGVGPITALAIETFAPDLNCFCRGRDFAAWLGLVPKQNSTGGKPRLGKTSKMGQRDIRRLLISGAMAVLQAVERFGTPHNSWLIAMLERKPRMLVAVALANKMARGLWAMVTKQEDYRTPAATMA

SEQ ID NO: 353375 - protein, 360 aa, unidentified
MIVQGTSVGLDVHALSVVAHAVDEETGKIERARLCPDHREVLGWLHQLRAPVRVTYEAGPTGFGLARAITEAGMQCLVAAPSKLQRPAGDRVKTDARDAAHLARLLRLGEITEVRVPDRETEAVRDLVRAREDARADLMRVRHRLSKLLLRQGIVYYGGTPWTGVHEQWLRRQRFDDIHLKAAYDYSFDAVLAATAARDRLDEQIAEVAASPRFADQVNRLGCLRGISALTGLALTVEIGDWSRFTGSSIGAYVGLVPCEHSSGGSRVQGSITKAGNTHVRRLLIESAWHHRKSYGTSGTALRTRWAKVDPALRARGHAGNRRLNKRWQTFTERGKNPLVANVAIARELAGWCWSLATMQ

SEQ ID NO: 353376 - protein, 342 aa, unidentified
MPAITTIGLDIAKSVFQVHGVDAEGNVVFRRQLKRRYVLPFFQKLPPCLVGIEACATSHYWSRELQALGHKVRLMPPAYVKPYVKRHKNDATDAEAICEAVGRPNMRFVETKTPEQQGCLTLHRTRHLFIRQQTSVINAIRAHLAEFGIVAPVGRRGVDQLLAVVADTRDKRMPEVTRSCVAALSAQLQMLKAQILEFDRMIRAWHRSSETSKRLDAIPGVGPALATALVASVADPKAFRSGRDFSAWIGLVPKQSSSGGKDKLGSISKQGDRYLRSLFTAGALAVIRYAKIHGTRHRPWLTALLARRPTKVAIALANKLARMAWAMMARGEQYREPAALAA

SEQ ID NO: 353377 - protein, 367 aa, unidentified
MEKVSTRAAAQSRNISQQKLTIGLDLGDRNSWYCVVDEAGQIQREQRVHTSGKALQEVFGAMPRSRIALEIGTHSPWISRLLSELGHEVIVANARKVRLIGESRKKDDRLDAQALARLARIDPELLYPVKHRSVQAQADLTLIRARAGLVRARTGLVNAARGLAKSYGERLRGCNVRNMNPEKAESLSPELQSALEPLLNAVESLSERIVEYNERIEDLAQQRYRQVALLKQIKGVGTLIALTYMLTLEDPHRFRKSRDVGGYLGLQPGRRNSGQSEPQMHISKEGDPYLRTLLVQGAQHILGPFGVDCDLRRWGLKLAERGGKSGKKRAIIATARKLAVLLHHLWVSGEAYEPLHNSKQKAMPTAA

SEQ ID NO: 353378 - protein, 400 aa, unidentified
MNTTSMNIRPQLERAAGLDIHQNKITVCFYIRDTLEEVRDFGTFTCDLEQIREALQKHQIKDVIMESTGVYWIALCSVLTAAGIKVNVVNPRFVKNMPKEKTDNKDAKWLCKLLVNGLVRNSFVASEEQRAFRDVCRQRTKYSQHITQTTNRLLKNLERRNIKLRSVVSSMHTKSGMDIIHAIAHGETDIEKMLLLCRGKLKKKRDEMRKALQGVITQHDRDMLKTLLKDITHYKEQIADIEERIRCHTDKVNTTLFQNLGQIKGVGKQTTEIILAEVGDNVNAFNTSDKLTAWVGLAPGNKESAGKSRYTGTRQGNVYLRTAMIQAAWGAVRTKNSCWRVLFAHLIKRMHAKKAIVVIARKLIKVIYKVIKGVLEYKEYGAEYYIEKLLQRKGLQPRPI

SEQ ID NO: 353379 - protein, 314 aa, unidentified
MDAVIVGIDVSKDKLDVGVRPSGERFVVNRTGTGLEELRNRLGELGAAIVGLEATGGYETIVAASLSAAGLPVVVVNPAQVRAFANALGKRAKTDPIDADVIAHFIEATKPKVRPLPDEATRQLSNLVGRRSQIVAMIVAEQQRKKHRPDKRMLASIERLLAALQRELSELDGQIREAIKASPVWREKDDLLESVPGVGPAISGRLLAGLPELGSLDRRQIAALAGLAPWTRQSGQWKGKSFIGGGRAAVRSALFMGALVAIRHNRTLKAFYERLLAAGKEKMVALIAVARKLLTILNAILRDGEPWREPEAHA

SEQ ID NO: 353380 - protein, 459 aa, unidentified
MKFVIGIDVACRASHVAAGASETGEIVWSGVRLRTTVEDLESLWHRLPSGTTEVTVVMEPTRNAWVPLASWFRRQGAIVVMVPPEQSSDLRAYFSKHAKNDRLDAQLLARLPSMHRDGLHEATGDGPADPLRRATRQRASLVLRRATCMNRLDALLEIMGPQWVDALGSAMTSTTFKFLVKWAHPLRVQRVGRARLARWFCHEMRRVHGADVADQVLAAARATLDLWGPDGLDFDELASDIAVEAEVALELSRQIKELDRRIDDLYLELDPARIVMSVPGVGAILAAQILGRLGDVNRFSSLAAVRSFSGLVPRQNSSGLVERSGGPTKRGDAALRGAIFQAANTARMVDPTLAQRYQRLMVEAGRHHNSALCSVAATLLTRITTCVRSQTPYVIHDIDGREITASEGRAIVRARYQISPQVRASRRAVSDQAALRKRDERSKRGVAERSEDALVPVAS

SEQ ID NO: 353381 - protein, 346 aa, unidentified
MHYVGLDVHARRSSLCILDSCGKVVKRLEVKGSWPKLMERVAAEVPRPFSVCFEASCGYGHLHERLSALAERVAVAHPGKLRLIFRAKRKNDRVDAEKQAKLLYLDQVPLVHVPCGDVRAWRGLIELRRKLVGRRTAVKSQLRALLRGAGCCDAPAGKALWSKRGLKWLAAAALGEADALRRDLLLEELAQADERVGRVTRELDRRADAHPGVALLRTIPGVGPRTAEAFVAYVDDVRRFARTRQVGCYLGLVPCQDSSAGRDRLGHITGDGPPTARMLLCEAAWQAVRRSPSVKAFFERVMHGEPGRKKIALVAVAHKLARSMAAMLRAGEAWREDDPQRERDPA

SEQ ID NO: 353382 - protein, 333 aa, unidentified
MVLTELGAEGRRMAVMIGVDPHKRSHTAVAIDGEDVELDAIEVRASARQVAELLAWAAGFEERTWAVEGAGGVGYLLAQQLVGAGERVLDVPATLAAGVRVLGSGRSNKNDPNDGYSIAVAALHAPRLAVVTGADHASVLRLLAKRNQELSSARTRTACRLHALLVELVPGGITKEITVSRAAQVLASVTPSGPVETTRHELALEHLEDLRRVEEQIRASKRRLTAAVEASATTVSEVFGFGPVGTAIAIGHTRNIGRFPSRDHFAAYNGTGPIEMSSGGRVVHRLSRRGNRQLNTRSISRRSPRSATRTHPAAATTTANSPKERQPKKRSAH

SEQ ID NO: 353383 - protein, 411 aa, unidentified
MDKVYDICCGIDVHKKLIVVCFKKGNKQEIREFGATTRELLELADWLKEGGCEMCAMESTGSYWKPLYNILEASDLKAMVVNAQHMKAVPGRKTDVKDAEWIADLVQHGLLNPSYIPNKDQRELRELVSYRKSLVGERTRELNRLQKMLEGANIKLSGTIKDINGMSARNILEYILTGKAFDEKKYDEMYEQRLISHNLKASKEQIIDDLNGVMSPLQRRMMRELLAHLDELNQHIRNLDNEIDNFMKPEDKNAAQAIQSIPGIGNSSAQAIIAVIGTEMDRFPTDAHLASWAGLCPGNNQSAAKRKSGKTRKGNALLRTTLITCAHSAVKNKKSYFYAQYSRISAHRGSKRAYVAVAHSMLIAIYHMLKYGLAFEDLGADYYNQFNKERKIAAYLKKLKGLGWEAPVVAA

SEQ ID NO: 353384 - protein, 392 aa, unidentified
MYIVGIDIGKNHHEASIVSPEGKQIGRSLRFATTHKGADSLMSFIFKNIGNSPCVFGMEATVHYWYPIYSFLKAKGYTIYVINPIQSDSLRKMYIRQTKNDSIDSFLIAEVIRFGQFGTTSMADENILAMRQLCRYRDSVISSRTEIKLRIGTIMEQIFPEYEKQFSSLWVSTSMGILEKYLTPENIKNAPIDELFEIIKDKSHNRLTRAKAISIKDAAADTFGIKIAQDAFSFQLKQLIDRMNFLDKQIEALDCQILEYYEKFDCYLHTIPGIGMIAAATILAEIGDINRFKSSSALVAFAGIDPTVRQSGEFSSTHNHMSKRGSPYLRHAIFLAATTCSFHNIPLNAYYKKKREQGKHHLTATGAVARKLTTVIYAVLRDSKPYEPKKFC

SEQ ID NO: 353385 - protein, 359 aa, unidentified
MASIALGRGDVVVGVDTHKDEHVAVALDGLGGKLGDLAIPANPAGYAELVAWADGLGLVDAFGVEGTGSYGSGLARFLRRHARKVTEVSRPPRKGERRLSGKSDTIDAEHAARQVLAGTATATPKLADGIVESIRLIKIARDSAVKAHTQAMVTLKATLVTAPDEMRADLEPLSDFKLISACAALDPTGDIADPATAMRQVLASLARRWLELHDEIKTHTRNLKDLTRSAAPDLVDAFGIGFDTAAQMLVTAGDNTDRIGSDAALAKLCGACPIPTGSGKTSGRHRLNRGGNRQANAALYRVIIVRMRWHPPTIAYVERRTADGLTKKEIIRCLKRFLVREIYQLLPEPSSPATLAPAA

SEQ ID NO: 353386 - protein, 418 aa, unidentified
MAKFNGNYSVYVGIDWANDKHDLCVQQANSDRRKFKVIKHSANAINDWIISLHKQYKGQIAVAVELSKGPIVYALQKYKFVTIHPVNPSMLAQYRKAFSPSGAKDDPADAELALDLMLNYPKKIKALKMESEPVRKLTYLVEQRRRLVEDRRRFSNRLINTLKQYYPHLLDWFSHRGSGMFCDFITRWPNLQKLKRARIGTLIKFFKAYPGRTASCTEQRLELIHQAEPLTLDNAVIESHQLLAVALANQMLVVVEAIKVFDKEISALFEALPDAELYKSLPGTGPCLAPRLLVAMGENRSRFTSASEIQMYSGIAPVTERSGQKCWVHWRYQCSKFVRQSFIEWAAKSVHQSYWAGIYYQQQRSKGNTHQSSVRSLAFKWIRVLYRCWKTKEPYDESKYLKALRDRNSPLLFKEKAC

SEQ ID NO: 353387 - protein, 347 aa, unidentified
MLADQLDYVVGVDPHRDSHALAVVHVVSGAIVFESTVVASSDGYAHALKLVDQHAPARRAFAVEGTGSFGAGLTRFLSGRGEQVLEVGRLRRERHSGGKTDALDAIRAARSVLTSERPATPRAGGERQGLQALVAAREGAVNAKRAGLCQLRDLLITTPEPLRSELRPLTRARLLQRLAATRPGGGRDPELRGSMLALRSIARRVLQLTAEERELACEIEALTRKLAPQLLDQPGVGPHAAAQLVLSWSHRGRIESEAAFARLAGAAPIPASSGQTIRYRLDRSGDRKLNRALHMILVTRKRSHPATIAYIERRLQEGKSRREANRCLKRYLARSLYRLLEHPPMTA

SEQ ID NO: 353388 - protein, 349 aa, unidentified
MKTIVKQIAGIDVAQDELVVCLGKMYDDWTPELYAHKTFANTAKGFISFTEWVTRLTDVSVPVRFVMEATGVYHESLAYYLDEQGQEVSIVVPNKISNYARTLTVKTVTDKTASEAIARFGLERKLDQWSRPKGLFKKLRQLTRERSQLVDERTVLKNQLHAEQAQAEPYKKSIERIKKRIILLDKQEKEILEELRSLIKTDNEMQQLVILLCSLPGIGILTAATVLGETNGFDLIRNKRQLTSYAGLDVKEKQSGTSVKGKPRISKKGNKHLRKAMHMPALAAIGHDERFKAIFARLISKHGIKMKAVVAIQRKLLEMMYTLYKTNKSYDKNYLQNQTVQSIENTTKN

SEQ ID NO: 353389 - protein, 356 aa, unidentified
MKYVGIDVHKKMCQAAIIDDEGELLDQIRFLNNKEEIKDFAMKLTTFKDDVKAVVESTGNLWIQIYDILEKFGFEVFLSNPGKTRLIAEAKNKTDKIDAKILARLLRADMLFTCYVPGEEIRNLREFLRARVDFVKNKTQVKNRIHSILDKHGLRFPGTPFSKKSIPWLREQDLGFMDETIVKGQLALLDTLNEQTLILEDKIAAMGMEDPRVSLLMTMPGIGYFAASMLVAEIGDINRFGNDKKIASWAGLAPRIHQSGGTTRIGRVGRGNKKISGLLIQCAHNARMHDPRFKRFYERYHKRKGKGKALVAVAHEMIRIVYFMLKNNEPYRGQNVEMTTRKLKRMKYRATVGVQT

SEQ ID NO: 353390 - protein, 427 aa, unidentified
MHYTQNDKIRQATEGTIVLGVDIGSEKNYLRVFEPNGIEITKKAISFLNTLEGFKSFEEIVTNMTVPLAGKKIIVGVEPTGHYWFNFADYCQSKNMTVVTVAPQHVKHSKEMDDNTQRKDDRKDPRVIAKLVIEGRYCIPYRPKGVYAELRVAYNRRCEIVEAETRAKNRIRRWFDLYFPEYRKVYGSVAAITGMVILKQAPLPQDIVSLGVDGILQIWRANKLRAAGLKRAKTLFEAAQRSICPPDAGRAVRMELWQLLEEYEYIKKQLHEADIMIGIVTAEIPEVNELMKIPGIGLITAAGMISEIGDIRRFDDPRQIQKLAGLAIVVNESGKHKGQSEISRRGRKRLRKILFQAALVLVRSNKEFKTIHEYFTTREKNPLKKKQSLMAVAAKLIRVCFGMVKNGTPYDPAKVLKDIRRAEPKVA

SEQ ID NO: 353391 - protein, 382 aa, unidentified
MGIVRLPSQQQPDNMKNPTSALTEEVTKQNVQPSREATGIVLGVDVHLRSYQVARKVDNLAIGPVQSFRSQTELLLWLERLKARAEQIEVVYEAGPLGYTLYRELRARGINCRVCAPDSSEQKRKRIKTNSIDARALAGRLYSYLNGDERALRLVRIPSMEEERRRLRSRQHDQLVQERKRLAARGNSLLLAAGYGSIKHWWRPKSLERLTAVLEPELQQMLELWVGLLRLLDEKIALAKAALMRRQTEPRPKGLGALSMEQLESELLSWQRYSSGRKIACLTGMIPSQWSTGEAQRLGSITKVGLGPIRRIMVEAVWRMKGFQPHYEPFQKWRAALEGQNRAHKKKAVVAIGRQLAVDLWRLKTRRVTAQQLKLIMVGGSL

SEQ ID NO: 353392 - protein, 344 aa, unidentified
MTYYAALDVGVRSLALCIIDSDGQVHLEKSLPSEVDDIVTCLRGFGGAIASVGLEAGTLTQWLTYGLRDAGFRPVVMEARHVKAALGAMRNKTDRNDARGIAQILRTGWYREVYVKSLESHYIKTLLASRKALLHKCIDLENEVRGLLKVFGIRLRAGIRHGAFDLAAREPIEANAALTHALAPLLDVRLELYRAFLELDRRVKALAGRDEVCQLLMTTPGVGYIAALTFRAAVDDPRRFRRSKNVAAHFGLTPRRYQSGERDNPGRISKAGDTEVRSALYAAANIILTRSTKWSSLKAWGTRLARSKGRKRALVAIARKLAVILHAMWIDSTPFSHQAPEVAS

SEQ ID NO: 353393 - protein, 319 aa, unidentified
MKTQTDQETIYIGLDVAKTHLDLAGPGIKEQRFANDAPGWAALMAALAAIKERAQVICEASGGYEKSVLEALAAGEVKASRVHAEEVRHFARSRGQRAKNDRLDAKLLAEFGRERRPRLWQPVEAAREELRALHDRRRQLVELRTKESNRLENASPRLAGLLEKSIAFIDTQIVEVDHLLAQHLDSDPGLKAQAKRLTSVQGVGAVTVTALLSHLPELGQVSDKEIAALVGVAPFAKDSGTLQGRRTIRGGRAAVRNVLYMAALAASRWNPILRDFYQRLIANGKPAKLALTAVMRKLIVLLNRLAANPNFTLREQHCC

SEQ ID NO: 353394 - protein, 483 aa, unidentified
MKPKPEEQNKRATNHPTQHHWHEMNRKQRREMMRKMQSEDLSLEVIHPDAAGIDIGNESHYVAVPPGRDSPSVRRFGCTTAELKAMAAWLKQCGIRTVAMQSTGVYWVAVFDILEQAGLEVYLVNARDTKNLPGRKSDVQESQWLMKLHTYGLLRNSFRPLQEIRVMRTYWRQRNDLVQSAARHILRMQKALTQMNLQLANVLTDISGATGQAIIKAILAGERDPHKLAEFRDPRVKASEEQIAQSLEGNWQEDLLFVLKQEHEGYEFCQKQMAECDRQLQQYLQQREDRSHGAPLPEEKRQGRRKKKRANKPQFDLREGLFRMTGTDLTRIDGIDVMTATTVISEAGYDMSKWQTENHFVSWLRLCPDNRISGERIIGKGRLPTNNPISIALKMAASTLRESKTYLGAQFRRLRTRLGAPIAIKAMAAKLARLVYRMLRYGMKYVDQGAAFYELRHRELQIKRLKAKAEKLGYRVTPISAAA

SEQ ID NO: 353395 - protein, 355 aa, unidentified
MNVNVNHYIGFDVHKKSISYCVKLADGRIVEEGKLAARRVTLCQWASKRAEPWHGAMEATLFSGWIYDTLKPFAAKLEMGHPGRMKAIGASKKKNDKLDARTICDLIRANLLPACWVAPSEMRELRRILRYRNLVLEQAVRMKNKISGLLMESGVEYNKKRLHGEKYFHELLENLAAEVPESVEDLLKLSRGWLESFQATQQQLLVKLQKHPILMERLKRLKSIRSVGEVTALTWALEIGDPHRFSSIGDAVSYCGLTSALVESADKQKRGPISKQRNAHLQTVLIEAAKLAPRWNPRLAEWHKAEIDSGRHRNRATLEVARKLVAYLLAVDKSGKDFAVRTPSAKPEGEAKPAA

SEQ ID NO: 353396 - protein, 317 aa, unidentified
MKETPIYAGIDVAKDRLDVVLRPSGGYVEATNDERGIRSVVRRLRKENVALAVLEATGGLEQPAAAALALGGVPVAIVNPRQLRDFAKATGKLAKTDRIDAAVLAHFAEAVRPEPRPLAEEHARELSAVVLRRRQILAMTTAEANRVRTAPKAVRKRIEAHLRWLRKELARVDRELERAVEEGLVWKERAALLMSVPGVGPTLSTTLLAELPELEHLDRRRLAALVGVAPLNRDSGTLRGIRTVWGGRSGVRTTLYMATLCAARHNPAIREFYGRLVASGKPKKVALTACMRKLLTILAAILRNRTHWQPRLLPAAS

SEQ ID NO: 353397 - protein, 422 aa, unidentified
MQNTAAKKRKQVPEGYLIIGVDPHKKKHAAVAITQDFAVHCKFKFDNTREGLRVMLDRIREEMVKSGCRGVMFAIETGGHYWRNIAYFLDERGLPLRFINQYTLKRRREGKDLNHRKNDYRDSEVAAQLLCTGEFTESKIPQGVYAELRAAHNAYRRLVRESTRITNLIQGLLDGLFPEFTTVFKDPCGVTALSVLSNCVIPSVIATMTEDEFIVIIESKHEGRRLMRRKLRALHQTSKTSIGIGAGANSVASEIAFLAEKLKLIRGHIRIIENTLIRLVDETEEGKYLLSIRGLNYIAAAGLLAELGCFKSYRSAKQMIKMAGSNPTESESAGKRSIHTPMSKKGRPVLRYCGWTAVIPMLRFNPDFRAWAKQRRERPVHANPLGGRETVGAALNRLLRLAFALVKNQTLYQSPQLIAVTG

SEQ ID NO: 353398 - protein, 418 aa, unidentified
MNAEGHTRGTRRYIALDIHKHYCVVAGVDQDGRVMLHPQRVEHADLEGWLKKNLFANDHVVIESTTNAWHVYDLLEPLAERVVVANPIQVKQIANARVKTDIRDTLILARLLAANLVPEVWVPPQHVRQLRQLLSQRRQLVETHTQIVNRMHSVAHRHHLSHARGKRFNEKTTLWQKDKRLSSVEQFQLELEMENRAYMEKQISRIGKEVAKMSHQKPWAQSMTYLMQLPGFGVITGMTVLAAIGDIQRFDSARHLASYSGLTPGLEQSGTKYHEKGITKEGRKELRWAMVEVAQRAVKSDPLWKHRFQELQKRMHRNQAIVAVARRLLELVWYVLTRRQPYRHFSQERIAYKYLTWAWQMDDEARDGLTRQQFARYYLMRLGSGHDLTRIALNPKYPRKLASEAELLALRPELNHIE

SEQ ID NO: 353399 - protein, 466 aa, unidentified
MARKSKKVTKKAQRQTPRSLKTIQPNSAGIDLGAKEHWVAGPTRDNDKPNVKCFGTTTPELYRLADWLQEQAIETVAMESTGVYWIPLFEILDGRGFQVLLANARQISNVPGRKSDMLDCQWIQLLHACGLLRGSFRPSDDICRLRALIRERSTMVDERSDWIRRMQKYLDQMNIRVHRAVSDITGVTGMAIIRAIVAGERNANALAKLRDPRCRKSEQQITEELTGNWRSEHLFNLRQALKMYDQLSAVIDDYDGEILSCIADLQLDDDDDTPVPPPSSKTKAQNIVKRGQESLREGFYRMSGFDLTTIDGISVNTAAVVISELGLDYTVFPDENHFVSYLRLAPNLSISGGKKVPKKFKATTCTRVSTALRMAALTLRNSKSALGGYYRRVAYRKGASVAVFAIARKLAQLIYRLVRHGQAYLDTGAQAYEARFNQRRLTYYTNTLKTMGFRVEPIPSFEPTPA

SEQ ID NO: 353400 - protein, 323 aa, unidentified
MSDKEGINNEAQSFVGFDVSKASVDALSLPDGEYQRFENTDCGLQQCLAWVQGKRHCLCVVEASGGYETALAGVLAAAGVPIAVVNPKHVRDFARGMGILAKSDRIDARVLALFAQKRRPPIRALPGEAQRRFIDLVDRRRQLVSMRAQEQTRLTQAKGRPRKSIQAHIKWLNAAIDDVDRNLNDTLRGCELWLVDSQLLDSVPGVGKVTICTLLARLPELGHLDRAAIAALVGVAPFVRESGQWRGGRFIWGGRAEVRSVLYMAVISAIRCNPVIKAFYQKLLAAGKAPKVALTACMRKLLTILNCMMRTRTPWNPPLAQNT

SEQ ID NO: 353401 - protein, 429 aa, unidentified
MNSTQNKKIEQVKETTMIVGIDVGSEKHYFRAFNWRGIELTRKPVAFSNSMEGFNSFYNTIVELMQKRELEEALVGIEPTGHYWFDLGQFMGEKNIKFVMVNPHHVHKSKELDDNSPSKNDRKDPRVIAGLVRDGRYFYSYMPTGVYAELRNASNRRFVLVEEQTRAKNRLQKWIAVYFPEYKGIYTHIDAKGGLLVLKQAPTPEEIVKLGEEGIIKIWKDAKLRRNGNKKALKILNAAMRSIGLRTGLTEARMEIQDLIEDYELQTKRLERVNDLIKELCQQVRYADKLLEIKGIGITTVAGFIAEVGDITRFDSTKELQKLAGLELVADSSGKHNGKTKISKRGRKRLRYLLFEAAISVVGKNEEFKEIHRYYTTREKNPLKKMQSLIAVACKLIRVFHVILTKGVSYDASKMLEGIRHPGEQLKAA

SEQ ID NO: 353402 - protein, 339 aa, unidentified
MQQLRIDLNHATYVGIDAHPTEHTAVAVNRFEEEKGILNFENSRDGLRHFLSWLQKIDRVSENVIIGVEGRGGKGSAFIAPMLKNYEHVYEVNPQYTRQRRQFGTRGGKSDIRDARCIAEVVIRKLPELPKIIQGQLTTRLLTLKKLVWYYEEETRFGTRLKNHLHQLQREHDLSIDIEEKKLIAQIIREKQKELKRIGEKKDGLEVKLATFIEGHEKNLTSVPGIGIVLAARIGAYADSLDRFATIDKFLQYAGIAPLEKASGKKKKAVQNHKGNRSLNSAMYMVALSQISHNPKAKKYYRKKLSEGKTKKHALRCVMKRIAMIVYGMLKSGEVYREN

SEQ ID NO: 353403 - protein, 472 aa, unidentified
MRTCHGKKVAARGQAKEGLFEVINPAAAGIDVGASEMWVCVPGENEQERVRTFGTDTVELEAISAWLLQRGVKTVAMESTGVYWIPLFQVLENHGLEACLVNARHVKNVPGRRKTDRLDCQWLQKLHACGLLSASFRPTAEICRLRTCMRHRTTLVREQAAQIQRMQKAMREMNVQLDAAVSDVTGVSGMRIVDAIVAGEHDPAILARMADPRVRKSHEQIARCLQGDYRPEHLFVLRQALAAYRFFLGQIQDCDTEVERYTGELEQAAGRADTALPAAAAETRKRKAGNVPEYDVRTHLYRLAGVDLTRIPGIGELTAQGLISETGLNMSRWETVKHFASWLDICPSPKVSGGRVIGQGRRHASNRAAQLFRQAASTLKNSQSWLGSFYRRMRVRIGAAPAVKATAHKLAVIYYHVLSTHTEYRQIETPKYEERLRERTLRNLQRRARHLGMDLVPAEAAAETAPAALAVT

SEQ ID NO: 353404 - protein, 320 aa, unidentified
MSEINIFGIDVDSVWLVVARYGHAGTDQIANQATAIRAWLAELPANSRIGLESTSRYHEPVVTLAQAAGHRVFVLNPRDVRYYAKGVGCRGKTDRVDAHVIARYVAKEGDHLHAHVPRTHAQQQMHVLQQQRAAVTRSQTLLQQALRAHGGVNDTFQPMLEAIRKTLRALDRQIQTLSRQGPQAAVYRRLLTIPGVGPVIAACLAHHLTRWPLARADAWVAYTGLDPRANDSGRKTGVRRLSKRGEPTLRQMLYMAAMTFARHPLGKSLNQALRQRGLSSTATYNILARKLARIAWGLHKSEQNFDPVRFAADHRIAGTA

SEQ ID NO: 353405 - protein, 400 aa, unidentified
MAQPLWAGVDAGKSDHYCWVIDSDGTRLISRRVANDEAALQELITSVTALADGGEVTWAIDLNAGGAALLITLLIAAEQRLLYIPGRTVHHASGGYRGEGKTDAKDAAVIADQARMRRDLQLLRPGDDIAVELRILTSRRTDLVADRTRAINRLRAQLLEYFPALERAFDYSASKAALLLLTKYQTPDGLRRAGTARLAAWLRKRKARNANAVAAAAIEAADSQRTAVPGQQLAAAMVARLAKEVMALDIEIGDADAMIEERFRRHRHAEIILSMPGFGVILGAEFLAAAGGDMAAFNSPDRLAAVCGLAPVPRDSGRISGNLKRPRRYNRRLLRACYLAAHIAIRTDAASRTYYDRKRAEGKRHTQAVLALARRRINVLWAMLRDHSPYQPATPNATAA

SEQ ID NO: 353406 - protein, 342 aa, unidentified
MEQIRIVGLDIAKSVFQVHGVDGEGAVVVRRRLKRSRVLPYFASIEPCRIGIEACATAHFWARELGALGHDVRLMPPAYVKPYVKRQKNDAADAEAICEAVTRPTMRFVPVKKVEQQGVMVLHRARELLMGHRVRLSNAIRGHMAEFGLVAPIGRNGLQKLIESINDETDVRVPAEARLCLKMLAAQLQLVNAQVLENDRQIRASARSTEVGRRLMEIPGIGPVIASALVATVPDPHAFRCGRNLSAWIGLVPRQNSSGGKERLGGITKQGNRYLRKMLVVGAMAVIRHAQRNGTRRPWLVQLMARRTTKIAAVALANKTARMVWAIMVSGERYREPVVQAA

SEQ ID NO: 353407 - protein, 417 aa, unidentified
MAFKIFRKNCCGLDVHKTWIYACIGITDSNGRTEYHQSRFSSFTNGLCDLAKWLDKYSCKEVCMESTGKYWIPVFNILEQSCMVTLAHPKYTKPQKGNKTDRKDAKWICDLFMCDMIKPSFIPPPDIRQLRDLMRFRMKLTYQVTGMKNRALNCLTVSNLKLDDVFSDVFGKSSRSIIQQILDHPGETFDVAPFVDKRCKHPIEEIQAAVDGAVSREQAAKLKICLDFIDEQQKRIKEIEAEIFRLAEPYSYALELIRTTPGLNKDPLTAIRILSEIGADMSAFPTSKHLVSWAGCCPRNDKSAKNIKGTRISRAGSYLKPVLVQIANALLKSKDHPEFRERYRRIKARRGHKKAIVAICRMLLTSIWNILSKLEPYTAKGYLADKVKDHSVVITKAQGLELLRKRGYIFKEELADA

SEQ ID NO: 353408 - protein, 369 aa, unidentified
MRDRITYVGLDVHKDGIVVAIAEGGRRGEVREYGRIANTPAALQRLARKLGQEGVELRFCYEAGPCGYGIQRQLSALGHECTVVAPSLIPKRAGDRVKTDRRDAASLAKLHRAGELTAVWVPDPGHEAMRDLVRTRLDAVRALRRARQQLSGFLLRQGCHYGRPAWTKLHRRWLAGLKFEQAVHHIVLEDYIAAVEAAEARRDRLTAQIEAMLPDWTLAPVVAALQTMRGMALVNAATLVAELGDLSRFANPRQLMAYLGLVPSEHSSGASIKRGGLTKAGNSAARRLLIEAAWTYRFPARVSRELRLRQEEQPRVIREIAWKAQLRLCARYRKLARSGKPPNVVTAAIARELAGFIWAIARRVPPAAG

SEQ ID NO: 353409 - protein, 319 aa, unidentified
MGTVMNQTSSSLYIGIDLSGSTLDVAIHDTTEHFSVDNETAAIEQLVQRLIALGPTLIVMEATGKLELAVLRALCQAGLPAVAVNPRQVRDFARATGKRAKTDRIDAFVIAHFAAVIKPVVRPLNDVQTEQLQALLLRRAQLIDMLVAEKARLERAHAAAKESLNDHIKWLKQQLTVADRDIDSFLRASPAWRQKEDLLRSVPGIGPGAAATLIAFMPQLGSLNRREIAALTGVAPFNSDSGKHTGKRRIQGGRAIVRRALYMACIPALRFNPTIRAFYERLRQAGKPFKVAMTACIRKLIVTLNAMVHNSTPWSPSTN

SEQ ID NO: 353410 - protein, 459 aa, unidentified
MGNARARKIPAQLVEDEDYQLRHERVAGIDIAKAKGDVCTRLPPAREGGRRASRVEEVPARAADILALAGRLLADGVQLAVMEATSDYWRIWYYLLEGAGLSVQLVNPSHARQLAGRPKTDRLDAQWIARLAEMGLLRPSFVPPPEIRALRDLSRTRLQLVRDRTREWQRLEKLLEGALVKLSSALSSLARTKTARVILEAVAGGERDPKVLAAMADGHVKAGRAGIEQALDGMQLGSHHPLLIRLHLDRTARLDQAIAALEDEIEAALAAVPAAWGTDASGEAGPAAGRGPDAAALPAAERLAEIPGVSLKLAMAIIAETGLDMTRFPTAAHLASWAGLAPAARQSGPRNRKPAKGQGDAYLKGYCTQAATGAARTATFLGERLRRLSRRIGGNRARTAVGRSVLVIIWHLLSNPEARYTDLGPGWHARQGDRDRKIRAHLRQLQALGLHVEITEAAA

SEQ ID NO: 353411 - protein, 415 aa, unidentified
MALKIVYQICCGIDVHKTFVVACIASTNKQGVTTYKRHRFSTFTQGLKELLQWLLDNHCKDVCMESTGKYWIPIYNVLEKDCNIVLAHPKYVKAIRGKKTDKKDAKWIADLFKHDLVAGSFMPPADIRQLRDLMRYRFKLTCFMSSEKNRLQNCLTVSNIQLASVVSDTFGKSSQRILDKILENPDDTSFDIEPLIHGSMKKKLPELELAIDGFITPEQAGKLKVIKKHFEDLESRKAELEKLILALASPYQQEPDLILTAPSFKNKFTAIGIISEIGVNMEAFPSAKHLCSWAGLTPTNNESAGKKKSVRVSKAGCYIKPLLVQCANSVVKSEKHPEIRNRYLRLRKRRGHKKAIIAIARMLLAALYNMLKNKEPYNAELYRKSDVLPVNREITIEQAILMAQFQGYKIKPAAE

SEQ ID NO: 353412 - protein, 407 aa, unidentified
MSEPPSPPQRFIGLDVHKHYLIAIAVNPAGEQIGGPWRAQLAHLAEWAHRHLTAQDAVVLETTTNAWTVHDDLRPLVHSVTLVHPPHVALIVRAQVKTDNKAALALAQLHAKGLLPAVWVPPQNVREQRATVAQRTKFTRLATQAKNRLHSVLHRHHLPLPPDGSPFAPANRDGWLKLPVSASERARLQSDLATLAFAQQQIAALTTALTADAAQDERLPLLVQLPGFGAINALTVLAAIGDVHRFETAKHLVGYAGLGARVHDSGQLHRTGRITKAGRRDLRAALVEAAQTAANTHPHWQAELARLEPRLGRNKAIVAIARKLLVAVWHVLTLETADRFAEPDRVARKLLNFTYTVGRANRRPQQSTAAYVREQLDRLGLGAEVNRIAHGQRAIPLPPSKLKTAST

SEQ ID NO: 353413 - protein, 359 aa, unidentified
MRIIGCDLHARQQTLAMLDTATGEVVKATLKHQDNVVREFYCKLPRPVRVGIEATGSMQWFVNLMEELGIECLVGHPAEIRAAEPRKQKHDRRDADLLLSLLAEERFPAIWLPTKELLDLRALLRHRHQWVGLRVKIQNALQAIALANGLRRGSSLWTRAGQQAIASLPLSPHAAYRRNELQAMYVQFQAEIEKLNQRVEQQAQERFGARLLMTHPGVGPITALATEVFLGDPARFASSKELASYVGMIPGEYSSGKRQRLGGLTKQGNPLLRFLWSEAAIHAVRRDLELKQFYRRKLIQKGLGKARAAAARKLGIRMWIMLRDQIEYNEFCRRRQMQQKSGDACAGMPAARYGAKVTG

SEQ ID NO: 353414 - protein, 408 aa, unidentified
MDLTPMHKRVIALDVHQAKITACAIVEHEDGRMEITKRDFGAFKRDRRALAQWALEIAPEVVVMESTGVYWKSPFAALEAVGIIAWVVNARHVKAVPGRKTDMADAQWLATLARAGLLRASFIPPLLMRQLRLVARQRQKLVGMCSAEKNRLHKVLVDAGIRINVVVADIHGASARAMVKALIADKPMHEVLDCKGRLRASRDELFEALSTEQFSAVHRFVADEIMQHIEQIEQRIARLDQYLLEGLQPWQPQLKLLQTLPGIDEQGAAMLLVEIGADMSVFGSAERLASWVGICPGNNESAGKRKTGRIRKGNAWVRRLLCEFAQAAARTRCALKAKFDALAIRKGRKKSVVALAHKMLRTVYAMLTNGTHYHDKEVDYEALNVQRNAPRWIKMLRKHGFIASPAAT

SEQ ID NO: 353415 - protein, 311 aa, unidentified
MTIPTSQTVVGIDVAKAEIVVYRADLQTIDPVKNDRTALKRWLKDLPPGSALAVEATNIYHLDTIELAYEMGHQVYVVDAYRVSHYRNSVGQRAKNDPCDARLLARYLASEQSKLRLWSPPPKAYTSLKSLLHRRATLIQNHSGLMLSWTDEPLLKKIQAAQQRAFKEADQAIQKLLRKVSKEAGIEENIDRCKAIEGVGELTATGLATTFMRGDFANSDAFIAFLGMDLQVDDSGKKKGVRHLTKKGDPEVRRLAYNAAMAACRSPKWKPFYESYLARGFSKTQALVALARKLCRVAFALMKNQSEYLSA

SEQ ID NO: 353416 - protein, 343 aa, unidentified
MELYIGLDVSLASTAICVVSSHGKVIKETTAASELEELERALQSLPGTVVGVGLEAGPLSQWLHRHLTEAGFDTVLMETRQVKGALKAMPIKTDRRDAEGIARLLQMGWFRPVHCKSISAQEMRALLSARKAIQQAIINLELSIRGVLRNFGLKMGRVAKGRFEDRVRELADGNAMLEAAANPILTARRALRTELADLEKLSRDHAKSDPVCRQFMTMPGVGAIVALTVKSAIDDPDRFRSSKDVGPWVGLTPRREQSGERDILGAISRAGDVGLRTVLYQAALVMLNLGRPSWLTAWAWNVAKRRGKRRATVALARRIGVILHRMWQDGTEFRFKRIETAAA

SEQ ID NO: 353417 - protein, 350 aa, unidentified
MPRKFDTAVVTIGIDPGKNTLHLVGLDARGEIVLREKVARTKIVSRLANVPPCLIGIEAGMGTHYVTRELLALDHDVRQVPPVYAKPFRQTHKNDFRDAHAVAEAVQRPTTRCVPPKTDEQLDLQALHRVRYRLVGQRTAIINQIRCFLLEHGITVRQRLHWLRHALPDILAQRIDVLSPRMVRILEDLAQDWRRLDDRIEAVTDEIDALSKNTEPCRHLMTIPGIGPIISSAVVAAIGNGTAFACGRDFAAWLGLVPKQISTGDRTILGRITKRGNRYLRMLFLQAARVVLLRPKNWMKHGFGPWLAAAAQRLHHNVLATALANKLARIAWSVLVQHREYEARLSVAAI

SEQ ID NO: 353418 - protein, 340 aa, unidentified
MRRLYAGSDLHGNNNLIGIVDGEGKRIFKKRLPNEPQLILEVLKAYKEDMVGIVVESTYNWYWLVDALMDEGYKVHLANPSAIEQYSGLKHADDKHDAFWLAEMLRLGILPEGYIYPKEERPVRDLLRKRGHLVRLRTSLMISLQNILSRNLGRNMNVNDIKAVKEDRVSPLLEKNEDLALAGRVSKEAMDHLTHQISKIEWVVQKKIQLKPGYQYLPGVFGVGKILSLTIMLETGPISRFPTVGDYVSYCRKVPSQWMSNGKWKGSGNRKNGNKYLAWAYSEASEFARRFYPEARAYYQRKMHKTNAPVAHSALAHKLARAAYYVMRDQVPFRPEKLFG

SEQ ID NO: 353419 - protein, 405 aa, unidentified
MNAVGIDVSKGKSTIAILRPFGEVIASPFEVCHTASDLDKLVKLIKKLKGETKILMEQTSKYHQPIARFLNQAGLFVTVINPILSHNYGKQTSIRRVKTDTQDAVKLASMALDRWLSLKRYVPEDDIRSALKSLCRQYNHITKLKIVLKNNLISLLDQTFPGINSFMYSSVKKADGHEKWIDFVSEFWHCECVSGLSLKTFKHRLQRWCTKFSYHCGDNRAETIHAYSLNQYPTLPKEKSSELLIMQAVRQLNMVIESLSAYLNQMRELCALLPEHDLVMAMHGVGGTLGPQLIAELGDVRRFYDKRALVAFAGIDAPPYQSGKFESRNRNISKRGSPSLRKTLFMVMTVILQRSHQHEPVFQFIDKKRAEGKHFYVYMVAGINKFLRIYYAKVKEYLNSIEKPT

SEQ ID NO: 353420 - protein, 463 aa, unidentified
MSKKGQRNSQSKTDRLKGDWKALEIVHPRAAGIDIGGSEHWVAINPELDEEPVRCFGCFTADLEQMADWLVERGVRSVAMQSTGAYWIPVFEILQQHGLEVFLVNARHTKNLPGRKSDIMEYQWLLKLHTFGLLLNSFQPSDEVRTARTLWRHRGELVAQASSAIQRMQKALIEMNVQLTNVLSDLSGVSGMAIVQAILAGQRDPKELAALADPQVKATKQVIAKSLQGNWRPELMFVLRQHVEMYRTCQDKIADCDRQLQQHLQSMTPKVELEAHPLGPRPKGKRARGNAPKFDLRTELYRISGVDWTQVDGIDVQVAQSVIAEVGVDLNAFASEKSFANWLGLCPTNETSGGKVLNRRTPKVVNRAKVAFRQAASTLIRSQSYLGAQYRRLRIRLGAPKAITAMARKLACLFYRLLKHGKQYVDKGMEYYEQRYRDQQVRFITRRAKELGLQVVVPTPAKA

SEQ ID NO: 353421 - protein, 343 aa, unidentified
MITIGIDPHKSSLTAVAVQPSGEVSATIRLEVNRDTVARLRAWARQWPQRRWAVEGAAGLGRGVAQGLAAADEPVVDVPAQLAARARLLNTGHARKSDPIDAAAVAMVAQHHRRLHPVRAEDDSLVLRLLSERRDDLAAERTRTVNRLHALLRDLIPGGAKRNLSAEQAAALLRGVQPMTAVDTQRQQLSRELVADLRRLDAALGRNGEDIATAVSASGTSITQIHGVGPVLAAKIIGHSGAVERFPSRHHYASYCGTAPIEASSGEQRRHRLSRAGNRQLNRALHLIAVCQIRTKGPGREFYQRKLAEAKTPAEARRALKRRLCDTIYRHLTRDQQAENLIT

SEQ ID NO: 353422 - protein, 362 aa, unidentified
MRIIGCDLHARQQTVAMLDTATGEVVKMTLTHEGNNVREFYSRLPRPVRVGIEATGSMQWFVNLIEELRIDCQVGHPAEIRAAEPRKQKHDRRDADLILKLLMENRFPAIWLPSKELQDLRALLRHRHQWVRLRTRIQNALQSIALANGLRRGPSLWSQDGQNTIASLPLAPHTAYRRNELQAMYAKFETEIEKLNQRVEEQACKRTGARLLMTHPGVGPVTALATDVFLGDPARFADSKALASYVGMIPREYSSGGRQRLGGLTKQGNPLLRFLWGEAGAHAVRRDPELQRFYRRKLIQKGLGKASVAVARKLGIRLWIMLRDQIEYHEFCRRGQKQQKSSDACAGMPETPYGANSRRPID

SEQ ID NO: 353423 - protein, 340 aa, unidentified
MTVIIGIDPHKATHMAVAIDGDEHAIARLEVNADRAQAHRLLAWAAPLGEERTWAIESADGLGKLLSQQLVAAGEHVVDVPPTLAARVRLLGSAKAAKNDDNDALSTAIAGLRHCGLRAVRGDGHSTVLRLRAGRYDDLVSLRTQAACRLHAVLRELVAGGAPRRLSADRAARLLRSVRPEGVVAAERKRVAALLADVRRLDRELAAIKVHIREAVDASGTTLLELHGVGPIVAALILAHVGDPARFATPERFASYNGTAPIEASSGPRKRHRLNPRGNRKLNHAMHLIAVTQIAHDTPGRVYYDRKLAEGKTKKEALRALKRRISDAVWRQLQVDIAAR

SEQ ID NO: 353424 - protein, 349 aa, unidentified
MRYLGMDVHAKSTVWCLVNADGEVLREGKAPTTAAALTSLVEELGREEELLAGQEVGTLTYLVHDALTAAGTKVLSFNAHQLRMIAASRKKTDRRDAYWIARALQSGMYPHPVYVPTGEIRELRALLSQRRVLHADYQSWRYRARAYLRAAGCPAPAGIAALRATLARATGRTEGVLADGLELCRRQEATLRAELRRVDAALASRVASIDAVQRLITIPGVGILVATAIYAWVGDVRRFPTAKKLAAYAGLVPTVRQSGGAVHVGGITKQGAPALRAGLVQASHVLLARCRRTEAMPLQTIGLRIRGSRGRRKIAVVALARHLLRIAYYILRDGTTYDAVRLGTMTDAA

SEQ ID NO: 353425 - protein, 364 aa, unidentified
MKKSSKKQQGATVAESKPTQVVGLDLGDRHSHYCVLSSTGEAMEEGRIQTTRVSMEKHFASEPRMRIALEAGTHSPWVSRLLKSYGHQVIVANPRKIPTLTKSESKNDRNDAEQLARMAAFNPKLLHPIEHRSPERQQDLNLIHTRSVLVRARTMLINSARGLVKSAGQRLPACSSEVFPEKAPAAVPPALKAACTPLLEQITLMNQSIAAMDKQIDRLDQKYPEITILRTVPGVGPVVAACYVLTLDSPQAMETNRQAGAYLGLRPRQQKSGDSDPQCKITRMGNTYLRSLLVQSAQHILGRSRPDSELRRWGLKLAASGGKRGKKRAVVAVARKLAVLLLSMWRNHKKFEPFPQSVAQLTTA

SEQ ID NO: 353426 - protein, 373 aa, unidentified
MPRYSTAFGMDVHLRSTTVCALDAETGEAVTRRFRGNPWGEVAEWMSGFPGPSLAAYESGYLGFAPQRELSGLGVDCVVAAVSKVPRSAADLSSKNDRNDAARMAKAILSHDISPVWVPSPEIEGLRDLAGAHDAATARLAAAKQRLLAFLARRGYAYGGTTPAGNPRRYWTYGFLRWLDKVRPADDGGIRALAALRNEVEAADETREALLAEYRAAVAAGPLSAEVEALQSIKGCGFALAAAFASEVGDFSRFRSGRQVTSYFGLAPKQRSSADSVRLGGISGAGNALVRKLAVEGSWCYAQAGHQPKLMPKGSGVPLEIRMHGRKGSERLLRRREEMLERGMPQAKANAATAAELVRWLWALGTMCREAGE

SEQ ID NO: 353427 - protein, 380 aa, unidentified
MRNVALDVGAQKIAYCEVKDREVVTRTTTRGLSALLPLLGPNAPKAVVAIEACREAWHISAKLKEWGHDVALVDTTRVRRIGVGSHGRKTDRLDAEALARALEAGHLPIAHMLSPERQKLRMQIGVRHALVETRAQYVTTIRHLARTHGVHLPSCTAGYFTVKMRAQHLGEAVRELVTPLLATIEQLDTHIRTADAKLVHLCDQEPLLKVLMTAPGVGLIVAATFVSVIDDARRFENAHQVEAYLGLVPSENSSGSQRRLGSITKQGNRYARAMLLEAAHSILRMRGSEDPLKRWADAVAQRRSRNIAAVALARRLTGVLWAMWKSDRVYDPAMLGAASARGLECAAQDAALRAQAFKRVGEKLQRRVRRTTKITEDAMG

SEQ ID NO: 353428 - protein, 339 aa, unidentified
MLYVGIDIAKNKHDVTALNVPGKTVLKPLTFSNNKAGFELLDLSIRQINQDCLIALEDTGHYAFNLLNFLHEQGYKVYTYNPLLIKEFAKSLSLRKTKTDKKDAHGIALKLLSDPNREQFQHDNRQVELKILARHIHRLKKKQSDWKVQYTRCLDIIFPELDKIVGKHSEYTYQLLTRYPNPQKRIEAGFDKLIEIKRLTASKIQDILSVAPRSIGTTSPAREFEIIKHYKRLIDKAETCVNDLMAEFNSVITTVTGIGNRLGAVILAEIRNIHAFDNPAQLQAFAGLDSSIYQSGQIDLAGRMIKRGSPHLRWALIQAAKACARFSPAFKAYLKTKLE

SEQ ID NO: 353429 - protein, 373 aa, unidentified
MKYSTVYVGMDVHKETFSLCCYTNEKEQAEYPQKVDGHYSKVINYIEAMRFHYGDDALFICGYEAGCLGFTLYHQLTDHNVKCIILAPTTMLQQKGRKKVKTDKRDAALIARCLAHHDYSPVHIPTEQDEQTKEYIRMRGDHKLALKKVKQQILSFCLRHNYRFDGTTNHWTQAHLKWLRSLKPEGLYAEILQEYLLTYDNLTDKLERFDKRIEELASDETYQENIHKLSCFIGVKTVTALAVLTEVGDFKRFASAQHFASYIGLTPGEDSSGDDQNRLGITKAGNRHVRSLLVEAAQSYSRGQIGFKSKALKARQAGNSPEVIAYADKANERLRRKYYRMVLRNNKKTNVAKTAVARELACFMWGMITGNVA

SEQ ID NO: 353430 - protein, 350 aa, unidentified
MMIGVDYHPSFQQIAFLIEGTGEYEERRLNHSDGEAEKFYRDLQLRGVQVRVGMEATGYSRWFERLLAELGFEVWIGDPAEIKAKRVKKQKTDRKDAQLLLKLMMEDRFPRIWVPSPENRDVRQLLWHRHRLVQMRTRIMNQLQALAMNEGRRWKSKLWSEQGRAELEKLALAPWASRRRHELLELLDRMNPTIEELTAAAEQEARKRPEVLRLMTHPGVGPLTALAYVLIIGTPSRFHRGKQIGNYVGMIPSEDSSGGKQRLGHISKQGNSLLRFLLVEAAQAAARNNPDWRRRYIHLAMRRHKSIAKVAMGRRLGIRLYWMWRNGCEYSPSMEFGSYAGQLGTGHGVK

SEQ ID NO: 353431 - protein, 348 aa, unidentified
MSESKQYVGLDVSLKETSICVIDDVDKIVWRGQVDSTPGAIASAVRQHAPHAVRIGLESGQLSSWLFHELKEAGLPVICVDARHAKAALSLKVNKTDANDALGLAQIMRVGWYREVTVKGLDCQAERALLVARAQIVSQITTLKNCVRGILKTFGRVLPKGLRSQFPARVRAAIDGHPVLGTIIEPTLRVLEATRVQLRVYDKAVIQRARSDDTARQLMSAPGVGTVVALAYITGVEDPTRFKRSSSVAAYFGMTPRRYQSGEIDHAGRISKCGDGMVRGLLFEAAKVLLSRSTRPSALKTWGEALSKRIGAKKATMAVARKLAVILHRMWTTGTTFQWNAEAASPAT

SEQ ID NO: 353432 - protein, 340 aa, unidentified
MRTTIIGVDLATKAIQVCVYLNSKVLSNRELTPQQFSEFLRQQSPCVVVFESCSGSNYWAQYCRSIGHKAKLISTRLVCAIRQNQKTDKNDALAIVQAALLPEVHFVASKTPHQQQAQAVLRLREQCIKQKTALKNQLGGLLREFNFSVGRGESRLIGTIESILEDYENGLSFTFRTMLSKSLELYRQVCLTLESYNLALEEWIDETPDCKKLMKIEGIGLLNAIHLYIAMAEHETSEFKRGRDVSACIGLTPVQHSSGGKVKLGTIGKRKSTSLRSLLITGAMAVVQQVEKREAKTKKECWLKSLIERRGKKCAAVALANKNVRTAFAMIKNGTDYQLT

SEQ ID NO: 353433 - protein, 321 aa, unidentified
MVDVSSVAGIDVSKAFLDVAFGMDTPVQKFPNEPKGHRALARALATRQVTRIVMEATGGREHRVLRHLTDERLPAIRVNPRQVRDFARATGILAKTDAIDARVLVRFAAAVEPEHRPLPSLEQEKLARLYTRRAQLVALRTAEMNRLEHATEALITRTIKAVIKTLEQQIALVEAESAEVIAAHRQLERVYAILTSVPGVGPVTASVLMGSMPELGTLSRQEVAALAGLAPFNRDSGTQRGQRHIRGGRANVRTALYMATLTAARCNPVITEDFERLTKAGKMHKVAMTACMRKLLTILNALVRDDMLWGQKKASKSPQSP

SEQ ID NO: 353434 - protein, 351 aa, unidentified
MKRPALFVGIDVGSETFTASIGKFEEERGWQIVAKATSFENNYDAFIQFVYWLNNNQALAKDCIVCMESTGVYGEALAYCLVSNDYKLVIEAPLKVKRAFDPEGHKSDPVDSRQIAEYAYRFFDQLRYWRPKDVVIEQLKTLLTVREQLVEQRTAHKNANQAIKRKVVRTSLAEDVHKKAIKELKEHIKAVEKEIKRLIDDDPSSRELQRLIESVPGIGSILATFLVVTMYSAPEPYNPKALAAYIGICPYENSSGTSRNKRPTSRHYGPSPMRRLIHLAAMSVRQHSPVFKRYFLRKLAEGKHKQLILNNIANKLLKIVCAIARTRTPYIPGYRSIHPELLTLKQPLTVS

SEQ ID NO: 353435 - protein, 396 aa, unidentified
MKVLNCRYQTSINMSAQVEFPLLFDRCAGIDVHKESVVVTVKVNESPDQTRTFGTFTEDLISLRDWLTALGVRHLAMESTGVYWKPVFNLLEEHFAVMLVNARHIKYVPGHKTDCKDSAWIAKLLMSGLLKGSFIPPQQIREMRELYRYKKKLISQRVAERNRLQKILEDANLKLGNVVSDVFGKTGWAVICHLIDGQTDAAALASLAKGSLRKKIPQLISALNGRITDHHRFMLQTSRLALENIQQQIDRIDRRLDEYISHHTTEVELLETIPGVSKETVKGIVSEIGFDMSVFPTANHLASWAGVCPGNNESAGKKMSSRITQGNRSLKTALVEAAWSASKMKKGWLRNKYYALAARRGKKRALMAIAHKILVAVYHVLNSLSPFREPVLKIAS

SEQ ID NO: 353436 - protein, 423 aa, unidentified
MDKNDDSRLEEFRQLKREIRGSAQHLVVGIDVAKERHYAFFGTPAGKTLLHRLVFDNSKEGFEKLCFQTDILKTQHCLTKVVFGMEPTGDYHKPLGEYLIQKDHLVVLVGGSAVKNNRELLDGRWDRNDTKDAANVADLLTQGKCLFYEFASPPLQELRSLLSLQRRLKKQEQGYRVRTRNHLIAQYFPELDPYFGYSEGPAIVKWCLDPREITELPFEEFVRMVSSRNGGEKQRRRLQEIRQKAASSIGCEAHPSVAFEGRVLVEEVRHLQDLLRETQASIRVVCHHFPEYFFLLTIPGFGPDISAKVLEAIGNPHRFENHRQVLKLAGLDLSAERTGKKQDVTPVLSKRGKADLRYGLYQAAFVASTRNRQFMTYFTNKLKGREREKGIGTKMRVKLAAKMLVIAWTLMKKKEKFDPGCIA

SEQ ID NO: 353437 - protein, 342 aa, unidentified
MDHFAGLDVSVKETSVCIVDDTGKIVREVKVASEPEALLAVLKNPAYHFKRIGLEAGPLSQWLYSALAEAELPVVCVETRHMQAVLKAQINKTDRNDARGIAQMMRVGLYRPVHVKTLRSQKLRMLLTHRKLLQSKAIAIENDLRGTLRNFGLKVGMVGTVKFEGRIKELVENLPDLAILVEPLLIVRRALREQLVILHRRLLVIVRDDEVCRRLMTTPGVGPVVALTYRATVDVPARFRKSKSVGAVFGLTCSKYQSGEIDRSGRISRCGDEMMRVMLYEAAQSMLRSKKWSWLKAWAMQIARRRGMKKAIVALARRLAVIMHRIWVDGTEFRWTREAAAA

SEQ ID NO: 353438 - protein, 381 aa, unidentified
MSEITRGTMSAIVRVGVDLAKQVIQVHGVDSAGRRVVGRTLKRDQFAAWAAQLPPGCVVAMEACSSGHHWARRLRAMGLDARLIAAHFVSPYRMEGKSGKNDATDAAAICEAASRPSMRYVPIKSCEQQGVMSLHRIREGFKEERTACINRIRGVLAEFGLVFSKSPKALRARLADVLEDADNELSGVARLVLQRAFEHWRDLDEQLRWCDRQVGLHVRGSADARRAAKITGIGELGASALVAGVGEFRQFRGGAQLGAWLGLVPSQNSSGGKASLGGITRRGDEYLRTLLIQGAKSAVMSAAKRNDPTSRWLVQLTARVGWQKACVAMANKNARIVWAVMTREQGFDPQHVSVKPQAKLPAKALQAQHAVTIPELAGAPA

SEQ ID NO: 353439 - protein, 346 aa, unidentified
MFIVGCDFHPSWQQVAWMDAETGDAGGEKLVNGNGEAERWYRQLPVPSLIGVEATGNSQWFIELLQQLGHEVWIGDAAAIRASYVRQQKNDKRDAAHLLKLLLEGRFPRLWVASSEQRDMRQLLIHRHKLVQIRSRVKNGLQHLALNRGLQKKSRLWSAAGQKALRELPLEGWAQCRRQDLLQLLAYLEAQIVPLERAVEQAAERDPQARLLLTQPGVGPITALAFVVTIGDVTRFPRGKQVASYLGLIPREHSSGGRQRLGSISKQGNCFLRMLLVEAAHSVTRLDEGFRKQYQHRCHRKPKGVAKVAAARKLAVRLYWMLRTQTPYPEIVRIESSPRVPLAGAS

SEQ ID NO: 353440 - protein, 438 aa, unidentified
MGSYAGVDWASEKHDVLIEDELGEELFAGSFAHDEAGLRSLCRALVRHDVQLVAIERPDGLLVERLLDAGLRVLALHPNQVAATRARFRAAGGKSDRFDAFVLCELARTDSHRFRVLEPDSDQTKALRALTRAREDLVQARTTLSNQLRAELERFWPGPIGLFSALDSPISLAFLKRYPSPKDARSLAAKRMQAFLASQHYSGGKQPSELVAKLRCAPDGRAGEQETDARRTIVLSLLAALLPIVAQIKTLERQITTALREHPDGEIFRSLFKGPDSVVTAATVLGEIGDCRARYPSGDALAGDAGQGAVAVESGKRKVACFRWACNKRLRDAFCTLADSTRHWHPWAQALYADALTRGHDHPRATRSVGRAWCRVVWRCWQDRTPYDPARHRALQQRLTVIIPATAGPVLDHLATARMAAGLLATNPADSPKVSASQ

SEQ ID NO: 353441 - protein, 344 aa, unidentified
MEPMYYIGLDVHKRKISYCVKDGSGQLHSEGWLPATRLDLDRWMKTLPQPWSAAMEATMFTGWIYDHLKPYAAQLKVAHPLMLRAIAAAKKKNDRIDAGKICDCLRCDFLPECYMAPTAIRERRRTLRYRNLLVRQMVQMKIKISSLLMEAGVSYNKQQLHKAGYFRELLASNPDIDDSLRSLLRQCRETVVRLGKTEGTLIRSLQQDRLLAERVQRLMSIPAIGPITALTWALEIGEVQRFSSIKKAVSYCGLCGAEKSSGNMVQRTPLSKQRNKHLQTTLIEAAKMAPRYSPTLAMLYDREKLRGNANRATLAVARKLVAYLLAVDRGQTHFLVVDRETCAA

SEQ ID NO: 353442 - protein, 322 aa, unidentified
MCKIIGIDISKQTFDVGFNDGSNWHHLVLDNNEKGFKRLLKVLSNNDWVVMEASGPYYLKLATFFYGKGYNVCVLNPLIIKRYSQTRLIRAKTDKKDAQTIAEYGAQYRLKQWKPEPTNISKIKQLYTVLELLNKEVHQSERQLEALTATGVMDKDLKSILQGIVSYLTCKRNKVEKQIEEIAQSVYKSTLDRLKSIPGIGTKTAIMLTVITGNFENFETHKQLIAYVGFSPRIYQSGTSVKGKGHICKMGKSQIRKLMYLCSWSAKRCNKDCVDMYERLLEKGKPERVIKIALANKLLKQAFSIAKNKTYYDENFNKKTCF

SEQ ID NO: 353443 - protein, 316 aa, unidentified
MSASPLFVGIDVAKAELVVALGPSGDLLTATNDESGIRQVLEHLQAASPALIVLEATGGYETAVVAALAAAGLPVVVANPRQVRAFAKAMGILAKTDNIDAHVLALFAERVRPTIRPLPDEALRMLDALLTRRRQLIEMLVAERNRLAHALPPVEKSLKQHIRWLERRLADVDSDMDQAIQQSPVWRAKEDLLRSVPGVGPVVSRTLLADLPELGALNRKQIAALVGVAPLAKDSGTLRGKRMVWGGRAPVRAALYMGALIAARHNPVIRDFYQRLVAAGKPKKVALTACMRKLLVILNTMVRNNTRWGERYALSA

SEQ ID NO: 353444 - protein, 370 aa, unidentified
MIKSVVYVGLDVHKDSITVAFAREGREPAEEWKAVPYDGTRLLKSLKMLTRNGETLKVCYEAGPTGFGLCRRLREAGVDCCVVAPSLVPGKPGDRVKTNRRDARKLAHFLRSGDLTEVHVPDEAVEAVRDLERARGDAKCAERVARHQLGKFLLRHDRHWDGKAWTQKHLNWVRTQKFAYPAQQSVLADYLKAVEDLAERVASLTAAMEKLVEETVLAPLVKALQAFRGISVVSAVTIAAEVGGDLRRFATAGQFMSYVGLTPSENSTGEHRRQGRITRCGNGHLRRILVESAWHYRHAPAIGLELRRRNRGVADGVRRIAWEAQKRLNKRLYHLLHAGKSSQKAVVALARELAGFIWSVGQEERLLAAS

SEQ ID NO: 353445 - protein, 313 aa, unidentified
MRFYTKQHRNYCGIDLHTNKMYVCIINQDGETVFHRNMKAEPEIFLRAIKSFRDDLVVSAECMFAWYWLADLCEHENIPFILGHALYMRAIHGGKSKNDRIDSHKIAALLKGGLMPMAYVYPRKMRATRDLMRRRNHFMRKRAELFAHIQNTASQYNLQDPLGRIAKPKNREGVIERFDLPCVQKSIEANLAMIETYDRVISSLERDIIQSAKNHDPVSYALLKTIPGVGRIIALNLLYEIESISRFPRVQNFVSYCRLVKCAKESNGKKYGSSGKKIGNAHLRWAFSEAAQLFLKCNEPGKKYLQKKNQQVR

SEQ ID NO: 353446 - protein, 346 aa, unidentified
MSHYVGLDVSLKEVSICVVDAGGEVLNRASVPTEPDTIAEYVAQNAPSAERVVHESGILATWLTRELERRGVPITCIDARMAHKALSARLNKSDKADAEGLAQLARTGWFTKVHIRSEASDRVRTLVAARERLIRMRKNLEAHIRGVLKTFGIRMGPVLRAHHRQGFRDQLAEAGACDPMLGLLAQTMIPIHKTLCASAEALGDELMHVAKQNTLARRLMTVPGVGPLVALNFIATIDDANRFRRSTDVGAFLGLTPRRYQSGEIYRSGRISKCGDAEMRRLLVSAATSLMTQVSRYSPLKSWAIRLSARKGFKKAAVATARKIAVILHAIWRDGTEFNWTKEPLT

SEQ ID NO: 353447 - protein, 388 aa, unidentified
MDAVVIGMDPHKRSATIEVMDAGEAVAGGGRYATDVAGYRAMLAFAKRFPQRTWAIEGCSGIGKHIAHRLIADGEQVVDVPPKLSARVRVFATGQGRKTDATDAHSVALVGTRMTGLRPVVDDEQLAVLRVLVDRRRALGEDHTRMVSQLHQLLLELIPGGAKKDLSAAQAKALLAKVRPRDAAGKTRRRVAAELIGDLERIYARKKAANKELNDLLAATGTTLTRLHGIGPSGAARLLVEVGDITRFPSKAHFASWTGTAPIDASSGDQVRHRLSRGGNRQVNKLLHIMATVQLRNPTEGRGYFDRKKAAGKTSMEAMRALKRRLSDVVYRQLLTDATRPSRTGPGGHSGTSLKSSVADSHPDIDTSDQSLPGPATTKPRTAVVVAS

SEQ ID NO: 353448 - protein, 415 aa, unidentified
MALKIVYKICCGIDVHKTFVVACIASTNDKGITSYESHRFSTYTSGLKTLLQWLLDRDCKDVCMESTGKYWIPVYNILESDCSIILAHPKYVKAIRGKKTDKKDAKWIADLFKHDLVAGSFMPPADIRQLRDLMRYRFKLTCFKSSEKNRLQNCLTVSNIQLGNVVSDTFGKSAQAILDKILENPADTSFDLEPLVFKSLKKKLPELRDAIDGYITPEQAGKLKVIKAHYENLESRKAELEELILALAAPYQQELTILQTAPGISSPFTAIGIISEIGTNMEAFPSAKHLCSWAGLTPTNNESAGKKKSVRVSKAGCYIKPLLVQCANAVVASKKHPEIRNRYLRLKKRRGHKKAIIAIARMLLTALYHMLKNGENYNAELYQKSDLLPVDREITVEQALMIARNQGYKIKSATA

SEQ ID NO: 353449 - protein, 346 aa, unidentified
MEHYAGIDVSLEWSSICVVDALGKIVKEAKISSEPATLVAFFEALGFAVKRIGLEAGPLSQWLHAGLKRAGFEAVLLETRHVKAALSAMTVKTDRKDARGLAQLIRMGWFRPVHAKSIRSQEVRALLVARKQLLGRLIDVELSIRGILRGFGLKVGPVTRKGFEARIRELVTGQATLERIAGAMLSARVALKAEYERLHKTVLAIVRDDAVCRRLMTVPSVGPLVAITYKSAMDDPNRITKSKAAGALFGLTPRKYQSGEKDVTSGITRAGDEMVRTALYEAANVLLSRITRFSKLKRWGIDVAKRRGSKRAKVALARKIAVILHRMWVDGSTYRWTEAQPIAAQA

SEQ ID NO: 353450 - protein, 347 aa, unidentified
MSDITIVGLDLAKNVFQVHAENEQGEKVLNKQFSRKKFREYITNLPPCLVGMEACGTAHYWAREVIAMGHRVKLVNPRKVKAFVERNKNDAKDAEAVCDATRSKKVRGIPVKSLAQQDLTMMHRARSQLVRRRTQLVNHLRSQLAEYGLITKRGFAALECLVKAILAGEHLEPSQELSFVLVDQHEEWLKLNQRIKAHDAQIRRVAKTNKTAQKLLDMPGIGEITATALVAKVEDFNVFKTGRNFSAWLGLTPKESSSAQRRQLGKISKQGDRYLRTLLIHGARTVIMTTLKKDKRENAYHRWIHHLVNRIGKNKAVVALANKHARMIWAVVKHGRTVDLNFSGSLS

SEQ ID NO: 353451 - protein, 336 aa, unidentified
MQVKFIHFAGIDVSKMWIDVCVLINGEKSIFHQQRFEQSKQGFAELKKWLIKLSESHMEQLLICVENTGLYDDAVLYFLADKGFRVCLENAAKIKASIRDRRAKNDQLDARNIAIYALKHADELEEWQRPREVVEQLKQLLASRSTLVGHLTSIKQSQKEVQTFKWAKLKKTKDYQGGIKGLQKDIEQIEADIWELIKSDETLYKMFALLVSIPAIGKITAYHFICYTNEFKRVKSGKNLSSYCGVVPFKQKSGSTLDKPGRISHEANKVLKKLLHLCAVTALKMKGEFAAYYQRKIAEGKQSLKVINAIRNKLALRIAAVIRNEEPYNEHYIYQP

SEQ ID NO: 353452 - protein, 461 aa, unidentified
MGRARAKRIPAKVVEDEEYQLTHERTCGIDIAKDKADIAVRLPPERGGGRRTTRTWALPSTFAAITGLGAELAAAGVELVVLEATSDYWRSWFYLLEAMGLNVRLVNPSHARQLAGRPKTDKLDCQWLARLAEMGLLRASFVPPPAVRALRDLTRTRLHLARDRTREWQRLEKLLEGALIRLSSAVGKMAGNQSALRILQAIADGERDPAVLAALAHGNVKGGRDGIRAHLEGMMPGEHHIELIRIHLRVITMLDRETRRIDDLIAAHAEAMEDAWGVTADGVPSPRPGTDAAVPAAAQRLAEIPGVTIELAISIIAELGLDMTCFPTAAHLASWAGLSPVSQQSGKQSKKAKKGKGDAYLKGYCTQASLGASSTATFLGERYRRLARRIGGARAQVAVARSILVIIWHLLSDPTARYQDLGPDWHLRKTDRARRTRSHLQQLRALGYDVTLTPADAATAA

SEQ ID NO: 353453 - protein, 485 aa, unidentified
MKQTKSSPCGRAIPAHGGQLSRKERRELARQVQSEQVTLQIVHSNAAGIDVGKNTHYVAVPPDRDAESVRYFDSCTDGLQQMVAWLKKCGITSVALQSTGVYWIALYDLLQEADFEVYLVNARYTKSLPGRKSDVQESQWLMKLHTYGLLPNSFRPPQEIRCLRSYWRQRQNQVRSAASCIHRMDKVLTEMNVRLSSAVTDLSGATGLAIIQAIVDGERDPHELAAYRDPRVKATQEEIARQLHGNWQADLLFRLKQELQGYRFYQTLIAECDQELAQLLRAFPDRSAGVALPEETRKNRRKKKRGNSPQFDLRQLLYLMSGVDLARIDGIDVITAMTVVAEAGYDMSPWPTADHFVSWLRLAPDNRISGDKIIGKGRTPTQNRLSQALKMAASSLKASKTYLGAQFRRLRARRGPAIAVKAMAAKLARLVYNMLRHGMEYVDRGTEFYEQQQRERRLHALTKNAAQLGFQLVPTELSLAGTGTI

SEQ ID NO: 353454 - protein, 318 aa, unidentified
MSHGYDKFVGIDVSKDGLDVHGLPDGSPSRFDNTAAGRAKLLSLLPQAGACLSVVEATGGYERDLVAEAVTAGHHIAVVNPRQVRDFAKALGLLAKTDRIDASVIARFAETTRPVPKGYDERQEQLRELIVRRRQLLDHRTAEKNRSEMAHSSLVRKSVLKLIETLNKDIQRIEKAILQLVESNDDWRERFEKLKGVPGVGGQTAATLMAELPELGQLNRQQVAALVGVAPFNRDSGQFRGRRAIWGGRQSVRNALYMAALSAKKHNPVIREFAARLHAKGKPPKLVLTACMRKLLIILNAMLQSGDSWSPRVATLTP

SEQ ID NO: 353455 - protein, 421 aa, unidentified
MEEITEEPVALVERVAALDIGKATLTACVRVPHDAKPGARLQEVRTCTTTTRSLLGLRDWLVCQGVTRVVMEATSAYWKPPFYLLEDDIAECWVVNARDVKNAPGRPKTDKLDAVWLAKLAERGMIRPSFIPPRPQRQLRDLTRYRRTLTHERTREMQRAEKLLEDAQVKLSSVISNIFGKSGRDMLDALIAGQRDPYVLADLARGSMRGKKSILAEALTGHFTEHHAFLLAMMLARIDALTAQINTLTARIEQAVAPFARQVAQLDEIPGIGILGAQEIIAEIGTQMSRFPTAGHLVSWAKFAPKARQSAGRAKAATTGEGNPWLGGTLGEAAISATHTSTFLASRYRRIVKRRGKKRALVAVGNSILTIAWHLLSDPSARFTDLGPTWHDHLAPLRRKRQLIAELERLSGMKVTLHQAG

SEQ ID NO: 353456 - protein, 348 aa, unidentified
MKNIAIGIDFSKKSFDATIIRVEDQTYSVVAYSKFENIKAGFREFEKWVSKSLKPCPEAKDKSHLLFCGEHTGPCSLGLCDYLASKKYFMWLESALVIHRKSGIIREKNDKVDSKRIAEYALRNFTTEVAPYEVDSKDLKKLKSLMSAHSMLSKDKVSKTNQLKSGTLDDSPVAVKLIERQLRETEEALAKIDREIAALRKKSEEFAQNFEILDSFIGVGPITIAYLIIKTRNFKDMTDLRELGCYIGVVPYRCQSGTSIDKAPRTSRYRDAEGNALLTTCALSAIRYNNPIIRPYYERLVARGVHPNKARNNCKAKIINVLLAMIRNRTKFSLVIHGKAKAQYMIPA

SEQ ID NO: 353457 - protein, 399 aa, unidentified
MLETIPLEVRVSVDIGSHQHRVAIGLSSGEVLEEFNMLHRAEGFDHFFARIATYEQQYACSVAVAMEGFNGYARPLDTMIRARDYRLYNINNLKLARFKEIFPGAAKSDALDARKGLELFQLRDHLPLAKDVLQEVAATPEENDILKRLTRRRRYLVREKGRVLNRLQSDLQAVCPGLLEITNDAGNLWFLRFLTSRPELTQLARLRRASLLKIRGVGATYAGAIQAWQKHAVFSHEVAWVGEMIQADAARILELLGQIKALESKIDAVAQESSVASILDSIPGFGRVCSAELAGEIGTIERFRSDGSLGLYIGMSNLDNSSGKFQGSKAPKHVNTRAKAAMMIAVDRHRKCVPESQTYYEKKRAEGKSHNQAIRALGRHLCRVIYKLLKEERDYEIRD

SEQ ID NO: 353458 - protein, 411 aa, unidentified
MEIVHTRCCGLDVHKKTVVACVLISQADGLIERQVRTFKTMTADLLALADWLCSLNVTDVALESTGVYWRPVYNVLEDDQRTLLLVNPQHMRAVPGKKTDVKDAEWLADLLRHGLLRASFIPPAPIRVVRELTRYRKTLVQSRADEANRLQKTLEGANLKLASVATDVLGMSGRAMFAALIEGERDPEVLADLARGKLRAKLPQLRQALVGRVQPHHLVLISQVLAHIDFLEEAIAQVQVEIDRCLPPFDEALELMQTIPGIKAVAAAAILAEIGPDMSRFPSAGHLASWAGLCPTNKQSAGKRMKGPANHGNVWLRAIMGEVAWASIRTKASYFYAQYHRLARRRGKEKAAIAVAHSLLVVIYHVLRTGQPYKELGVDHFDRLDSARVERHHVRRLEQLGFTVTLTPTAA

SEQ ID NO: 353459 - protein, 338 aa, unidentified
MQVTTLGIDLAKTVFQLHGVDARGHAVLTRRVKRSQLVDAVASLSPCVIGMEACASAHHWGRVFEKLGHTVKLMSPKYVKPYVKTQKNDCRDAEAICEAVSRPTMRFVAIKTVDQVDLQAVHRSRTLLIKTRTALINQIRGLLGEYGLVIARSPEQVRPALVRLVDEEQTALTPFARETFSELYEQLVDLEQRIAKVTQRLERVFRGHPVCRKLAAVPGVGPLTATALLAAVSRPHVFQNGRHLAAWLGLVPRQCSSGGHARLGGLSKRGNRYLRTLLIHGARAVVQRAAHNTDAQGRWLWTLKCRKGTNVAAVALANKNARVIWALLAHDDVYRRPA

SEQ ID NO: 353460 - protein, 345 aa, unidentified
MELHTIGIDLGKTVFHLVGLNLRGEVVVRKKFSRTQLLRFTANVHVGLIGMEACGGAHFLGRALREQGHEVRLIPAQYVKPYVKTNKSDYIDAEAIAEAVARPTMRFVPIKTDDQLDLQSLHRVRERWVMRRTAVINQIRGLLLERGITLRKGRCHVGAALPGILEDADAKLSGALRMLLAQLKLELDHLDRRIDEADALIKKTACENEACQRLVAIPGIGPVTATAVIAAIGNGAAFHKGREFAAWMGVVPREHSTGGQQKLLGISKRGNSYLRRLFVQGARAVIQQRTKQSSSLSAWLAQLTLRTHRNVAAVALANKLARIAWAVLAKNEPYRPPVLANVAAA

SEQ ID NO: 353461 - protein, 353 aa, unidentified
MTYYAGLDVSLEQTSLCVIDDAGAVVLERRVATEPEAIATALAALPERPARVLLETGGLTPWLWHACLAPRADRGGRPGAASGARGLVMHCIDARRAKAQLALRPCKTDHNDARGLAEIARMGWYANIRVKSLDHHALRAKLAARAELVATARDLGNQVRGFLRSFGLLVGKGKGQFESRVVTLLASCPALEPVADALLAARRAVLAEVEHLDRVLLREARDNATCRRLMTVPGVGPITALAYQSTIEDPLRFGRARDVGAYLGLVPRRHRSGEVDRSGRISKQGDALLRGYLYEAATVLISRLQRPCALRAWARALAERIGVKKARVALARKLAVLLHHLWRHQEDFRWASA

SEQ ID NO: 353462 - protein, 314 aa, unidentified
MSELAVVVGIDVAKARLDLAVRPSGEQRQVSHDASGIAEVVSYLQELAPQVIVLEATGGYEVPVVAELGTAGRAVAVVNPRQVRDFAKASGRLAKTDRLDAQVLAHFAEALHSVPRPLPDAQGQELAALVERRRQVVALRTAEQNRLGTTRTPAVRAHIQAHLEWLDADLRALDDELQRRVKASPLWQEREALLRSAPGVGPIVSLTLLADLPELGRLSHAQLAALVGVAPLNRESGIWRGRRSVWGGRAAVRAALYMGTLRATRCNPVIHQFYERLLAAGKAKKVALVACMHKLLTILNAMVRHQTPWQAQAT

SEQ ID NO: 353463 - protein, 338 aa, unidentified
MTQAAPISSIIPRDYDIFGGLDVDKKSMAVTFRDHGTMRKSLKLPYSASQLLNYTRKHFPGQRVAFVYEAGPTGFGLHDELTAASHPCLVVSPAKVPTAPGQRVKTNRLDSNKLSEGLRGGQLRSIHVPTQSYRELRHLVQLRDTQVAQLTATKCRIKSLLLYEGIPFPAANGRWSGQALRQLEALPCSAAVRFKLDRLIDALQFHFQSAAVVQKEIRRFCQNDPELKQCLSFLTSLPGIGSITATHALARLGDWRQIENVRSIAGFLGLVSSEHSTGDQENRGSITRSGDSRLRNKLIQCAWVAINKDPELRAFYRRVYERHPRKVAARKSHCGRSS

SEQ ID NO: 353464 - protein, 346 aa, unidentified
MTMVGGFDVHRKQITFDYVDDDGLVRWGQIRPATRAVLRGWLGEHCPESDAEFALEGCTGWRYVSEELAAAGVVAHLGDPAEIAGLRGPKKRAKTDRADARLLRTLLLEGRFPESWVPPAQVLEVRTLGRLYCTLMDERRAWQQRIHAQLFHQGCPPITALLSAAGRDALASAELSAAGRQYVDTALRRIDELTAEIDPLRTQLVNFARHQRGCQALQARQYGIGWLCAAIIWAEIGDARRFARSDKLVRFAGMDVTVYSSDGKRSPGHLSRQGSPELRWATFEAAKCAARRGSPDYAYYHKLAARPHSGKNPTLAVERKILRRCYHILRELGDAALAFPPQQVAA

SEQ ID NO: 353465 - protein, 389 aa, unidentified
MFYLGIDIGKNTHVASLVDDKKKVIFKAFSFSNSIDGAESLILKLIPFKNKLEIGMEATGHYWLSLYSYLVEKNFTVRVINPIQTDGWRQGIEIRKRKTDIIDSLLIADLLRYGDFVETSLSNEDYLSLRNLSRFRSYLVSSIGDLKRKTIALLDQVFPEYASSFSNIFGKTSKEILSNFSTPSDFEDINSDDLNTFLESVSRKNYASKKINELSKKASSSFGINFCLDSFSLQIKMLIEQISFIQNQVCDVENEIEVLLEKLNSPITTIPGIGSVNTATILGEIGDIKRFSNPSKLVAYAGLDASVSQSGEYESTYNHMSKRGSPYLRRALFQSALRAEFCDPVFSDYYQKKISEGKHHLVATNAVARKLCHTIFAVLTKNEPYQVQS

SEQ ID NO: 353466 - protein, 456 aa, unidentified
MAGSQQKKRKLSAQVVEDEDYQLRYERCAGIDVAKASGVVCTRLPAQRDGGRRVAVTETVAATVPAIAALAGRLAAAGVELVSMESTSDYWRVWFYVLEAHGLAVQLVNSAQARQLTGRPKTDDLDAKWLARLTEMGLLRPSFVPPADIRQLRDYTRARVHLVQDRTRQYQRLEKLLEGALVKVTAVTRLTTASAKDMVRAMIAGERDPRTLAALARTRLKARHEDLVAALTGMRFTDHHAHLARTLLNLIAYLDEDIAILEDKIAACLDAIPAAQGVDADGTAGGVGPDPLVLPAVWRQAEIPGLTTELACQVIGETGLDMSRFPTAAHLVSWAGLAPVANQSGPRTRKGKKGQGDSYLRGFCTQAATGAALTDTFLGERHRRIARKRGPGRAKVAVARSILIIIWHLLKDPETRFTDLGPEHYASRTDKDKKTRNLIRQLNALGLDVTITPQAS

SEQ ID NO: 353467 - protein, 312 aa, unidentified
MTSSVTPTRFIGCDVGKRSITVFDSQTQRSFAVANTAGALRAFAKRLDPCCLVICEATGGYEGRLLASLVAAEVPAHRADARKVKAFIRSFGTLGKSDKIDAKGLSRYGAERHARLGRWQPRDEDRLSLQTLVLTRQDLVKSRTAFQNRLVAPQSQAARPYLRAVLAKLAAEIAKIEARIEELERDSAPLRQALKILIGIVSIGTTTASALLALMPELGTLNRRQIAALGGLAPHPNQSGEQERYRRTRGGRHAVKDALFMAALSASRYHPTLSLLYQRLVQRGKKQIVALAAVRRKLLIIANAKLRDAMAV

SEQ ID NO: 353468 - protein, 485 aa, unidentified
MKGKQPEKARRAKEGNCDSNHKKWHEMNRKQRREVMRKIQSEEISSAVVHPHAAGIDIGNEAHYVAIPPGRDNQPVRRFGCTTAEVKEMADWLKQCGIRTVALQSTGVYWIAVYDILEEAGLEVYLVNARETKNLPGRKSDVQESQWLMKLHTYGLLRNSFRPPQEIRTMRTYWRQRHDLVRAAGRHIQRMQKTLTQMNLQLGNVLSDISGRSGQAIIRAILKGERDSHELVALCDSRVKASEEEIVRSLEGNWQEDLLFVLQQEQNGYEFCQKQMAECDQRLEEYLQKRADRSWGKTLPEEKRKARLKKKQGNAPQFCLRGEMFRMTGVDLTQIDSIDIMTAMTILSEAGWDMSKWKTEDHFVSWLRLCPDNKVSGDKIIGKGRLPITNRVTIALKMAASTLRTSKTYLGAQFRRFRTKLGAPVAIKAMAAKLARLVYRMLRYGMQFVDRGAEFYEAQHRKLQINHLKWKAAQLGFQITEVLAA

SEQ ID NO: 353469 - protein, 365 aa, unidentified
MITIGVDAHKHAHMAVALDERGRVTGQWQGENSAAGWDEATRWARALGNERRWGIEGSGGYGRGLAQHLVGLGEVVYDINPRLTATERRRSRRMDKSDAFDARAIAQVVQREENTLPCVAAEDETAALALLTSEREDAQAEATRLRNRLHHLLLQLDPEYHLHLPALTSVAGVRAAAVYTTTSGSLVQQERAAVVRRLAGRLLLAMEQVAELGGQIEALAQARYAPLTRLCGVSLLTVGSLAGILGPGRRFVSEAQLAAYAGVAPLETSSAGRVRHRLNRGGNRRLNAIVYRIALVQARCSPEAKAYLARRVAEGKTKREAFRALKRYLIRAIWRLWTECVALTVPPLARPQAPRPLLVSGGAVA

SEQ ID NO: 353470 - protein, 341 aa, unidentified
MKEYIGLDVSLKETAVSIRRNGKRMWRGKCASDPKVIAELVRKRAPAVELIVFETGPLSVWFYHALIQEGLPAICIDARHAAGALNMAPNKTDANDADGLAQLAEIGYFKSVRVKGFDSMLARTLITVRTRLVRMTVELSNQIRGIMKTFGLIVPAGQGNVFDQNVCRLLDDQGELATIILPVLAVWRSLRERTAELSRKLVADARRNEACQILMSIPGVGTITATAFMAAIEDPDNFRKSRSVAAWLGLTPRRYQSGEVAYDGHISRRGDKPLRGLLYEAAIVILTRSFAHSGLRTWGLKLKEQIGFKRAATALARKLAVTMHAMLKSGEFFNPSIGAAA

SEQ ID NO: 353471 - protein, 355 aa, unidentified
MDSKKYIGMDVHKESISIAVRNGAGKIVMESVIETKASMILQFIDGLRGDLQVTFEEGTSAAWLYDLLKPHVTKLVVCDPRKNVSMREGNQSDKIDARRLAELLRLNHLSAVYHGEHGLRSLKELVRSYLTITKDLGRVMSRVKAIYRSWAIACTGKQVYAPRHRAEWLGKIGEPGVRRRAEFYYQQLDALRTVRQQVRRELLAEGQRHPAWKRLCQIPSIGPIRSAVLLGILQTPHRFRTKRQLWTYSGFGIETQSSADHRSVGGQLERAKKQVSIRGLNRNCNHDLKNLFKGAAIVASSKPGPFQEFYTALLTKGIRPEMARLTLARKIATIVLIVWKRGACFDAQHLKPQTA

SEQ ID NO: 353472 - protein, 315 aa, unidentified
MHHPLPQTAGIDIAKDQLDVCLYPDGATRRFPNDAKGHRVLIAWLAAYSIQRVVFEPTGAYHRVLERSLASAGLPLAKINPRHARRFAEALGQLAKTDRLDAALLARFGALLEPPSRPVLSPTLEAMKELLVARQALIKDRTAALNRQKIVRAPLLRRQLDQRLRQIARHLAAVDAQLQSLCRGDADLAPRLAILMSIPGIAQATALSLLIEMPELGNLDQSQVASLAGLAPVARDSGTSRGRRTIRGGRAHVRQALSMPALVAARFNPDLKAKYQALLGAGKPPKVALTAIMRKLIILANALLRDQRHWTPKPA

SEQ ID NO: 353473 - protein, 386 aa, unidentified
MPQLNDLSRSLVTLEQDATLIAVIEMGQSSWLVAGIVPGVERSPLKKLAVDESALLKLLNRWREEAEKAGHRIERIAIAFEAGRDGFWLARWLRARDIETHVIHASSVAVSREHRRAKTDRLDTELLKRAFLGWLRGERNHCKMVAIPTLAQEDAKRPNRERESLVGEQSRIVNRMKAALARLGIRGFNPKLKKAVERLDGLRTPEGEPIPPNTLAELKHDMERRRLVRSQIRDIEGARLERLEQAPGDGPHVMVRLLARVIGVGVETADMLVQEVLSRNLRDRRAVARYGGLTGSPDESGKKRREKGLARSGNARVRRGMIQLAWRFLMFQKDSALAHWFYARTKNAPQTRKTMIVALARKLLIALWRLVREGAIPEGIVLRPAL

SEQ ID NO: 353474 - protein, 519 aa, unidentified
MGAWWQLFWLGSSLAQARAGSWKARPRWGECEFNPHVGRANHCCVKTIKAIMKRKSRGAKKQKVSPFDGELKLIEPDAAAIDIGSRSHWVAVNPQRDREAVREFGAFTTDLMRLADWLEQCEAKSVVMEATGVYWVPLYELLESRGFKVYVVDAHTVRHLPGRSKSDVKDCQWLRRLHSYGLLRGSFRPPAQIRQLRNYQRSCAKIVEAAAQQQLRMQKALTLMNIQLHHVISDISGLTGLGIVRAIVGGERDPKQLVKLRDPRIRASKETIQKSLEGNWQEELLFDLKIALESYDHFQGQIAAYNEQICRELREVPSKVDVVREPLPAGRPKVCHKRPGMSQQDQLDLRQELYRISGVDLTRIDGISLQTAQKVFFEIGTDVSAWDDEKQFSSWLGLSPNHRISGGKVLKRSSRKVVNPLSVGLRLAARPLRNSHSALGANFRRLIAKIGMPKAITAMARKLAVLIYRMLKYGTQYVDKGMEHYEAKYRETKLQYLRSQAAKLGMALVPNLEAVSAAL

SEQ ID NO: 353475 - protein, 408 aa, unidentified
MHTDFQYFVGIDWGSEKHRVCLMNAAGNVLAERWVEHSGSSLAELVDWLRQQSSAAPQALAAAIEIPRGAVVETLVEQGFAVFSINPKQLDRFRDRYSPAGAKDDRRDAFVLADSLRTDPHCFHAVRLDEPAMIRLRELSRLEDELAQEFSRAANRLREQWHRFFPQLLQLSEAADEPWLWELFELAPLPAKAARLTEARIARLLQQHRIHRITAAQARAILKTKPLTLAPGAREAAAEHALLLLPRLRLLHQQRSDLARRIGALLKELTAPAEGQTEHRDAAILLSLPGLGRKVAATMLSEASQAIAERDYHALRCYSGAAPITRQSGKKKSVLMRRGCNERLRNALYHWSRTSVVWDQASKNRYAEMRACGHSHGRALRGMADRWLKVLISMLRHGTLYDPQYSVA

SEQ ID NO: 353476 - protein, 345 aa, unidentified
MPIVGGLDIHRKQITFDYLDTVTGQVQRGQVSPAGREHLRAWLARFAGREDVAFAVEGCAGWRYVAGELAAAGIEAHLAEPADTAARRGRKRHAKTDKTDARHLRMLLAEGRLPECWIPPGHILECRALLETYHDLRREHTAWVQRIHAVLFHQGAPALGVGTLRTGQGVAALRAAADDCLSPAGQLQVATALEVIEALEARMHVVRHQLTDAARHLTGARVLAARLYGVGPFAALALTCWLAGAGRFSSSRKAVRFAGLDVTVWSSDRKGPPGKLSRQGPPVLRWALYEAGKAHARASAPDHAYYAQVKDRKNSKRAALSEARKILRQAHHILAELGDDALAAA

SEQ ID NO: 353477 - protein, 399 aa, unidentified
MAAPSLWAGIDAGKLDHHCVLIDASGERLLSRRVRNDEAPLTALIDDVIALADGGLVQWAIDLNAGGGALVISLLLARDQHLLYIPGRIVHHASAAYRGDGKTDAKDAAIIADQARMRRDLPEFRHRDEFTVELRTLCARRTDVAADRNRAINRLRAQLLEYFPALERAFDYSHRKGALILLTGYQTPEALRRIGRTRLEKWLRGRNAYNSVAIADRAIAAANAQHVVVTGQRLGSTIVARIAQQILDIDAELSDLDDMIEERFSQHQQAALIRSMPGFGPLLGAELVAATNGGLDSFHSADRLAAVAGLAPVPRDSGRISGNLKRPRRYDRRLLRVFYLAANNSIKTCPQSRAYYDRKRAEGKHHRQAILSLARRRVNVLWAMQRDNTAYQSTAKTAA

SEQ ID NO: 353478 - protein, 347 aa, unidentified
MRYYTEQHQYYCGVDLHARTMYVCIVNQADEILSHREIPTKADLFLEKLAPYREDVVVSVECIFTWYWVADLCAAEKIPFVLGHALYMKAIHGSKTKNDRIDSKKIAKLLRAGMVPMAYVYPKPMRSTRDLLRRRMHFVRERADLLTHIQQTNYQYNLPKIGKTLKYKGNREGVAERFEDASARKTVEVDLELITYYDTIIRKLEWHLVRSAKAHDPQALHILQTIPGIGKILSLVILYEIQDITRFPRVQDFASYARLIRPKKTSAGKCYGTGNGKIGNSYVKWAFSEAVVLFLRETREVQPYIRRLERKYGKDKAKGIVAHRLGRTVYYMLKNKQVFDIKKFVNQ

SEQ ID NO: 353479 - protein, 410 aa, unidentified
MQVVYTHCAGLDVHKKTVVACVITPNGSGGWHKEIRTFSTMTAQLLSLSDWLLSLNCSHVAMESTGEYWRPVFNILEANFEVILVNARHIKAVPGRKTDIKDAQWIAELLQHGLLRASFIPPIAQRDLRDLTRHRSNFIRERVNLVNRIQKVLEAANIKLASVASDVMGVSGRAMLDAIVQGKASPEVMASFARGRMRDKHEQLILALEGRVRPHQRFILAELLCQIDSIDATLERFNHQISEFCRPFEAAVALLDTIPGIARQTAEIIVAEIGTDMSRFPSAAHLAAWAGLAPGNCESAGKQLSTTSRKGNRVLRTILVQAAHALARTKTYLAAQFSRLSARRGKKRAAIAVAHSILVIAYHLIQRQEPYRDLGANYFDQQRPEATKKRLVKRLEKLGYQVSLEESITC

SEQ ID NO: 353480 - protein, 345 aa, unidentified
MKPVAIIGLDIAKTVFQVHGVNAAGQVVVRQRLTRGRVLAFFEKLTPCLVGIEACGNSHYWARELIARGHEVRLMPAQYVKPYVKRGKNDAADAEAICEAVGRPTMRFVSVKTPEQQSVMMLHRVRLMLNRQRTQLSNSIRSHLSEFGIVAAIGRRGIDQLLAIVADEKDTRVPSDARLCLQMLAAQLAVVKEQILENDRRVRAIARQNELGRRLMEVPGVGPLLASAFIATIADPAVFKTGRDLAAWIGLVPKQNSSGGKERLGSITKAGNRYLRQMLVVGAMAVIRYAERHGTRRPWLVQLMARRSAKVAAVALANKLARIIWALMTSGERYREPILTDLVAA

SEQ ID NO: 353481 - protein, 342 aa, unidentified
MNNSVISIDLAKNVFQVCVFDEHRKPIFNKKVTRAKLLETVMNQKPNRIVMEACYSANYWGREFLKLNRSVGLIPAYQVKPFVVGNKNDSNDAIAIGEASYRPKMVFVPVKTIAQQDLQSLHRIRDRLVKARTAVANQMRGLLSEYGIVIAKKIAVLRQEVPWVLEDPDQPLSEVARSFVADLYDELSVFDHKIKNKTLALEALLKNNDDYQRLQEIPGIGPIVGSALISAVGNAKQFKNGRNMSAWLGLTPKQYASGDNTRMGGMSKRGNRMLRKLFIDGARAVVIWVENKTDGFSLWIQALLMRRPRHKVLVAVANKIARMAWAVLSKNEPYKAPGLVSV

SEQ ID NO: 353482 - protein, 456 aa, unidentified
MEQPTRFIGMDVHKDTIVVAVTGAGEVGKATAYGTFPNTAAALDKLVRRLRHAGSGPLKFCYEAGPCGYGVHRTLTRLGEDCMVVAPSMIPRKSGDRQKNDKRDAASLAVLHRGGLLTAVWVPDAAHEAMRDLIRTRLAAVRAVRTARQQLSAFLLRHERNYRDGGKAWTKAHRGWLADQSFAQPAQQIVLEENIEAVRLGEQRRDRVDGYLRAQIPTWSLFPLVQNLGALRGLDTIASAGLAAAIGDLSRFASAPDFMAYLGLVPSEHSSGPKRRTGAITKSGDIHARTLLIEAAHSYRFPARIARRKLAAIDAVSEAARVIAWKAQTRLCQRYRQMMAKGKPTQVVVTAVARELAGFVWSIACVASDPPAKTSVTTTSDEVCLTWSTGRRRALPPQPLRATARRPAPPQQTGTPIELRYVTENKPCAEANNPEASTPASRTRRSAAASAEGSAG

SEQ ID NO: 353483 - protein, 361 aa, unidentified
MPGTMTYVGFDVHARSTHAAAVDVMTGELSRMRFGAGLDAPVAWLCSLPGPVRACYEAGPTGFGFYRAALAAGVGMEVIAPGKTPRGKGDMVKSDRKDAELLSRLLLAGSLTPITVPPPEVEAARELIRAHDACRRDLMNARHRVSKMLLRHGRVYPKPSTWSQEHRRWLSRQQFPEAMSELTYADLVACVDGLTARKKALAERISRLATEERWWPTVARLRAFRGVDTLTAFAIHLELGADWTRFQKAHRVGSWLGLTPSRQQSGEHDHHGAITKTGSVLARRLLVESAWHYGREPRIGATLANRQEGQPDHVLQISNRAQHRLHRVYTGMRARGKPHNVTTVACARELSCFLWAAATAP

SEQ ID NO: 353484 - protein, 449 aa, unidentified
MGKASPQVTEDDEHQRVSGKVAAADVARAPGMVCVRLPSKNGSRHSKAWEVTATMGAVTGLGRQLMKDQVQMVTLEAASGYWRIFCYVLEMCGLAVQLVSPSQARNLKGRPETGKHDAMWLARLTGWGMLRPCFVPPAPIRELRDYTRARTGLVRERTRCWQRLEKLPEGALIKLSPVASKLTTQSAQDMIRAMIAGERDPRVLANMAQTRMRARPGALAGALAGMFDSHHGVLAGQLLDQAAFLGKQIETAGAGMTAALAKIPGSWGVDADGTTGPDAGHGPDAAVLPAAMRLAEIPGISVTMATAIIAGTGLDMTRFPAAAHLVSWAGLCRAASQPGPRSRPGKKGHGNAYPRSSLGQAATGASRTPTFPGERYGRIARRRGKAKAQVAVARSILVIIWHLLSGPAARYAGLGPDYVARRTGRDKKIRNHVRGLRSMGLEVTLTPAA

SEQ ID NO: 353485 - protein, 364 aa, unidentified
MEQITRGECGRVVVRVGVDLAKRVIQVHAVDAAGRLITGRALARDKFIAWCAQLPAGCVVVTEASSSAHHWARKLVSMGLDARIIAAHLVTPYRRQGSGGKNDANDAAAICEAASRPSMHFVPIKSVDQQSVLCVHRLREGIKEERTACINRIRGLLAEFGLVFAQSPKVLRLVLADVIEDAANEMGGLARLTLQRAHAQWQELDEHLAWCDERIAQHARMNEQVKKATTLMGVGPVTASAVVATVGDFKQFKNGAQFGAWIGLTPRQHSSGGKTKLGGITKRGDTYLRTLLIQAAKSAVLTAHLRSDRISSWLCKLRERSGWQIAAVALANKNARILWALMTRSEAFDPNHLGVKPGTSAQPA

SEQ ID NO: 353486 - protein, 349 aa, unidentified
MKKVIAGMDLHSNNVMIGIMDVDGKRVANRRVPCDLKEVVKFLAPFKSRLQEVVVESTYNWYWLVDGLKALKYPVVLANPAGMQQYNGLKHGDDTSDAFFLTELARLKILPTGYIYDAELRPVRDLLRRRLMLVHQRTALILSFKSLYTRTTGSDMSLSRLKAMEIKEAQELYHHPANQLIAGLQFQQIGHLTGSIGKIEQAVLASARELPCYAKLQTLPGVGKILGLTITMEVGDIERFADAGDFASYCRTVAAKRTSNDKKKGENNAKCGNRYLAWAFVEAANFARRFDPQCRRWFDRKAARTNKVIATKALACKLARAAWFLMAEQTDFDPKRMFGFEARTHENES

SEQ ID NO: 353487 - protein, 391 aa, unidentified
MIYVGIDVAKDKHDCSITNSDGEVLFKAFTITNNLDGFNDLYQKIETVMKDITKVKVGLEATGHYSYNLLGYLIDKGLPTYVINPLHTNLYRKSLSLRQTKTDKVDARTIASILMSDVNLKSYSDISYHNEELKSLTRYRFDKVKERAKLKSSVSRLICILFPELEKLVPTLHMASVYALLSEFPGAKQVANAHLTRLTNLLSEASKGRYSKDTAITFRDAARTSIGSNMPAKSLELKHTIKLIKELDSEIDEIENEIKIIMDEINSPILSIPGINYRMGAMIIAEIGDFSRFDSPDKILAYAGFSPSTYQSGHLYGAYAHMEKRGSRYLRYALYNAAKYVCHWDPTFTAYLAKKRAEGKHYNVAISHAVKKLIRVIYHLEKTNQQYIKAS

SEQ ID NO: 353488 - protein, 346 aa, unidentified
MKQYVGLDVSLKETSICIVDKEGEVLREVKVATEPTAILAVLMDETLAIERIGLEAGAFSQWLYGALAEADLPVVCVETRHMKAALSAQRNKTDRSDARGIAQMMRVGLYRPVHVKTMTSQKQRMLLTARQLLKAKAIDIESELRGTLRNFGLKVGMVGEARFEARIRELIEDDPDLAEIVEPVLIARRSLREQLRVLHRKLLELVRHDQICRRLMTAPGVGPVVALTFRATVDVPSRFKSSKTIGAAFGLTPRQYQSGETDRMGAVSKCGDRMMRAMLFEAALALMACTRKWSWLKAWGMKIARHRGMKRAIVAVARRLAVILHRMWVDGTDFRWTRPEAAAAPN

SEQ ID NO: 353489 - protein, 371 aa, unidentified
MKDNLTQTKPPEPALLIGIDWADQKHDTYTIDRQGHGVWEQIEHSPEAIDAWLAEKLRQADGQPIAILLEQSRGALIHTLMFRKNVILYPINPKQFARYRESYSNAGCKDDPTDAQLLARMLRERIRLLKPWTPDDESTRLLARLCQTRRQLVNERTRLTQQLIDQLKAYFPLVLEFNSSQSVSSLVLELLRRWPDPRCLKRADRRILHRVLREHGYRNEDKRQEVIERIRSARLLSHDRALIEPAAIVVQCLARQIPVLERSIEALEASIDKEMANHPDAKLFTALPGAGKTLAPRLLTAFGSQRDRFASANEVATFSGIAPVTKRSGKSCIGATHVPNTCVRHFTSSPIMRESGAPGAGPTTAYKRAEA

SEQ ID NO: 353490 - protein, 312 aa, unidentified
MRWSPPAPCEGYAFTGCFISETLIMSELALVGIDLGKNTFHLHGQDKPGRELFHKKLSRQQMMKFFCNLPACTVVMEACAGSHFVARELMAMGHKAKLISPQFVRPFVKSNKSDFVDAEAICEAAAHPTMSFVTPKTEVQQLLSMMHRMRESLVHYRTKVVNQMHGFLLEFGISLPKGSAMIKRLASILSEHELPIRLTVLLQRLHKHFSYLDEQIKEMDKELIGQLAGDDLGSRLLSIPCVGPITASLMAAEMGDGKQYGCSRDFAASVGLVPRQHSTARAARRLCWESANEAIRTSEDCWCSASGFTCLG

SEQ ID NO: 353491 - protein, 410 aa, unidentified
MEVVYQRCCGLDLHKNKVVACLITPGSEGAPQKEIRTFGTMTDEILKLSDWLASSGCTQVAMESTGVYWKPIYNLLEGDFELLLVNAKHIKLVPGRKTDVKDCEWIADLLRHGLLKGSFVPDRPQRELRELTRYRTSLVRERSAEVNRLQKTLEGANIKLTSVATDIMGRSGREMLEALVAGSSDVAAVAQLAKGRMRDKIQDLERALSGRFQGHQRFMVAQQLAHIDFLDEIIERLNAEVKERMRPFEEELSRLAEIPGVGRRTAEIIVAEISVDMSRFPTDRHIASWAGMCPGNNESAGKRYSGATRKGDSWLRTALVEAAQAAGRTKNTYLKAQYHRLAARRGKKKATVAVGHSILVIGYHLLKDKTTYQDLGPHYFDELDRQATERYLVRRLEALGNEVTLKRVAA

SEQ ID NO: 353492 - protein, 339 aa, unidentified
MNEVTVIGIDLGKHSFHLHAQDAAGRMVFRKKLSRQQLLRTLANVPCCRVVMEACAGSHWLARQLAGMGHEPRLISPQFVRPFVVGNKNDFGDAQAICEAACRPSMRFVSPRNEAQQTVSAMHRLRERLVRERTATVNQIHGFLLEFGISLPRGAALMSRLPTVLDHETLPPRLVGLVVRLHAQVHYLEEQIRQVVQDLKASLREDDKGRRLLEIPGIGPITASALAVELGDARQFANARQFSASIGLVPRQYSTGGKPTLLGISKRGDRNLRRLLVQCARAVMQHTASRTDALSLWVKTLSTRRHSNVVACALANKLARIAWAVLARGTHYQARALTT

SEQ ID NO: 353493 - protein, 354 aa, unidentified
MDHIGIDVHKKDSQICIVAEGGELIEQRVPTQPRRFAEALGDRPHARIVIEASTESEWVARCLEGLGHDVIVADPNFAPMYATRTRKVKTDRRDARALAEACLLGAYRPAHRLSDAQRHVRARLTVRDALVRTRTRYISVVRAVLRQHGWPVPSGSAEGFPRRVMALPLPGRLRSEVAPLLAVMRHLQQQLAYSDERIVAVTRTDARVRRLQSVPTIGPVTAAAFVAAVDDAARFRRAHEVEAYLGLVPRELSSGETQRRGRITKAGSSRVRWLLIQAAVSMLRLHDPRTVWLREWAARIAARRGRGIAVVALARRLAGMLFALLRDGTVYELRAAAPRRDQTGVAPVWWTVNN

SEQ ID NO: 353494 - protein, 452 aa, unidentified
MHLGGWFVAKSNGESAPRSASTGLIGPQTGRRNSVCKENPLTNPYNLFVGIDLGSQSHHVSVVDRDGTLLGERKFEHDGQGIQQLLTWLAELAGGASPETVAVALEAPRGAIVDALLERGYCLFSINPKQLDRFRDRYSVAGAKDDSRDAYVLGNSLRTDLSHFRRLRPDHVQIVRLRELSRASDALQEDWRRNANQLWSYLQRYFPAILKFSSAADDVWVFDLLEQTQAQSKLAAALPIEELAKLLRRRRIRRFSAEKLYRALQDRLPLAAGVEEALAEQVLLLLPRLRLLHQQRSEVDHRTDRLLVEMAQENFPEHRSVEILRSIPGLGRVFIATVFSEAGRPLLDRDYHDLRILAGAAPVTWRSGKTEIVSMRRACNDRLRDAVQNSANTHMQKDPRAKQIYARLRRKGNTHARGLRGVGDRLLELICVLLRSDQLYQLDRRQPKQDAA

SEQ ID NO: 353495 - protein, 344 aa, unidentified
MSIVGGLDIHRKQITFDYLDTTTGEVRRGQISPADRGHLAAWLAGRFTGQAADFAVEGCTGWRYVAEELAAAGITAHVAEPADTAALRGRKRHAKTDKTDSRHLRQLLADGRLPECWIPPSHILECRALLETYHDLRVEHTAWTQRIHAALFHQGAPQLGGQRLRTGEGLAALRAAAAGLSPAGQLQIAVALDKLAAQDRYLDVLRRRLLEAARQLAGAKELHARLYGVGPVTALALVCWLGGAGRFSSARKAVRFAGLDVTVYSSDGKRSPGHLSRQGPEVLRWCVYEAGKTHARGSAPDYRYYASVKDRIDGKRAAISEARKIIRQAVHILAELGDDALAAA

SEQ ID NO: 353496 - protein, 354 aa, unidentified
MFNNSTFFIGIDLGDKHSFVTILDSEGELVEETRLPTTRTAFQRKFSSIPACRIATEVGTHSRWVSHLLKDLGHDVLVANARKLRAIYHNPRKDDRTDAETLARLARLDPNLLSPIRHRSPQAQADLAILRSRYALVRSRTLLINHVRGVVKSSGARLPSCSADCFAQKVSPDIPEPLQPALMPILDTIAALTQQIHSYDRQIQDLCKERYPETLLLQRISGVGPLTSLAFILTLENPNRFHKSREVGPALGLVPRSDQSGDHDPQLRITKTGNAFLRQLLVGSAQYILGPFGPDCDLRRWGLQLADRGGKNAKKRAVVAVARKLAILLHHLWKTGEVYNPFFLSRLHAEQPEL

SEQ ID NO: 353497 - protein, 311 aa, unidentified
MNTYIGIDVAKQFFDLYDLAKEKHQRFDHTPAGIKSCMAFLSSRHPALIVMESTGGYEMDLAVAFSDVGLPVAVINPKRIRDFARATGKLAKTDKIDAQIIARYAATRQPPPQVVMDEHTRTLKDLVARRNQLVELRTAESNRREHLRNRTIARSIAVMIKTIDRELAKIEQEMRQHIIRTPEFKLKVDQLTSAPAIGETTAMMLIANVPELGRLNRRQISALVGVAPINRDSGTFRGKRMTGGGRRDVRAKLFMPTIVATKHNPVISEFYHRLLAAGKNKMTAIVAAMRKLLTILNAMLAKNQSWIPNYS

SEQ ID NO: 353498 - protein, 371 aa, unidentified
MNSLIHIGIDVHKDTYSLCSYSFQTSQAFGQTKIGSDNKLVIKYVEKLMKRHPEVEVLCGYEAGPTGFGLYRDLHKANIPCVVMAPTSLPRAVGNRVKTDRLDALELAKHLAYGTYSAVRVPTSEDEAVKDFTRLRNTRQQALKRAKQNLLSFLLRRQRRYTEGSTYWTKTHHRWLKQQKFTDPLDQETYNEYLQELYDQEEKVERYDARIEELSRLDAYRERVEKLRCFKGIDTHTALSLVCEIGDFSRFATAAQFSAYLGLVPSENSSGQRERRGGITKGGNTRLRTLLIEAANGAIRGNLYGAKSKKLKARQAGNPAQVIAYADRAQRRLHRTYNKLVLNSVPRNKAIVAVARELSCFIWGMMNDRID

SEQ ID NO: 353499 - protein, 354 aa, unidentified
MIIIGVDFHPEFQQIASVDTDSGEFQEQRLQHREEAERFYRELAGHGVAVRVGMEASGHARWWERLLAELQVELWIGDAAAIRSKRVRKQKTDRQDAQLILQLLLEDRFPRIWIASWENRDLRQLLWHRHRMVQARTRIMNQLQAVALNEGLRCKKRLWRDAGREQLESFPLAPWASRRRRDLLELLDRLTPTIAELTQAIEQEVEKCPEAQRLRTHPGVGALTALAFVLIIGRADRFQCGKQIASYLGLVPLEESSGQRRRLGHITKQGNSLLRFLLVEAAQVTVRSDPEWRSKYFHLAMRRGRKIAKVAMARKLAVRLYWMWRKGWDYEQLKRFSPYAGQPGNRHGVRLNTE

SEQ ID NO: 353500 - protein, 350 aa, unidentified
MKDNITIGMDLGDKNHIVVILDADGNQIECTTLTNTKVSVKRFFQKYTGAKVAIEAGVHSPWISRLLEELGCQVYVGNPYKLRVIWDSTDKSDERDARMLAMVCRLEPKLLWPIRHRDIKAHNDLEIVKARDILVQSRTKLINHVRSVVKGTGERLPKCSSASFASRAVSLLDASLLPALKPLINAIACLTDRIGELDKQIKTLTLERYPDTQVLQQVQGVGPVTALAYVLTVEDPSRFAKSRMVGPYLGLTPRRDQSGDTNKQLRITKAGNTYLRKLLVGCAHYIIGPFGPDSDLRRHGISIAARGGKNARKRAAVAVARKLSVLLHSLWISRQDYVPLYRSYRFKKAA

SEQ ID NO: 353501 - protein, 310 aa, unidentified
MFIGIDVAKDRLDVHVRPAGEAFTVGRDGEGIEDLISRLSRLAPALIVLEATGGFETIVAAGLGAAGLPVAVVNPRQIRDFARATARLAKTDTLDAAVIAHFAEAVNPPARPLADEQSRLLGELMARRRQLIEMIGAESNRRRMLTVRRTLKTVDRVLATLKAQLEQIDDDIDNAVRGTPAWREAEDLLISVPGIGPRIARTLIAEMPELGRLGRREIASLTGVAPFNRDSGTLRGRRTIAGGRPVVRAALYMSILASIRRKLPLALTYQRLRDARKPAKVAKVAKVACMRKLVTILNAIFRDKKPWANA

SEQ ID NO: 353502 - protein, 463 aa, unidentified
MLEDLELIHLHAAGIDIGSAENMVCVPARSVGAAQPNVRSFGVFTQQQDDLVEWLKDCGVTTVAMEATGIYWLTLYDKLESAGLEVLLVDPHSVRHVPGRKSDVLDCQWLQQLHTYGLLRGAFRPAAAVRRLRTLSRHRAELVAEGGSHLQQAQKALVQMNVQLPLVVSDINGETGLRIIEAILAGERDPQALVKLRDPHIKKSTEAEMAAALSGHYTEELLFVLRQNIEAWKFYQQQMGACDHQIEAALKAMASANKSSAPAAPPKPVPPAEAGSPGAKKKRQRPLHGNNAPKVNFSEQIQRVCGVDLTKVCGLNLLNVLMIISEIGVDMSRWRNAKAFSSWLGLCPGTKISGGKKLSRRTRHVVNRASVLLRLAALAAGKTDTWIGRFYRRKRSQLGAPKAITATAHKLACVIYHMLKYQEDFMPLDVAIYEMKAHDRRVRYLRKQVEELGYELVERKEAA

SEQ ID NO: 353503 - protein, 430 aa, unidentified
MGLIVPTTIHPEQEDQPLPYEWFVGIDWGSQQHQVSVLDRDRRRVGERVVDHDGASLARLADWLWTLSAGQPQRVAVAIEVPRGAIVEGLLERGFHLFALHPKQRDRFRDRHSVAGAKDDRRDAFVLADSVRTDQPSFRRLQLDAPQLLLLRELSRAEETLLEEFRRSANRLREQLHRLYPQMLQLCSAADEPWLWDLIDLVPTPAHAALLSEAQVQRVLKAHRLRRVTATEVLTCLQTQALPVAPGAAEAAQAHCQLLLPCLRVLAEQLQACSQQVSALLSTLAEERGEGESPSDVAIVLSLPGVGRKITAWLFAEAAQPLAERDYQMLRTHSGVAPVTKQSGKRRLVVMRHGCNPRLRHALYHMARVAMQRDAHFNSVYTTLRAKGQRHGQALRNIGDRLLRILVAMLRHRTCYDASRIRREPVVQMG

SEQ ID NO: 353504 - protein, 343 aa, unidentified
MEVKRVGIDLAKNVFQLHGVDRHEQAVFKRRLKRDRWLRVLLDNTDPECVIGMEACSGAHHWARELQSRGYTVKLIPPQFVVPYVKSNKNDANDAEAICEAMSRPSMRFVSVKRVEQQDIQATHRIRSELMKQRTAKAQQIRGLVGEYGLVAPIRLTALRAAIPRWLEDAENGLTPRFRALLHGLYRDLTGLDDRVAELTGEIKVIAKTDPVAQRLQQLRGVGPLVATALLASVGDGKQYKKGRQMAAALGLTPRQHSSGGKDRLLGISKRGDAYLRSILIHGARAVVSTARHKEDRLSLWVTQIAQRRHPNVAAVALANKTVRMAWSMMTRGSDYDPEFVIG

SEQ ID NO: 353505 - protein, 396 aa, unidentified
MIEVCSFKSINALTGAKRRLALKKNSKTMRPRKNATQKTATTLPTRTIGIDLGDQTSCYCILDEQGEVVSEGTLRTTEAGFREQFRRMARARIVLETGTHSPWVSRYLEQLGHEVLVANARQVRIIYDNDRKTDKVDARTLARLARVDKSLLHPIRHRSAEAQADLAVLRARDLLVAVRSTLINCVRGMVKSVGGRLPSASGAYFATKVRDQLPGCISDALLPLLEEIDNLTIRIRVYDKQIEELAKTKYPKTELMRQIPGVGVVTSLAFALTIDDPNRFHKSRDVGSYLGLRPKQSDSGSSKPQLSISKAGDHLVRRLLINCAQYVLGHWGPDCDLRRWGLSLMAHGGKNAKKRAVVAVARKLAVLMHKLWVTGEVYEPFRQSMETAPTEAAPAA

SEQ ID NO: 353506 - protein, 326 aa, unidentified
MVLGIDVSKATLDAALLLDSGASKARHKVFPNTPDGHEQLLSWLQEQGAPLVHATLEATGTYGESIALSLHEAGHRVSLVNPALVRAFGQSQLKRTKTDKADAILIARFCAMHQPPLWSPPAPELRELQALVRRVEALDEMQQMEENRLESGVSCEVVRASLLDHIAYLQTQIDGARRQVQDHIAAHPDLKEQARLLESIPGIGAVTAAVLLSEIGDFSHFQSARQVAAFAGLVPRLRESGSSVRGKPRLSKAGSPRLRKCLYFPAMTALRWNPLIKALGLRLSVQGKPKMLILGAAMRKLLHLAYGVLKSRKPFDVNFSPQTCAA

SEQ ID NO: 353507 - protein, 423 aa, unidentified
MKGSTLCVGADVHLDQITLVVVDKADGDEVTERFRVTNNLPGAQAAAATLARLARRLGYTGIEIGWESTGMLWIPFHRHLSHSPELQPFDLQLVCFNPQLIKGFKDSLVLRKPKNDPRDAATVAARVRFGDLPLSYVPSDFWQGLRRLTRYRYQLSRDIGREKKRFLAYAFLKCSDWKRVKAFSDVFGATSAALLTEFTTAELQLMSHDQLVDLICRRGYGRFNDPTGTARAVRETLRTSYPIDATMDEMVTATLATCWEHIRFIKRSMKRLDKYIAHYIEPFPNPIITVKGLGAVITAGILAEVVDVSRFDEHKHLAQYMGLTWEKRYSGNSVSQHTRLTKVGNHYLRYYCVLGADRLRQFNLEYKAYYWRKYHEVAKYQHKRALVLTARKLVRLVHALLTKNVPYVRPQSLVYLQEDPALQ

SEQ ID NO: 353508 - protein, 362 aa, unidentified
MKKHSKAGKMTDKPSRTVGIDLGDRFCSYCILNQDGEVMEKGRVRTEASAFRRQFAGEERMRVAMECGTHSPWISRLLEELGHEVLVGNARKLEAITGSESKNDDRDAEQLGRLAHFDPRLLFAVRHRSAQRQQDLTLIQARATLVRARTMIINTARGLVKSSGGRLPNCSSRSFATQVKPKLPAELAELIGPLLEQVASLNAQIARMDQQVEGLVKSYPEISRLRSAPGVGPLVAATYVLTLDGAQTVAHSRSAGAFLGLRPRQKQSGNYDPQCRITKTGNTYLRCLLVQAAHYILGRFGPDSALRRWGLKLAASGGKRGKKRAIVAVARKLAVILHRMWRTGQRYQPFPQSVTQGSAVHV

SEQ ID NO: 353509 - protein, 342 aa, unidentified
MVYVGLDVSGKSLVGYAVNERKRCVYKGEQPASRVGLRALVRQIGVGPKLVVFEAGNQMKWIADTLKTLDGVQVHVVHPNEVKWITESRGKTDRVDAKKLAELARADLLPRAVHIVEGPVRELRELVSARQQLQRKRVALITTIRGYVYQEGHRLPEKFFAGVAWREKLTRVSVSAPLRLIVQTFMTSIEALVVAEQQLTKRLRTIADPRCDLVETVPALGPLASRVVLSAVDEVQRFDDQKAVANYGALAPTIYQSGAVRHLGRINRDGRQEVRRVLLQCAHTVVRMKSAGAKPLQQFYARIAARREKKIAVVALARKLLTTAYGVLKSGTPYDPRKLQPA

SEQ ID NO: 353510 - protein, 326 aa, unidentified
MNSILGIDVSKESLDVVLLNEGWPMHKVFNNNPAGHTHLGHWLAAHRPGQLHACLEATGQYGEEIAEFLFQRGFQVSVVNPARIKRYGESKLHRNKTDKADAALIAEFCQKEHPPTWEPLPPSVKHLRALVRRLDDLQGAYQQERNRSLCGERDVWVVEDLAIHLKYLQGRIRAARLAIQQHIEQQPALRSQQDLLTSIPGIGKLTAARLLAEIGDISAFENAPQLVAYAGLNPKGNRSGSSVHKKTRISKEGRAFLRYILYMPAIVARKHNPVIIEFCQRLSDRKLAEMAIVIAAMRKLLHIVFGVLKNQTPFDPGYGKQFAFNP

SEQ ID NO: 353511 - protein, 409 aa, unidentified
MQVVHERCAGLDVHKRTVVVCVLVPEGREVRTFGTMTRELMEMVDWLLGKGVTHVAMESSGVYWRPLFNLLEGRGVELLVVNARHVKAVPGRKTDVKDAEWLADLLRHGLLRASFVPDRSQRELRELVRYRKTLVEERARMVTRIQKVLEGANIKLSSVASNVVGKSGKAMLEQLAAGNEDAEAMAELALSNLRSKRGQLREALFGSMGEHQRFMLKSHLHLVEELDAEIEVVNAQLGERMRPFESQIALLDQIPGIGTTSAQQILAEIGVDMSRFPTADHLASWARVCPGMNESGGKRHPASTGAGNPWLRSTLIEVALAAVKAGRRQPNFFSARYHRLSTRRGPKRAAMAVAHSLLIAIYNMLRNGSYFVDLGPTHYDQRRRNLIVKRSVRRLEDLGYKVSIEEAVA

SEQ ID NO: 353512 - protein, 395 aa, unidentified
MFIVGIDIAKRSHEAIIIAEDGQVVRKAFSFRNNCTGYNLLLEQVRKLTLVKSQIVFAMESTAHYWLALYARLLKDGYTVMVLNPIQSHSLRELYIRKAKTDARDSLIIADLVRFGRCKASNVPQDKILALRELCRSRAYLVDMAADLKRKLIALLDRIFPEYESLFDSVFSKASIAVLCKYSTPQKVKNANLRKLTDILMESSNGHFGEWKAHQLKEAACSSFGIDDSGGVYSTLLGMFLEQILSLTAQADSLEKQISVFFQEFNNPLTSIPGVGTVLAATILSEIGDITRFSSADKLLAYAGLDPSVKQSGEFKSNQNRMSKRGSPYLRRAIWLASTVAVHRDPMFQTYYEKKISEGLHYMNVIGHVSRKMTAVIFAVLRDGQPYQPILQSAG

SEQ ID NO: 353513 - protein, 338 aa, unidentified
MLSIGLDAHERTSSLCILDTSGRTVKEVTVKGHPRRVLRWLGEVKEPFKICFEASTNYGWLYDELKAFAVEVLVAHPGRLRLIFRSRRKNDRIDAARLAKLLYLGELPLVHVPSVDVRAWRGLIEHRQRCVRERTRVKNGIRALLRTHGIQMPCRVRLWAKKGRAWLSELDIPTTVAALRRDQFLDDLQHHDRKIHRLETMLGSIGNRHPGMVLLQTIPGVGVRTAEAFLAYVDDPQRFRGRSIGAYLGMVPRQNASGGVNRLGRITREGPSTVRQMLAEATWQAVRRSPTVRKRFERICQDRPDRRKKALIATAHYLARVMISMLNTGAAWREEVAA

SEQ ID NO: 353514 - protein, 348 aa, unidentified
MLIIGCDYHPGFQQIAFVDTETGELGERRLTHREEAEEFYSRLQERSVRVGMEASGHARWFERLLRDLQFELWIGDAAEIRTKRVRKQKTDRQDAQLLLRLLLEDRFPRIWVADAENRDLRQLLWHRHRLVQMRTRIMNQLHVVALNEGVRRKKALWRPAGRNELEALKLAPWASRRRQDLLDLLDQLTPKIQELTRALEEEAEKRPVARRLMTHPGVGVLTALAFELVIGTPERFQRGKQIASYVGLVPSEESSGDRRRLGHISKQGNALLRFLLVEAAQVTVRSHPHWRSKFFHLALRRGRKIAKVAMARKLAVHLYWMWRQGLDYGQFEKLGSHAGEPGNRHGVQ

SEQ ID NO: 353515 - protein, 371 aa, unidentified
MEQFIGCDAHKKYSVFVAVNERGEASQKVQVGHDRGPYRRYLEQLPPGSQIALEASGHYYWIVDEMEAAGHHPRLAHPLEAKKRMGKTGKKTDKVDANGLGVLLRNGTLPEVWIPPAGLRDQRELLRLRMFLVQQRTRLKNRIQGALGRYNLQISEVTDVFGVEGRLRLGARLGELPPHTRQSVELELVTMDFMEMQIEAVEKPLQELMEVTAEADLLKTLPYVGRILSMVMTLEIGRVERFASAEHLASYAGLVPRVHSSGGRTRLGQICGDVNRYLKWAFIEAGNLAVIHQKQLAGRHVVRLYQRVKRKTNHQKAVVAVGRHLAEAAYWILKKQEVYREPQSKPKASAQARTAPDSFVDARVSAKPAIA

SEQ ID NO: 353516 - protein, 414 aa, unidentified
MELETIYARCCGLDVHKETVQACVRLLDERGKLTTEVRSFSTMTADLLKLGDWLTELGVTHVAMESTGVYWKPVWNLLEDRLTMLLVNARHIKNVPGRKTDVLDCQWIAQLLQHGLLRGSFVPPVMIRQARDLTRHRTQLVGEKTRVANRIQKILEDANIKLASVATDILGKSSRAMLQAMVQGQCDPKHLADLALGRLQSKHRQLVAALRGGVNDHHRFMLKMLLEHLSALEQLIATLEQRLDQLLTPLQEQIQRLDEIPGVDVRVAQTILAEIGPDMSHFGSSAHLCSWAGMCPGNHESAGKRKKGTTRSGDRWLRTALVQCAWAASHTKQTYLSGQFHRLVPRRGKKKALVAVGHSILTIVYEMLAHGSHYQDLGADWFDRQQPSRLQRNLVKRLEALGYKVTLEVQRQVA

SEQ ID NO: 353517 - protein, 407 aa, unidentified
MLEVKVERCAGIDVGKKFIDVCVLIGPVNRKPAEEVRRFGTHVGDLEALRAWLKEKACTKVIMESTGSYWKPVFNILEGQFKVILANPEQVKALRGKKTDRKDCRWLAGLLRHGLVQPSFIPPRDIRELRDLTRRRRTLLQNGTQERNRIQKVLEDANVKIGNVLSDVFGMSGQAMLEALLENKLSPEQVADLARGSLRRKIPQIVEALEGHRMSEHHRLLIRQAFKHMQFIEEMIEELDKQIQEKLAPYQKQVELACTIPGIGSDAAASILAEIGMDMSDNGPFSSCHHLASWAGVCPGNNSSAGKRKSGKIRKGNRWLKATMTQTAWAGAAKKNSAFQFRYQRLKARRGVKRATIAVAHAQLITLYWVLRNGAPYQQQRQDLERQQRESLIRHHLHRLAQLGHTS

SEQ ID NO: 353518 - protein, 338 aa, unidentified
MSKFNTIGIDLAKQIFQVHINDANGKKLSSKKLKRSQLLDYIRQQPNALVAIEACSGAHWWARQFQSLGHAVKVIHPAYVKPFVQMHKNDQRDAQAIAEAAVRPNIPAVSVKSQEQLDLQAIHRVRERLVKEKTAISNELRGILAECGIVLAQGHSALKTGVPLILEDAENGLSDPLRCLVSDLMQQWYEQVERIARYERQLQQISKQNEDCQRLMSIPGIGPVNATLLLSHAGSARQFKTARHFAAYLGLVPRQHASGGKEKLLGITKRGNKQVRKQLVHGARSAYRALLAKTDPSRLKTWLIRCEGKHPNKVIVALANKLARIIWVVLTRQTAYEA

SEQ ID NO: 353519 - protein, 485 aa, unidentified
MIVIGADTHKGSHALAAVNDGTGKVRGHREITADDAGHLAAIRWARGLDDDRVWAIEDCRHVSQRLEQALIAAGERVVRVPPQRMGASRKGERERGKSDEIDALAVARAVVKDGVEAFPAAYLDQRAMEIRLISDHRGDLVADRTRVVNRLRWHLLVLCPELESSLKRKALNHARVLDRVDRRLRKLPAGARVRIAREQITQLRALNRQIDQLHNELAELVAANRPKLLAEQGCGALTAAILIGHTSGNQQFRKEASFAMKTGTPPVPCSSGQRTQHRLNRGGDRQLNHALHIIAITRAQHDPATKQYLARKEAEGKTNKGALRSLKRHLARRFHKLLAEPPTDQQQAINGHPTVESPPTSSDGKPPEIPPPPPRQREVQPSPRLDGLHEVERTDPRPAESFSGPLPPRRTLAAATACRKSPRSSPISPSPTPSRALSGRLRPLTDHPRPTDNTQFQARLQPPSQPTLPCQPAFPKPANCDAPLT

SEQ ID NO: 353520 - protein, 341 aa, unidentified
MDKELYFGVDVSKKTLDLAYYDGEAIDWKNAHIKVSNDDAGFKKIGSWVAKVGKDFDTFLFCMEYTGLYNQNFRLWLESKEYIYGMVEPRKMHRFEPDLDDDQRSLDRIKTDELDAFRIAIYCEQNHKKILRNPSKLPSPVYFKLKRLLAERKQNTKQSVLYKQQLHDICAYDTDLSVERKKLLLKNMQENQKAIDKEIDSYMNEDTSIRKNYNLLTSIPGIGRIIALETIVLTENFTAISNPRKYACYIGIAPFKKESGTSVRKKTGVSKKGFSEAKADLSIAVLSAIRNNPSIRDYWIRKRKEKCGGIVLNAVKFKLVLRMFAVIKRGTPYVETDAYKN

SEQ ID NO: 353521 - protein, 323 aa, unidentified
MSGFVGVDIAKNTFDIATHQPNGKHKTKAKLANDPKGFKEFEAWLEKNAERSALIVMEATSVYHLELAEFVYNKGFRVCVVNPATTKAYADSELRRIKTDKSDAKLIADFAREKDQKLHPWAPEPLKYRQLKAMVRRLDDLQEMEQMELNRLDVSDEKVKDSINSVLRHIEKEIVETHKAIKKHIDDDPDMRQMRDLIVTIDGIGQKTLERLLAELGDLRKYSDPRQLVAAAGLNPKLQESGKFKGHTLISRVGSARLRAGLYMPGMVALKHNKAIKAMKERLEANGKAPKQIICAAMRKLLHFVYGVLKSGLPYDPKLALAR

SEQ ID NO: 353522 - protein, 363 aa, unidentified
MRDARAVAVGLDVHKSSVRVAAVRADELLGEVTLPYDHERVERELRAWPGARVCCEAGPTGFGLYRHLVAAGIDCQVVAPGLVPTRPGDRVKTDKRDARRLAALHAGGLLTAIFVPSPELEALRDLVRAREDARLDRMRARHRLGKFVLRHDRRMPTTCWGVTRRAWLGRQAFDLPGQQQAFDDYLFAVDQLDRRIGALELEISRIAAEGPHTELIGRLRCLRGIDTLTAVGLVCEVGDFTRFRCAEQFMSFVGLVPSERSSGESRRQGSITKAGSSHARRLLVESAWNSRRRPTVGYELARRHRGQDPLVLERAWRCQQRLHRRWQRMAGRGKPQQKIVVACARELAGFVWAIATEQPMRTT

SEQ ID NO: 353523 - protein, 336 aa, unidentified
MSKRYMGIDVHKKLCVFTELDSRGNIVNQGKFSNDLPEVSDFTSRLTPNTHLVLEPVLNYLWLLDQFEPYVGSVHVATPHKVRVIAESRNKTDKSDSRVLAELLRTNFLPESWVPPQELRSLRTVVRQRYHLVGTMVSFKNRIRHLLMEHGVKLRVSDISSLRARQEISRLRLPEVTLFSIRQCHASIAVLKTSIKELDDRLDALSDGVEMTSLLNTIPGIGRIWSVTIYSEVGDINRFRSRKAFASYTGLIPSIRASGDSIHHGSITRHGSRPLRHALLEAGIHAARRSPSLRRLYNRVLYRGNVQKARVAVARKLAVIIYAMLKNKQPFRLEHA

SEQ ID NO: 353524 - protein, 473 aa, unidentified
MVKSVGIDLAGTGEHKVRCLDERAQLCDGFGFQTTLDGLAKLEERVFSDGSNPVNNSEPTGLAWVLIAVYLRARHPDCRLVRVQSHKVATLRKYLRRSSKSDRIDALTLAKMPFIDSERLEELYLPPAKIYAIQRLARQRKRLESEIGARKKRIGSILDGYLPGLREAFADPWSPQARAFLSTHLNPLATIRAGESALNTFLAKAKPRGKRDKAECHRVYLSCQNAAALCELSSSAGVVNDDFFAYLQEEIAREIRLMEFAETESEAIAKHLERLYEELHTSDNLRTIPGVGQHTAPIFLATVGDPLRFRSQSAFANYTGVVPAARQSSDTEAKGLRMTKAGPAIMKWALYQASQIGRRCDPQLAWVYYRQMVYHGKNHKQAMGAVMSHMGARILTVLREDRPYELRDTDGKPISREEAWKLILSNYKVPEEIKRERRRKTTSAMLKPRTRNREMAAHRTNEAATAPQPAVVL

SEQ ID NO: 353525 - protein, 350 aa, unidentified
MTNLARSVTGGVDTHLAVHVAAALDERGALLGVESFNTTEAGYKKLLGWLSDFGPVELVGVEGTGSYGAGLTRHLQDERVRVVEVDRPNRQRRRRKGKSDPEDGISAARAALSGDACGEAKTRDGNVESMRVLRVARTSARKGRTQALNQMRSLISTAPEPIRDELRGLNVFHLLERASSYRPGTKRDIISLTKLSLRMLARRAITLEEEITELDAILKPLVKETAPELVATLGIGTDAASALLVAAGDNPERLRNEAAFAHLCGASPIEASSGKQHRHRLNRSGDRQANSALWHIVITRMVYDPRTTEYIDRRTKEGLSKKEAVRCLKRYVAREVYGLLPHQRLGVDTP

SEQ ID NO: 353526 - protein, 314 aa, unidentified
MAGPFVGIDVCKDHLDVALRPGGRFRVANDPAGHADLVARLLPLAPQLVVLEATGGLELPALAALAACGVPVAAVNPRQARDFAGATGRLAKTDAIDALALAHFADAVRPQPRPLPAPEQRALDALVGRRRRLVEMRVMESNRLAACADDAVRAGIRRHLEWLAGEIDEADRALGESIRQSPAWREKDELLRSIPGVGPQVSRALPAAIPELGALSGGQVAALAGLAPYADDSGSRRGGRHVRGGRADVRRALYLAALSARRHCAVLREFASRLQARGKKAKVVLVALARKLLVIANAILRSKEPWQPELAAAK

SEQ ID NO: 353527 - protein, 365 aa, unidentified
MKEGKKAGTRYVGIDLGKRTYEVAIVGKGGKVTISNGRTFVAGRQSLYKKLRPGDKVALEAGNMAFMMAKEIETAVGCQVYVLNPSQLAVIYCSMKKTDKEDALKLAHILEDCREERLPVVPVPSDKELQRRKILANYRRAQQSRNRDINQLHALFVAQGITTKVKKDLCTCEFRKEAITELNGIELEEADYILKRLALCEQRIEALEKQMAEESAGDEVIERLQSIPGVGPKTAFAFVAHVAAERFENAGQVGNYLGLVPRVYKSGDTVRYGRITKRGNGYLRALLVQSAWALTNTKGGEKLKLRYEYMTKEKSKSKKKAIVAIARRLAEMMYTMMRDGTWYASRPFEPGKQEAEKLANLALSA

SEQ ID NO: 353528 - protein, 408 aa, unidentified
MEVLYERCCGIDVHKKVLVCCFKCGKKQEIRTFGSNNDDIREMAKWLLDGKCQMIAMESTSSYWKPLYNIFELSGLDVIVANARDIKNVPGRKTDIGDAEWIADLLKHGLIRASYIPSREQRELRELSRYRVSLIQERARELNRLQKMLEGGNVKITNVVSDINGRSSRNLLKALLENDEPLTEERVQGMVHGKMAHKVDAILKAMNGFLTPLQKQLIRRVVDHIDDMTKRIGEMDDMLSQYLQPYQEAIEKLDEFPGIGKRSAETILIETGLDMERFPTDKHFSSWAGLSPGNNESASKRKRCRTVKGNKTLKTTIIQCAKSAKRCKSYFRAQYERLVVRRGANRATVAVAHSMLIAIYHILKEGSRFVDLGEDFYARFNKEKKISHHLKQLTKLGWIPNAAGAATA

SEQ ID NO: 353529 - protein, 404 aa, unidentified
MYYVGIDWADEEHYVYITDDSGQKLDSFSIEHSEKGMNKLQDRIYRFSRKLDNILFSIETDKGLVVSTLMDWGYTVYSINPKAVDRYRDRYKASGVKSDEFDACVLANILRTDGSRFQPILPDSELARELKVLTRDRDKLVGDRTRLSNRLTSILKAYYPAALELFSDVAQPITLSFLCKYPTYQDVKKISFDEFKRFLSENRYPQPKRARGMYQKLQQPHLECEDMLTRTKSRLMLVTVSQLQLLMDEIKSYEREIKKLLESHPDANIFLSLPGSGDILSARFIAELGDNHDRYQSAGDVQAESGSAPITIQSGKKKYVRFRRSCKKPFRNTIHTFAFCSTSQCTWAREHYDQQIATGKTHSQAVRSLSNKWMKIIFTLWKRGETYNEEHHLLMKAKHAVVAV

SEQ ID NO: 353530 - protein, 398 aa, unidentified
MLSIGIDVSKGKSTVCGMKPGGEIVYTPFEVQHTREGMSELVSLLRGSGEEVRVVLESTGSYHCPVVAALLENGIFVSVVNSLRMKRFCSQSIRRVKTDQIDAMQIALYGLAYWQELQPTRLPEDTYRELQLLARQYYQMTSMLIKAKVDFNALCDQVLPGMQELMSDHAGRHKLSDFVLRYHHTAHILKMGETRFRKDYCKWAEKKGYRNHERMAALIFATAQNGIPVLPNAPSTQIVITEAIRVLHTVEASRDAILTQMQALAKTLPEYSLVREMPCIGDTLAPRLIAEIGDVRRFHSKRALIAYAGIDAPPYQSGKFSANNRHISKRGNRYLRKTGYEVMQSYVMHKPANDPIFTFIEKKRSEGKSGKLAMVAGLNKFLRVYYGKVTELYRSLPQ

SEQ ID NO: 353531 - protein, 348 aa, unidentified
MEMKCYAGLDVSLKEISICVIDQNGGIVARGSSPCDPEGVQAWLRNRSLAPERIIHESGQLAIWLQRGLTRLGLPATCIDARMAHKSLSARPNKSDAADAEGLAQLARTGWFTSVHIRSEEADCLRTLVNARERLIRLRKELEGHVRGALKTFGIRMAAVGQGQLRQAFRDQLALAGERDPVVRVLADAFISAHETLCRAAADLEAVLKTEARQHPVARRLMTIPGVGPVVALSFVALVDDPARFRRAADVGAFLGLTPRRHQSGEMDWSGRISRCGDSAMRRLLFEAASSLIHRVQRFSPLKSWAVRLAGRRGFRKAAVATGRKLAVLMLTLWKREDDYAWTKGATT

SEQ ID NO: 353532 - protein, 389 aa, unidentified
MYRIIKIGMDVHSKNYTLCAMEPTIGAEDRIFGEVQVAPDYKEVICFIESLKMKLGFYDEYSIECGYEAGCLGYTLYHQLTGAGIKCVILAPTTMLTQQGNRIKTDKRDARLIAQCLSYGGYHPVYIPTGEDDAVKEYLRMRDDHKLALKKLKQQIHAFVLRHGYQYSGTKWTIKHVTWLKKLELDPMYRETLNEYLASYEEQEAKIERYDKRIEEIASERRYQENVKKLGCFLGIRTHTALSLIVETGDFKRFAKGNTYAAFLGLAPGERSSSDNVNRLGISKAGNTHLRCLLIEAAKGICKGAIGHKSKELRSRQSGQPAEVIAYADKANTRLRSKYYKMIRHGKKTNVAVTAVARELACFIWGMMTGNISIRPTTAGTSMPAVRQE

SEQ ID NO: 353533 - protein, 346 aa, unidentified
MEQIIRIGMDTSKSVFQLHGVDAAERPVLRKQLRREAMISFFRKLPPTVIGIEACGASHHWGRLLASFGHEMKLMPPQYVKPYVKRGKHDAADAEGSCEAMSRPTMRFVPVKTAEQQAAQMLAGVRDQLVRRRTQLTNAIRGYAAEFGLVAAKGLGKIEPLLARIEADESLPVLAKELFDAQAREYGHLQKELKVLDAKLLTWHRSNEMSRRLAQIPGVGPIGATLLAIKVPDARAFKSGRDFAAWIGLTPKNHSTAGKNRLGVITRAGDSALRSVLVAGATALLQHRMRGRGRASLWLVGLARRKPAKLVAVALANKTARIAWKLMVSGEAYRPAPTMAPAMTQA

SEQ ID NO: 353534 - protein, 380 aa, unidentified
MAQPTDSVNVCCVALELSKKSWVIAFSPPPEGGKNSLHQIAAKDISRLFGFLESARLKAEREASRPLEIVVCYEVGYDGFWLARLLIAKGIRTIVFDPASFLMPRRGRRAKTDRLDAEGMTRTLRTWLSGDREVARDVQIPSVEQEDAKRIERERKYLVEERISIVGRIKGLLALHGIWLTGKRIGKGLRERLDRMTTGDGRPLAPFLRRDIERMLRRYDLVSQQIEEVVADRREALADNSGRFPHAEKVRRLAMLGAVGETTATVLVAEVYHRTFETRRHVASFVGLAPSPYASGETSRDRGISKAGTKLARQTFVELAWFWLRYQPNSKLSLWWQVRFGGMGMRGRKVGIVALARKLAIALWRFVEDGVIPEGATLKA

SEQ ID NO: 353535 - protein, 399 aa, unidentified
MSLVVAKEIRVSVDVGAQRHRVAIGLSSGELLEEFDIEHNPEGFDHFFRRLCEHEKAHACGVSVAMEGFNGYARPLDRLVRAHNYRLYNINNLKLARFKEIFPGSAKTDAIDARKGLELFQLRDHLPLAKRALQEVVEVPEANDRLKRLTRRRRWLVGERGRVLNHLQGDLQAVCPGLLSMTKDAGNVWFLRFLTSAKTLPQLARLRPKTLLKIKGVGATYASQIQVWQKQASFSDEVEWVGEMIQQDARRVLELDRQIKALEAKIESVMEGSSMARILASIPGYGLVCAAELAGEIGTIDRFKSDASLGLYVGMSPLDDSSGNTNSSKAPTQVNKRAKAAMMVAVDRHRKQVGKSQQYYDKKRAEGKKHNQAIRSLGRHLCRVIYQLLKKERVYEIRD

SEQ ID NO: 353536 - protein, 446 aa, unidentified
MRGGSCRSAGRREGGGGVLHARRLPERRVRSCRSSLYVTNKPLKERFKRLPRKPSAPGGSRSDLACRVAPRLIANPEEYQEANVVGLRVTRSRQQEERGRGTGDYFDARSTQVKKMSVFVGVDIAAKTFEVVVRRDGKNARAVSFEQTPQGHAQALKQLKALNPKHVVMEATGIYYLDLAVLLSEAGLPVSVINPKSARHFAELKMAGSKTDGIDSALLAEFGERMSPKLWVAPDSTRLALRDLGRQINRLTASRTQAKNRLHALQAKSMTLPLLLKDEREGITLLDRRIDRLKRAALELVAASAQLQAQFDAMLAAKGVGELSAISIISELCVLPEHLKAPQVSRYAGLDVRLCQSGTSINRPARLSKAGNAYLRAALYMPAMSAIQHDQRAKAFYDALVARGKKKMQALCAVMRKYLTGLWVCFNCCTPFDSSKLFSDQYGKNA

SEQ ID NO: 353537 - protein, 381 aa, unidentified
MTTAAPHNEHGNITEATLFVAFELSEKTWKLGFTTGHGQKPRERTMTARQQERILDEIAQAKRRLGLPETAPVVSCYEAGREGFWLHRFLQAHGITNQVVDSSSIEVNRRRRRAKSDGLDVRKLLSMLIRYAHGERQVWQVVKVPSVEAEDHRHLHRDLETLKQERASTTTRILGLLSSQGLRVTSLTKLPEQLEALRLWDGSPVPPGLRRRVLRVYAHHTFLSAQIAEVEAERRAQLQASTDARLDKVRQLMLLKGIGINGAWLLVMEFFGWRAFKNRREVGGLAGFTPTPYQSGESAREQGITKSGNRHVRWMTTELAWSWLRFQPDSALSCWFRQRFGSGGTRLRRIGIVAVARKLLIALWRFLETGVVPDGAVFKEG

SEQ ID NO: 353538 - protein, 370 aa, unidentified
MGNRSMFVGLDVHKETIDISTAEGERHGEVRHYGVIASDLEPLDKVVRALRAPDRRLHFVYEAGPCGFGIYRHLTNRGEECAVVSPSMIPKRSGDRVKTDRRDSQMLARLHRAGELRAIYVPDATDEAMRDLVRAREDAVVVGSQAKYRLKAFLLRQGRRYTGRDGWTLPYRRWLSDLSFPSAAQHIALQEYRDAIAETEQRIARLTDQLRQLAPTWRWAPVVAALQALRGVSFITAVALVAELGDLTRFRHPRELMAYLGLVPSEYSSGPQVRRGAITKAGNPHVRRLLAESAWAYQGIPRIGRKHADRQEALPKVVCDIAWKAQLRLTARFRRLVARGKAKPKVATAIARELSGFVWAIAREVSPTSR

SEQ ID NO: 353539 - protein, 356 aa, unidentified
MSYDVKYIGMDVHKEAIVMAVQNESGKLVMESVIETKASSILQFLHGLRGELHVTWEEGTWAAWLYDLLQPHVQHIVVCNPRRNALLKEGSKSDKVDAQKLADLLRTGMLRPVYHGENGLRTLRELGRSYQTISKDLTRVMNRLKALYRGWSIPCAGTQVYAARAREEWLNKLPQAGVRRRAELLYQQLDGLQALRREVRPEFLAESRKHKAAKLLRQIPCIGPIRAARLIGLMQTPHRFRSKRQLWTYSGLGIETHDSAQYSFVRGQLQRSKKPQQVRGLNRNHNHEMKEIFKSAATRASCGRGPFHDFYAGLLAKGMKPEMARLTLARKIAAITLTLWKKEERFDVEQLKTQAA

SEQ ID NO: 353540 - protein, 351 aa, unidentified
MRKRCANSKDMNEVNGNDVLYIGADVHERETQLAIFEPGGTLLEEKRIPTKDLQSYVHSLPAKEKHLALESLGFIYPLYDKLKQVPGCDVAVANPKRIRQTSDSKQKHDRADAKLLGNLIRTNFLKRSHMADAETREKRFLINDRVKYGLRRSELRGAIRWLLKRRGIELEQDPFSREGRRILREEVQLQEIDIRLQELELIESIVEKLDKQISYVVSLDEKAKLLDTLPGIAPYTALYLSSAFDNVDRFPDSKHACAYLGLVPSLHQSGDVSFTGHITRDGNKFLRRNLVECARAAVRKDPHLKEFYQKLRRKRGERKALIAVARKMVSYAYWMLKRNQTYEELTPWDGS

SEQ ID NO: 353541 - protein, 411 aa, unidentified
MEKVYDKCCGIDVHKKLIVACFRKGNQQEVRDFGATTRELLELCDWLKDGGCEMTAMESTGSYWKPLYNILEVCELNAMVVNAHHMKAVPGRKTDVKDAEWIADLLQHGLLQASYIPDRDQRELRELVRYRKSLVGERNRELNRLQKMLEGANIKISGTITDINGKSARNILEHILSGKMIDSAEYDILYEKKIIAHNLKASKEQIIDDLNGVLSDLQKKMMRLLLKHLDELDAIIGELDDDIDNFMKPDEKKAAEVIQDIPGIGNTSAQAIISVIGTDMSRFPTDSHISSWSGLCPGNNESAHKRKSGKTRKGNALLRETLVVCANAAVRNKSSYFYAQFTRISAHRGRKRALVAVAHSMLIAIYHILMDGVVFKDLGADYYNQFNKERKINAYLKKLKALGWEAPVVAA

SEQ ID NO: 353542 - protein, 413 aa, unidentified
MKVFCGIDWASDHHDVALVDGDGKLLGRARIGDDAAGLQQLLDLLAEHGDTPGDQIPVAIETSRGLLVACLRSTGRPVYAVNPMAAARYRERHTVSRKKSDHLDAMVLANILRTDADAHRQLPADSELAQAVAVLARAQQVAVWDRTQAGNKLRSHLREYFPGYLAAVQPITGGLNAPLARTLLAAASTPRQAAQLSRIQLKAALKRAGRQRGIEAEVERLHAALRVPQMRQLPLVETAMGRQALALLGKFEAACAAADSLAEASVELFEQHPDAAVITSFPGLGALSGARVLAEIGDDRSRFADAKALKAYAGSAPVTRASGKSQTVMVRRVKNQRLAAVGYVWAFASLTASPGARAHYDRRRETGDRHNSAQRNLYNRLLGCLHHCLANGTPYSETTAFPTAPKLELTIAA

SEQ ID NO: 353543 - protein, 314 aa, unidentified
MIVVGVDVSKDTLVAVAIDKSTRIKNSFTIENNKENVDKWLNDLPYKKLLLSCEATAEYHRVLALLALSRKIPLRLLNPIVTKQYTKATVRKRKTDPQDALTIAKLAMQGEGRLISSQTFHIAKTHERTAIKLSHMRQRLILMQQHMQEVDQHDEASIQQLQICIDTIEQSIKTFRKKAESEVNSREATLLCSIPGIGQTIATVLLAEIGDINEFKSAKAVVAYAGLDPKVKQSGGRLHHNTHLTKRGSPYLRQMLYTGASIAQRHDKELKAYYEKKRAEGKRYKEATVAVARKLLSRVYAVLKRQSPYVKEKE

SEQ ID NO: 353544 - protein, 356 aa, unidentified
MEKLTTVGIDLAKDVIAVCVLDVHGAAMERRVFRREAFERWAEQLPASNVAMEACGSAHHWGRWFAARGHTARLIAAEFVVPFRKGGKNDTADAEAVAIAARQPTMRFVPIKSVDQQAILAWHSVREGWKEERTALLNRMRGLLAEYGVVIARSADRFLAALPKLSEDSRLPDPVRALLLEVREQFAALHARLARCDAQIAAHARNSSAARRASELLGVGPITSSALVATLPDARVFKSGRQLGAWLGLAPRQHSSGGKTRLGRISLRGNVYLRTLLIQGARSTLQSAINTEPSRASRLQRWIIELYARKGYYKTLIAIANKHARMLWVMLTKDQGYDAAAWQRHPMHQPPLAGNA

SEQ ID NO: 353545 - protein, 406 aa, unidentified
MTAVMIGVDPHKATHTAVVIGPAEEPLGELRVRASAGQAEKLVAWAADWPERTWAVEGAAGLGRLLAQQLVAAGERVLDVQPKLASRVRLLQAGDTNKNDPNDALPVAVAALRSKTARPVMAEDYPAVLKVWSKRHRDLARLRNQVACRLHAVLCDLVPGGHPKEISAAQAARLLEQASPSGAVDQARAELAAEFPGDMRRLDAQLRDTRKKLAAAVRASGTTLTEVFGVGPVIAGTIIGDIADVSRFPGRDHFASCNGTAPVEVSSGNRKVHRLSLRGNRRINHAIHMAAITQIRHKHSDGRAYYDKKIAEGKTHKEALRSLKRRISDAIYARLLADARRAGQRPARAREGNRGTTLTPARPAHTPNAGSSDKPLPDPGTTIRPGTRAATPSPSKPTSKKTLTTT

SEQ ID NO: 353546 - protein, 343 aa, unidentified
MQAITTIGLDIAKSVFQVHGIDAEGKVIIRRQLKRRYLLAFFQKLPPCLVGIEACASSHHWSRQLKALGHNVRLMPPAYVKPYVKRQKNDATDAEAICEAVTRANMRFVETKTPEQQSCLMLHRTRQLFIRHQTSVINAIRAHLAEFGIVAPVGRKGVEQLLAIVTDTSDQRVPELARACLAALGVQLGKLKAQILEFDRMIMAWHRSNETSRRLDAIPGIGPALATALVASVADPRAFRSGRNFSAWIGLVPKQYSSGGKERLGSISKQGDRYLRSLFTAGALAVIRYAKIHGTQHRPWLTALLARRPTKVAAIALANKIARMAWAMMANGECYKEPVALAA

SEQ ID NO: 353547 - protein, 346 aa, unidentified
MEHYAGIDVSLQLSSVCVVDAQGKIVKEAKVASEPESLIAFFAALGFAVKRIGLEAGPLSQWLHAGLTRAGFETVLLETRHVKAALSAMTVKTDRKDARGLAQLIRMGWFRPVHAKSMGSQEVRALLVARKQLLGRLIDVELSIRGILRGFGLKVGPVTRKGFEARIRELVTGQATLERITETMLSARSALKAEYGKLHKSVLAIVREDAVCRRLMTVPSVGPLVAITYKSAMDDPNRISKSKAAGALFGLTPRKYQSGEKDVTGGITRAGDEMVRTALYEAANVLLARITRFSKLKRWGMDVAKRRGSKRAKVALARKIAVILHRMWVDGTTYRWATAEPIAAQA

SEQ ID NO: 353548 - protein, 379 aa, unidentified
MKKHSTLFIGLDTHKDSIAVAYATDSRTEPVTYLGSIGTQHYAIRKMVRQFESRNPGCQLQFVYEAGPCGYWLYRLLSSWDYPCFVVAPSLIPKKPGQQVKTDKRDCMQLAQLLRNGDIDPIYVPEPEDEAIRDLSRARETAMWDLKNAKSQLKAFLLRHDIRYAGTANWSAAHIRWLSELVMPTPAQNTVFREMLYTIVERYKRLERLDNELTYQVRRWRFYPLVKAVQALRGVQLLVATSVVAELGDLQRFDNPRKLMAYVGLTPSERSSGNRRRVGPLTCAGNKRARRMLIEAAHAYRYPAKTSRILQQRQEDLPKAIVEKAWDAQVRLCRRYRSLMQRGKHRNVVVAAIARELVGHIWAIAREVVIAKPDPRLML

SEQ ID NO: 353549 - protein, 474 aa, unidentified
MARRRSSRKPKTSDSRTRPRRRGFAIHNAPLPKGLKTVNQNAAGIDIGATQHYVAVPEGRDEACVRCFGTFTSDLHAIAEWLTDCGITTIAMESTGVYWIPLFELLELSGFEVKLVEPGKLKRAPGRKTDVLDCQWIQELHTYGLLEGSFLPDQQIGVLRCYMRQRDTLVRYAGQHIQHMQKVLEQMNIKLTEVVSDITGATGMAIIDAILGGERDPQKLAALRDRRCKNDEATIALALEGNCSEHHLFLLRQVVESYRFYHRQIADVDEVMESHLRTFTDKSEGQKLPCRPRKRKLSNNEPRFNMRKYLHQMMGMDLTEIPGFGGAVLLGIVAEVGLDMSPWPTEKHFASWLCLCPGNHKTGGRQNRGKTATRPSKSRAATLFRLGAQSILRSNCALGAFGRRLRTRLGAPKAITAVAHKLSIIYYNALKYGRQYVDQGAENYERQYRQWAIKGLRRRAEQLGFDLTPTSKAG

SEQ ID NO: 353550 - protein, 347 aa, unidentified
MRFYTHPHQVYCGIDLPARSMYVCLVNRDGEILVHRHLKAAPEPCLKAVAPYREGLVVAVECIFTWYWLADLCAAQGMPFVLGHALSMKAIHGGKAKNDQIDSQKMAALLRGGMLPQAYVYPAERRATRDRLRRRTPLLRTRAELLAHVQNTNSQYNLPEIGKKLAYKANRDGVAERFEEAAVHKTLAVDRGLITYDDELLKDLELSLLKTAKQHEAQTLYLLQTVPGIGKILSLVLLDESHRIARFPRVQDFASYGRLVKCSQESGGQRLGPSGKKIGHAHLQWAVSEAATLFVRNNPQGQKLLSRLEKQPDKGKALSLLAPKLGRAVYCMLKREVAFDLERFLQT

SEQ ID NO: 353551 - protein, 352 aa, unidentified
MNRYIGLDAHSQTCTVAVMGSSGRRLREQVLETNAKVLVDFLKSIAGDRYLCMEEGALSEWLYETLERYTKETMVIVAPPHSGPKNDSRDAWNLADEYRTGHLKRVVHKAPQCFTALRQAVRGYQVATQDLARAKQRTKAVFRSRGLDVDASIYQPDERAKWLRQLPAPYRRLAELRAMQLDMTTEVHAQAEAWLEEEAAKVDTVKLLSTVPGIGTVRAAQLVAIVVTPTRFRTKRQFRNYCGLGIVTRSTSDYVRTADGSWKRQPVQQTRGLNRNRNATLKSVFKGAATTVIQKLPDHPLYRDYQQAVQSNVKPNLARLTLARRIAGATLAIWKKKEKYDPAKHQRSKTTS

SEQ ID NO: 353552 - protein, 341 aa, unidentified
MVSTRAITGGAGTHADTHVAAALDGIGGLLGVSEFPATPAGYGQLTGWLQGFGTVGLVGIEGTGSYGAGLARHAAAAGIRVAGVDRADRQERRRQGKSDPFDAVSAARAAQSGRAAGLPKGRDGAVEAIRALMVAKRSARHERTQAINQARALLLTGPDDLRARFAGHTAAALAEAIAALRPRPGDAAGYAIRVALRELGRRAGFLDGQIERLDDLIVPLVTATAPGLLSLYGVGPDTAAMLLVAAGDHPGRLRSEAAWAHMCGVAPIPASSGKVRRHRLNPGGNREANHALWRIVITRMSAHPATRAYVERRAREGLPEKEIIRCLKRYVAREVYHHLRG

SEQ ID NO: 353553 - protein, 367 aa, unidentified
MSDRTSRPTASILTTVQLPTTVGLDISDRASHFHVMRGDGVSLKTGKVGTEAADLTRLFDEWAGCRLVIEAGCHSPWISRLGLARGLEVVVANPRRVELIAKSDKKTDRTDAETLARLGKSNVEVLAPITHRSKQAQEHLAVLRSRDAAVSARTMLINQVRGTLKSHGHRAPKCAAQCFASRVTKTIPAELAPALLPIVELLTHTDQAIRGYDKKLERIAAEHYPVTEQLRAIRGVGPIVSLALVLTLDDPKRFKGRDVGAYLGLVPRVQCSGKMQPQLGITKAGDREMRRLLVISANYILGRYGPDCDLRRFGLRLAGDGGDKNAKKRAKVAVARKLAILMHHLWRTGAAYDALYLAKKKGETVPA

SEQ ID NO: 353554 - protein, 351 aa, unidentified
MEYVGIDWATRRAAWCALNAKGEVVGEGVVSADLDGVLRLVTSAGREVRAAIEMMSGAAWVAETLQAAGWQVQVADSRKARALAPLAAKTDKIDARVLAELVRRDLVPSVWVPPFADRALLEQLLRRMHLVRLRTSGKNRIFGILTQWGVRVPVARLRKSDGLALLERRGVPEVWRDSVQEMLATIDYLDERVAQLDAVLRPLAAEDERARLLTTIPGVGPVIALTIATTVGDVARFPSAARLVGYSGLVPRVHQSGESSRTGRLSKAGSPLLRWAAVEAAQHAWRPQNPWHRLYVDVRRRHGHGNAAKAAVARKILIASWHVLARHEPFKPAASVAAPIVPASSSQPLAA

SEQ ID NO: 353555 - protein, 322 aa, unidentified
METLHSHCAGLDIHQKEIVVCTYIGSSDEELIKEIRTFPTMTKNLYEMLQWLKKLNITHLAMESTGIYWKPVFNILEDYFDITLANAQRIKNVPGRKTDVADAEWIAKLLRYGLIEKSFVPPVDIRELRDLTRLRKKMVGNMTAEKNRIQKTLECSNIKLGSVITDVFGVSGRKLLTRLVEQGYVNPNEVEENIHVRMMPKASQIAESLFGTLNPHQIFLIRQSWNHILFLEESIQQLEAKIDEILLPYQEQVELLLTIPGVKKHSVASIIAEIGVEMNQFPSAHHLASWAGLSPGNHESAGKKKARAQQKEIRTSNQHFAK

SEQ ID NO: 353556 - protein, 343 aa, unidentified
MEHFAGLDVSVKDTSVCIVDDTGKIIREVKAASEPAALLAVLTNPTYHFKRIGLEAGPLSQWLLSALAEAELPVICVETRHMRAVLKAQINKTDRNDARGIAQMMRVGLYRPVHVKTLRSQKLRMLLTHRKLLQSKAIAIENDLRATLRNFGLKVGIAGKVKFEARIKELVENQPDLAVLVEPLLIVRRVLREQIGILHRRLLAVVRDDEVCRRLMTVPGVGPVVALTYRATVDVPARFRKSKAVGAVFGLTCSKYQSGEIDRSGRISRCGDEMMRVMLYEAAQSMLFHSTKWSWLKAWAMKIARHRGMKKAIVALARRLAVIMHRIWVDGTEFRWTKEVVTA

SEQ ID NO: 353557 - protein, 406 aa, unidentified
MQILYPRCAGLDVDKDIIVACVRCVSAPKHHEVRSFASTTTGLLALSDWLATHACTHVAMEATGVYWKPVWHVLEDHFELVLANAQHIRNVPGRKTDVNDATWIADLVAHGLIRSSFVPPAATQELRDLTRTRKQLVREISQHSLRIQKILEDANLKLASVLSNILGCSGRAILAALVAGEDNPERLAALAQGNARKKTTELREALRGHVTAHHRTLLRLHLDLIAALERTRADLDVAVGEALAPIQQHVNLLTTIPGVSELTAQVILAEIGTDMTRFIDAGHLVSWAGMCPRNDESAGKRRSTRVRKGAPWLKTALVTAAWVAVRVTHSYLHARFLRIKARRGAKKAILAVAASILTSAWHMLRDGVEYADLGAAYFSQRDAGQTIQRLVKRLTALGYAIQPPAA

SEQ ID NO: 353558 - protein, 345 aa, unidentified
MKHYAGLDVSVKETSVCVIDEAGKICREVKVPSHPEDLAAALNDPAWRLERIGLEAGPLSQWLFSGLLEAGLPAVCIETRHTKAFLKAQVNKSDRNDARGIAQMMRVNLFRPVHVKTLTSQKRRALLTARKILQDKAVAIENDIRGLLRNFGLKVGVVGVAKFDERIRELVEGMAELVEIMEPLLAARQKLREMFTALHRKLLSIVRDDGVCRRLMTIPGVGPVISLAFCATIDVPARFRNSKAVGPSLGLTPVLNQSGESLRVGRVSLCGDDMMRALLYEAAQVIMTRVQKWSWLKAWAMNVAKRRGLKKAVVALARRLGVIMHRIWVDGTVFRWTKEAAPATA

SEQ ID NO: 353559 - protein, 343 aa, unidentified
MSNDTRIGVDVAKAVFEIAISDRPGHVTRRERLPRGQFLAFMAQQPQATVVMEACGSAHHWARKIQGLGHRIVLLPPHHVRPYIRRNKTDRTDAKGILEASRNEDIRPVPVKSVDQQVLTSLHRLRSGWMTERTARLNALRGLLRELGVFIPMGAREVVPFVWSLIEDADSDLPEALRPIFAEACREIREIEARVKQVERQLEATAAQLPAVEHLRTIPGIGLLIATALVAFIGDIRRFPSGRHFASYLGLTPREYSSGLKRNLGRISKRGDGYLRTLLIHGARSVLIHARKQQPDRLRQWANNLAKTHVHNKAAVAVANKLARIVWAVWYHQRSFALIAKAA

SEQ ID NO: 353560 - protein, 430 aa, unidentified
MSSVSEERERRQVVPDAGCGVVVGVDISKGRADWRGCRPGQWGKRHHLVQDEAGFLGFEEQLRALAEEGREVWVAMEPTGPYGLCLQEWLLERGWRTVLVNPYHVHRTQEIPDNSPGKDDAKDPGVIAELVWRGSYSHPRHVEGPYAELRAGIREWFSLAKKRTATENEARALLEVWFPELGRLFRSGLCLSVRAVIRRYESPQAVLGAGKGRLRRTLRAGTSGQGGRYAEAILEAAKQSVALREGQLSRVRALRGLVAQLELVERRQEQLRGELEQSLTETAEGECLRSVPRLGVIIAAGLLGECGPLGDFPREAALEKFVGLHLYRRASGMRRGKPHITKRGRSGARALLGRLAALHMQPGGLGWAWAQRQRERGKQGVEIQVGLARKLLGLVHGLCRRHEHFDRKRWEAGAQVADGVGVLHGMRVAA

SEQ ID NO: 353561 - protein, 370 aa, unidentified
MLDTTTFVGLDVHARSIKAVSLDVMTGEVRCATFGYDAGAVAEWVRSVDPKARCVYESGVTGFDLQKRLSGLGVDCVVGAVSKMIKPSADRRRKNDRNDAEFLARMLSVGNVVEVWVPDDECEAARDLTRALEDARDDLSRAKQRLSKFLLRHGLAFDERTPTGRRKGNWTRAHWSWIESIRFAEGADNDVLAYYVDAVRRAAEEKARLEGLVEAEARKPRWRRRVDSLRCLKGVDTATAADLVFEAGEFSRFRNARSFAAWVGLTPSEHSSGESDRRGAITKAGNKHLRKALVEAAWHYLTCSGRPKDLAKGQAPDRVARRHAAKGVRRLVERREALLARGVHGNKANVATARELACWVWAVGLMAEEA

SEQ ID NO: 353562 - protein, 405 aa, unidentified
MPYILALDVSMGHSYSVLYKDDTCLFEDEIEHTQRGFHALLEEIQHLPERPLIVFEATGIYSRPVEKFFQDHHFSYCLLNPLEAKKQMEESTLRSWKTDKSDAHRLAQTHLKNQRQPKEVQSNFYLEMRDLARFYQEIEKKITRLRMDLHNCLQLTFPELEQFFSNRLTPYALTLIRLFPHPDFVLASTRTKIKNKLINETRKKISANRAEQKADQIIHYAQCAYPAVEKDSIHCQKTIYYAELLQDLLEQKEALATQMIKKAEGSPCFLLYQTFPGIGALTAALLLGELGDITRFKTHKQLNAFVGIDIRRYQSGKYTGQDRINKRGNPKARKIIFFTIRNMIRQQRAAPNHIVDYYYKLKKQPIPKKDKVATVACMNKLLKCMHAMVRAHTEYDYAYAVSVDH

SEQ ID NO: 353563 - protein, 340 aa, unidentified
MKDTVIGVDLAKNIFQVHGASRAGEVMFRKKLRRQQFMQFMATQPPALVVLEACGSAHYWARELAGAGHEVRLIAPQYVKPFVKRQKNDAADAEAIVIAARQPEMRFVEPRTEAQQARGVLFRARQRLVHQRTELVNALRAVLYEFGLVVPQGIAHIRHIEAMLDEAVLPEAVKQECLDLLRQISEQSVRIDVRTKKIRMLAQESENTCRLQSMPGVGPLTALAIEAFAPDLQSFRRGRDFAAWLGLVPRQFSSGGKERLGKISKAGQADIRRLLIMGAMTQVNWASRKAPAPGSWLARMLTRKPRMLVAIALANRMARAIWAMATKQEDYRDPALSLAA

SEQ ID NO: 353564 - protein, 402 aa, unidentified
MRYVVGLDWGSTEHAVCVLGEDGREAARFAASHTAEGLAELRRRLARFGSPAELPIAIERPTGLLVDTLVEAGHPVVPIHPNAVKAARPRHRMSGAKSDGADAFLLADLLRTDGHRLAPLRPQSDEIRALRALVRGRDDLVATRVQLANQLRGTLDGYWPGAAAIFAAIDSPIALAFIRRYPTPAAAARLGEGRLAAFLASQSYSGRRSPAELLARLRAAPLGLVAEAEAVARGELATALAATLEALVAQIATLTARIAHAVAALPEGRIVMSFPRAGTICAAQITAELGNVRARFPSNETLAMEAGVAPVTKQSGKSRAVIFRWACNKRLRAALTCLADNSRHACAWAAEVYRRARTRGCDHPHAIRILARAWTRVLWRAWQDGKPYDPAYHRSAQLPVAA

SEQ ID NO: 353565 - protein, 412 aa, unidentified
MQVQYLRCCGLDVHKATVVACLLQMDADGRRSTAIRTFGTTTDDLLALGDWLRANSATHVAMEATGSYWKPVFNLLEGQFTVWVVNAAHIKAVPGHKTDVHDAEWIADLLQHGLLKPSFIPDRFQRELRDLTRSRTIVVDERSAVVNRVQQVLEDANLKLAGVATDIMGVSGRAMLAAIVAGTTDSATLTDLAKGRLRSKREQLERALSGRVGAHHRLLLGMHLTHIEFLDELVAQLTAEIAERLKPFEDELQRLDGIPGVGRSTAEVLLAEIGPDMTRFPTAGHLASWAGMCPGNYESAGKRKKGKTRKGSKFLRRALTEAARAAARKRGCYPAAQYRRLVVRRGPGKAAVAVGHTLLVTAYYLLLRHDTYRDLDPSLLDERLRKRTRQRALAQLQALGYDVALTEHQPAA

SEQ ID NO: 353566 - protein, 339 aa, unidentified
MNITTIGIDLAKTSFSLVGSDKHGKIVLRKTLSRNKLLPFIAQCPPCMIGLEACSGAHYWAREFEKLGHRVRIIAVKFIEPYRKGGKNDNNDAEAICEAVRRPNIWYVPVKTADQQAALCVHRVRQGVVRDRTAWVNRLRGLLSEFGIVMPKGRYAVQSAVPAILGDPDNGLPELARQMIHDLWLSIQQANDQILGYDRALSRLSKEDETAKRLLTIPGVGEQIATGVVASVPDPRLFKNSRQFAAWLGLVPRQYTTGGKIRLGRITKRGDKYLRMCLVHGARAVVAKLGDKQDQVSCWVRDLIERRGYLRAVVALAARNARLIWTLMMKRENYRLIKN

SEQ ID NO: 353567 - protein, 416 aa, unidentified
MADQNQWYAGVDWASDSHHVLLTDADGRSIAERAFKHSGEGLAEMAAWLIASSGGAAASAIKVAIEVPHGPVVEMLLERGFAVHAINPKQMDRFRDRFTLAGAKDDSRDAQVMASALRTDPRCFRPLAVADPVVIELREWSRIAEDLGAERNRLTNRMREQLWRYFPAMLDLEDDLGAEWLLDLWQAVPTPDKSARIRETTLVKLLKRHRIRRFDAAHLLDVLRRPPVPVAAGTTEAASAHITTLIARIRLVNRQIKDAHQRLDLLTSRLMPTADAAPGQNKQRDVEILASLPGVGRIVLATLLAEASDALQRRDYAALRSLTGVAPVTKRSGKSCIVVRRQACHHRLANAVYHWARVAVQHDPRSRAKYAALRTRGHNHGRALRSVADRLLNVACAMLKTGTTFNPSQAAQKTSC

SEQ ID NO: 353568 - protein, 314 aa, unidentified
MKSYHTFMGIDIGKLTFVVALHGQPSTHEYDNTPEGIHLFLSEHESILSNAFCVLETTGGYELALLYTLCDRHIDVHRADTRKVKNFIRSFGNAAKTDALDSKALARYGMERQAILTLFKPSSNQAMTLFHLVHRREDLKHMLVAEKNRIKNPTCASLIKDSCTEVITLLTAQIETITQYIQALINEDSLLKAKQKKLMSIPGIGKIIAIELLILLPELGTLNRRQIASLVGVAPIARESGQFKGYRKTGHGRQSIKPLLFLAAMAARNSNSELKHFYERLSEKGKKKMVALTALMRKIIVIANAKLKTGDMVA

SEQ ID NO: 353569 - protein, 311 aa, unidentified
MDCYVGLDASLKKTSVCVVDGTGKVLCEGVVDSQPSAIAKFLKSRALGAIRIGIETGPTSIWLTTELRALGLPVICIDARHAKAVLKMQINKSDRNDAAGIARIMQTGWFKEVRLKGFDSHAVRALLTSRATLVKIKRDLENQIRGLLKIAGLLVGTARGNAFSQRVLELAEQSPELAVSVIPLLTTREAIGKQLYDLDRKVLRLARGDRQAQSFMTAPGIGPVTALCFRATIDDPARFSRSRSVGAYVGLTTRRYSSGELDWTGRISKCGDPMLRSYLYEAAGVLLTRTEMVGAEGVVHAPGQAYRHAQG

SEQ ID NO: 353570 - protein, 380 aa, unidentified
MSNCIMIGCDLHDRNILLRFCEINGEPEQASFNNDERGRARMITRLQTVAKKHNAERIVFAYEASGQGYGLSDLLRDHGIECHVLSPTHLPKTPKSAKQKTDAKDAQMLLEQVRGFVLAGNTLPVVWTPPQRLRDDRELVRARVDAADERTRVKLQILSMLKRRGIAKPTSYTPSWTKRFVEWLREVASSLDAAVTPVLESLIDRYELYRTEQTKLDKAIKQLSQTDRYQRPCQELRKLPGVGLLSAMTFLTEMGDLNRFHNRREVAAYLGLCPASFESGQANDRKGRITRQGPARLRKVLCQAAWVSLMHCKESSEFYHRIKGGKSNRTKKALVATMRRLAIKMWHRAAACGVSCELEGRGGPHCLEASSASGTMAGAA

SEQ ID NO: 353571 - protein, 344 aa, unidentified
MGTRLPVFVGIDYADQVSQVVVLDGDGKELGSRRLASETERIVAYAERFGPLGGAAIEAGCGAATLADDLIQQHHWPLQLAHPGYVRRMKQNPDKTDYSDAKILADLRRVDYLPGVWLAPPAVRELRRVTRARQALVEEARRVKLRVRALLRDHRIGRPETVRRVWTQRGVRWLTELTSDVRLPRDSQWLLQQHLDHLRYLAGSIAAGEKRLEEMTVSDPLVQRLLEQVGIGLITACVLRAEIGQFERFGSGKPLAHYCGVSPQNASSGQRQADAGLVRGGNRQLKLALIELAHRLKRYDDRWRTLSDRLASAGKPRCVIVAAVANRWVRQLYYQLRSVPAAAA

SEQ ID NO: 353572 - protein, 351 aa, unidentified
MSRQSMRSAVTTIGIDLGKNTFHLIGLDQRGNIVLQLKTSREQLERRLTNIPQCLIGMEACSGSHHIGRQLEALGHVVRLMPAQYVKPFLKGHKNDYRDAEAIAEAVQRPTMHFVSIKTPEQMDLLALHRVRSRLVSQRTGVINQIRGLLIERGITVRQGPTPLRKALSDILSPSSQTLSPRLVRLIIDLAEDWRRLDDRIATVSTEIEALAEQDGPCQRLMTVPGIGPIISSAVVAAIGNGTGFKQGRDFGAWLGLVPKQESTGDRTILGKISKRGNKYLRTLFVQAAHVVLARRPSTAMRGLWPWIEQASRRLHRNMLAIALANKLARIAWAVLARGRDYQPTIMPHAA

SEQ ID NO: 353573 - protein, 358 aa, unidentified
MNCVGIDVSKGKSMIAVMRPFGEVVVSPFEVRHTANELSELAGLLKSLDGETRVVMESTGNYHAPVAWLLHDAGLYVSVVNAMLVHDYGNNSLRRAKTDKKDAVKLANYGLDHWLTLPRYIPEEDTRLMLKICYRQYQQYSKVQTMLKNNLISLLDTTFPDANRLFTSPPRADGSEKWVDFVATFWHCECVCGRSEKAFTTQYQKWCRKHGYNFSEDKALDIYASACRHFGVIPKTDTAKLLVEQAISQLQTTSSALAALKQEMQSLAASLPEYPVVMGMFGVGPTLGPQLLAEIGDVRRFHSKKALVAFAGIDAPPYQSGQIDVRSRSISKRGSASLRRTLFLVMSVILHCLSLIHI

SEQ ID NO: 353574 - protein, 342 aa, unidentified
MEQVSVVGLDLAKSVFQVHGVNAQGEAVLRRRLTRGQLLKLFEKLPPCLVGMEACASAHHWARELAALGHEVKLMPPQYVKPYVKRGKNDAADAEAICEAVTRPTMRFVGAKSPDQQATMMLHRVRQILTRQRTQISNALRAHMAEFGITAAIGRGGLERLIAVIADQDDARLPDEARACLAVLSTQLEMVKEQILDNDRRILADARRTEAGRRLMKIPGIGPLLASAIVACVPDPATFGGGRSLSAWIGLTPRQNSSGGKERLGSITKAGNTYLRELLVVGAMAVVRRAKQGSTKRPWVTQLLTRKKPKVAAVALANKNVRIIWAMLASGEAYREPELAAA

SEQ ID NO: 353575 - protein, 331 aa, unidentified
MRKVVIGIDVSKVTLDAYWVNAENLKEHYHDSFLNKLLGFKQLIEWVKSKGTDEVFYCIENTGHYGRSLCSFLQKNSFDFAQVNAAEIKLSMGIKREKSDRSDALMIAHYGIKFPERMYTNTLLAEDLLGLQLLLSQRKLLQEKELAFQRSLKLSKHCLPSDQVARSLVKDNTRHRKYLHRERGKIESRIEDYVSSLPVVKSNYDLLKSIPGVGPIIALHTIVQTHNFKEISCPRKFSCYCGVAPFKNESGTSIRKGTRVRFYGHKVLKRILNFGAMNAVKCDPQLKVYYKRKVAEGKSKMSVLNAVRNKLIHRMFATVKRGTPYVVHEMH

SEQ ID NO: 353576 - protein, 334 aa, unidentified
MNEITTVGLDLAKNVFQVHAVDAAGAVVIRRQVRRAQLLLFFSRLKPCLIGMEACAGAHCWSRELAKLGHEVRLIPPSYVKPFVKRGKTDAADAEAICTAVVQPTMRFVPVKTEAQQAVLMSHRTRDFLVRQLTQLANAIRAHLGEFGLVVPKGVHNMGRLVAEADAADLTPQARMPLELLVGQFSDTKARIDTITADLRRAAQADETARRLQAMPGIGPITASVLTATLPDVSAFRSARDLSAWLGLTPKPHFSGGKERLGAISKMGNRYIRRLLYLGAMGVISTRKRSDPGEDWLGSMLEKKPPKVVAIALANRMARAVWAMLRTGETWRAA

SEQ ID NO: 353577 - protein, 337 aa, unidentified
MTRYVGVDLHRRRSVIVVLDGDGTELWTHRIDNSPVALGLEIEEAGPEPEVVLEATWGWYWAADVITQAGGRVHLAHPLGIAGFENRRVKNDRIDARLLADLLRMGRLPEAWIAPGSVREQRELVRYRRKLSQLRAGLKAQVHSVLGKEGLLPSLNYLWGPGGKAWLDETDMAEAYETRVRSLRRLIKIYDTEITKLDARIAKEFKGHPGYQAIQAIHGVGPVFGAIFCAELGDVTRFKSAKHVCSWAGLTPRHRESDAKIQRGSITKQGSPLVRWAAIEAVSKNHGDDPIKDLYRRVAERGGRNKARVAAARKVLTLVYYGLRDYEIRSLAPPEAA

SEQ ID NO: 353578 - protein, 522 aa, unidentified
MAIYGLVGRRCDLVGEIYIFRNRAEPMNHNWKGEWMSKRVQKRQERKRVQPKVDWKALAVVHPDAAGIDIGGSEHWVAISPDRDEQPVRCFDCFTADLEQMADWLAARGVRSVAMQSTGVYWIPVFEVLQQRGMEVYLVNARHTKNLPGRKSDIAECQWLLKLHTFGLLQNSFQPSDEIRAVRTLWRYRGGLVGQASSTIQRMQKALIEMNIQLSNVLSDLSGVSGMAIVQAILEGKRDPQELAALADPQVKASQEVIAKSLHGNWRSELLFVLGQEMDSYRALRKRIAECDGKVQQHLQRMGSRVDLSVQPIGPRPKGKRARGNAPQTFDLRSELYRLTGVDWSQVDGIDVQVAQTVIAEVGTDLKAFPSEKHFANWLGLCPTNDSSGGRVLKRRTPKVVNRAKTAFRQAASTLIRSHSYLGAQYRRLRTRLGAPKAITAMARKLACLFYRLLTKGQPYVDRGAHYYESHHREQQIRSLIKRARQLGLQVLSGNGQPLGLTGSFPGGPIRMTVPAPWFLVS

SEQ ID NO: 353579 - protein, 407 aa, unidentified
MQEATQHDAVDVFVGVDVDVGVDVGKGQHHAVALDRNGKRLYNKALPNDEVKLRALIAELKTHRRLLFVVDQPSTIGALPVAVARAEGVLVAYLPGLAMRRIADLHAGEAKTDARDAAIIAEAARSMPHTLRSLRLADEQLAELTMLRGFDDDLAAQVTQTSNRIRGLLTQIHPALERVLGPRLDHLAVLDLLERYPSPSALAAANEKTLANRLTKLAPRLGKNWAAEIVQVLNEQAVIVPGTQAAAIVMPRLAQQLAALRKQRDEIAAEVERLVLAHPLWPVLTSMPGVGVRTAARRLTEAAPKAFATATHLAAYVGLAPVTRRSGSSIRGEHPSRRGNKVLKRALFLPAFAALRDPVSRAYSSRKIQQGKRHNQALIALARRRCDVLFAMLRDGTIYPPKSAPDA

SEQ ID NO: 353580 - protein, 499 aa, unidentified
MPSRRKGKNTMTTAGKQPSKKEGFDPQRSALKRKARGRCCFEGKGKRRKSKLSVINPDAAGVDVGAQAHYVAVPEDRAAVSVRSFGTCTAQLDEIVQWLKDCGIKTVAMESTGVYWIPLFQKLEEAGFEVLLVDARQAKHVPGRKSDVQDCRWMQQLHSYGLLRAAFRPEDGICRLRTFQRHRKNLVECAGMWIQRMEKALNEMNLQLHHVLSDITGQSGLAILDAIVAGERDPSKLASLAHYRVKKSQAQIEAALRGDYRPELLFVLRQSLENYRQMQQQILQCDLSVEKQLAAMSHQSKPSEHLESKAQAEDSAHCRPGKEKPKNGLESTLAAHLKRILGVDLTTLPGLNVLASLTLLSEIGTNMTKWRNYKAFVSWLGLSPNNKISGQRVLSSRTRKVVNRAATTLRLAAMLVGKTDTALGSFYRRKRAQLGAPKAITATARKLACLIYHLIINGQAYKEPDLRTYELKYQEQILQSLRKRAKSMGFDLVELPKAA

SEQ ID NO: 353581 - protein, 309 aa, unidentified
MEHFVGIDVAKDRLDVHLRPSQETFAVARDGEGLAQLVDRLQTLAPQLVVMEATGGYEAIVASAVVAARLPLAVVNPRQIRDFARATGKLAKTDRIDAAAIAHFAEAVRPPVRPIADAEAQALGELVARRRQVIEMMVAERNRRRRVTQSRVRRAIDRHLELLQTELSELEQDIDGAIRKSPAWQADADLPASVPGVGKATLRTLIAELPELGRLDRRKIAALVGVAPINRDSGTMRGRRTIAGGRPTVRTALFMAALVASRANPIIAPYYVKLRAAGKTGKQALTACMRKLIVILNAILRDRKPWQPA

SEQ ID NO: 353582 - protein, 331 aa, unidentified
MDEVRRFVGIDVAKVALDVFIGSVGAAFSVANDEVGIRELLRQLEPADFVILEATGGLETPVASALAAAGIAVAIVNPRQVRDFARATGRLAKTDRLDAEVLARFGEAVRPEARRLADEQGQALEALVNRRRQLVEMLTAEKNRRARAPKVLHRSLDEHIRWLQRRLSGFDDELGELIRNTPLWRERDELLRSVPGVGKVLSSTLLAQLPELGMLNRKQIAALAGLAPFNRDSGSLRGSRCIWGGRAQVRRVLYMATVAGVRSNPTIRTFYLRLRANGKHAKPALVACMRKFLVILNAMLHHKTHWQTPALTSPTSSLSPLLGAVSEHGCF

SEQ ID NO: 353583 - protein, 414 aa, unidentified
MKLWQEITHYAGFDWAHDHHDVVIVDRHGEIVADFSIGHTAQGWQRWREHAAELGPGLAVCVETSQGLLIEQLLESGVSLYPIAPVSSKAYRERKAPSGTKTDRLDAWSLADALRLDGHNWKALAKEDPLVAELRVLCRDEVALIEERTALVNQLQSALQEYYPVALEAFEDWTLPAAWAFVEVFPTPGALAAAGKRKWEKFLHTHKLARPQTYAKRLEIFARANEFVSGEVLTRTKSRLALTRTRMLRVLESQIEAYRAEIEKLFAQHPDHHLFGSLPGAGSKIAPRLLGEIGSDRTRFDSLSALQALAGTAPVSYQSGQIHKVFLRRHCNKALRATIHLWANLSRRGSPWAALYYQALRARGKSHAGALRCLGQRWLKILWKIWQTHRPYDPDLHTRNQLKHGSWVLTLHSA

SEQ ID NO: 353584 - protein, 316 aa, unidentified
MAMRVSKSIVGVDVAKVELVIYQADPDLLTSIANEKPVIKRWLKTLPGATAIAVEATNIYHVELVELAYESGFDVYIIDGFQLSNYRKGVGGRSKTDASDARLLARFLKNEGEDLRPWSPPPAVYGKLQSLLRRRASLVQAKTALTQSWANDASLKAAFAAFLKSIEKLDLLVKKKLKDVLREAGLLEQVARCQAVEGIGFLTATALVMAYSRRDFNGGDSYIAFLGMDLRVTDSGQKNGRRSLTKRGCSEIRRLLHNAAMSASRTSAWKEFYDHHRSRGKATTQVLVMLARKLARVAFALMKNQSEYRAKGQVMA

SEQ ID NO: 353585 - protein, 379 aa, unidentified
MKRTYYIGLDVHKESVAIAHAVGGSRQAPVYFGECGGSNLSIERALRKLAGTLGVKLRELKVCYEAGPTGFVLARRLRTLKVETSVMSPSKREHEKQSRIKTDRRDAKAIARLFRNGDITEVRVPPVLDEAVRDVCRARTDASDDLARARQRLNAFLLRNGYRYSGKARWTPAHMSYLRELVLPEPAQKVVLEEYLQAIDTGLERVERLREKMIELLGQWEWKPVVKALMACRGFQEVAAMTLVAELGDLRRFEHPRKLMAFLGLVPGEYSSGDKRRQDSITKCGNSHARWMLVECSQHYRRSPKVSSQLTLRQQGQRKEVKALSWRMQNRLHSRYVKLKMRGKRENKVIVAIARELCGFLWELQNKIISDRIPASSAA

SEQ ID NO: 353586 - protein, 430 aa, unidentified
MKSNTQNAKIEAITEKTLVLGIDVGSETHYARAFDYRGVEYSKKPFKFSNTEAGFVTFKAWVLDIKEKHGKDKVIPGMEPTGHYWFNLGKFLQDNEMKPVLVNPHHVKKSKELDDNHPTKNDRKDPKVIAGLVREGRYMIPYLPDGVYADLRTASNIRFQLQAELTRIQNRINRWFNIYFPEYKTVYGKPDAKSGMLILKAAPLPEDILTLGIDGVNQIWRDAKLRAVGKARAKTLIEAAEHSVGSKEGAVSARMEIRMLLEDYESRNIRLQEVMGLIEGLVNQIPMAEKLLEIKGVGIKTVSGFLAEVGDIRRFNDPKELQKLAGLALVENSSGKHKGKTTISRRGRKRLRYLLFEVAMSLVAKNPEFRELHNYYTTRRLNPLKKMQSLMAIAAKLLRVFYAILTKGVGYDPKKMVNDIRRPAAYAQAA

SEQ ID NO: 353587 - protein, 344 aa, unidentified
MQIRSVGIDLGKTTFHLVALGAAGKVLAKKKFTQKQLLAFTANMQTSLIGLEACSGAHFLGRALRNQGHDVRLIAAQFVKPFVKSNKNDFVDAEAIAEAVERKNMRFVPIKTDDQLDLQAMHRIRDRLVSRRTAVINQIRAFLLERGMVFAQKPAKLKAAMADVLENAENTLTPMMRNMIGILWDEWKTVEQQIDELTDRLEQIASSDAGCCRIRQIPGIGPIVATALVAAIGNGAAFRKGRDFAAWLGLVPRQYSTGGKAKLLGISKRGNTYLRKILIHGARAAAMRIKRDRFAIGRWMNALESRAPRNVLVVAMANKLARIAWAVLSTGEDYRPGGTASVAA

SEQ ID NO: 353588 - protein, 570 aa, unidentified
MTTLVQSFWYLSEGWMLVRRVSPLGELAKPHQLSHSSGFVSQISWRLNNEQEVVKLPCFFEPSGTCRWHDVRSVCNEAAEKTKGGSLTMKKRNIYLSRSQELLGVFEQAPSGAKVMCVPMDYAKKDHTVMFCNGYGDIVRKPFSVKNSPEGLKYLTQQVVRSCGHRGISRKHVFFGGEDPNSYAENFANRLRSEGWLVANVNARDAKKQRANLQASTDRLDLMGIAVMLLNRRANCCPAQSGIYRNLRTLVRHRRKLVIMKTEVSNRIHTVVDRLFPGFLNERNTGVCPFTDSSLWLMENRFSARQIRRRRRPSLIEAFRRYGTVEPEKTAAKLQQYAAQVLSTPPEYIGTLQLSLTQHVKHYRCLQKNIGQAEKEIALWLAQTQGAFLTTVRGIGIVLAAGVTGEIGDPNEQKPVNNLVSYSGIVPRVKQSGGCEGKIYIGQVAKRCNRILKNYVVSSAVHLGFHGPPELMADHKRRDAAGQHADFGIARRYLRMAMCLMRTSQVYVPHRLRSANASPQERAGYYLTMWPAVREKWKKLNALKAAFEKDRPLGQWRDMVQKLYEIKLSL

SEQ ID NO: 353589 - protein, 392 aa, unidentified
MVVSVGIDVSKDKHDCFIVSSDGEVLADVFTISNTLDGFHGLLQRIQECSAPQDKIRVGLEATGHYSYNLLGFLLDNGLPTYVLNPLRTNLYRKSLSLRKTKTDRVDARTIASMLLSDAGLKPYTDTAYHNEELKSLTRYRFDKVKERAKLKSSVSRLVCILFPELEKLAPSLHTASVYTLLEEFSGAKQIAAAHLTRLKTLLETASKGHYKRDMALEIRDAARNSIGSWMPAKSLELQHTIRLIRELDNEIAEIEEQIQSIMDELHSPITTIPGLGFRMAAMIFAEVGDFTRFDSPDKLLAYAGMSPSTYQSGQLKNCYPHMEKRGSRYLRYALYNATKYVCHWDPTFAAYLAKKRAEGKHYNVALSHATKKLVRLIFAMEKSRQPYRLAA

SEQ ID NO: 353590 - protein, 404 aa, unidentified
MGRIYVGIDWADDHHDVYVTDDTATALDSFTIPHSCEGMEKLENRVGKYCANREAVLVAIESHQGLLIYALLEAGYQVYPINPKAVDRYRDRYRMSSSKSDPKDAMVLANILRTDLHLYKPLPRETAADARLRQLTRAHKSLGQQKVKLLNQLTTQLKSYYPVALRLFSRLDHNITLAFLERFPTPEKAAVTSLEDLKRFFHEQDYSHQWRATSIYESLQQPGLRAPRELEEIHQTIVLSLVPILRSLQGEIERLAKEISQEFKHNPARELFSSLPAGEMTAARINGELGSDGARYPTREYLQTAAGTAPVTRRSGKTVVVFFRWQCNKHLRAALQDLARESVKRCSWARRYFAGQMRLGHKPSRAYRALANRWAAIIWKMLQTRQCFDQSRLGRSNAKASSTI

SEQ ID NO: 353591 - protein, 370 aa, unidentified
MKTIAYLGMDVHKDTFNLCALDGTTGEILGETRCASDVKLVKKFIEKVAKDHKKEIQIKAGYEAGCLGYSLHDLLEKQGIDCDILAPTTMYSSSKNKVVKNDRLDAKMIALNLANNTYKPVYVPDEEDICVKEYIRMMKDFKTSLKKIKQQIKAFLLRHGFIYKGKSSWTIAHLKWLKNLEITGLLKETLEEYLLQYDVLTDKIERFSQRIEELSHEKRYEQPVAQLRCLKGVDTTTAMTLHVEISDFTRFPNAKAFTAYLGLTPSEHSSGEKVSRNGITKQGNTTVRSTLVECVNALVKGTIGKKTKRVKARQKGQASKVITYADKATERLQRKYHRMMYQGKPRNVAITAVARELACFIWGIETKQID

SEQ ID NO: 353592 - protein, 340 aa, unidentified
MDITTLGIDLAKSVFQLHGVDAQGVIVLQKKLRRGAVVKFLSKLEPCLIGIEACATSHYWAREIAALGHDVKMIPPAYVKPYVKRQKNDAADAEAICEAVTRPNMRFVPVKTEEQKAVLVLHRSRDLLMRQRTMILNAIRSHCAEFGIIAAQGARKVSELVTKLRNDDTLGVPEVGVSALLSLASQLDCLEQEVRKIEHQLLAWHRQNAASQRLETIPGIGLITATALAASVPDPAVFKSGRQFAAYLGLVPRQNSSGGKDRLGRISKMGNGYLRRLLVVGATSVTRRAPTIDTRTGTWVRSLLEHKPTRVVTVAIANKTARTAWALLSKGESYKAVPAI

SEQ ID NO: 353593 - protein, 342 aa, unidentified
MYYIGLDVHKKTISYCVKEVSGQVHREGQIGATRRELDGWMKTLPQPWMVAMEATIFTGWIYDHLLPHAQQVKVAHPLMLRAIAVAKKKNDRIDAGKIADCLRCDFLPECHMASTAIRDRRRTLRYRHLLVRQMVQMKNRISGLLMETGVSYNKQRLHRVRYFRELLSSNEEVNESIRPLLRLSRDTIGRLQKTEYALVSSLQRDPLLAERIRHLRTVPGVGPITALTWALEMGDVSRFPSIREAISYCGLCGDEKSSADKMTRTPLSKQRNKHIQRVLVEAAKLAPRQDHDLALVYETAKQKGNGNRATLAVARKMVAYLLAVDRGQRDFVPAEAHRNAAA

SEQ ID NO: 353594 - protein, 403 aa, unidentified
MSPEHSIDIFLGLDVGKSEHHACALDRDGNKVFDKPLPQLESELAGVFHQLQELGTVLVIVDQPNTIGALPIAVARDCGCEVGYLPGLAMRKAADLYPGRAKTDKRDAFIIADTARTMPHTLRAVDRNDEVLSALKMLSGFDDDIARDCTRTVNRLRSILTQIYPSLERVFAGSTLTRTPILDLLIHYKGPQGLKRAGYQRVLNWMIKHTRKDPTPLVDDIFAALKAQSVTVPGSDAAELVIPQLAANIKALKEQRNTIAEQVEEMLADFPLCEVLMSMPGVGIKTAAQILLAIGDGSDFDSAGHLAAYAGIAPVTRRSGSSIRGEFPARSGNKRLKNALFYSAFAVIRSHEPSRQYYERKRAEGKRHNAAVICLARRRCNVIYAMLKNKEFFREIPPRPVAA

SEQ ID NO: 353595 - protein, 411 aa, unidentified
MHNRQNYLYVGVDLHKEHHTAVIINCWQEKLGEIQFENKPSAFSKFLLEVEIYVSAGVSVVFGLEDVGGYGRALAKYLVDHEQVVKEVNPALSFLERKSHVTTQKSDSWDAECVARILINKLNQLPDAKPNDLFWSIQQLVSRRNALVKAQSALKNQLHIQLNHHYPSYKKFFSELDGKTALAFWQQYPSPSCLEGANIKQLTAFLLDVSNNTCSVKKASDILKLVKEDGHTMKEYQDTRDFLVRSIVREIEFKKKEMKYIERELKQLVNLLDYQLETMPGIELVTASALIAEIGDIRRFLNANKLARFAGIAPVYFGSGGKGKTHKSKQGNRALHALFYNLAVQQVQVAKGSKKPRNPVFHAYYQKKLKEGKTKGQALVCIMRRLVNIVYGMMKYKIAYELPVVEEKEVV

SEQ ID NO: 353596 - protein, 415 aa, unidentified
MSLKIVYKICCGIDVHKTFVVACIASTNDKGITSYESHRFSTYTSGLKTLLQWLLNRNCKDVCMESTGKYWIPVYNILENDCSIVLAHPKYVKAIRGKKTDKKDAKWIADLFKHDLVAGSFMPPADIRQLRDLMRYRFKLTCFQSSEKNRLQNCLTVSNIQLGNVVSDTFGKSAQAILDKLLENPADTSFDLEPLVYKSLKKKLPELRDAIDGYITPEQAGKLKVIKSHYENLESRKAELEELILALAAPYQQELAILQTAPGIRSDFTAIGIISEIGTNMEAFPSAKHLCSWAGLTPTNNESAGKKKSVRVSKAGCYIKPLLVQCANAVVTSKKHPEIRNRYLRLKKRRGHKKAIIAIARMLLTALYHMLKNGENYNAELYRKSYLPPVDREITVEQAIIIARNQGYKIKSATA

SEQ ID NO: 353597 - protein, 329 aa, unidentified
METLYIGVDLHSASFQACAVMPDGTRVWEERFPRTDAGVAAFQARCPVDSAIAVEATTPTWHFVDAIAPRVQRVSVVDPLRTRLKAGFAAKTDRLDARRLADALRRDSVVGVYYPPLAIRELRELCRSRHALVHTRTALIQRLRAVLLRHGIADARQRLTRRAGLAWLDTVGLPPHAAASVRRLRRVVETVLDETRQVDATVTHVAGGDPVVARLVTITGVGPVLGLTMRAEVGDISRFATPKHLASYAGVVPRVDASAGRAHYGRITKTGSPWLRWALVEAAMHGTRRSDPRGRWARRLAMRKGALKARVAIARTLCDEIWRVWPRSG

SEQ ID NO: 353598 - protein, 325 aa, unidentified
MQYCGIDVSKNKLDCAWLRDAETGKVKTKSTPNTPSGFRQLYDWLLKETCESPSNIQVVIEATGVYHETVAYYLHDAAFKVCVVNPLRSKRFAESLAVLHKTDKKDSVVLARFSKMVKPDLWEPETVEVRELKALISRLEALEKDLQREENRQEKVLVSYTSELVIDSLLKMIQALKDEKSRLEKKIDDHISKYPNLKNNRQLLESIPGIGPTVSRVMLSVLESRKFTSAGQLAAFLGLIPKHRESGTLKGRTTLSKNGPARVRAKLYMAAVSAIRYNPDVRAQYQRLQRNGKTSMQAIGAAMRKLVQICFGVVKHQNEYQPQLT

SEQ ID NO: 353599 - protein, 403 aa, unidentified
MNSVGIDISKGRSTIAVMRPFGEVVISPFEVRHTDSELSELARQLKSLNGETRVVMEATGNYHAPVAKLFHDAGLYVSVINAKLVHGYGNNDLRRVKTDRKDAVKLANYGLDRWLTLPRYVPEEDTRLLLKNCYRQYRQYSKVQTVLKNNLISLLDTVFPNVNRLFSSPIRGDGSEKWVDFVAEFWHCRCVSEKSQKAFTNKYQRWCRKHGYNFSEAKAHTIHAEACGHIDVIPKSETTKLLVEQAVAQLRATSAALAALKHEMQALASMLPEYPVVMDMFGVGPTLGPQLMAEIGDVRRFYSKKALVAYAGLDAPPNDSGDVTGRHKSMSKIGASSLRRTLFLVMTVYLQNAPLDEPVYQFMDRKRAEGKPYRVYMMASANKFLRIYYATVKAYLESLEHTA

SEQ ID NO: 353600 - protein, 348 aa, unidentified
MDIIGLDLHKRESQLAIKAEDGTIAERRIVTSRERFTAVLGGLPRARILLEASTESEWVARHLESLGHEAIVADPNYAPMYANRSRRTKTDKRDARTLMDACETGAWRPAHRLSEARRHVRAELAVRDALVRTRTRYIALAKALVRRDGLRVPTSASSWVPTRIAELDLSPALATELTPLFAVYAPLNEQIAAADRRLAAVAAVDPIVARLATAPEIGPVTASAFVATIDDVTRFGSAHQLEAYLGVVPSERSSGEKRQLGRITKAGNGRMRWLLVEAAWRILRSKSPETAALRAWALAIARRRGKRIAAVALARRLAGVLYAMWRDGVPYDAQRIRPLGVTVHERAG

SEQ ID NO: 353601 - protein, 401 aa, unidentified
MNAVGIDVSKGKSTVAIMRPYGEIVASPFEINHTEDDFKKLVSQIQKLHGESRIIMEYTGRYYEPLANYLYNAGLHVSVVNAILIHDYSNSSIRRVKTDKKDSIKIANYGLDRWLDLPDYMPEDELRQALKVYNRQCSQYAKLKVVLVNNLIALSDQTFPGIDSLFGKTPRQDGHQKWIDFIKSYWHKDCIIKKSFKSFDNSYKKWCSKNGYHYQSNKTIDIYQLAYEAVASMPYNANTELIITETANELISLVDTLERLRIEMNRIASQLPEYPVVLSLHGVGTTLGPQLIAEIGDVRRFHNRKALIAYAGIDSSPYQSGTIDIKSRGISKRGSATLRKTLFTVMDCILRHKHTDEPVYQFLDKKRAEGKHYYVYMIAGCNKFLRIYYARVSEYLNSLEK

SEQ ID NO: 353602 - protein, 340 aa, unidentified
MNEPTLIAIDVAKNVFQLCELDARMKVLRNESVRRSRLMKLMAQRPAARVAMEACYSSHYWAREFAAMGHDVRLVPAQHVKPFVRGNKNDANDALAIAEASQRPNLQCVPIKTLEQQDMQALHRVRIRLVRQRTMLMNQTRGLLSEYGVVMPKGIPSFRCALAVLLDPESDRLTPFMREELIEIDREFRALNDRLGRLERQMQHRAASHPLCALLTTVPGIGPVNATAIVAAIGKGDQFAHPRDFAVWLGLTPKQFASGDRSVHGRITKRGDRYLRSQLVHGARSVIYNCHRHDDPLRRWVQQLVARVGVNKAAVAVAARLAKLSWIMLQRGERYRAQTA

SEQ ID NO: 353603 - protein, 347 aa, unidentified
MKPPLNYVGIDVASATFTSAVGRMGEKWQIVVRPAQFANEYDSFAKYLHWLQAHEVKPDNSVICMEATGVYTEVLAHFLVANRYRVAIEPPLKVKRAFKPEGHKSDPVDSCQISEYAYRYWDELSLWAPRQELLEQIKTLLTTREQFVTEKAGHHNAWLALKRKAVRTPLAERAHEKAMGELKSHIQRLEAEIQRLIDQDPDFRNTVALLVSIPGVGMLLAAHMLLTIQSAPQPLSPKSLAAFIGICPYEESSGSSMHYTATSRHYGPPGLRKLLFLAALSVRTHNPHFQTYFLRKLQEGKPKKLIINNIANKLLKIMVAVVRSNTAFIPNFRSVNPGLLKKALTIS

SEQ ID NO: 353604 - protein, 367 aa, unidentified
MKKVSTAAVKTTKNVSQPKLTIGLDLGDRNSWYCVLDESGQIQLEQRVRTTATALREVFSEMPRSRIALEIGTHSPWISRLLSELGHEVIVANARKVRLIAESRKKDDRMDAQTLARLARIDPQLLSPVKHRSAHAQADLMMIRARAGLVRARTGLVNTARGLAKSYGERLRGCNVRNMNPEKAEGLSPELQSALEPLLNAIESLSERIVEYNERIENLAQQSYPQVALLKQIKGVGTLIALTYMLTLEDPHRFRKSRDVGCYLGLQPGRRNSGQSEPQLHISKEGDHYLRTLLVQGAQHILGPFGIDCDLRRWGLKLAERGGRSGKKRAIVATARKLAVLLHHLWVSGEVYEPLHNSNRTTVAAAA

SEQ ID NO: 353605 - protein, 344 aa, unidentified
MHFIGIDLHKRIFTACVLDDNEKVVDELVDIETDEKGLDLLMSRYPADDCRIVFENLTRAHFAFHYLYDHGYAVSVAHTGHGALREIADTNLKTDRVDAYKLALVCKDMWAGRRFIRRTHISSDENMRMKAVIRMCNELSCIRDEMKLRIMEYMNLHNIPEHPRYKDVAGMRYREYLLGLGDPALTRMVNMMSAAIEEIEASAKEIEAYAKRCEDARLLMSMKGISALTAVTVVTAIDGIYRFETPETLVSYFGLAVRTSESAGKRRKGCITKEGDPLVRKYLANVVKNHAMRCPDSDLARFYRRKSDEMPHWKAVTAAMRKLVCQIWHMLTYKEQYRPNVAGH

SEQ ID NO: 353606 - protein, 337 aa, unidentified
MKNSSQSMEFFVGIDVSKLTLDVTAIHTASKSKKYIQVENNDSGLNVLNHWLHDMPGFAHAQTVFCFEHTGMYTRVLLDYLLSQSANVWMESSLQIKKSLGLNRGKNDKIDSCRIAAYAYRFSDRATFVENNSPEILLLKDLLSARNRLKKSLQQISVKIKELTKVDFPQGKEIEALNLHAIRGLKASIEQIEEKIHQVITSDKHLKEVYQLITSIPGVGFILSVKLLVYTKVFTCFDNVRQLACYCGVAPFEYRSGTSVKGKTGVSKFANMDLKATLHLAAISAIQHNVELKKYYERKVEEGKCKMSVINAVRNKLLARIVAVVHRGTPYVQLTNG

SEQ ID NO: 353607 - protein, 343 aa, unidentified
METRRYIGVDLHRNCFTACVRLENGREYLKQWQLEDLSKFATKLRPTDQIAVEVTGNTRLFHDAVSAHVERVVAVNPNQFKVITHSVKKTDPNDARNLALYLSKDLLPEVRMKDKTQAQIASLTQTRDTMVKLRTALKSKINNVCSAHGVNLNKESLASEKGLRAVLDMKFDVLVNLELKIIVDQIRSLNKSIAELEETIAKEGTKLKGHMNLTSIKGIGGLSGSILLSIIGDINDFAEEGNLAAYFGIVPRVSNSNETEHSGSITKRGSKLGRTTLIQCALIAQRYSPYLKKYYERIKNRRGTGKAIVALARKFLGIIYRTLKNNWVFADFPNFVLAEPAKA

SEQ ID NO: 353608 - protein, 319 aa, unidentified
MAQNDLVVVGIDVAKDKVDVCIRSLSLRQTFPSTPQGDRKLVAWLRKHQVNKAVMEASGGYERAWAKVLREAGIEVRIVDPKRVRSFALSAGRLAKNDAIDAEMIAWFAETFSEAPSQKHDAAHEELQTLVKARLSLIDVRMRLVSQSEHAAPGLVQKAHAHILKSLASEIAKLEAAIYAKIKSMPDFAERAEIIESVPGFAEISSANLVAGMPELGQVSDEIAAALIGVAPYDDDSGKRRGERHIKGGRRWVRNAIYMPCVGAATQNNPVLKAYYQRLIAKGKEPKVAIIACMRKLIVILNTMIARRQKWDPSRYALS

SEQ ID NO: 353609 - protein, 457 aa, unidentified
MEVPVIYPSCCGIDVHKKMLVACVIVVRGQETCRDIRTFGTTWSELCRLVEWLQEVGCTQVAMESTGVYWHPVFNALEAHFPVMIVNAQHLKNVPGRKTDIQDAQWIAYCLQLGLLRPSFIPSRPQRELRELTRGRKSLIEDQARTTNRIEKVLEGTNSKITSVISDIMGLSGRKMLRALIDGEQDLQKIARMALGKLRKKEEQLIEALAGNFTDHHRFLLRQLLRQWEEQEAHIRAYDQEISRRLGEPPEQEAADAAPEACQPVSTAQQESLSPTSEASFVQTAPPLPGYEGYANIIKLLDGVTGINLRAAQVLVAECGIDMHRFPTDKHFASWLGVCPNNQVSAGKRLKAKSGKGNRHARSILVQAAQGVAKSKGTYLRALYERYKARMGHKQAIMAIAHHLAIIIYHMIKKQEAYREEGPEEADERLQEMRKRRAMQQLKDLGYDVSLQPAQSA

SEQ ID NO: 353610 - protein, 340 aa, unidentified
MQTKKKSFIGIDVSKLWFDLSLMIVIDGVKQAMISQKFDNNLSGLKELTKWLKAQGVLFDNSTLVVIENTGVYHRLIWEYCTTKGLSLHIGNAAGIKWSLGITRGKDDVTDSQRLCSYCYRHADELKSAPVLDPVILQLKDLMTARTRLTTQINSTKVYLKELALSNNKEVQNTIENAHKAALDGMQKSLELINKEIKKIVSEHTAINENYKLLISVPGIGHVTAIYMICCTANFASRISGKQLACYAGVAPFTNQSGTSTKGKSKVHKMANKDLKKLLHMGARSVATHNAEFKHYYERKLKEGKHDLAIINAIRNKIVLRAAAVINRKEYYVDNYKKAA

SEQ ID NO: 353611 - protein, 412 aa, unidentified
MQVIIERCAGFDVHQETVVACVLIGAPGEWPRKQVRTFRTMTRDLEALRNWLQELGVTQVGMESTGVYWRPVYAVLEGHFDLIVGNARHIRNVPGRKTDVKDAEWIADLVRHGLIAKSFVPPAPQRELRELLRYRRKLVESQAAERNRLLKLLETANIKLASVASDVFGVSGRAMLKALIEGSASAEAMADLARGQLRRKRDDLVLALEGRMEEHHRFLLATQLRRLEAAEQDIAALDDRIEAKLESYRVQHGLLMQIPGVDWVVAAVLIAEIGVDMSVFLSVHHLAAWAGVCPGNHESAGKQKSGRARKGNVHLRTMLVGAATSAARTKGAYLKDKFHRLKARRGAMRAALAIAHKILVAAYHMLAKGLPYRELGEAYLDQIAQTRTVANLKRRIERLGYNVTLEPKAEPA

SEQ ID NO: 353612 - protein, 388 aa, unidentified
MLMEVDQSEAQTAIPADLTAIFVSLELSKSTWLVTSLAPSSSKMSRHSVPGGDIAGLLAVLGDLQKKVQSRLGQAHRLVVIQEAGLDGFWVHRVLDREDWIESHVVDAASIAVSRRHRRAKTDRIDGEALIRTLMAYQRGEPRVCSMVRVPALDDEDRRRICRERKALVAERVRHANRIKGLLLSQGIRDYEPMHRNRRERLEQLKTGDGRTLSRQIKAQISRELDRLELLLEQIRAVEVERDRLVASAAIDERAPLTLLTSIKGIGPEFAVILESEGLFRHFDNRRQVAAYAGLAPSPWQSGNIDREQGVSKAGNPRLRTTMVQLAWLWLRHQPDSALARWFNERVAHNGGRLKRATIVALARKLLVALWKYVTAGVVIDGAVMKIA

SEQ ID NO: 353613 - protein, 428 aa, unidentified
MDHSASLTNPIVAWIGLDWADQKHDVCLQATGSTEVEHLVVEQKPEALQAWVAELRRRYPHGPIAIALEQSRGSLFYALMNYEFLRLYPIPPKALADYRKALYPSGSKDDPVDAQLLLEFLRKHPQRFRPWVADNVETRQLALLNEHRRRLVDDRTALTNRLTALLKGYFPEALGWAEDLRTPLAWDFLAQFPTLELAQQASRLDVLKVYRAHTRRPPEQLEALCDEIRTARPLTTDRAIIASSVLMVEILVEQLRVLGAGIERVEQQLADVFATHPDRAIFQSFPGAGKALAPRLLAAWGSDRQRFPTAANMQCFAGPAPVTVRSGKTKWVHRRYAGPTFLGQTFHEFAAQSRLKSPWAKAYYQQMRSKGADHHPAVRALAFKWIRIMFRCWQDRTLYDELHYQQALTRRGSPLATELNRLALEQKS

SEQ ID NO: 353614 - protein, 464 aa, unidentified
MKDNKRRRQMKQRRISSHLEQVNLFAAGIDIGSQSHYVAVPEELDSEPVREFSCFTGDLNRMADWLVEIGIQTVAMESTGVYWIPAFEILEERGLVVLLVNARHVKNVPGRKSDVQDCQWLQQLHTYGLLEGAFRPPEETVALRAYTRQREMLVQRASDHIRHMQKALRQMNLLLDNVVSDINGMTGMKIIRAILAGERDPTVLAKLRDKRCKHDDKTIAASLEGHYREEHLFALKQSVELYDVYQQQIANCDETIQAQLDRMKSRGDKDDLPSTKKRKTKSSPDFDLRGELYRMTGVDLTRIDGLNETSVLKVLSETGVDITPWPTEKHFASWLGLSPGNKITGGKILTSKTKPSANRAAAAFRIAAYGLFNSKSALGAYYRRQRARLGSPKAITATAHKLARTFYSMLKNGTEYVDQGQDYYETQYRDRVTKNLKKRAASLGFDLVPNKADENMPDTVLSTT

SEQ ID NO: 353615 - protein, 439 aa, unidentified
MNKRRDRVCGADVHKDLIVATITGDDVLPIQENFGTTKAELKRFRNWLIANKCEQVAFEATGVYWMPIYDALSKTIDTIVANPLQIKTIPNDKSDSKDSNRIATLCLNGQIKRSRVFTDEDRDLRMMTRARSGYVKTRTQFRNRIHKYLSSSGITLSSTMDDMFCKSGRYILDGLAKEKPLEEILKGIPSGKIRKKKDEIRAALENVLNDTNRMLLTDALEILDNLESKMEKLSLEVLKKVQQKSKDLAIVMSIPGIGFVSGSVILSEIGDYHDFKTPDQLAKWCGLNPGENESAGKKKKCGITKRGSKHIRVVLVQAAQTISNMNKTAMSRFFQRLIKKKERNVAIVAVARKLICLIYHLLINQELYQEGECRKRGSSQDKSCHAPSFKEEHLTDRVAAIVDAFYHLKESSRKNALMREIADISGIKVGQKRPSKGGG

SEQ ID NO: 353616 - protein, 389 aa, unidentified
MGSSLHLNTPAACGEHGTVFVAFELGKAQWKLGIVVPGKARLSRYVIDGGDTEAAWQLIAKARARAEKQLGGPVRVMSCYEAGYDGFWLHRWLLARGVDNQVIDPASLQVNRRKRRAKTDRLDLEQLIGALIRLLWGDRLACKVVHVPSPAQEDDRRAWRERERLVKERTAHTNRIKGLLHGQGVRDALPRAKAFGGWLGSQRTGDGLALPAHLVDELKREHGRLMLVEAQIGEIEAQAEAAREAAAPSPLAARINQLIELKSLGPVSSQTLVGEVFFRDFKNRRQVGSYFGLTGTPFDSGDKTREQGISKAGNPRARTAAVELAWLWRRHQPASTLSRWFEERVGHQKGRVRRIAIVALARKLMVALWRFLEHGVVPEGANLRAAPHG

SEQ ID NO: 353617 - protein, 354 aa, unidentified
MPVVAGADCHRDTHTIVVIDGVGKALSSFSIPASAEGYRLAISEARKLAVESWGLEGTGAYGRAFAQALLQASFTVFEVPGIMTKRHRKHASRHGKSDELDARAIGEVVLRESDRLPRFREFAEQEALRLRYDQRDRLVRERTMVINRLRSAALRLALPGIPSDLTSDSSVDKLRETALPFRADGLVEDVIADEIRFGIETLQRLNAEIRRLEHLIGPFVKRLAPELLELRGVSLVTAAGLVGHTGDVANLRNADAFAMRSAAAPVPWSSGRNQSVRLNTGGDRQLNRLLHTIALTQIRSVGHQGRQYYQRKLAEGMTPRSAIRALKRHLATVVFYRLRLCQNRVEAGMLVAAA

SEQ ID NO: 353618 - protein, 330 aa, unidentified
MMVTASLLPVVGLDVSKATLAVCYQVDDLVKHLEVSNSKAGFQQLVKACGAQCRFVMEATGTYNLAVAYYLHEQGGEVAVLNPLVIKRFIQMHLSKGKSDRKDAQWLLRYGQQQPVKVWQPDEAVLVECRQLEQVNEQLLKQKTMVSNSLEALQRQPVISKLALKRLQQMLKTLTQQAALVEAELLTLLEQRFAAQMTLLCSIPGIGRKTAGMLLLFAGGFTHFDNYRQVIALAGLSPREHTSGTSIRGKVRITKMGGGLIRGKLFMCSFSAKKTNAACAALFDRLVAKGKNKKLALIAVCNKLLKQAFAIVKSGVPYQADFSSKLTPIS

SEQ ID NO: 353619 - protein, 315 aa, unidentified
MTQIIITTAGIDTSKSKLDIAVHDRAERWQVANVLPGWRALAGYLAKAGVTRVGIEATGGYERGVVEHLREAGFTVLVLQPIQVKAFGRVHLCRAKNDALDAVLIAACTATLDPPKTTPDSRLAELAENLTFLDQIDEDLRRFKTRLEHIHEPRLRRMVLGEIARWNARRLAQVRYIAKQLRSHPDLAARFDLVLSIPGIGERTALAIIIRMPELGRVSREEAAALAGLAPFDNDSGQQKGQRHIAGGRARLRRSLFAAALPAVFRWNKALTMLYARLIASGKHHNAALIACARKLLIYANTVVQRGTPWIEKDA

SEQ ID NO: 353620 - protein, 422 aa, unidentified
MVMDEITEVPGALVERVAALDIGKATLTACLRVPHEDKPGACRQEVRTYATLTPALLELRDWLVCQGVTLVVMEATSAYWKPPFYLLEDDIECWVVNARDVKNVPGRAKTDKLDSVWLCKLAERGMLRASFIPSRPQRQLRDLTRYRRTLTQERTREKQRAEKLLEDAQIKLSVVISDIFGVSGRAMLDALISGQRNPHELAALARRNIRAKTSVLQEALTGHFTEHHAFLLGMMLARIDALSTQINTLTTRIEQATAPLSAQIAQLDEIPGIGTTAAQDLIAEFGTDMSRFPTPGHLVSWAKFAPKARQSAGRSKAAATGKGNPWLGGTLGEAAAGAARTKTFLASRYKRIVRRRGKQRALVAVGNSILVIAWHLLSDPAAHFTELGPDWHDRLAPLRRKHQLIAELERLSGKKVTLHDAA

SEQ ID NO: 353621 - protein, 449 aa, unidentified
MSSHKGNAAGLPVIHDRAAGIDVGSRFHVVAVGADLCNEPVQTFQAFTSDLQRMADWLMAMGITTVAMESTGVYWVPVYEVLEGRGIDVILANAREARAVPGRKSDVNDAQWLQRLHACGLLRASFRPGRDIAALRVYLRLRERHLDYGAAHIQHMQKALTFMNLQLHHVVADVTGVTGMKIIRAIVNGQRDPEVLAQMRDVRCKASLETVRAAMVGNYQPEHVFALTQALALYDFYQACVDECDAQIEVVLAALTAEKASPSAPLPKARHRTVQPNAVSFDVRPVLYQLAGVDLTQIHGIGPYLALRLIGECGTDLSRWRSAKHFTSWLTLSPGCKISGGKVLSAHTRKTTNRVAAHLRLAAVTVGRTNTALGAFYRRLSARIGKAKAVTATARKIAILFYNAMRFGIDYQDPGATHYEQKYRERVIKQLHRRAAEFGFTLQEAVSVS

SEQ ID NO: 353622 - protein, 419 aa, unidentified
MAFKILRKNCCGLDIHKTWIFACIGITDSNGRTEYKQARFSSFSNGLRDLADWLAKYSCSDVCMESTGKYWIPVFNILEKTCWVTLAHPKYTKPQKGNKTDRKDAKWICDLYMCGMVKPSFIPPPDIRQLRDLMRYRVKLTNMLTGEKNRAQNCLTVSNLKLDDVFSDVFGKSSRSIIQYILEHPGEQFDVTPFIHRRCKHPVEEIQAAVDGVVSREQAAKLKECLLHIDQLNAHRERIEAEILRLAEPYPYQLELIRTVPGFAAAPLTAVALISEIGVDMSVFPSAKHLASWAGCCPRNDQSNKKVKSTRISRAGCYLKPLLVQIANAVIKSDRHPECRERYRRIKARRGHKKAIIAVCRMLLTAIWNILSKLEPYSAKGYLADKLTEHSVVISKAEGLALLRKRGYIFKDELDVESG

SEQ ID NO: 353623 - protein, 393 aa, unidentified
MIGGIDSHKDTIHVAVITGLGVDVADREFTTTQAGYHEAIDWLRTQDCLDVVGVEGTSSYGLGVTTALREAGARVIEVNRTRAAERRRKGKSDRLDAYRAARGVLSGEASTIAKSDTIEPLRAVHNARKSAVKAKRVAWQQISATLINAPAPLRDRYRGLAEDKAVQQLIAARPARGTEPAVAGIMVALKVLARRHRALSAEIDELGDHLAETTTAINPGLAALQGVGPVVAAQLLITAGDNSDRLRSEASFAALCGTAPVQVSSGRVTRHRLSRGGDRQANAALHHIVTNRLRHDPRTRDYRDARLAKGGTKAAAMRALKRAVAREVFRALRGRCPVPDYSDLRPARQARNLTLAAVAAELKVWPSALSQLELGQRVDNDLVARYRNWLTAA

SEQ ID NO: 353624 - protein, 369 aa, unidentified
MKNTIVHDEGATSLEAVTTKVKPTGAQIKIGLDMHARVYVAVAQYDHLLPKEARRLRPAEFVPWVEELLRGGHTVHVVYEACGLGFNLYRQLMAAGAHCYVIAPRKLDEECSRVKTDPRDASTLCQRLSRYLEGNTRELAVIRVPSQQEEQARHVSRQRTQLVCHRQKLEAQGRSLLISHALPAPAHWWKERTFSRLGQHLPAWVTTRLQMARPALLSLQEQIDALTSELEAAAPCSLPRGVGKLTSVVLTREICDWHRFNNRRAISSYTGLCPGERTSGSKRVPGSVTKRGNPRIRAALVECAWRMVRFQSQYPPVQRRLAVLAKGSGALGAVRKKAIVAVARRLAVDLWRLHTGRCTAEQLGLNISN

SEQ ID NO: 353625 - protein, 348 aa, unidentified
MQLLNLDQKYYCGIDLHGKTMYTTVMDKSGTLLFHKNLPNSMSDLLEALRPYRNDVVVGVESTFNWYWLADGCQREHIPFYLGHALYMKAVHGGKNKNDSLDSKHITDLLRSNLFPLAYAYPFEMRAVRDLLRRRRYYVDMRSAAYRHIQMVYMQHGLVDQKLPAPNIKGKRESLMRPFEDPNVCLAVASDIRQMNVLDDLISVLESKVLDQAKKHDRTALNLLQTITGVGAILAYTLLYEIHTITRFPSPQAFSSYCRLVKPERSSGGKTVGSGNSKLGNPHLKWAFTQIIVHAQLYSPVLKRYYEKMKQKHGPAKSKSILGHKFAIAVYHMLKQGRAFDEHKFIGG

SEQ ID NO: 353626 - protein, 302 aa, unidentified
MSNVNKEQPKVTAGLDLGDKYTYLCLLDTESGEVLEEGRLRTTPEALRQRFEGCQPMRIAIEVGTHSPWVSRLLEECGHQVLVANARKLRLIHQNKHKTDKIDAQNLARLARVDPKLLAPLKHREENTQAHLALLRSRREALVEARTQLVNHVRGSVKAFSGARLPKCSTPTFHKKAAPQIPQELEEVLRPVLETIASLTKRIKDYERKLEALAQEHYPETKLLRQVRGVGPLTALTFVLTLEDPNRFRKSRTVGAYLGLAPAKKQSGEGDLQQRITKDGDEILTRLLVGSAHYILGHFGED

SEQ ID NO: 353627 - protein, 395 aa, unidentified
MLIGVPGKKRRRRLTILNTLDDFQRLSATLASYGMPVRIGFEATGNYHRTLAHYLDRAGFELKLVSSVGLARTREALHNSWDKNDPKDAQVILHMLEIGAVQFFYDPLVVGTADIQELSKTHEIVSRSKTELWHRIMTHYLPLYFPEAERFHRSSRTDWFLAFLEKYPSPHMISAISREAFIADAWDVVGRKVSKEQFLSDIYATAINSVGLPVHADSDAVRMFRLVLAEGRSLVRQRDVIEARAVELLSDLPDYQLLTTIPGIGPINAMTILAEAGDLRRFRHHRQFLKFCGMDLATVQSGMFRGQSRISKYGNARLRRTLWMAGQVAVLKRTNSFRDKFERYIARDRHNAHLRRKAYTAIAAKMARTVHAVVKHGEPYRPFFEGVSPGGRTSL

SEQ ID NO: 353628 - protein, 320 aa, unidentified
MSATSVVVGIDVAKAHVDVAVLGGEFAAQRFANEAEGHSVLAAALQSLGVTLVVMEATGGYEATLACALQAAGLPVAVINPKQARDFAKAMGRLAKTDRIDADMLAELAAVLVRRDDLARYLRPLPDAQQQTLAAVVTRRRQLLTMLGSERQRLQLAIPMVRPSIEAMIQAIRAQLDDVEAQMVGHVREHFAELDALLRSASGIGPIASATLLATLPELGRLTRREIAALVGVAPMANDSGTTRGRRRVQGGRFETRRVLYMATLTAAKYNPAIRAFYQRLVAAGKMPKVALVACMRKLLTTLNAMVRSNQPWNTSLHHA

SEQ ID NO: 353629 - protein, 354 aa, unidentified
MMLIGVDPHKSTSTAAAVEPQSNREVASIRIDATLREYRRLLTWAGRWPEHRWAIENAEGLGRHLASWLLARGEQVVDVPTTATARVRQLSRGGGRKNDRIDAAAAACVAALQGDARPLEAETTADALGVLDERRGNLSQARVRAVNQLHALFRALLAGGAPTGLSAAAATGLLRTVRPVGPVEVVRKKIASDLVADIRGLDARLKANEKAMATLIKESGSTLTRTVGIGDITAARLIGRTGPPGRFPNSAAYAAYTGVAPIEVASADKIHHRLSRSGDRQLNSALHTIAITQIRTAGSLGDIYYQTKIAEGKSPREARRCLKRRLADHVWRTMIVDEKRHRAKTSNSAPASVA

SEQ ID NO: 353630 - protein, 436 aa, unidentified
MKRKDVPMKQYYYNINDNLKQLTENTLIIGVDISKAFHVARAIDYRGMELSSTITFNSNRKGFSQFHEFITDISNIQGKSDIIVGFEPTGPYGDTFVQFMLSKGIKVVLILGAQVKAAKELDDNTPSKNDYKDALLIAGLIKDGRFRIYRRFDSEILELREAMANSYQLTKKITCVKCQIDNWLCKYFPEFSLVFKDWTLKTAYATLRTFPMPSMIQAETVTSIVRSWRASGVIRGVGVKKAQMLKLYALRSTGLKYAGKSALIHIRSLIAQYELYLLQKEEAWLLIDEIVEDIPFYNTLIKIPAIGKKAACGIVAEIGDITDFSHPRQLIRLAGLSLRESKSGGKRGTSEITKRGRPLLRRYLYIAVLNMIKSKDGAFWQLHMYHTTFKKSPLKPMQSVVALMCKLLRVIYGMSISGKPYDPNLVTSGIADSEVF

SEQ ID NO: 353631 - protein, 334 aa, unidentified
MEIKILGIDIAKRVFQLHGINCFGKVVLKKRISREQLSNFIANIPPCLIGMEACGGSNYWARKFTSYGHEVRLMNPHYVKPYIKTNKNDAADAEAICEAVSRPTMRFVSIKSVEQQDIQALHRYRQRLIQGRTALVNQIRGLLTEYGIVIPQGITSLRLRVPQILDDQENELSGLSREIFNALYQELIIADQHIKDLDKRIMLLCKESAYCQRIMKIEGIGPLSASALISAIGDIHAFKNGRHLAAWLGLVPRQHSSGNRQALLGISKRGDRYLRTLLIHGARAFISFAKRKSAWLEALIKRCGKQKAYVALANKNARIVWALLAKQVDYQSAH

SEQ ID NO: 353632 - protein, 360 aa, unidentified
MRDYTTKTVYVGVDVHKKTYAVTAICEGQVVKRDSLKGDPAVLITYLKKHFVGAQIESAYEAGFCGFHLHRLLVAAGIKNRVVDAAGMEVAVGDRVKTDKRDSLKIATHLSQGRLKGIHVPSPEREWRRTVTRLRDNIVKQRTRIGNQLKSLLFLNGLISADSNKKISLNWVKSIQALKLSKDLEYTLGQYVEMWLEMDARIKKINQEINEQAETDKTLEEVYRSVPGVGPTSARILANELEDTSQFGNERQLFSYVGLTPTEYSSGEHVRQGHITRQGRPILRKILTQVAWMAVRRDLSLKEIFVRLSKRVGSKKAIIGIARRLVGRIRACFRTGKLYSVKTDPNPSCQENELYDLALA

SEQ ID NO: 353633 - protein, 344 aa, unidentified
MTIVEDRPAITGGVDTHSEVHVAAALDPVGGLLGTREFPATAAGYASLLGWLGKFGDVALVGVEGTGSYGAGLARYLAARGVRVVEVDRADRQDRRRKGKSDPLDAVSAARAAQSGRASGEPKGQDGAVEAIRALMVAKRSARNERTQAINQARALILTGPDELRARFARKRAAALAEAIAALRPRPGDAAGYAVRTALRELGRRVEFLDAQIERLDDLIVPLVAVRAAGLLSLYGIGPDTAAMLLIAAGDHPGRLRSEAAWAHMCAVAPIPASSGKTRRHRLNRGGNREASHALWRIVITRMSAHPATRAYVKRRTAEGLSKKDIIRCLKRYVAREVYPYLRG

SEQ ID NO: 353634 - protein, 412 aa, unidentified
MKDLLEISCGLDIHKEKIVACILIGPLGKPTHSEIREFTTLIPDMLALRDWIISENCHHIAMESTGIYWIPIYEILEDAFSGDITLLVVNARHMKNVPGKKTDMRDSEWISTLLRAGLLNASFIPEKRIREFRDLNRYRKSIIRDITSQKNRVEKFLQSSGFRLSSFISDIFGASGRNIILHLMEHGQIDKISLDSYLKTKTRKRIDEILMSVNGTLSEHQKSFLKILMCHYDSMKEHLIEIETHLQEDMLPFALQIEQLNTIYGISTTASCAIIAEIGTDMKPFKTAEHICSWAGLCPGNNESAGKRKSTSITKGNPYIKSMLCEIAWVIAGKRNTYLSAWYWRIKQKKGARKAIVALARKLLVIIYTMLKQGTNFDENCFEVRRKNCEQKQLSRYIRELEKHGYTVEAQV

SEQ ID NO: 353635 - protein, 407 aa, unidentified
MQATPYGSIHAGIDWSWQHHALCLVDDDGQRAEEATVPHTKAGLSKITTVLRRHGVRRVAIERGDGPVVEHLIRNGFEVVVISPRQVKSLRARYGSAGNKDDRFDAFVLADALRTDAGRWAVVRPDSEETIALRMLVRARHDLIDHRVAVHNQLLAVLQHNFPGAIGLFSQLDIGISLTFLRRFPTEAKAAWLSELRMAHWLKANSYCGRHTPARLVGHLRQAATGRVTGPAADASEVIVLSLVDLLATLRHEQEHLEARIKEALLTHPDGHIFQSLPRAGVVRAATLLAEIGDCRARFPDALSLAAAAGVAPSTRQSGKLLNVAYRRGCNKQLRAALVDWAQDTPRANAWARDTYDRARARGCRHPHAARILAQGWTRILWRCWYDHTPYDPGLHGRLGTLIAEAA

SEQ ID NO: 353636 - protein, 348 aa, unidentified
MVTIGVDLHKRTHTLVVVDQAGRQLATRTVPATVAGHLEALKWALGWAERSWALEDCRHLSRRFEADLVRAGEAVVRVPPKMMAGVRRAARTRGKSDPIDALAVAQAALREPNLPTAQLDGVAREIQLLLDHRDALVAERTRHQNRLRWHLHELDPGNEPAPRSLSRAHVLLALETQLAPLSDVVARLACDLVARCRSLTAQIKELDAEIKVRATALAPTLLALQGCGVVTTAKLIGEAAGIRRFRSRAAFAMYNGTAPIPVWSGHERYRLNRGGNRQINTALHRIALTQMRDPGPGRDYFLRRRAAGDTKLEAIRALKRRISDEVYRRLWQDEPRIRSAQPDHEAAA

SEQ ID NO: 353637 - protein, 329 aa, unidentified
MVQRKELNFEGQNIYIGIDVHLKTWHVSILTESGCLKKHSQQSSAQALFEHLKKHYPNGNYLSAYEAGFSGFSTYYSLLDFGIECLPVHAADIPTGQYESVMKTDAIDSTKIARALKSGLLRGIYIPKKEVLDDRNVMRLRITLKRQLSGYKSRVKHLLYNNGVIYPECFQNSKSHWSKRYLKWVHEDVQLLSESRNSLDLLLRQVELFRKSLLEITRLVRTLSRNGRYGEAYENIVSIPGIGMITGMCLLTEIGDIHRFRNERQFASYLGLVPTSHSSGEKTSHGEMTFRGNKRLGPLLVESALVAIRQDRALAAAYGEYCKRMLPRR

SEQ ID NO: 353638 - protein, 400 aa, unidentified
MIDTGDIDVFLGLDVGKGEHYATAVTPAGRKAFDKRLPNTEPKLRELFARLQAKHGTVLVVVDQPASIGALPLAIARDMGCPVAYLPGLTMRRIADLYPGEAKTDAKDAFIIADAARAMPHTLRAIDGEDETIAELEMIVGFDDDLASEATRVANRLHGLLTQIHPSLERVLGPRLQHPAILTLLERFGSPAQMHKAGRQRLVTLLRPKAPRMAERLVKEIFAALDEQTVTIPGTEAAALIVPSLAGSLTAVLDQRKLLAGRIEELLEAHPLSKVLASMPGVGVRTGARILIEVGDGSAFPTAGHLATYAGLAPATRSSGSSIRGEQPSRRGNKQLKRAFFLSAFAALGDPASRAYYDKKITQGKHHTQALLCLARRRADVLFAMLRDGTFYEPQPIRAT

SEQ ID NO: 353639 - protein, 428 aa, unidentified
MDYTQNAKIAQVTEKSLIIGVDIGSESHYARAFNWRGQEYGKKVFHFNDDVEGYKAFKGWVEAHKARTGAETVIVGFEPTGHYWFSFGRYVKQMGMMLVLVNPYHVKQIKELDDNSPKKTDFKDPKTIAKLVVDGRYSIPYIPEGVYAELRQAVSSRDRIIKEQNALTNRIKRWLKIYFPEYLKVYTKFSAESGLLLLEKAPLPAEIVELGVDGVTQIWREQKLRAVGKKRAETLVEAAKNSVGIDGGACAKLELQLLLSDFRTKQAQQEQVEAVIEAEVLKVPHVEKLLAIKGIGLITVAGFLSEVGEIGRFDSPKQIQKLAGLELKENSSGKHKGQTSISKRGRKKLRKILFQAVLPLIRSNAEFSDVYRYYTTRQKNPLKGKQAVIAVGCKLIRIFYTLLTKGVDYDASRMRLDIIRPADGEQVA

SEQ ID NO: 353640 - protein, 348 aa, unidentified
MMIIGCDFHPSWQQVSWLDMETGETGEQKLVHAAGEARQFYEQVAAPVLIGMEATGNSQWFIELVEDLGHEIWIGDAAQIRASYVRKQKTDKRDAAHILKLVVEGRFPRLWTPDREQRDLRQLVLHRHKLVLIRSRVKNELQHLSLNKGMQRKRRLWSQEGQKLLRELPLKKWAACRREDLLGLLTMLDEQIGKLDRAVQQAADENPQSKLLMTQPGVGPNTALAFVLTIGDAGRFPRGKQVASYLGLIPREENSGGRQKLGAITKQGNRMLRSLLVEAAQVAVMHDPGLRKQYRHHCHQKPKAVAKVAAARKLAVRLYWMLRTNVAYPEIVRIESSSGLPLVARHGE

SEQ ID NO: 353641 - protein, 345 aa, unidentified
MTNNNITWVGMDTDADKAEVAVYRGWESEPAATFSVGMDRKGVKKLIERLKQESGEVRCVYEAGPCGYPLARTLHEAGIRCDVIAPSLTPRKPGDRVKTNRRDARNLARLYRAGELTVIDIPKESEEAVRDLTRAREDVREDLTRRQHRLSRFLLRHGYRYRQGHAWTQKHWAWIREIRFDDANLQTVFDESIRAVEQSQEQLKTYDARIEELAQQPPYAAKVGRYQVLRGVRTVTAMTIVAEGADLRRYATAPQFMGSTGLVPSEHSTGDRERRGRITKTGNAHLRRVLVEAAWHYRHHRISGAQIKKRRKGQPAALVTIAERADQRGCIASFTNWWIGTTKSL

SEQ ID NO: 353642 - protein, 415 aa, unidentified
MALKIVYKICCGIDVHKTFVVACIASTNDKGVTSYESHRFSTYTSGLKTLLQWLLDRDCKDVCMESTGKYWIPVYNILESDCSIILAHPKYVKAIRGKKTDKKDAKWIADLFKHDLVAGSFMPPADIRQLRDLMRYRFKLTCFKSSEKNRLQNCLTVSNIQLGNVVSDTFGKSAQAILDKLLENPADTSFDLEPLVYKSLKKKLPELRDAIDGYITPEQAGKLKVIKAHYENLESRKAELEELILALAAPYQQELAILQTAPGISSDFTAIGIISEIGTNMEAFPSAKHLCSWAGLTPTNNESAGKKKSVRVSKAGCYIKPLLVQCANAVVKSTKHPEMRNRYLRLKKRRGHKKAIIAIARMLLTALYHILKNGENYNAELYRKSDLPPVDREITVEQALMIARNQGYKIKSATA

SEQ ID NO: 353643 - protein, 412 aa, unidentified
MDVVYERCCGLDVHKRTVVACLLTPGPQGQPQKAVRTFGTMTADVLALAEWLAAAGCSHVVMEGTGVYWQPIWNLLEDRFTLLLVNARHVKAVPGRKTDVKDAEWLADLLRHGLLASSFVPDREQRELRELTRYRTAVLRERAAVVNRLQKTLEAANLKLASVVTDITGKSGRAILRALIAGETEPAQLAALAEGRLREKIPQLERALVGCFGAHQRFLVAQQLDHLDFLDERIAQISAEITTRTQPLAAAVSRLDAIPGVGQRTAEVLVAEVGTSMERFPTADHLASWAGMCPGNRQSAGRQLNGKTRKGSPWLRAALAEAAQAAGRTKGSSLQAQYRRLAARRGKQRATVAVGHTILRIAYHLLQDPASVYDERGAHDVTERARQAIERDLVRRLQQLGNTVVLHPVGAP

SEQ ID NO: 353644 - protein, 418 aa, unidentified
MKLNKTKKVTKINSKTLIATLDIGKNVQYGYFRAPNGNDIKPFAFYNSKKSFNAFWAKLVEFKNKAKLEDIVIGFESTGPYAEPLFHFLRKKPVKLVQVNPVHTKRVKELTGNSPNKTDKKDPRVIADVICLGHALTLVVPEGPAAELRRLSQARERAIKTRTAMINQLQHLMFVIFPEFFTVLNISTKTARYFTKHYTTPEKIYALGLDSVSQIMKKVSRGKLGQERAKQLHEAAADSVGISEGKQSIVFEIEHLVARIEAEDQFVDCLEQQMCDYLQQIPYSQSILSIKGLAEVTVAGLIGEVADFNKFDTISEVMKLAGLDLYEISSGKHRGQRRISKRGRPLMRKLLFFAAINVVKSKGIMHKKYQQMLDRGMLKMKALVAISRKLLAIIFALVRDQTRYVENYSNSNHYKLAA

SEQ ID NO: 353645 - protein, 317 aa, unidentified
MTAIGIDISKDYFDACIQDDVKRFDNKPTGFKAFVTRLPAQAHCVMEATGNYGACLALYLYEHGIRVSLINPLQTKRFGQSRLRRAKTDTADAELITQFASVADLTPYEPKSPDVSELEQLQSLRDQLVKQHTALLNQLHALEQLPKSRRSHVVKQALLKSLRQLEKTIAELDRELEALAKSSLGESLEQLSSIPAIGAQTAIRLLLLTDKLKRFDSAKQLVAFFGLCPRWTQSGSSVNASGSICKSGNSMMRSALYLCACSATRCNRACQELYVRLLAKGKPKKVALIAVANKLLRQAFVVVKKHMLYDDKLALNL

SEQ ID NO: 353646 - protein, 396 aa, unidentified
MRATDARVVIGMDPHKRSVTIEVMAADEEVLGGGRFGTDTAGFTSMLEYVRRWPNRVWAIEGCNGIGRHVALRLLAEGHEVVDVPPKLSARARVFATGQGRKTDATDAHSVALVGTRMAGLRPVVHDEQLAVLRLLVDRRSSLGDDHTRMISQLHQLLLELIPGGAKKDLSAAQAKALLAKVRPRDTVGKARRRVAAELIADLERVYARKKAADKELKELLAATGTTLMDLHGIGPSGAARLLVEVGDITRFPNREHFASWNGTAPIDASSGDQVRHRLSRAGNRQINRVLHIMATVQLRNDTEGRAYFDRRKRDGKTSMEAMRALKRRLSNIVYRTMLDDAVRASAASEVTGPGGQRGSDSDSSATGSQPQHRLFGQATPGPVTIQPRTPLPRVS

SEQ ID NO: 353647 - protein, 376 aa, unidentified
MKKNTTLTIGMDIGDRKCHVVVLAGNDEDPTEITMIKTTRESMQSYFESKPISTVAIEVGTHSAWICTLLQSLGHTVIVANPRQVRLISNSWSKTDWADAQKLARLARIDPRLLHPIQHRGSEAQDLAAFVRARDAAVRARTKFVNHIRGVVKGIGERLPQCSTPSFIKHMDTVPPERREALEPLKKCLEVLNNTIKHYDQVIEKKGSELGSVVSQLTQVDGIGTLTAVAYVSCIEDPHRFEASRTAGAFLGLCSRNKSSSSQDPELSISKCGDSYVRHLLVSAAHRIIGPFGKESDLRTWGIKLAGQGKNSKKRAAVAVARKLAVLLHQLWKTGDDYKPLKNPKVTKQIIDNTEEYKELFAKTKTKTKTKGSRKR

SEQ ID NO: 353648 - protein, 342 aa, unidentified
MVDTMIGVDLAKNVFQLHGATMTGELKFRRKLSRGQFLRFMAEEPPALVVLEACGGANFWARELAKIGHEVRLIAPQYVRPFVKRQKNDATDAEAIVIAARQPEMRFVEPKTSEQQARAVLFRSRNRIVRQRTELVNALRATLYEYGQVVPLGIGHIKRIEAILADAEIELPEIVREECHDLLAQIGEKTARIDEKMKKLAGLAGHNDSTRRLQTMPGVGPMIALAVEAFAPAMQSFRRGRDFASWLGLVPKQFSSGGRERLGRVSKAGQADIRRLLIIGAMARVNWASRRPPRVDSWLSRMLARKPRMLVAIALANKMARKIWAMLTKMEDYREPAMAKAV

SEQ ID NO: 353649 - protein, 349 aa, unidentified
MIRNTPRDAAVYGVDLGKNLFHVVGLDSCGAVVQRVKFRRETLLNFFERAGRAVVGMEACPGSQWLARKLLTMGHTVRIVPAQFVKPYVKSQKNDTIDAEAIAEAVTRPTMRFTQVRTTEQVDLQALHRIRDQLVASRTRLINQVRAFCLEYGVAIRQGAGVFRLDLPRVLANEGNDLTPAMRRMLTELFEDVGRLDQRIATVTREVEGLAARDDRARRLMTIPGIGPLAATALLAAVGDGRQFRRARDLAAWLGLVPREHSAGGKTTLLGISKRGNRYVRRLLIHGARSCVTHLDRTRDRLGGWLDGLQARMHVNKVTVALAAKIARTAWAIITKPGALYERRDPTVA

SEQ ID NO: 353650 - protein, 305 aa, unidentified
MDAIRERCAGLDIHQETVVVCLLSGPLEKRPRSVTETFGTTTRELLRLQEWLEQQGCTEIAMESTGVFWKPVWNILESTCTITLANPHRIRNMPGKKTDVKDAEWIAKLHRCGLIEGSFVPDEPIRDLRDLTRYLRKLKQNATQEKNRIHKILQDANLKLTTYVSDLFGVSGRALLDSMVNGEVLDVHEVRKLVHTRLKMKVPSLVEALNGRLRLHHRKMIRRHLEHLQYLESEIQTLEAEIEELVQPYMKEIELLDTVPGVSTDAAASIVAELGTDMSPFPSEAHLASWVGVCPANHESAGKKK

SEQ ID NO: 353651 - protein, 344 aa, unidentified
MHYCGLDVSRKSTHAYIEDAQGRRVKYAVVPTTPTGLAGVIDAYAERGLRVAVEAGNQTAWIVDLLREAGAKVHVVHPLKVKLIAESKKKTDRIDAKLLAHLLRVGGLPEPVHVPSPRSRELRGLLVARRQLIQMRTKLLNVVRGLARQQRIELRPRALLSRRGWRELTAAGLSPALRDIVAAYDATVQTASQALAALDGQLTQRARRDPRVARLETMPGVGQVSAQTLVAAVDTIDRFPTAKKLVAYAGLAPSVRASGERVEYGRITKQGRSEIRAVWVQAAHALLAVKAAAARPLQRWAERVGRRRGKKTALVALARKLLTIAFHLLRDGTTYDPRRLRCPA

SEQ ID NO: 353652 - protein, 324 aa, unidentified
MTEPALGIDIAKLKFNACLINHNGKLRHKVFPNSETGFEQLRQWLSKQGVERVHACLEATGTYSEPLALFLHEAGQRVSVINPAAVKAFAQSRLSRTKTDRVDAELIARFCQAQAPPAWTPPAREVRELQALVRRLDALIEMRVAEENRLSSGITVEAVRQSVAAHLAYLVEQIKRTEELIRHQINAHPTLRQQSELLDSIPGIGEATAAALLAELTDIKQYGSARQVAAYAGLVPRERQSGSSLRGRARLSKIGNARLRKALYFPAVTALRCRTFFRAWAEGLQARGKCKMTVICAVMRKLIHLAYGVLKSGQPFDPAWAKSA

SEQ ID NO: 353653 - protein, 350 aa, unidentified
MEAQLEVVLGVDTHLDVDVGVVIDAIGRVLGTLSVPTNSEGYTQLLSWARSYGCLQRAGVEGTGTYGAGLARLLTANGIAVVEVNRPNRARRRLRGKSDPTDAENAARAVLAGEALAIPKSQTGVVEALRALALTRRSALKARTQTINQLRSLLVSAPDDVRAKLLKTSPDECVAECRRIRLLGEGPAFEALAQALRTLAKRWTHLSCEIKSLDRSLKQLTERAAARLLQQFGIGTQTAATLMITAGDNPERLHNEAAFAALCGVSPLQASSGKTVRHRLNRGGDRAANNALWTIAMVRMRSEERSRAYVARRTAEGLSHKEIQRCLKRYIAREIYPLLLADLWDASHPS

SEQ ID NO: 353654 - protein, 358 aa, unidentified
MGDGSKEPQRMTAGLDLGDKYSHLCLLDTRSGETIEEGRLRSTPEAFRRRFDSERPMRIAIEAGTHSPWVSRLLEEYGHEVLVANARKVRLIYGQARKNDRLDAQNLARLARLDPKLLAPLKHRGEASQAHLAIVRSRETLIQARAKLINHVRGTVKSFGFRLPSCSSPTFHKKVGAHVPEPLRPALQPLLKTIASMTESIQGYDRQLEVLAEEYYPETKPLRRVHGIGTLTALAFVLTLEEPSRFQTSRAVGAYLGLVPSKDQSGERDPQKRISKQGNGLLRRLLVGSAQRILGPFGEDCDLRRHGLKICERGGKDAKKRAAVAVARKLSVLLHRLWVGGEAYEPLYNAERFEGQAA

SEQ ID NO: 353655 - protein, 427 aa, unidentified
MKYTQNEKILQVTEDTLIAGVDIAKESHYARAFDYRGVEYGKYLRFENNREGMTKFFKWAKDLMERHKKNKLIVGIEPTGQYWLCFAQYLKDNNIKVVLVNPFHVKRSKELDDNSPTKSDRKDPKTIAMLVKDGRYVEPIIPEGVYAELRVAMDIKDRLNKQIGMTKNQITRWLDIYFPEFNTVFSDWEGKAALITLREFPTPEKIAKKSAEEIISIWKKEVQRGVGEKRAIKLIETAKKSIGKKQGIKMAEYEIKTLIEQYEFLKKQIEEVEKKIEELIVEIPGVKELLEIKGIGINTVAGFIAEVGDIEKYEHPKQIQKLGGLNLIENSSGKHKGETTISKRGRKRLRRVLFNAVMALVAKNEEFRELHKYYTTRAQNPLKKKQSLIVLCNKLIRIFYVILKKGVKYDPIKMMKDIKRPALQEAA

SEQ ID NO: 353656 - protein, 384 aa, unidentified
MKKRSTEETRTTRETKRTGGIKGADVSSTGSSRSLTIGLDLGDRMSQICVLDSMGEIVEETRVATTENGLTRIFDVKRLGKCRIAMEVGTHSPWVSRLLRDMGHEVLVANSRKLRFIYQNRGKTDRVDARSLARVARMDPALLSPVKHRDEEVAQDLAVLRTRDLLVRTRVKLIGHARGAVKSAGHRLKASSTRSFTAETESMLPEELKETLGAVFSAIDAISEQIRALNQRVREMAKTKYPETGLLRQVAGVGYILSLAYVLTLETPDRFEKSRMVGPYLGLVPARRQSGDSDPQLRITKEGDGFMRCLLVQGSQYILGPFGPDCDLRRFGLALEGRGGKYAKKRAVIAVARKLAVLLHKLWRSGEVYEADRRLALLPEPAKA

SEQ ID NO: 353657 - protein, 356 aa, unidentified
MSRDIKYIGMDVHKEAVVIAVLNNSGKLVMESIVETKASSLLQFIHGLQGELHVTWEEGTWAAWLYDLLKPHVHQVLVCDPRRNALLKEGNKSDKIDAQKLANLLRTGMLRPVYHGEHGLRTLRELARSYHTISQDLIRVMNRIKALYRGWGIACGGTQVYAPRYREEWLGKIEHVGVRRRAELLYQQLGDLQTLRRTLRPELLAESRKHKATKLLRQIPCIGPIRAARLLALMQTPHRFRSKRQLWTYSGLGIETRDSAQYCFVRGKLQRVKKPQQIRGLNRNHNHEMKEIFKGAATRASCGVGPLRDFYMALLDKGMKPEMARLTLARKIAAIALTLWKKEERFDAEELKTQAA

SEQ ID NO: 353658 - protein, 397 aa, unidentified
MIAVGIDISKAKSTVAVIDSDGTVLASPFTMAHTQPEMEAFVTYLKGLGEPTTILMEYTGHYHYPVLKKLQDEGFPVCIVNPYQMKKYGDVEIHKAKTDKKDALRIAAYALEKSYKLVPYSSMEQKYEDLKFLSRQYSQRITYVAKLKVQLIALLDQTMPGITKILPLNSRNPEKCALLLFIKRFKSFDEIQRIGKARFLASYNVLAKKASERSASSKGLSIYELAVDSITTRGEDPYIWLSQNQCVDLLSATQNAADEIISQMRNIAETIPEYKVLRAMHGVGDRLGPIILAEIGDVHRFHSGKALNSYAGNDAPPYQSGQFESRNRHISKRGSSTLRKACYEVMQALKLTKPQDDPVYLFMLKKEQEGKPFNVAKMAGVNKFLRIYYARAMELYK

SEQ ID NO: 353659 - protein, 369 aa, unidentified
MGDRITYVGLDVHKEGIVVAVAEGGIRGEVREYGRIANTPTALDRVMRKLGADGVKLRFCYEAGPCGYGIQRQLSTSGHECVVVAPSLIPKRAGDRVKTDRRDAASLARLQRAGELTAVWVPDAGHEAMRDLVRARLDAVHALRRARQQLAGFLLRQRCHYGRPAWTKLHRHWLARLKFEQAAHHLVLEDYIQTVEAAEARRNRLTAQIAAMLPDWTLAPVAAALQTMRGMALVNAATVIAELGDLSRFANPRQLMAYLGLAPSEHSSGASVRRGGITKAGNGAARRLLIEAAWSYRFPARLSRELLLRQENQPKPVREIAWKGQTRLCARYRRLARAGKPANIVTTAIARELAGFVWAIARSVPPAAG

SEQ ID NO: 353660 - protein, 428 aa, unidentified
MEKTRIAKLEAIDEKTIICGIDVAKKVHWAQFVDWRGIPVGKAVKFKNNKAGLEHIVAEAKRRCKETGKEKVITGMEPTGPYWKAMARWLESEGLEVVGVNTYHTKQAKELDDNSPTKNDKKDALVIARLVKDGRYFHPYLPENTYAELRVTANHRLMLVKRMNAVKNRIIGILDEYFPEFVTVFKCPLKGKASRQILKNCPFPQHILEIGIAGVLAEIKKAVKKTVGKKKAEQLLVAAADSIGVRHGADSARFQMRLLLDELEFFEMQLIQVKARMEELLGQTGYKDLLLGIDGIGIISAASFLAETGDPMRFDKPRQIHRLAGYDLVENSSGQNKSGTSISKRGRKQLRALLYRMAMVMVASNSELKQLYLYLRTRLKNPLKGKQALIVVSKKIVTIIYQMMKTRTEYKPVLVLGPVRREQLRLAA

SEQ ID NO: 353661 - protein, 366 aa, unidentified
MKQITTFVGIDAHKKDLFVAMLSGQAATPVSWQLANEPTAVRRLVRKLEREASGPVHVFYEAGPCGYALQRQMTTARVRCDVIAPALMPRKPGERVKTNRRDARKLAELGRAGLLTIVQPPTPADEAVRDLARARDDAREDLQRSRHRLGKLLLRRGLHYAGRNWTQAHRRWVDSLTWTHAAERAVVDDYQLAIDHTESRLVELDARLAEIAEQPPYREPVGWLRCFRGIDTLTAMLILAELHDFRRFGSARALMAFLGLVPGEDSSGEKHRRGRITKMGNGLVRRILVEASWHYQHRPGIGRALAARRKGQPSRVIAIADKAQQRLCRRFRRMLTEHKPAPKIAVAVARELAGFIWAALQPPAVA

SEQ ID NO: 353662 - protein, 432 aa, unidentified
MKYKLKQKQNQRITRITEKTLVVGADIAKKIHVARAVDIRGIELGKECVFHNDQEGLTKLAAWMKELGRIHEKTDIVFGIEPTGHYWFPLAAFLKEQDIRVVVVNPHHVNKSKELEDNSQTKSDYKDAKVIADLIRSGKYSEPNLPTKEYAELRILMNFREKVMVSLNQVKARITNWFDRYFPEYPQVFKDWEGKASLMTMRQFPTPEEIVSIGARGVLTHWKTEIKRGVGIKRAEQLYAAATVSIGLTEGLTAARIELAALLQQYDLYCKQEESIMTEVLQILEKIPGTKQMLSIPGIGILTVAGFLAEVGDLNNYDHGQQIIRLAGLNLTENSSGKRKGKTGISKRGRSRLRGILFRCMLPMVAKNKEFKALHEYYTTRSQNPLKKKQSIIALCGKLVRVLYTLGTKQKEYNANEVLGPIRQAQLQQSAA

SEQ ID NO: 353663 - protein, 343 aa, unidentified
MAQSNLIAIDLAKNIFQVAQFQGSKLKSNKQASRKALLELLVKAKPSVVAMEACASAQYFARTAQSFGHKVMLLDPLFVKAFRQGQKTDANDAIAIAIASKVPNVRTCKILSIEEQALQSLSKVRALADKQKIQLSNQIRGLLLEFGIVINQSEAAFKAAIPDILEDAENTLPLELKHALALTYALYQQQCDNKVELQKQIERIVKQNDGCQRLMALEGVGPITAIELLSFLGDTTQFSNGRSAAACAGVTPLQHSTGGKAKIGCIPKRRGGALRRNLFLGARSIVSKLKNREASTEKERWIKSLLIRKGVKCAAIALANKTMRTAYALLKKGTNYEPTALTA

SEQ ID NO: 353664 - protein, 359 aa, unidentified
MKTIVSNKQNWFNKINLTKDDEIYVGIDVHKKSYAVAVWLNNAPAIDFVMPADNQKVLTMLDKLRIALKQVVYEAGPTGYSLARLLQDAKLPIRVIAPSKTPRQSARESKTDKLDCRKLAQYAAKGLLRPIAIPTKQQEADRQLFRLREQLVEKQRRLKLQIKSFLLQHGIPDPAGLKSWSVLAVEKLRTIALPDKLRYCLDIFLDELAFLKTQIKKTEQHLKETFSAPQYAKKIELLRTHPGVGPVVAGQFCTEIFNPKRFKNSTEIGKYVGLSPMVTQSGQSRKDGPVLKTGRPQLRSNLIEASWVWIRNDPHAYKTYIRLLHNTGEKNKAIVAMARRLAIHLWKMLSDNKPFVQAA

SEQ ID NO: 353665 - protein, 358 aa, unidentified
MFCERTSVGLDVHARSVVAAAIDGRSGEVFRARLTPSHADVIEWVGKLPGPCAVVYEAGPTGFGLARALSAAGLRCQVAASSKLLRPAGDRVKTDARDALNLARLLRLDEVVPVRIPSAAEEAARDLVRTREAARADLMRARHRLSKLLLRHGIVYYDGKAWTERHDRWLHHQRFDAAPTQSAFEDVYEAVVLATARRARLDEKITALAADSEFSPLTRRLACLRGISTLTGFALAVEIGDWDRFTGASIGAYLGLVPSEYSSGTSRTQGAITKTGNSHLRRLLVEAAWHHRSTYRPGAVLRHRWDQAPARARAHAGNQRLHARWVGLNLRRKAAVIANVAVARELAGWCWSLAVLPD

SEQ ID NO: 353666 - protein, 413 aa, unidentified
MDVLHRCCCGVDVHKASVVACLIAPRAGGAPCKEVRTFGTMTEDLLQLVDWLVAAGCTAVAMESTGSYWKPLYNLLEGVVEQVLVVNAAHIKQVPGRKTDVKDAEWIADLLRHGLLRASFIPDRPQRELRELTRYRTSLIRERAAEVNRVQKVLEGANIKLAAVASDLTGVSGRAMLAALLDGHMDAAAMAQLAQGKLRAKIPQLEQALVGQFGAHQRFMIAQQLVHIDTLDEIIARVSVEIAERVHPFAQEIAQLDSITGVGQRTAEAVVAEVGVDMTRFPTADHLTSWAGLAPGNNESAGKRRSGKTRKGSPWLRAVLIEAAHAAGRTKDTYLGAQYRRLLARKGKKRAAVAVARSILVIAYHILRDHEPYHDLGASYLDQRDRQAVERRLVRRLEALGYDVSLQPKEPAA

SEQ ID NO: 353667 - protein, 419 aa, unidentified
MSQSNIDKPSMQDPVRTLHAGVDLALEKNVVVVVNERAERLDHFSFPQDRGGYDYFLRRLEGLRQKHQAAKVVVAMEPTNFFWKLLARELEEKQLSYRLVNAYTVKKHREGDQLDRSKDDRRDAGQIAELSRNGKTTQTQLQKGAYEDLRQYATLYHQLMQSMRREKTILWGLVGQVFPEMARAFKDLEGETYQALLLTCTAAAAIRQMPLDAFLAKVRAAYSGKRLCVSKLKRVYQLASRSIGVTEGLQAIQLAIQVHLTHLQVFETQLEQVTGAMTARLFSLPEAPYLLSCPCLKATSAALFLAEVGDPQRYQKAAQWVKLAGIQPVPNSSGRKQRSRTPMSHQGRPRLRTLLYFTCLRMLQYDTRFAQLYSHLQRRKDNPLTKMQALGVLMNKLLHIWWALIHNQTFYNPSFGQSV

SEQ ID NO: 353668 - protein, 364 aa, unidentified
MNKKRKRMTTAQDPKPFAPDQVDPCGTEVSAEELIVALRRKGVQQPLKSFPNTPEGHREIGRYLARPGRLVRVCMESTGVYGLDLALALAAQAGIQVRVANPRAVRNFAKALMERNKNDRVDAGVLQEFAARMPFEPWQPPARPALHLCALARRLEAITDLCAAEENRLHASQATEALPAIIRQDLERSIRFHQRAAQRLTREALKIISEDSNLQQRYTLLVTVPGIAQTSALRILAELVMISAHLDARQWVAYAGLDPREYSSGTSVHKKVRISKAGNRHLRRGLYMPALVAVRHDPHLRGFYQHLLANGKLKMQALVAVERKLLHAIYGMFKHQQAYDGTKVYRLPDGLTPASSAPVRTEAA

SEQ ID NO: 353669 - protein, 314 aa, unidentified
MAEEKVNVGIDVSKTWLDIAVLPSEESWRIENTEKGIGKLIERLRVLPLDRIVVEATGGYEARLVKGLAEAGLPVSRVNPGRVRRFAQGMNWLAKTDKIDAKVLAQFGEKAQPRLLILPSEAEKRLSALVKRRKQVVDMLTAEQNRTELAETEVLASIANSIQFLQNQLAELDAQIQDLIDQTPDLKHKQNLLQSVPGVGKVLSSTLVSQMPELGTCDRKQIAALGGLAPFNHDSGRKRGRRMIRGGRPFIRRILYMATLAATRFNPVIKALYDRLIAAGKLKKVAIVACMRKLLTILNAIVRDQSSWQPVFPS

SEQ ID NO: 353670 - protein, 331 aa, unidentified
MKKWDFTLGVDVSKLTLDIHCKELNIHIQIANGSQGFKVFQSWCKEFKIGLRSSFVVLEYTGGYEYKFLQFCESKRILYTRIAGLAIKRSLGIVRGKNDKVDARRIAQYGSEKSHDLKPAGPVNPTIMALRQYLSFRKRLVRESAGYKATLTERKVMYPAKADDMLTRMMAKKIKENDQLVKKLEAQLEIMIEADPAILMNYKIIRSIKGIGNINALMTIAYTENFTCFKSARSYAVYAGVVPFDHSSGTSIRGRRKVSNLANKELKQELNQAARVAIKWNQDLKLYAERKLQEKPYKVVLNNVKFKLILIMFSLVNRGELYVDNYQKVAC

SEQ ID NO: 353671 - protein, 411 aa, unidentified
MQVVHERCCGLDVHKKTVVACILITLANGEVQRHIRTFSTMTAGLLALADWLESLAVTVIAMESTGIYWRPVFNLLEEGRSVILVNAQHMKAIPGRKTDIKDSEWLADLLRHGLLKASFIPPAPIRELRDLTRYRKSLVQERAREVNRVQKVLETANIKLSSVATDVLGKSGRDMLSALIEGNTDAEILADLARGKLRKQLPQLQQALDGRVQAHHRLLLKHILAHIIFLEETLEQLQQEIEQHLGPLEEAMTLLMSIPGIQALAAATILGEIGDDMTRFPSAKHLASWAGVCPGNKQSGGKRLSGKTTQGNATLRAILAEVVWVLSHMKDNYLSAQYHRLARRLGKKKAVVAVSHSLLVIIYHVLSTEQPYSDLGADYFEQRDSTRLTQRSVRQLEALGYTVTLVPKEVA

SEQ ID NO: 353672 - protein, 378 aa, unidentified
MLSENSIRIAIELSVSSWLIAVRLPGADKSRLRRIDGGDARALLALIGEFRSLASAKCGKIVDVACCFEAGRDGFWLHRLLTAHGITTYVLEPTSILVNRRARRAKTDRLDAEGMLRVLAAWLAGDRQVCSMVRVPTPEEEDAKRPHREREHLVREKLRIENRIEALLFTQGIRGRPSLRSWERDLAELRTGDGRVLPRLLQAELNRLRRRLVLTLQLIREMEVERAETQTTTIDDAVTKKITALQRIRGIGENFSNVLVHEVLYRSFANRRQLASYVGIAPMPYQSGGMDLDRSISRAGNQRARTTLIQLAWLWLRYQPSSALATWFRERVGTLQGRTRRIAIVAMARKLLIALWRYVETGVLPEGVELGAAMVAPA

SEQ ID NO: 353673 - protein, 383 aa, unidentified
MDQNQGTFDRDKSKPGPVLYVAFELANSTWKLACSDGNKLRHVTVTAGDLAQVRGAITGAKRHFDMGDEVHTVSCYEAGRDGFWLHRYLHSCRIDNVVVDSASLEVNRRLRRTKTDRIDAGKLLSMLVRYHGGEQHLWRVVRVPSREDEDARHLHRELEALKRERTRYRNRIHGILIQQGLRIKNPSTKKFVQALELMRTWDGRELPPEMKVRLVQVHERLRLVEEQISCLVKEKTLRLKAETARMAQVVQLMRLPGIGPVSSWTFVMEFFGWRRFRNRREVAALAGLTPTPYDSGKRLREQGISKAGNRRVRTLAIEIAWAWLRFQPRSKLSRWFLERFAGGGSRMRRIGIVAVARRLLIDLWRFLEYGVVPEGAQVNPLAV

SEQ ID NO: 353674 - protein, 448 aa, unidentified
MRMPQVIDDEEHERVFDTVAAVDVAKKDGVVCLRQPHRSRPGSRQSTVWTVPATMTAVSALGAELADAGVQKVTLESTSDYWRIWFYVLEAAGLDVQLVAASQVKQLTGRPKTDKLDAVWLARLTEKGLLRPSFVPPAEIRVLRHYTRARTHLTQDRTRCWQRLEKLLEDAMIKVSAVASTLATLSAQDMIAALIAGERDPQVLAGLARGRMKAKHAALVEALTGMFTSHHGEIAQMLLDQIGFLDKHIARTTMLIGEQLAMIRAAWGIDDDASTGPGAGTGDGAIVKPAVARLDEIPGISAGLAASIIAETGLDMSRFPTAAHLVSWAGLCPRTMQSGPRTRHAKGTGNTYLRGYLGQAANGAAGTATFLGERHARIARRRGGAKAQVAIARSILVIIWHLLHDPEARYTDLGPGHYQTKIGKNRKTRSHIRQLEALGYHVTLTQAA

SEQ ID NO: 353675 - protein, 361 aa, unidentified
MPTKKSNPTFSGQKVFIGIDVHKNSWSVAVRTLGIEVAHFTQTPEPQQLARYLESRYPGGSYMSAYEAGFCGTSHHEHLVKLGIQNMIINAADLPQTDKQRNNKSDLHDSRFIARYLEKGLVSGIHVMPKDQQERRSLFRCREVLVRDCARAINRVRSFLYFFGIDLPSEFKDKQYISKNFLNWLYSIKPGSDEGHEALEFYLNHLVYLRKNILAVTNLLRRSVSTHSMDAYNRLLSVPGIGCITAIGLLSEVGDFKRFNDPDEFTSYLGLIPSEHRSGQTILNIRMQPRCNMHLRPLLIEASWLAIKKCPYLLAYYKEHAPKGAKKAIVKVARKLALIARSIVLKKTIYQPGYNNQNQEI

SEQ ID NO: 353676 - protein, 311 aa, unidentified
MNNTIGIDISKDTLDAHRLADGQHKQFLNGKTGHAQLVKWIGKQSDPLIIFEATGAYHRQLERVLCTHIIPFVKVNPKQARRFAQASGKLAKTDRVDCKMLAKMGAALQLMPKPFTAENLYDLKELLSARRALIKDRTAAKARKATVINALIKQQLEKRLRQIKNDVAKIDALMLDVAREDQYMSERLDILFSIPGIGVITALMILVDMPEIGALNNKQVASLAGLAPMSQSSGKWMGKARIQGGRPNLRNAIFMPALVAIRHNADLKTKYDQLVTAGKEKKVAITAVMRKLLVLANALLRDNRKWAEKAA

SEQ ID NO: 353677 - protein, 343 aa, unidentified
MDHFAGLDVSVKDTSVCIVDGTGKIVREVKVASEPDALLGVLRNPDYCFKRIGLEAGPLSQWLFSALGEANLPVICVETRHMRAVLKAQINKTDRNDARGMAQMMRVGLYRPVHVKTLRSQKLRMLLTHRKLLQSKAIAIENDLRGTLRNFGLKVGIAGRTKFEARIEELVEHVPDLAVLVEPLLVVRRVLREQIAVLHHRLLAVVRDDAICRRLMTVPGVGPVVALTYRATVDVPARFRKSKSVGAVFGLTCSRDQSGERDRPGAISRCGDEMMRAMLYEAAQAMLLRSAKWSWLKAWAMQIARRRGMKRAIVALARRLAVILHRIWVDDTEFRWTREAAAA

SEQ ID NO: 353678 - protein, 324 aa, unidentified
MTDAVLGIDVSKNTFDASLGAGTKARSKSFANSPDGWHQLIAWLGKHKIGQVHACLEATGRHGLGIALALHEAGHVVSIVNPAQIRNFARTKLGRNKTDQVDAVHIREYAELFKPRPWTPPSPAMRRLCELQTIRAGTVAGLTEWKNRRGSGIMDDLALSLAETTIQHFTSQLELVDQAIAETIDNDVELSAKRDLLVSINGVGEALAGIVLAELPGPDILGSSAAVAAYAGLNPQQRQSGISVNRPVRISKIGNAVLRAALYMPALSAMRYNPAVIALVDRLKAQGRLKGKQIVIAAMRKLLVLCFGVLKTGKEFDPAMVMGK

SEQ ID NO: 353679 - protein, 337 aa, unidentified
MSRFIGVDLHKTAFTVCFMEGEEKRFETYKIDVMERFRENLRADDEVALETTTNTRHFVGRIRDRVQGIHVINPFQFKVISHSVKKTDANDAEKMAFFLSKGMLPEVRMKDEQYAELESLANTRGKLVQLKTALKNKIHNILNAQGIVTKKECLSSGKGLDRVLEYPVSAVARIELEVIIEQIKGLNAGIAKIDKLLSDKGKDLDGHEGITSIKGIGDKGAAVLLSVIGDINNFEDEKKLAAYFGIVPRVSNSNETNHQGRITKQGSKLGRTTLVQCTLIAIRYSNYLRVFYEKLKAKKGSGKAIIATAKKLLGIIYLTLKNKWVFEDFSNFVIKEA

SEQ ID NO: 353680 - protein, 394 aa, unidentified
MLYCGIDVAKHKHAAAVLDEHGLPKKPVFMFENTHAGMEHLLAELKSLGAEVRIGLEATGHYWLSLYDFLTRNGYSVSVINPMQIAAYRKSGLRKLKNDRTDAVWIADFLRIANLPASSRDIPTILQLRELTRFRFWLAEQIGDCKRKLLTILDRVFPEYESVFSNVFVASSRAILQEAVSAQEFADFDLQELTELLTKTSRRRFGIEKATQLQEQARQSIGVGFLADAAQIELRCLLAQIELLEEQEAEIEEALTKLMETIPQHITSIPGVGLPTGAAILAEIGDVSRFESEEKLVAYAGIDASVHQSGQFIATQMHMSKRGSPYLRLALWQAASMSILHNDELKAYYHKKRAEGKLHRVAVGAVCRKLLVRIYVILKENRPYVIRESTLPNP

SEQ ID NO: 353681 - protein, 344 aa, unidentified
MLHAGLDLSRKKLDVCLLDEDGNHLDQLICPPDGEGLKTFARRINELHDQPIAAVIESMTGARFVHDTLESEGWDVEIADAQKVKGLAPLACKTDRIDSMVLATLSHRDLVPSIWLPDPRVRQERELARFRLHLVKHKSMLKNRIHSSLISFGKPCPVTDLFGVEGRQLLKQMEIPEPWRSDITASTELIDHLERQIDQTNKRLKAGHADHPYIPLLMSAPGIGWVLAFTIAGEIGEIERFASPQKLTGYTGLCPRVNQSGDKDRRGPITKQGPTYLRWALMEATMHALKHPAYAERYQRNKKRLGKQRGAKVAQIDVARRLSHAIWHMLSRNEEFAPRGAVFV

SEQ ID NO: 353682 - protein, 404 aa, unidentified
MWYVGLDWADTHHDVEVLDEAGKRVGARRFAHSHEGLNELKQFVLSIAASPDQLACMVETNHGLLITFLLEAGIPMYAVNPKMANQLRKAAGAKTDQIDAHLLAKMGRLELDEMRRLEADSPTVQELKTLTRDQDALIQTQTRLVNQLTACLKEYYPAALHLFAKLQQRSTLVFLQAYPTPQTAQAASLEEITATLRMGKHTNPTRAAPKIFEELHRPQLVAKVVIVRAKQRLMLSLVKQLLVVIQEIASYDEAIRTLFLTHNDQQIWRSLPRAGKRLAPRLLAEWGDDRARYADANSVQTLAGTAPVPFQSGNYAKAHKRFACLKPLRNVLHQFAWQSTRQEAWAASYYRRKRAEGKTHSMAVRALANVWVRIIYRMWVSNTCYQTATFEAAQLTHAPRQHVA

SEQ ID NO: 353683 - protein, 435 aa, unidentified
MEQEENMEDVTDSLALFRQMKASIRGAEKYLLIGIDVAKSKHHAFFGTPNGKTLRKNLVFDNSLTGFESLRDLAADLKNQHGLVKVVYGLEPTASYHKPLAEYLLRQEEQVVYVSNVAVARNRGLLDGRWDKNDKKDAANVADLVGQGRCLYYDLPPEDLRELRSLIAFRSRLKKEEHALRMRLRNNLFAQFFPELDQLYERGGQPDDLILSIAEHCLDPKSIAGLGFADFLKLITKRKIRIEQEKRLHTLWEAAGRSIGCQVHESALWEAKNLVSKLKAVRETVKENEQRMATVAKKFPEYVCLLSIPGFGPIVSAMVLAAIGDPHRFEHRRQVMRLAGLDLSAERSGKNSDSVKPVISKQGKAALRYALVQAAMVASSLNPTIRRYFSKMLKGRELERGINLKMKVKLAAKLLIVAWTLMKSRKNFDAACFTV

SEQ ID NO: 353684 - protein, 404 aa, unidentified
MWYVGVDWAFTHHDLVVLDEAGRRVGSRRVAHSKQGLDELKHFVLSIASDPKELACIVETNHGLLIPFLLEAGIPVYPVNPKSANQLRKAAGAKTDQIDAYLLARIGRFELAELRRLEPDSSIVQELKTLTRDQDALIQMQTRLVNQLTACLKEYYPAALHLFSKLRQHSTLVFLQAYPTPERAASASVVQIEATLRTGKHPNPRAKAARIVAEVQRPQLSANAVTSRTKSRLMLSLVKQLLVLIEEITSSDKEIARLFLSHPDKEVWSSLPGAAKRLAPRMLAEWGDDRTRYTDASSVQALAGTAPVPFQSGNYAQAHQRLACLKPLRNALYQFAWQSTQQEAWALAYYQRKRAEGKTHSVAVRALANVWVRIIYRMWVNQTSYQTATFEAARLAHAPRPHAA

SEQ ID NO: 353685 - protein, 421 aa, unidentified
MGKEDAAGMQVIFERVCGLDVHKGVVVASVRIMSAGGRVRSENRRFGTMTKDLLALLDWLKQAQVTHVAMESTGVFWKPIYNILEGHLEVWVVNARHLQKVPGRKTDMSDAQWIAQLLQCGLLKPSFVPKREQRDLRDLTRNRTRLVQQRATVANRIHKVLEDANIKLGSVASDVLGVSGRAMIEGIIAGQQDAEQLAELAQRRMRGKIPQLRLALEGKVTEHHRFLLREHLEQYDYLERKITALEQRIEQATSPFFKHAAALVDTVPGVAPAAAQAILAETGVDMAQFPSHKHLCSWAGRCPGNHESAGKRHSGKTVKANKWLDAILTECAWAASRTKATYLNAQYHRIAPRRGKKRAIGAVKHSILTAVYFIVRDQVPYKELGADHFTRLNPEQQTRYHVRKLQQLGHNVELSPIEEAA

SEQ ID NO: 353686 - protein, 372 aa, unidentified
MNYNTVYVGMDVHKESFTLCSCRYEDEKASHYQRTPASYKNVLRYLAFLRTIYGEDTRFVCGYEAGCLGYSLYHQLENFNVECVILAPTTMLEQRSKRRIKTDKRDAEIIARSLAQHNYSPVHIPTKMDNQTKEFIRMRDDHKAELKKIKQQILAFCLRQGYQYDGSGNWTAKHVKWLRSLKTEGLYKEILDEYLLTYTILTDKLNRLDQRIEELASEEEYKEPVSKLTCFLGIKTHTALSVIVEVGDFQRFASARKFAGYLGLVPGQHSSGDDRNGLGITKAGNTHVRRLLVESAQSYTRGKIGYKSRVLRSRQAGNSPQVINYADRANERLRRRYYQMVLKDGKKYNIAKIAVARELACFIWGMMTDNIY

SEQ ID NO: 353687 - protein, 370 aa, unidentified
MEEGIKFFVGLDVHKDTIAVAVAEAGRAPARLVGSIAHDVSKLLKVLARYGDPEAVQVVYEAGPTGYGLQRELARRGYSCQVIAPSLIPKRSGDRVKTDRRDCVRLAELARAGELRAVWVPDPADEAIRDLARAREDAVNARTQARHQLKGFLLRHDVRYTHKTSWTKTFYRWLGMLNFGASGAQTAFTEYWQAVTAADERVTRLTEALTHSIEGWRFESVVRALQALRGIDQVSAIGLVAEIGDIGRFAHPRQLMAYLGLVPSEYSSGDRVARGSITKTGNAHARRLLTEAAWNYRFQPRIGYRAQRRAEDLPQAVRDLGWKAQLRLTGRFARLRARGVHINKVCVAVARELAGFVWAIAWTAAKLAQT

SEQ ID NO: 353688 - protein, 412 aa, unidentified
MSIALPNQQFVGKPYKILHNNINSLTTAVSKIKEAEELYSLESRIFLESTGIYHYPLFCYLRDKGFNCSVINPIITKNSTNINIRKVHNDRFDSKKAALVGLKPDLKVSLMPSDLALNCRNLCREYYDLVDHRSAYVNKLQGELRMAFPQYLGIFSKVTTNTSLTLLERYTSPNAFLLADMQEIIDTIQSTARFGLTYAQKKYHAIIQAAHDANEFGYMIDSNIKRIRLYISFIRKYDEEIKSILDTMHELVDNNEDTDFVKQIHLIESFKGAGFLSAVSLMGEIGDFSAFSKPKQLFAYFGLDPTVKQSGKFEGTKVQMSKRGSSIARRVIHTLTLQSISVSRNGEAKNPVLRDYYLEKCKSKPKLVAMGAVSHKVCNIIFAILRDNKLFEVITPQEHIKQYNAAKCDIAA

SEQ ID NO: 353689 - protein, 351 aa, unidentified
MTNSILAHRWCIGIDLHKDTMTICTYCRCCGEIAFRKIACKNRDQVAEFFRALPRPHAVAIEAVGFYRWLWELLEPLVEKLVLADATQARALAGRRMKTDREDARNIAELLADGRLPLAYAPPMEVQVLRDWTRQRNRLSRAHARALHGVKSIMNTNNRPGPVRLSAERLTGYIKAYGARLPERHVRMLWQHQRQLSLVEEEMGLCEREIAGLLASPRFAATAALLITAPGVGPVVTATVLAEVGDFHRFPDGKAIGRYAGLTPRLFASGGKERHGHICKTGPRDLRWVLQQAAWTAIRCDERIKHRWLRISRGSGRKAAAVAVGRQLLVTLWHMVHRQTPYRSPTPQEAA

SEQ ID NO: 353690 - protein, 379 aa, unidentified
MTIVADTTPPAPVDVFGVTLGVDTHADFHVAAVIDPLGRHLGQASFDTTVAGFKALLAWANDFGPITIAGVEGTGAYGAGLARFLTAENVVVVEVDRPDRKTRRDQGKSDPIDAYAAARAAASGRASGIPKTRTGDVEAIRVLRVARTGAVRARTRALTQLKSLIVTAPDALRAQLAGLDGTELVTTCARLRPARRTAPTPSPFAKRPPRPGRLVDPTAATKRSLASIAQRVHQLDAEIAELDDDLEALLTPLAPTLLDLFGVGYDVAGQLLVTAGDNPDRISTEAAFAHLCGVAPIPANSGKNQNNFRLNRGGDRAANAALYRIVLCRLRYDERTRAYVDRRTKQGKSKKHIIRCLKRYIAREVYAAIQADLNPDFAP

SEQ ID NO: 353691 - protein, 419 aa, unidentified
MKHDVEVLHPYCCGLDVHKKVISACILTPTKKQRKRFGTMTDDLNELVNWLKEYCVSIVAMESTGVYWKPVYNVLEEAGLEIQVVNAQHIKMVPGRKTDTTDAEWIATLLRIGLLKPSFVPSRRERELRDLSRYRLALVQERSREIQRVQKILESANIKIGSLISDVNNMSGRLMLQAIIKGKLTPEEISTLGHVNLKHSPEEYAKALKGRVNAVHQRLLSMQLTHIDELTQRIVELDNDLETITAQIPNFKEALELIDSIPGVGRQSAMTILIEIGLDMSRFPTVKHLAAWSGVAPGNRESAGKNKPEKSRKGNKYLKAVLVQAAHSLHRKKNCHLREQYQRIKARRGSKKAAVAVAHTILRIVFYLLTRKEMYQELGANYVSEKTKNSQIQRYVKELAKLGLVIPNALVDQQLANSA

SEQ ID NO: 353692 - protein, 376 aa, unidentified
MQRKELSFSGQKIFIGIDVHKDSWRVATVPEVGVVKGHSQKPSAKELLDFLKKHYPDGEYHAVYESGFSGFSTYYALQEVGIDCIVIHAADVPTTQYEETMKTDKIDAVKLVKSLKAGLLTGIYIHKRDDIDARAVVRLRKTIQKQLGGYKSRVKHLLHSNGVAFPERFSNPGTHWSKAFINWLKQEVSLLSCTRISLDLLIVQVESIRHTLLMATRKVRELSRSERYRHDYELLTSVPGIGISVAMALLTEIGDFNRFRNEREFASYLGLVPTSHSSGGKVAYGEKTFRGNKKLGPQIVEASWISIYRDRGLGCAYVNYKKRMEPQEAIIRVARKLSNIIFSVLKTGKKYESYQWDEIEKYTDKQATSKKNDSCS

SEQ ID NO: 353693 - protein, 343 aa, unidentified
MDHFAGLDVSVKETSVCIVDDTGKIVREVKVPSEPKALLKVLTNPAYRFKRIGLEAGPLSQWLYSAVAEAGLPVICVETRHMRAVLQAQINKTDRNDARGIAQMMRVGLYRPVHVKTLRSQKLRMLLTHRKLLQSKAIAIDNDLRGTLRNFGLKVGIAGKVKFEARIKELVENYPDLAVLVEPLLIVRRVLREQIVILHRRLLAIVRDDDVCRRLMTVPGVGPVVALTYRATIDVPARFRKSKAVGAVFGLTCSKYQSGEINRTGAISRCGDDMMRVMLYEAAQSMLVRSTRWSWLKAWAMQIARRRGMKKAIVALARRLAVIMHRIWIDGTEFRWTREVAAA

SEQ ID NO: 353694 - protein, 344 aa, unidentified
MSEQYVGHQIVGMDLHRRRSVLVRMTDCGEQLETVRISNDPEYLQAVMARAGEHPDVVLEATYGWYWAADTLAELGATVHLAHPLGVKMFSLRRVKNDQLDAADLADLWRMGRLPEAWIAPPACRELRGWVRHRAKLVGLRSNLKCQVHAVLAAAGVQVPMSDLFGPSGQQLLATARLAVESRSRIDSLLRLIAGLDFEIDTFARLVAGRLREDPGYRAIQQIPGVGPVLAAVFVAEIGDITRFRRAAQLACWAGLTPTHHESDTTVHRGRITKQGSRLVRWAAVEAVQRVPAHTRLGQTRDRVGDRRGRNIGVVAAARELTELVFYGLRDHRIRCLATPASAA

SEQ ID NO: 353695 - protein, 383 aa, unidentified
MKKTQETLRIEDSIKEAILYIAFELSNSKWKLAFSDGSRIRHKAITAGNLAQLQVEIDLAKRKFKMIEDVRVVSCYEAGRDGFWIHRYLESQGIENLVVDSASLEVNRRKRRAKTDRIDVRKLLRMLLRYWGGEKQVWSVVRVPSETDEDARHLHRGLEDLNKERTMHRNRIKEFLVLHGIKVSNPSHKRFLEQLEKLRTWDGRQVPPDLKSTIIREYERLQMVEDQIRALEREKTERLKNPDTDSLQKVVKLASLYGIGSVSSWTFVMEFFGWRQFQNRKEVGALAGLTPTPYDSGKSLREQGISKAGNQRIRALAVEIAWAWLRFQPQSNLSQWYMKRYANGGKRMRRIGIVAVARKLLIDLWRYLEYDKIPEGARLKSAT

SEQ ID NO: 353696 - protein, 420 aa, unidentified
MKKATSPPPAAETADTPACSAAQDARRLGAQGRLVMRIVGLDLGVRHIAYCEVKDGKVIDRCSVRSLSQLESRLGPNCPPAQVAFEACREGWHVHDKLLGWGNTPCMLDTTRIRQIGVGQHKRKNDAIDAETIAFAVESGRIPAAHVLSPERRALRAQLSVRGALVETRAQYVTTIRGLSRAAGVLLPTCSTDAFAARFEADSQQLDAATRTLVAPLIAVLKALEFELARVDQELATLAQRDPIIGLCATVPGVGLIVASTFVSVIDEAKRFHNAHAVGAYLGLVPGEATTGGPGKRRLGGITKQGNSMARVMLVQAAWLILRARDTNDPLRRWADNLVQKRGKRIAVVALARKLAGVLWAMWRDGTVYDRAANATASAAGVRRDARQQTHRADALEVSAKKLHQRAVAAAHKISEASGT

SEQ ID NO: 353697 - protein, 305 aa, unidentified
MISWVGIDISKSNLVVWVQPQNQGFDVANTSQGFDELIECLSRYQVGRVLLEATGGYERKVMAALQSANFNVLRINPRRARAFAVAMGKNAKTDPIDAAVLADFAEVLNAPCDKTICAEREALRELVQLREHFVQQRDDNKRRLQQVQLPAAVTTIKDHIRYLQTQIKLLEKSINQSMRDLDAEKADRLTSVKGIGTVATASLLVYLPELGELDRREIAALAGIAPYNEDSGNHSGKRQIRGGRARVRRALYMSCWVVIRHQADFKARYEALRERGKSAKVALIACMRILLIRLNAMLRDGTEWR

SEQ ID NO: 353698 - protein, 392 aa, unidentified
MNPRALGWDNHRKFSKVSVMEKTPDGEILAVERARLEHDDKDAMRAWLSHLDPEIPVALEATFGWPWVADLLEELGHPVHLAHPPVVRALAKHEAKTDRCDSDRLGKFQLRGILPESYLAPPEVRQHRERTRHRMALSALRTAVKNRAQAVLHRHGILHEFSDLFGKAGRRFLDDLALPEGSRQALQGSLQLLDKLTLLIDEVEQWMVENLEEDDVVRLLMTIPGVGLILAHVIRAEIGEIGRFPTFRHLASYAGLAPMSDDTAGREGPRHCSNACNHVLRWAFIEAVHGVQRTKGQHGFRLRQLYARLCGQGRPKGRASSAKVAIAHELSKVVHVLWTKRVPYTDTPPPRPGSRDRQPKIEESPTAKTTLRSDQPRHPMVRRRATVGQTRS

SEQ ID NO: 353699 - protein, 414 aa, unidentified
MDVVHPRCAGVDVSKRDAKVCVRIADAGRLKAKSTVTTWGSVTNQVLALRDHLIAEQVTLVVMEATSDYWKPFYYLLEDGPFDVMLVNARHVKNLPGRKTDVSDAAWLADLGAHGLVRGSFVPPEPIRQLRDLTRTRTAITRDRAREIQRLEKLLEDAGIKLSSVASDITGVSGRAMLAALIAGERDPAQLADLAKRRMRSKIPELTEALTGRFGAHHAFLARLHLDLIDQHTAAIDGLTARIEVMIEPFRGARDLIVTIPGISTGVADVIIAETGADMTRFPSAGHLASWAGTTPGSNESAGRIKSTHTRPGNPYLKGALGVAAMSAARSKGTYYSAKYRRVAARRGPVKAIVAIEHAMLIAIWNMLNTGTLYSDPGDDFYTQLNPDKAKNRALDQLRKMGYDVTLNPQAATG

SEQ ID NO: 353700 - protein, 348 aa, unidentified
MSITMIGLDTAKSVFQIHAVDAAGKPQLKRKLRREEVIPFFEQQERCTVVLEACGAGHHWARVLTQLGHEAKLLAPEAARPFVKKGKKNDAADAAALCPAASRPEATFVPVKSPEQQGVLALHSVRTLLVKQQTMLANAMRGLATEFGLVVAKGIHKLDELEAQVQAEASMPATAKQAFAELHGQSQAAATRIAGLEVQIVAHARQDATARRLATIPGIGPITASLITATVGDSIGSFKSARHFAAWLGLVPRQHSTGGKTRLGRITKAGNSEIRRLLVLGATSMVFRAAQWNSAAGAWLRGVLERRPVRLATVALANKMARIAWAVMTRGETYQAKGRAPAAAAAEA

SEQ ID NO: 353701 - protein, 343 aa, unidentified
MERYYYIGLDIHKKIIAYCVKAIDGSLIDQGKIVADRQSLEIWVKGLPGPWIGAMEATMFTGWVYDFLKPHAVALKVAHPAMLKAITAAKKKNDRADAEKIADLLRVNLLPECHMLSEEIRELRRILRYRNHIVRTAVKMQNKMSGLLMEVGVSYSKKRLHGKKYFRELLERVDEIPASVKELLLLSRSSYEMFRSFQKRLVETLRTDSLIRDRVHRLMTISGIGEITALTWVLEIGDPGRFTSIRKAVSYCGLCSAQKESAGKEQRGPISKKRNKHLQTMLIEAAKLAPYWNEQLAIVYERELNKGNKNRATLAVARKLVAYMLAVDKKQADFKLLSETRAA

SEQ ID NO: 353702 - protein, 444 aa, unidentified
MVRFVGCDVHKRTAVFTLLLEDGTLFATYTVPVTREALTAFAERQLVGEDRLAMEATTNTWAVAGVLRPFVKEVVIGNPLRVRAIAEAKIKTDKVDSRVLAELLRCDYLPKVWQPDQETQRLRRLTQRRAALVSDRTRLKNRLHSILHHTLVPLPEGDLFSKKGLAWLRQVPLAQEEALARDSDLRLLEQTELEIAELDERLVREAWQDEKVRLVMSIPGIDYTVAQTCLAAIGDVSRFANAKKLAAYLGLNPSTRQSGEHCYHGKITKQGNAHARWLLVQAAQHLGQYRGPRGQAMRKVSKRKNRSVAVVACARKLAVLLWHVLTSGEPFRYAPARSLETKYSRLRVRATGQRRRGGVAKGTTRSAQYGHGRTRVVPSLPQVLAQNGLPAVAPLSKGERVMLERKRLDEFYRELQTPSRIQTNTRTTQVEEREENVKSELTQS

SEQ ID NO: 353703 - protein, 388 aa, unidentified
MIYVGIDIAKTNHYASIVNYSTGEVLESPFLVTNNKQGFDLLYSKIKDFNKEKVLIGLESTAHYGNNLIFYFHEKQFKLGIINPIQTATLRKTRIRKVKNDKVDSTLICEALSLGYYNLLSDYDIKLLEIKSLCRFHKDLKDKASEAKIQLKTYVDQLFPELNSFFKDNLDIKTAHELLKLYQSPEDISKVNLTKLSNLLIKSSRGKYDKSRAIELKTLASNSVGINNYALSIQIKMTIELIELLESQIKDIEKQVSNFIKKSDNVITSIPGIGDMTAAIIISEIGDINRFNNPSQVLAFAGLDPSVKQSGNFNASSTRMSKRGSSILRYALILAANNVQLNTKTFNDYYNSKRLQGKLHYNALGHCAGKLVRNIFYMLKHNVKFNLD

SEQ ID NO: 353704 - protein, 343 aa, unidentified
MQAVTTIGFDIAKSVFQVHGVDMQGRVIIRRQLKRRQVLTFFRKLPPCLVGIEACASSHYWSRELQKLGHTVRLMPPAYVKPYVKRQKNDATDAEAICEAVTRPNMRFVATKTPEQQSCLMLHRTRHLFVRQQTAVINAIRAHLAEFGIVAPVGRHGVEELLKIVADASDQRVPEIARACVAALGAQLRVLKMQILEFDRRIMAWHRSNAVSKRLDAIPGVGPALATALVASVADPKAFRSGRDFSAWVGLVPRQHSSGGKDKLGGISKQGDRYLRSLFTAGALAVIRYAKIHGTRHRPWLTALLARRPTKVVAIALANKIARMAWAMMAKGEQYKEPVALAA

SEQ ID NO: 353705 - protein, 415 aa, unidentified
MVPRVSSHRYLSQEVIMPYQTLYVGIDVSKYKHDIAIVNEQKQPVAKPFIITDDLEGYQDLIQQLDELLRRYDTHRFYIGLESTGDYWKNIYYYLKQQPQPVVVTVINPVQTRAYAKSELRRASTDAVNARDIARFMAEKRPAASFDRAPIFDNIKDIDRQIVQLKKQQTMTVNKLRIELTKVAPEIEKNVSHIQGKQILALLAEFPTAELIANSSADQLAEIRYGKNNWALSAAFIEKMRALCQKSVAYKTGLGAGYAVQSLLRCIGQFQREIQWLKSQLITLYQSVTDHESLLVTIPAISRETAILLEAYIGDVHRFANAKKLVAYFGLNPTVNTSGTMKRASYLQKKGNALVRQKLFMAVLTMIRQKIDPIYSYYQRLVDAGKPKLVAIGAAMRKLLVIIYYMLSKNEPFKT

SEQ ID NO: 353706 - protein, 397 aa, unidentified
MEVIPVIIVAVDVAKDKHDCFITNTDGEVLFDPFVIRNNQDGFDALYQKICSVTDSLQNVKVGLEATGHYHLNLLGYLLDKGLSTCLINPLQTSLFRKSLSFRKTKTDPVDARAIARLLMSDRTLQPYSLTSYQNEELKSLTRYRADKVRERARLKSSLARLVVILFPELEKLVSILHMATVYDLLREFPGASYVASAHLTRLCHLISDSSKGHYGKEKALEIREAARHSIGSVFPAKSLELRHTIDHIRFLDDEIDEIEAQIFALLDKDPPKMLDIPGIGPRMAAVIVAEVGDFMRFSSPDKLLAYAGLSPSTYQSGQLTSTYAKMEKRGSRYLRYALFNATKYVCIWDPVFKDYLAKKLAEGKHYNVAISHAAKKLVRLIYHLETTGETYCSKAA

SEQ ID NO: 353707 - protein, 406 aa, unidentified
MIFVGVDWAEAHHDVYVEDGDGKRLGGGRLPEGVEGIARFHELVGDHVDEPGEVVIGIETDRGLFVTALVAAGYQVFAVNPMSTSRYRDRHSTSGAKSDPGDAKVLADMVRTDRHNHRPVAADSETVQVVKVLARAHQTMVWSRQRQTNLLRSTLREFYPAALVAFDDLASGDALEVLRLAPTPELGRTLSLQKIAAALRRGGRQRHIEGRAAEIHGALRAEQLAAPAAVSSAMGASVAASVAVIATMVTQIAGLAEELEAGFEQHPDAEVVRSLPGLGTILGARVLGEFGDEPNRYHTPKCRKNYAGTSPITRASGTKRVVLARYARNHRLADAIYMWAFAALSASPGARALYDTRRAAGDTHHAALRALGNRLVGILHGCLESHTAYDETIAWGHRTAPLADVA

SEQ ID NO: 353708 - protein, 399 aa, unidentified
MNYFGIDISKRTSVIAHYQDDIFQKEFTIQNNKNGYNQLLNYLNEMDQFQFVFEATGIYSRGMVKFCRVNQIDFIEMNPLEARFKTSSLRAWKTDESDAHKLALLAPYLKASTSLDSNPDIFFELRERARFHVEIENDQNRLKIMIIELLHQTFPGLEKLFKNRYSKIALNIIEEYAHPDLVSQKDIESLTSSIMEYTNKNLSYQKAENYAERLNKIAQESYPNVKHSSFLVKKVRLLIQQLKSSIQQLSQLDKEMIELAQQLECFEVMHSIPGIGKLTVAMIIGELGDLTKFKTNKQLNAYVGIDIKRYQSGKTQYRDTINRRGNKKARRLLFLVVMNIIRGQRNYNNHIVDYYYKLRKQPNEKSHKTAVVACINRLLKTLHYLVNESKLYDYQMSPH

SEQ ID NO: 353709 - protein, 418 aa, unidentified
MNVKTRRTKKQVNVENQAINLLSKEELNKKIEVVEKELRSYTWRELETNDKFAKNDKLSFITDDMLIVGCDIGSENHYIRAIDVRGRELSRGAFEFSNTSEGFENAKAWVLALAAKHDKKQIVLGLEPTGHYWFALAAWMISNGISVVQVNPYAVKQSKEIEDNSQLKDDRKDPKLIANLVKDGNYGMPYLPEKVYADMRRLSMFRDQLTEDRIRNINRLHRELKIYFPEYMDAFGKIDGAFTLEVLKVSAIPSDITALGAEGIKNIWHNEKLRGRGYSRANEIVSYAEKSVGLTDGIDAGREAVKWYAEQILKLVACSSGKHKGQTKISHRGRKRLRYWLFQAAKSAVSHADEFKQLHEYYTTRTNNPLKKMQSLVVIACKILRVIYTILKTGTTYDPQKLLEDIKRPTTSQTPMAA

SEQ ID NO: 353710 - protein, 512 aa, unidentified
MVSSAFNRNPLKSVAPDAVTRSLVKPVYPFWNTDLSRLEEYPLFSPLGHHHHPNTERTLEMAKRKKRKLKKGVENLHVVHPNSAGIDIGAYEIYVAVPGDRSEEPVRRFDTFTEDLHDAAKWLRDCGIESIAMESTGVYWIPVFQILDAYGFDIVLVNARHVKNVPGRKTDVQDCQWLQYLHTVGLLKGSFRPDQEVCSIRSLLRHRDNLVKATSSHIQLMQKSLTQMNLQIHNVISDITGVTGMRIIDAILDGQRDPEQLADLKDRRIKADKETIAKSLTGDYRREHLFTLNQTVQSYRHCCQLIKECDAEIEKHLIEFDSRIDIDESPLAPSTKSKRKSKGNAPDFDVRMHMYRILGTDLTRIDGVSDLTTHVVFTEVGPDLSKFKTANNFCSWLGLCPNNKISGGKILSSHTRPGSNRVAQALRLSANSLWNSKSYLGDFFRRMRARHGAPKAITATAHKLARIIYHLIKNQKAFDQTVFAEQEKVHQRRLKRRLINQAKSLGLQIVPA

SEQ ID NO: 353711 - protein, 360 aa, unidentified
MAMILAIDMGKNKSVCCRYDPQSGKERYKTVPTCPQSFHDLLVEHPDDTVVIEISPLAGWVADLCQTLKINLKVVNTASEQWSWKKIKNKSDRKDARKLAVMEAMNQHRYVHMPSSPGRQWRELIAYRDDQVSRVTACKNRIRGLLDRQGQRWAAGSAGWTEAAIGQLKTQAKPLSECDSDNLWRGMLHEEIESLQQAQAHLAQVTAKLDQIAQQSERVRRLKTAPGVGNRTAEIVIAMLDDSSRFHNVRQVGAYAGLTPRQCQSGQMDRQLGISHASSKLLRKMLVQSAWAGQQTNPWMKQTFERVCGGKADRKKKSIVAVARKLFVRLWAMDRDKKDWNGPEAVTPAWRALQKSKALC

SEQ ID NO: 353712 - protein, 408 aa, unidentified
MNAVGIDVSKGKSMVAALRPMGEVALLPQEFLYTEVELEQMAYAIIALGEDTRVIMEATGRCHEPVAAALHEYGIYVCVLNPLFIKQSGGGSIRKVKTDKADAMKIAKYGLDNWVDLREYTPMDTVRQQLKLCSRQYNLYMKTVVSLQNNLISLTDKTFPGVNELFSSPERADGHQKWVDFVMTFWHCDCICHVSEKAFTERYQKWCKRKGYHFSAEKALDVYAGSCGHFTTLPKNDNTKLLITTAAQQLLAGEMTLAALRAEMTRLAKQLPEYDTVRAMYGVGETTAAQLMAEIGDVRRFPRRSSIVGFAGVDPAVNQSGKHEAKSTPTTKRGSPHLRKTLYQIVCTYLKRSPVDEPVYQFLDKKRSEGKPYFVYMTAAQNKFLRIYYAHVKECLEAFDARQSLAQS

SEQ ID NO: 353713 - protein, 331 aa, unidentified
MTIHVGLDVGSRTTAMAWRQKGSPAGTWVIDQTPKGRKIALKKLLALKPLSVVMEATGIYYLDLAIELSSAGLPVSVINPKSARNFARLMLQHNKTDAIDAQLLAEYGERMTPRLWLPPSPVQLELRAIGRHINRLTSHRTRAKNELHALQVTETTSPMLIEDEEEAIAMFDKRIERFRKAGRDLIRNCTSLDASFTHMLAAPGMGDVSTLAVLAELTTLPDTLKSSQVSRHAGLDVRLTQSGTSIDKPGRLSKCGNAYLRSALFMPALSAIRCDRYVKAFYETLVGRGKRKMQAICAVMRKYLTGLWACMKSGEDFNTAKLFSEKHLLKA

SEQ ID NO: 353714 - protein, 347 aa, unidentified
MKFYTKFHQYYCGIDLHARLLYVCILDERGNKVLHQKIKADPHQLFKLLKPYIGNVVVGVECMHCWYWVSDFCRKINVDFILGHALYMKAIHGGKAKNDKIDSYKIASLMRGGNFPLAYNYPAETRATRDLLRRRTHIMRHGGELKAHVVNTDSQYNLPAQSLNLKNVSAREDLRHHYDDPIVQRMIELDMNILDCYIRELKHVESFIENKAKQHYGALLSIVRTFPGIGQILGLTILYEIGDIERFASVQKFASYARLVKCKAESAGKTYGTSGNKIGNGYLKWAFSEAAVLYLRNNEKAKHYLTTLQKRMSKAKALSALAHKIGRCVYFMIRNKQVFDEKKFLKG

SEQ ID NO: 353715 - protein, 342 aa, unidentified
MRYLGEFPATEAGTHKLVAKLAAKYNKLTFCYEAGPTGYGLYRRIKSLDHECVVVAPSLTPKKPGERVKTNRRDAVSLARLLRAGELTAVWVPDERHEAMRDLSRARQAAKKDLQGKRQQISSLMLRLGRCYPGKKTWGPAHMTWLRSQKLQQREQRVALEELLEGVRQEGERVERLEQAIREAVPEWSLAELVTAVQAMRGFDLIAAAGVVAETGDLSRFQKPREFMGYLGLVPSESSTGDRVNRGGITKAGNGRARRLLVEAAWAYRHPARVGRVKQAKVAAAPRRVREIAWKAQTRLCRRFRLLERKGKRRPVVATAIARELAAFIWAINREVMQGRQA

SEQ ID NO: 353716 - protein, 318 aa, unidentified
MQEREKKMENYVGIDISKRYFDLYSLPQGKQYHFENSTEGIRRCLEVLTESRPILIVMESTGGYEVALATELHLAGLTAAVVNPRQIRNFARAVGQMAKTDNIDAKIIARFAATVRPPARAVIEGKTRQLKDLVARRDQLVDMHVAESNRLEHAVDKDIARSIREVLKAIERQRSRVEQQIAGHIEQDQQLKRKADIVDSAPGIGTTTASMLVTHLPELGTLNRREIAALVGVAPMNRDSGTFRGKRMTGGGRVSVRCGLFMPTLVAIQHNPVIREFYHRLLLLGKDKMTAVVAAMRKLLTILNTMVAKNEFWKPNLA

SEQ ID NO: 353717 - protein, 463 aa, unidentified
MSTKQSGQQDAKASGSGNSTTMPVVHPQAAGIDVGSRSHYLAVGQKPEDVYEVGVTTAGHQEAVSILRQHHISTIAMESTGTYWQPLFNALQEAGFEVLLVNGRQTKNVRGKTDIKDCQWIQKLHSLGLLTGSFLPEPAALALRTINRHRSSLTEVVASYTLKVQKCLRLMNIRLDVAIRDVAGKTGRAIVEAILGGERDAEALAQLADPRVKKSQAQLAELLHGQWDESLLYELRDCWELMEVHNRRIENCDKKIAVLLSAYLPTEPQGSEPHQMPALAKKQAKGKHSAQGISLQQHCHRILGTDIYAVPGIGPGVALQFMSEMGTGIHKFSSAKQFAAWLRLAPNNRISGGKILSSRTDKTRNALTKALRDAANALGRSKSDDYLVYFFRRIAYKSGRGAAITATARKLAVILWNMVVHKLPYQRSDPAQYLDVIKARKLQHLKKDIKKHAITIEELSALI

SEQ ID NO: 353718 - protein, 386 aa, unidentified
MKKIIICGADVHDNSITARIAVNKEEPETRVFSYTRQGRRNMFDYLKFISGKHGAERIALGYEASSLGFGLCDEAWDAGIECYVLAPTKMPQSEEQRKRKTDKRDAQKILEQVRGHVLAGNDLAKVWIPDFQTRDDREVVRMRLEVADKLTEARTQVRTLLKRNKVEKPKGVGNAWTVSDCQWLRGLAEGGKELASGARIAMASLLRQIAALEAEIKKLDEAIEILAATDRYRAAAAVLIKELTGVAVLTAMVFLTELGDLRRFQNRKKVGAFLGVVPSSNESGENNDCKRHITRQGPARVRKVLCQATWARIAFNKEEKKVHARIVEKNPKKKKIATVACMRRLGIRMWRKALEAQLKAGVYQTKELPQAGPQGFLAKKGELPCP

SEQ ID NO: 353719 - protein, 506 aa, unidentified
MHQRTLGVDLGVKSPNVAVVWEEQEQRLVEVVKFELLLTEFERLEGAAMAGAAEGTKLHVVMEKTYPAYQYVSKFFLDRGHHVSYAKPDQVKEGRKFLWRRVKTDERDALVMARLPYLDPRQLNRAHVANVLVRELKTLVSQRLSLVKQSTSLKNLLERSIGAVWPGVTELLDLDSNYGRALVRELVPQSAVELGEAGLLTFIREKGRVKRTHAQRLAPKLVSVAKRAVELQSIFEDDNWIELEKTHAIEVLEQIEALERTLASKEQQIEQAYLKADPNQTFKTVPGVGDRTAPSFFSNFGEPQRFPTTRKAQGFVGFYPATDSSGQKDRKATALSKEGPGPLRRDLYLATDHFRRQDPQGARMYYDQMVNKGKHHISALCIVVNRAFIPRLMAVARERRAYELRDLEGNPITKEQARELVAQFRVPEEVRVRLRNLKKVAQKKNRGSVSSPVTSEHEAPRSETAPRQDDSTNDQLTMTKTELVMLVEHLLKSGGNLEESTLGSFK

SEQ ID NO: 353720 - protein, 371 aa, unidentified
MNFIGIDLHTNRFTCCYRDERPSSKDSKKEQVTKTYDLNKRGLAQFYQTLTEDTYTLVEATITTFSFVRLFKDMVRQAIIANTYELKQISQARCKTDKLDADKLCRILKAQIMSGEQLVSPVDLPPKELQDLRSLFSTYRLYKKQNTQLKNRIHSLLKEQLLGFTQEEIFGKKDREYIRTVLPGTPMNCQVNQLLNRLERDEADTVEIEEQVLVYAEPYMKQIEILTSMKGVSVFIAIAIIADIIDVSRFKNSKAFTSYLRSAPKVSSSNTSLSIRGTNKKGRKLAATLLTQSLNHILKSSSKLRRWYERLCEYKKPGLVRTGLRRRVLAEIYQMLKKEEYHYGRDEKNHVSKMNQYKILLKKRKILLKTA

SEQ ID NO: 353721 - protein, 371 aa, unidentified
MDHIRFIGLDVHKERISIAVAEGGRAGAVEFLGEIDNDPGAIRKMCERLGRPGKPLAFCYEAGPCGYGVHRQLTGLGHGCEVVAPSLIPIKPGHRVKTDRRDATLLARLHRAGELTPVWVPDADHEAMRDLVRLRSVVRQVVTRARQHLQGFLLRHGRKHGRGTAWRLAYRRWLSTLAFDHPAQQVAFQDYVDAVTDAERRLLRVETQISRLLPEWNLHAVVDALQAMRGIALINAVVLVAEVGDFTRFSNPRQLMAYFGLVPGEQSSGETVRRGGITKTGNSHARRALVEGAWAYRMKPRVGRHKVDRIEALPKAVRDIGWEAQVRLCARYRRLTARGKTANVVNVAIAREMVGFIWAIARTIQSVPKEA

SEQ ID NO: 353722 - protein, 355 aa, unidentified
MTASYDYHIGVDYHKSYSHLVVQDSSGKTLRSGRVKNDRQSLGGFLEPYRENSHAVVEATRNWMVMYDWLDDICDDVVLAHPLKVKAIADAKIKTDKIDATVLAHLLRADLVPEAWAPSDKARELRIALRERMFYVRLRTMTKNRIVTVFDRYPEQAALLKKLADLFGSAGRVQLAELKVSPIDRIQIDRGLAFIGDINERIKQSEATIRAMTKANADVKLLKTIPGIGEFFARLIDAEVDDIGRFRTPKKLAAYAGLVPSTYSSGGKTYHGKIIKQGNKWLRWAFVEAVAPAIATDPQLRAQYEHLKNRGTNKTRVAIARKLLTIAFHILRDQRAYQRRGTSTMEGASTISRSS

SEQ ID NO: 353723 - protein, 482 aa, unidentified
MAKRKKSTFERLGRSINRKQRRELARRLVSNDPGLSIIHPNAGGVDVGNQSHFAAVPPDRDPQPVQEFGCWTADLVRMARWLQACRVDTVALQATSVYWIPLFDILTEHGIRVVLVNAQFTKNVPGRKTDVQESQWLMKLHTYGLLRDSFRLAPNLEAVRTVWRLRDRQVKESGRAVQHMQKALTKMNLQLANVISDLSGVSGQAILAAILKGERDPYRLADLRHERVQASREEVARSLEGNWRQDVLFELQQAVEDYHFAQQQMRACDSQLEKYLATLATRLPHDIVPPEILPATPAKKIRKTKPKGNTPALDLKAELTRIGGVDLTSIDGIDVMTAMTIYSEVGPDLSAFPSEQQFASWLGLTPSHDISGGRIVGPGRRKVQNRVAAALRLSATTLLHSHSYLGARYRQLRRQLPSKPAAVKAMAHYLALLVYRLLTKGAAWVDRGAAQFEQKRSQHELANLRSKALEKGFHLTPINPSR

SEQ ID NO: 353724 - protein, 413 aa, unidentified
MQDLLEICCGLDVHKENIVACLLTGATDVKPTSEIRTFSTMAHGLQELKEWLFECNCYHVAMESSGIYWIPVYETLESESHPMHLLVVNARHMKNVPGKKTDMRDSEWIATLLRAGLLRSSFIPEKRIRELRHLTRYRKSIVRDVTTQKNRIEKFLQSIGFRLSVFLSDTFGASGRNIMRHLIAQGSINLEELDLCLKGQTRRKIKNILVSVNGTMSEHQQHFLAISLDHLEVLEAHLNQIEQAIEKETEKFESAMAILTSIPGIQKIAASSLLAEIGTNMSCFPTAEHLSSWAGMSPGNNESAGKRKSAGVNHGNPYVKSMLCEIAWVVAGKRDSYLSKWYWKLKQRKGAKKAIIALGRKLLVMIYAMLKKGTSYDEGYFEQRRKQLENKRVSRMVSELHRLGYQLSSPATL

SEQ ID NO: 353725 - protein, 387 aa, unidentified
MTEQFASASTAAAFDHDSTLVVALELSGKSWDMGAVLPGVVRRPRRGLAPRDLAGLLTQLERWKAEAQRAGRTIRRTVLAYEAGRDGFWIARSLLKQGIEVQIMHPASIPVERRGRRAKTDRIDLDMLLRTLLAWLRGEPRVCSMVQIPSVEEEDMRRPERERERLVSERIALENRIENLLYLHGVTGFKPRMKKAVERLDDLRDHAGAPLPPRKMEELRRLMARHRVMSDQLKEIEAAREQVVTAAEPDSAAQQIQMLAALVGLGLTTATGLVREVFCRSFADRKAIASFVGLTGTPFNSGGSEREQGISKNGNPRIRRLLVQAAWRWLRFQPDSALSCWFAERTGGAKGRIRKIMAVALARKLLVALWRYVETGEVPAGARFAAA

SEQ ID NO: 353726 - protein, 408 aa, unidentified
MVVFVGDDWAEAHHDVHLMNGDGGKLAARRLPEGLDGIRAFHELVAGHVDDPTEVVVGIETDRGMWVAALVAAGYQVYAINPMAASRYRDRHHVGGAKSDASDAKMLADVVRTDRHNHRQIAGDSAEVAAIQVVARGHQNLIWTRVRQTNMLRSALREYYPAALATFGDLADRDCLAVLAKAPTPDAGARLTVGQIIAALKRGGRQRNLEHRAGEIRTELRSEQLAAPDVVAEAFAATTVAAVAIIAEINRQIDRLETVMTTNFEQHPDADIYLSVPGFGVVLGARALGEFGDDPNRYANSKSRRNYAGTSPRTVASGKKNVVVARHVRNDRLYDAVDRAAFCSLTQSPGCRTFYDQHRGAGDGHHQALRALANRLVGILHGCLDHQTLYDEDIAWAHRQPNQTAHAA

SEQ ID NO: 353727 - protein, 336 aa, unidentified
MKYIGLDVHSDHINCAVIDEQGNLIYHDCFNTSLKNLINLSEKLKHPLSLVYEEGELADWLYQGLRSSFEEIVVADPIENRLIYGGDQKSDPIDPLKLATLLRGGFINPVHHTWDHHRSQFKQLVFAYHDMAKQVTRTKNKIKAYYRKQGIIIKTDSVYHPDKRTLFIKESHHPEIIEKYYQFLDLFQQEKNRFERTLKKESRHYPIIRRFLKIPGVGIVTATTFFTIIDDPHRFARKQQLWSYAHLGKSVHQSGNYEVTRRQRKGNRLLKYVIKIAAGDAVRQKTNEFTRAYIRMVNIQQKEPKLAYRIIARKLATIMWTMWKKNQSYLEEMSST

SEQ ID NO: 353728 - protein, 343 aa, unidentified
MKHIGLDIDSTSTHISVFSDRGRETKRTCIPTREADLVAFMLSIPGPKRVALEESQMADFVTRIIAPHVTRVIRCLPQHNRLISESENKCDPEDARNIAELLYMNKLKEVHHAPWNYRRLREGVRAFWTASRELARAKVRLKAFYLFNGVHCVGERVYSQRHRKNYQEQIREQSGNQHLLEQLYLRLDFCRATKAAHVKILRQLAQPFQEDVGCLQSCPGIGFIGACTLAAYLQNGWRIKNKRKLWQYGGVGLRRHESAGVGRRGATRKGNRYVKNVLLTAAAAIASRKTANNALTRWWHAGVLAGIPVDRMKRNLARKVAVIAHRSLRFKEVYNDDRVMTTP

SEQ ID NO: 353729 - protein, 339 aa, unidentified
MTHTIVGVDIAKSVMQIHWVDPETGEVVNKPLKRAAFLEYFANRSPCLVGMESCGGSQHWARRLIEMGHEVKLMPAKFVKAFNIRNKNDAADARAIWMATQMDSKAVAVKTEAQQAVLALHRMRQQLVKFRTMQINNLRGLLTEYGEVMAVGRAALDKSIAGILERLSGRLPAILIDTLRDQWKGLDNLDQQIGQIERRLQEWMRDNQAAKAIAAIPGVGLLTATAAVATMGHANAFKSGREFAAWLGLVPGQTGSGGKIELQGISKRGDTYLRTLLVHGARSIIYRVKEPGPWVDQLKQRRPMNVVIVAMANKLARIIWAILAHQRPYRKDYESVRPG

SEQ ID NO: 353730 - protein, 338 aa, unidentified
MIGVDLAKSIFQVHGALLSGKEQFRKKLTRPQFWKFMSGHSPAVVVMEACGSAHFWAREMIKLGHEVKLIAPQYVKPFVKRQKNDAADAEAIVIAAQRPEMRFVEPKTEGQQARAVLFRGRERLVRQRTELVNALRAVLYEFGHTAPIGIRQLKRIEAIVEEPNSDLPTLVREECHDLIQQIAEKTVRIDAKTKRTVKLAAQTDTARRLQTMPGVGPLTALAIEAFAPEMESFRCGRDFAAWLGLVPRQHSSGGKERLGRVSKAGQADIRRLLIIGAMSRLNWMGRQSIHEGSWLARLSARKPKMLVAIALANKMARAIWAMLTKREDYRDPMSAVAA

SEQ ID NO: 353731 - protein, 405 aa, unidentified
MAPAVTEIDVFVGIDMAKQDHYAQAISRDGTELFKRPVLNDQATIEQLLSDAAVHGRIVVVVDQPASGAQLLLSLAAQHQVPVAYVTGLQMRRAADLYAGSAKTDPIDAFVLADFARRNADRLTWLSVTDDLLVELRILNGRDVDLAADATRTINRCRDALTAISPALERVVGSRLGQAGVRDVLAKWATPTALRSAGQARIRARMAKRSPRIAAKVTEEVWAALDAQTITLPGEAAWGRIIADLCSDLDRVISQRDQLAVEIEEVFMAHPLGKVLVTLCGFGPRTGARTLAEIGDPQRFADGGRLAAYAGLAPVDRRSGRSINSSSQSRSGNHRLKNAMFLAAFVAAQHDAAAKAYYQRKRAEGKKHNAAVICLARKRCDINLAMLKTASPYDLSRHTALPEAA

SEQ ID NO: 353732 - protein, 342 aa, unidentified
MSEDYDGRQYVGMDLHRRRSVLVRMTEAGERLETVRIVNDREQLAAVMARAGEDPEVVLEATYGWYWAVDALAELGGCVHLAHPLGVKGFSYRRVKNDERDAADLADLLRMKRLPEAWIAPPATRELRELVRHRAKLVHLRTSLRCQVHAVLANHGVCVPVSDLFGVQGSMLLERAALSAAGRARVDSLLRLIDTFDTQIDQVAKTTARQLANHSGYTAVQTLPGVGPILAAVFVTEIGDITRFPAPAKLASWAGLTPRHYESDTTVHRGRISKQGSRLVRWAAVEAVQRVGKHTYIGGYRDRITARRGRNIGNVAAARELIEYVYYALRDGTCRRALTTTA

SEQ ID NO: 353733 - protein, 353 aa, unidentified
MIVTHYTGFDVHKKSVSYCVKTAAGEVVEEARLAADHETLRRWAGAQRKPWHGAMEATIFSAWIYDTLKPHAEQLYMAHPARMKAICSGKKKSDRIDARTIADLLRCNLLPACYVLPPPMRDLRRLLRYRNLVVRESVRMQNKMAGLLMETGTPFEKEKLHGKKYFTNLLKTLQEVPESVKDLLRMSRGALEMFQATQKQLVKRLVGDSLLVQRVERLTTVQGVGEITALTWALEIGDPQRFSSNGDAMSYCGLTAALRSSAGKEQRGPISKQRNAWLQTALIEAAKLAPRWNPQLAAVQARELDRGHHNRATLAVARKLVAYLLAVDKSGLPFQARPLPPAGEALGTAAASG

SEQ ID NO: 353734 - protein, 337 aa, unidentified
MYYIGLDIHKKTISFCVKDAAGCVHREGKIGSSRRELDAWLRTLPQPRMMAMEATIFTGWIYDYLLPHAEKVKVAHPLMLRAIAAAKKKNDKIDAAKIADCLRCDFLPECHIAPTEIRDRRRVLRYRNLVVKQMVQMKNRVSGLLMETGVSYNKRQLHKVGYFGEMMSTNAEISDAVRPLLNLSRGMIRRSSKLEYDLVSSLERDPLLRERLRRLRTVPGVGSITALTWALEIGDYTRFRSNRQAISYCGLCADEKSSADKVMRMPLSKQRNKHIQRVLVEAAKLAPRESPELAMIRARELERGNPNRATLAVARKMVCYMLAVERRQQDFVQTAAA

SEQ ID NO: 353735 - protein, 377 aa, unidentified
MHSENIAAYIGLDVHKETLAVAIAAPERLGEVRYYGTINNEAQAVRRLFQKLQGLYGNILSCYEAGPCGFGLYHQLTAMNIKCQVIAPSRIPKSPTDRIKNDHRDAISLARLLRAGELTPVWIPDLTHEAMRDLIRARAAAKRDSRVARQRILSMLLRTDKRYAGKHWTGKHRTWLANQSFSQPSQQIAFQHYCQSLEQIEDRILQLDQEISRLLPEWSLCNLVCQLQALKGVGQLIAITLVAEPGDFSRFSNPKQLMAFLGLVPGEYSSGNSIRPRGITKVGNSELRRLLYEAAWSYRTPAKVGAWLIYYRPDSVTQYSKDIAWKAQQRLCSRYRSLTAKGKKSQVAITAVARELTGFMWDIALAAQSSFSQQKQN

SEQ ID NO: 353736 - protein, 422 aa, unidentified
MDRDASTVDYAVFVGLDWGSEKHSIALQPAGSKEIERYELKQNPEDLHGWLSRLRDKFNGRFVAVAIEQTKGAVIHALMSYDFVHVFRINPKSMADYRKAFSPGGAKNDPADAEYLLEWLTLHRDRIKPWLPDDPQTRALQRLVEFRREVVNQRVALTNRLTQILRDYFPQALDWAGEIDSVMACDFLSKWPTLEKVKKAKPDTIRTFYRQHGSRSKEVIEERLKAICMAQALTQDTTVIGTSVSVVQTIIRVLRPTMENIDRLDKEIHTRFETHPDVAIFDSFPGAGAVLAPRLLAAMGSDRSRFGSASEVQQYSGIAPVTDRSGEHMWIHRRFACPKFIRQTFHEFAGQSIKWSGWARGYYDMQRSKGKGHHAAVRALAYKWIRIIHRCWKDRVTYNEEVHLNSLRNKGSEILNFIDKAA

SEQ ID NO: 353737 - protein, 413 aa, unidentified
MTNESWTLSVGVDCGSRHHEVCVLNQSGQTVATRRIEHSGADLHALTEWLLTLGESQPARILIGIEVPHGPVVETLLERGYVVYAINPKQLERFRDRYSAAGAKDDGRDAWVLASAVQSDRKAFRRVEVGDPQIIQLRELSRLDGELSEELTRTTNRLRDQLQRYFPQLLQLCPAADEPWLWELLARAATPAEARQCDVTALEQLLKRARIRRFTAAELHHVLGTRPLVVAPGTVEAASLHVRVLLPRVQLLHAQRTESAKQLKQALKRLTHDSPGKGREHHDVTILLSLPGVGIRIASTMLAEAAQPLKTRDYHGIRLLSGVAPVTRASGKRRIVTMRYACNERLRTACHHWANVATQHDATARRHYRILRQGGHTHPRALRGVADRLLAVLFGMLKSDTLYDRQRPRRSAA

SEQ ID NO: 353738 - protein, 428 aa, unidentified
MSFKARASLISHFSLKEGFNLNLTLFVGIDVSKESNHVYAMNLARDKLFSTHIPNTQDGASIIESKLLDILNSHGLLKVIVILESTGVYSAHLATYLSNSKHLAIFDSKVYIINPKISKNYRKSFADMDKTDPKDAFILADIARVGRTSELTPFKGAQRLALERLTRHRLHIAELLSTEKVYALNNVFLKFSEFETLFSDNFGKTAVELLLEYKTIDDIIETPLEELASFITKSSKNRFDDSLDMASKIQAAARASYRLDKLAYDPINLSLASSINVINCYEAEIKEIDKAIMRQVVGFNQNHYTVLMSIPGIGKVYAAGILAEIADINQFESDDALAKYAGITWRKTQSGKFDADDTHLTKTGNKYLRYFIIQAANIARQNIPEYRDFYQKKFNEVTTHQHKRALALTSRKLIRLIYGLLSANRLFQ

SEQ ID NO: 353739 - protein, 399 aa, unidentified
MVSCLMGDSTALASAIVRCCPKFKHDCAIIDELCDTVMPSWSFSNDREGFSHFKALLDSLEGEKKIGLESTGHYGQNLKQFLESNGFAFMEFNPLLVSRFVRSKSLRNTKTDSIDALSIAQYVMTVEYKPYPSSFYHLDKLKSLTRFRNSLVRQRSRQLVELTNVLDKLFPEFKPFFKDKFSVTALYILAHYQTPERIANMNARSYEALRKLSRGRFTLSNFTQLKALAKNTVGTQSDYLLDQMNILLELYSQLDSKVDELDAQIKECVRGIDPPCLSIPGVGELSAAMILSEFGDFSKFQNPSKLLAFAGLEPGYFQSGQSEYTGHMVKHGSSRLRYALMNCCLPLISNEPVFAAYYAKKRSEGKPHRVALTHVAKKLLRVIYTLQTKNIRYDPTMIH

SEQ ID NO: 353740 - protein, 411 aa, unidentified
MLRKENYIYVGIDLHKETHTAVILNCWNEKLDEITFDNKPSEFNKLTKKVAKHSKNDLQAVYGLENAYGYGRSLAVWLIEHGCMVKDVNTALSFAQRKSVPMFKKDDSYDAQCVATVLINMLGTLPDAIPDDAYWTLGQLVNRRSNIQTHIIRLKNQLHEQLCVAYPSYKIFFTVIDRQTALYFWETYPSPEYLKGKTAEELAEELRPISHNNCSTKRAEKILTAIKADGDTKREYQDSRDAITRSLVSDLRHYNQQLAEIEQAIEELLLVFECTFMTMPGIDIITASKMLSEIGNINRFPNADKLAKFAGIAPVNFSSAGKGNDKPSKQGNRRLQAIFYFLAIQMIQVSRNGTPRNAVLYEYYQKRLKDGKSKTQALICIARRLVNIVYGMLKNKTEYRMPNDPKVSKAS

SEQ ID NO: 353741 - protein, 356 aa, unidentified
MNYVGIDYHKRYSVVTAVDEKGHVLLTTRLDNSPEPFQAFFSSLDGPSEAVLEATRTWGVLYDLLEEIDGVESVTLAHSLKVRAIAEAKIKTDKIDSHTLAQLLRVDLIPAAYIPGKETRSFKDMIRQRVFLVRMRTRLKNRIHVLLDRRHIPPPPVTDIFGKGGTAYLKKLALPGIDGEILRENLELLEVFDTLIKDAEHEIQRLIGNDPRVKLLRTIPGLGPILAAVVALEIDDVTRFGAAPKLAAYAGLVPSTYASGGKIFHGHLIHMSNKWLRWALVEAAWVAMRNSPYCRAYFESRKRHKGPHVAIIALARRLSEIVWHVLNEKRAYEERPSRVYKRTPSKETSPAALTIT

SEQ ID NO: 353742 - protein, 399 aa, unidentified
MLEQAWAGVDVGKEHHHCVVIDAEGRRLLSRRVANDEAVLLALISDVTGLAGQVRWAVDISTGEAALLLALLAAHDQQVSYLSGHQVNRAAGGYRGSGKTDAKDAAIIADQARMRRDLAPIRVPDEVIVELRMLVARRRDLQSDRVRAVNRLHETLLTISPALEKALDLTNQGPLILLTGYQTPAAIGQLGVTELTEWLRARKVRSAGELATRAVAAANAQQIALPGEALAAHLAAQLAEGVIALDEQIKHTDKLIEGRFHRHHAAPVILSMPGIGFLLGAEFLAATGGDTAAFATPDRLAGYAGLAPAPRDSGRVSGNLYRPKRYNRQLQRVFYTSALISIRCCPESRTFYDRKRAAGKRHNQAVLALARRRVNVLWALLRDHRPYQASRPVSAAAAA

SEQ ID NO: 353743 - protein, 428 aa, unidentified
MSNVSTPYISVGIDIAADDSVVCIMLPSFEIIGKPFKVVHTDLNSLEKLVSAIKKAEDKSQMKSQIFLESTGIFHFPLFCFLKNEGFDVFVLNPLITHSTKNSGIRKVKNDKFDSIKIARIGLDPKTKKSVISDEFVLDLRIQCRQYYAISDDRTVLINRLSNHVKLAFPAFVGIFSELSGNASLTVLKYTNSLDALLESDPDFLIDLIAKASRKGRVYATKKYNAIIEAVYVSKKLTFNLPNVFSVIHDLICHIFLIDNQLSAIVKRVHDILNSNDKHPFVEQIKLIDSIPGAGFFSSVALMCEIGDFDAFNNPKQLFAYFGLDPSVNESGKFKGTRNHMSKRGSRLARRIIYAIALASVRNKPNGQSFNSILQSFYQDKVKSKPKKVALGAVMHKICKIVFAVLRDSSPFIPISPEEHIRLHFQPA

SEQ ID NO: 353744 - protein, 340 aa, unidentified
MSLYGGIDLHANNSVVVLLNAQDQVIYQKRLPNDLPTILEALAPHPGEIEGVVVESTYNWYWLVDGLMEAGYRVHLANPAAMQQYSGLKYSDDHSDARWLAHLLRLGVLPKGYIYPKAERAVRDLLRKRAHLVRQHTSNVLSVQNIMVRNTGVRFRVKRLRELTKQELEGLLPEVEQVLAVTSSLAVLDCLSQQIKTLEQTVHKRLKHTPAYEQLLTVDGIGTILAQTITLESGDMGRFPTVGNYASYCRCVNSTKISNGKRKGQGNVKNGNPYLGWAYMEAAQFALRFNARAQRFYQRKLAKSNNNTILARKAVAHKLARACYYIMRDLVSFDAMKAFG

SEQ ID NO: 353745 - protein, 322 aa, unidentified
MNKYNETFGVDISKDVFDVHGSTVGHDQYKNDESGFRKFLKELPDNSLVVMEATGYYHYRLAQFLYKNGVTVSVVNPLSVKRFIQMKLAKVKTDKSDAKAICDYALINEVPLYNALTDTQSECLQLFRLLDTYLKQRTATKNKIHGEAVLGIPSKFVYRSLVRNKKQLNKEVAAIESKILSLVKEDQQEQLTLLTSIPGIGQKTALFLIVVTDGFSKFETASQLCSYVGITPTIRESGSSVRGRARISKVGNRKLRNLLFLCSFNACKHNKACKEVYERIVNKGKSKKLALIAVSNKLLKQSFAIAKSGRPYDETYVSILPR

SEQ ID NO: 353746 - protein, 271 aa, unidentified
MTHASRFIGIDISKSSFDICILPDRQVASFANTAEGICTFIALMADLVGIERLVVEPTGGYERGVVDALLAARLPVAKVNAQQVRQFARACGQLSKTDRIDAFVLANYGRRMESKVLAPSSPGQTMLVDLASRYRQLTHMIAQEKNRGEKLAHDADGRTRAWIEETLRFLIEQRQAAVEAMMACLKADTVLKSKADGLMSLKGIGLRTACFLIAGLPELGHIDKGQVAKLVGVAPINRDSGLMRGKRMIAGGRSGTPSMSRPCRQSVSTQT

SEQ ID NO: 353747 - protein, 310 aa, unidentified
MDMISVGIDVSKRRLDIAVRPSGEVFSLDRNPAGLEQLTERLKSLSPQIVALEATGGFETVVAAALAAAELPVAVVNPGQIRAFAKALGQRAKSDPIDAMVIAHFAEATRLKPRPLPDEATRLLADLVTRRRQILEMLGAERQREERVRVPHLRKSIVRLIKALEKELFSLDTDINDAVRNSPAWRDKENLLASVPGVGRVIACTLIAELPELGQLGRKQIAALVGLAPFTRQSGQWRGKSFIGGGRSAVRRVLFMGAMVAKLHNPVLKAFFDRLVAAGKPKMVALIAVARKLLTILNAILRDNRPWQTA

SEQ ID NO: 353748 - protein, 365 aa, unidentified
MSSVASPAGLVHLGMDTSKKTIVIATLWPGEEIPVTERIANEEAAVRRFFGRLGDPSVLRSCYEAGPGGYDLYRLLTSMGVACDVVAPSLIPKGGSDKVKTDKRDACRQARLHRAGELTPVRVPTQAEEAVRDLVRVRAALVDDRKRAQQRLTAVLMRHGSVWTGSYWTAAHRAWIDAQRFGEPALAAAIAHYRGTLATREAELAAIEAELAPWARRDPLAGPVARLGCYRGIAELGGLTLTAEIVDWRRFPAARAFMSYTGLVPSEYSSGERTRRGSITKAGSEPVRTTLIEAAWAYQHAPAIGATLRRRQAGADPGTLARSWKAQRRLNGRYRHLTSHGKARGEAITAVARELAGFVWAEMTA

SEQ ID NO: 353749 - protein, 421 aa, unidentified
MLILYQRCAAIDIGKDVIAVAVRLPGDGAEHRQTIKQTFKTFYGVLKHAARWLTEQQVTHVAMEATGIYSMPVYHALIEHGQFEKVLVCNAGHVRNVPGRKTDLSDAEWLVHLLECGLLRGSFIPPAQIKAARDVIRYRTKLTESRTGELQRLGNVLQDAGIKVDSVASTITTQSVRAMVEALIDGERRPLLLAELAKGKMRAKIPDLQRALEGRFDDHHALMCRLHLDHLDHLDEMIARLDTQIEDMMQPFRSQRELLTSIPGIGPFAAAAVISEAGADIAETFPSAGQFASWIGVCPGNHESAGKRHSGKPRKGNQHLQHVLVECAWAASRTPGYLQSLYRWHVRKCGGSRNPTAKNKAILAVAHKLSIIIWHVLATGKPYTDLGADYLDRRVDPAKETRRLIARLQALGHTVTIEPAA

SEQ ID NO: 353750 - protein, 421 aa, unidentified
MKEWKQITHYAGFDWARDHHSVVVVDSGGQIVADFDFPHSQEGWKDFVQKMAAYPNLAVAIETSQGAAVDQLLQHQFTVYPVNPIASESYRKRKAPSGVKTDHHDGWGLADALRVDGQGWKVLTPRDPLSEKLRLLCKDEIVLIQQRTLLVNQLQQALLEYYPAALEAFADWTADFTWDFIVEFPTPQSLVNAGRRRWQKFLHTHKLWRPETAQKRLEIFARADQFKGSEPVAEAKSQLALSLCKVLRALEQQLNQYSKQIQVAFKAHPDHDLFGSLPGAKKVLAPRLLAAIGSDPDRYGEHNVLQCFAGTAPTRYQSGQVDRVKIRWACDPFLRHTMHLWANSFRKATVWGQTYYEKKREEGMSHACALRCLGQRLLKIVFRMITDKKPYDAELHARNQKKHGSWVLDLVNRTAASPTSE

SEQ ID NO: 353751 - protein, 346 aa, unidentified
MSDGIAGGQVVGIDLHLYRSVIARIDAQGNELGWVRIDNDPRALVAECRKAGRGVPVAIEATYGWYWAVDALRAARFEVHLAHPLGMKALRKRKRVKTDPADAYELANLLRLGSLPEAYISPPELRELRELVRHRRQLVKLSTAVKAGIRALLAKHNIRLSATQLESDTATGLLDALTLPGTYAQRLASQRRLMLVLADEIASVEVELHGRLRGHPGYRNLLTVKGIGPVLAATFVAEIGDVDRFPTAGALCCWAGLTPRHYESDKTVHRGHISKEGDPLVRWAAVEAIQRQCEPAVKAVRDDIVARRGKNARNIAKVAAARRMLEVVYYVLRDGQARCLTSKAAA

SEQ ID NO: 353752 - protein, 355 aa, unidentified
MRTYYVGMDVHSATIVMVVLNGAGKQVMESIIETSAESVRSFFKQPRLRGEVYATFEEGNQAGWLYDVVRPLVSNVVVCDPRHNKLLQAGNKSDRVDARKLAQLLRNGSLHAVYHGNKGVRTLKELVRNYDSLVSDATRVMNRLKAIYRGRAIACRGSEVYRGDRRQKWLNKLNEPGARQRASSLYAQLEELNRLRQEAKKEMLREARRHPAYKLLLSMPWLGPISVAQIIAVVGTPFRFRSKRQFWTYVGLAVVTKTSAEYVMVDGLVRRSLRPVTTRGLNRNHNHLLKRVFKQAATSACADGPFKAAFEARLAQGMDPSLARLTIARKLVATTLAIWKRGEQFSPERMKQQVA

SEQ ID NO: 353753 - protein, 342 aa, unidentified
MNIPVRIGMDTSKSVFQLHGVDENEVVVVRRQFRRAEMIRYFERLPPVLVAIESCGSSHHWGRLLQSFGHEVKLIPPQYVKAYVKRGKNDAADAEALCEAVTRPSMRFVPVKSKERQAACMLMTVRERLVSVKSQLSNAFRSYAAEFGIVGPAGRQNVAALIKRVLEDESLPEMARDLFRLQADEYAAVQARLAKIEAKLMKWHREDDVSRRLATIPGVGPIGSSMLSMKAPPPETFRSGRDFAAWLGLTPKDHSTGGRQRLGGITKAGDSILRSTLIVGATALLRHVRKGRHKPTPWLASLLERKPPKLVAVALANKFARIAWRLMISGGVYNQPVAAMPT

SEQ ID NO: 353754 - protein, 463 aa, unidentified
MGGDQLHIGGERAAAFRELVDDLDPRRVLLVGIDVAKASWFVLGCDLYGNVVIDGTKVAADRAGLGQLAGLLGQARARVGAQLVVVGVEAAGHYHQTLAAHLADRDDLLLRLINPAAVAAVRKTQLNRRRKTDWLDAAAICDLLVRGEGSRFLLGDDPATALRPLWSGRKDLVDARTRLRLQVLALVDCLWPGLTAHDTALGVRPVLRNLFTTKAGRILLGLLAQDWSPERIATHDTARLKALFARHGCQLKVTVAARILTRARESLRPHPAATAGKPVLLAALLATLETLDRQVAELEVEMAGLLPHTEGAKLTQIDGIGTVAASGFVAFVGSARRWGDWSKVWRGAGLDPARSQSGPTDVNFSISREGSAWGRRAVLDLASAACRKPGRWRDAYQRRINLDRKPPLVALTATGNSVGRTCFALMLTGADYDPGHEATRRRRHCPTSVSAELAVGKAGGQAG

SEQ ID NO: 353755 - protein, 412 aa, unidentified
MEVAHPRCCGLDVHKKTVAACVAIHQQGRQHKYRKRFGTTWRELQRLAEWLKEHAVTHVAMESTGVYWKPVWNVLEGQFELVLANAQLVKALEGEKTDTKDSAWIADLLQHGLLRGSFVPGEQQRDCRDLTRLRQELVQDSNRVANRIQKVLEDANIKLSSVASDTLGRSGRDMLQAMIEGETGAEKLADLARGVLRKKLQQLQAALEGRIREHHRVMLKHLLEQWEFLEGKIGEVEEEIRTQMLPFQEAIAHLDSIPGVNETVAWTLVAELGVDMRRFGSAARAAAWAGLCPGNHESAGKRLSGRTRRGNRYLRRVLVQSAWTANRGQGTYLQAQFRRFIARLGKKRTAVAVAHTILTIAYHILDRNEDYRELGGDYFERQDPQRTTRRLVRRLERLGHHVILQPATEAVH

SEQ ID NO: 353756 - protein, 422 aa, unidentified
MDVLYERVAGLDVHKDTVVACVRIVADGRTKRECRTFATTTDGLKGLRAWLEECRCTHVAMEATGVYWMPVFRILGDSGFELIVANAAHIKHVPGRKTDMNDAMWIADLLACGLIQASFVPNEEVQELRALTRTRKQLVREQTRHVQRIEKTLAEANIKLSVLSDIMGATGRRMIEAMIAGIRQPNKLAELAGKQIKATPKELYDALHGRLTDHHRFLLELHLKQWDNIDEMIRKLDLEVDQRIARMEAETEGSRTPFRTLIELLTTIPGVSAVAAPAILSEIGADMSRFPTAGHLVAWAGLCPGQNESAGKRKASRLRKGAPWLKTMLVQCAWAAKRTNDSYYRAQFFRLQSKRGPQKAICAVAASILTAIYHILKEGTEHHDLGATYFDRRPIAVKASRLVAHLKKLGFTVQLQPIPRAA

SEQ ID NO: 353757 - protein, 345 aa, unidentified
MPIVGGLDIHRKQLTFDYLDTVTGEVQRGQVSPADRAHLRAWLARFAGRNDVAFAMEGCTGWRYVAEELAAAGIAAHVGEPADTAFARGRKRHAKTDKTDARHLRQLLADGRLPECWIPPAQILECRALLEAYHDLRRGHTAWVERIHAVFFHQGAPRLGEGALRTERSLAALRAAAGTHLSPAGQLQVATALDMLTAVEARMDTLRRQLRDTARRLTGARVLADRLYGVGPLAALAMTCWLGGAGRFSSSRKAVRFAGLDVTVYSSDGKRSPGHLSRQGPEILRWVAYEAGKTHGRASAPGHDYYAAVKDRQDGKIAALSQARKLIRQACHILAELGDDALTVA

SEQ ID NO: 353758 - protein, 421 aa, unidentified
MSYKIAGIEIHKRVLMVAVASVADEVADATGAAMEFECRRFGTGASERQHLVAWLREHQMREVVMESTAQYWKPVWLDLEPHFEKLHLAQAQSNRAPKGRKNDFRDAQRLARRLLAGELMLSFVPEPEQRTWRLMTRGRLPLVRERVRLQNQVECLLEEARIKLSSVIGDLLGVSGRRILEALSQGETDAVKLAEMGDDRLKCTKEQLADALRGAPEPAHLQLLKLHLERLQLLDEQIEQLSRMSASALTNYQDAVVRLAAVPGFGAESSQQMVAEVGVDAEAFPSAGEFASWVGTCPGSNVTAEENQSSHCPKGNRYVRRILSEAAHAAVKKQGSHFQNVFRRFLPKLGYNGAIWVVAHRLARLTWKILHDGVSYIEQGQETNPRAKKRRAQKLAQALRRLGYSVTLTEVNPAPMAQAST

SEQ ID NO: 353759 - protein, 367 aa, unidentified
MTTLVSLELADKDWKVGTWPSEQAKPSVRTLRGTQERKLEVLEKWLKVEAARGERVVSIYEAGRYGVWLDRWIRERGVENRIVAPHTLKRPPGRERKTDRLDAIKLVGELRRYEGGDQRCFSVVRPLALEDEARRELIRERDEIVRECTRHRNRLGSKLRVYGIDLTPAPGNRKEWEAELARGGEWKTGDGKKVPEEVVKYLRREVETLGHFQKRLGEINKELKGRHERRPKESPERRLAKLKAIGLITAESLTSEFGSWDRFTSGRRIGSFVGLTPQPRLSGSGGQILSIDKAGRPFLRKTMIELAWMWVRWQPQSALVRKWGPRLRMKGRIKRMAIVALARQLLVRMWLYVTAGVEIPGAEYKAA

SEQ ID NO: 353760 - protein, 386 aa, unidentified
MQRPNDLSQSRIVLKQDSTLIAVIEMSLSSWLVAAVVPGVQRQPLKKLAVDESALLKLLHRWREEAEKAGHKIERIAVAFEAGRDGFWLARWLRTRGIEAHVIHASSVAISREHRRAKTDRLDTELLKRAFLGWLRGERDHCKMVAIPTMEDEDAKRPNRERESLVGEQTRIVNRMKAALSRLGIRGFNPKMKKAAERLEHLRTPEDEPIPPNTLAELRRDMERRRVVSEQIRQIENARLERIEHAPGHGPHAMVRLLARVIGVGIETADMLVQEVLSRNMRDRRAVARYAGLTGSPDESGTRRREKGLARSGNARVRRGMIQLAWRFLMFQKDSALAQWFRARTENARGTRKTMIVALARKLLIALWRLVHEGIVPDGVVLRPAQ

SEQ ID NO: 353761 - protein, 341 aa, unidentified
MEQVTTIGLDIAKHVFQVHGADAAGHALFRKRVTRPKLLGFLAAQAPCVVAMEACAGAHYWAREIGKLGHCVRLIAPAYVKPFVKRQKNDAADAEAICEAAQRPSMRFVPVKTEEQQANAITFRARDLLVRQRTQCVNTLRGHLFEYGYVFPQGITHVATLVALVEDPQSSLPGSVRIILKLLVDTFTALDGQIAALDAEINQRSKADPTARRLMTIPGVGPITATAITALAPAVQGFAAGRDFAAWLGLTPLQKSTGGKQKLGAVSKRGERTIRRLLIIGASAVVQQASRRGAPKGSWLAQMLARKPKMLVTVALANKMARIVWALLVKGGIYRTPVAAA

SEQ ID NO: 353762 - protein, 353 aa, unidentified
MDKIARIGVDLAKNIMQIHAVDSVERVVVRKAITRERFASWFANLEPCLIAMEACSAAHYWARKLSALGHDVRLIPPQFVAPYRKGGVHVKNDALDAEAICEAASRPHMRFVPVKSPAQQSVLVLHRMRTGFVEERTALINRMRGLLAEFGVFLPQGIDSLRKQFVERVEDGSNELAGPARQALMRGWTQWQSLDEQIAWLERQIAEHAAHDPQAQRCMDVCGVGRLTASATVATVVDARQFKNGRQMAAWLGIVPKQNSSGGKSRLGRITKQGDAYLRTLLFQGARSAVLTAHRRNDRLSRWIVQLQARVGFYKALIAVANKHARILWAVLARGEQFDPSYVPARIRTAKGT

SEQ ID NO: 353763 - protein, 460 aa, unidentified
MRKPTEKQLSGRKRTGKSGFPLLNPDAAGIDVGAREHYVAVPADRDAQPVRCFGAFTEDLQRLAQWLLQCGIKTVAMEATGVYWIPLYQILESYGLAVKLVNARHVKHVPGRKSDVQDCQWLQQLESFGLLSGSFRPEAKICVLRSYMRQREMLIRQASRHIQQMQKALTQMNIKLHQVISDLSGDTGLRIVRAIVAGERDRLKLAALKDRRIKSEVALIAKALEGDYRAEHLFALKQALELYDYYQRKIAECDAEIYKEMKTLETRGSAAPLAKHKPRSPHNPLGFASQAELYRIMGVDLTRIDGVNENTAQLILSELGLDICQKWPTEAQFTSWLGLCPNHEISGGKLLKRGTRKVVNRVANALRMCAQSLLNSKSALGAYARRMRARKDTPVAITATAHKLARLIYRTLKYGQDYVDVGSDSYEAKYKAAVVKSLQKRAQSLGYQLVSCQTPGAVVP

SEQ ID NO: 353764 - protein, 390 aa, unidentified
MQTEADRPEAPTAMCNHLGAIFVSLELSRSTWLITSLSPGGGEKVSKKSVRGGDVAGLLERFAQLRKKVHARTGRNFPIIVVQEAGLDGFWIHRVLQNEGIESHVVDPASIAISRRRRRAKTDGIDGEALLRALLAYKRGEPRVCAMVKVPTAEEEDRRRLCRERKGLTNERVLHVNRIKGLLFSQGVSGYEPLRRDRRQRLDELRTGDGRPLQKHLKAQISRELDRLELLLEQIKTVETERDALLAAQQVAAPAPAAMLLDFKGIGPEFAAALWLEGLFRHFDNRRQIASYAGLAPTPWQSGSVDREQGVSKAGNPRLRTTLIQLAWLWLRHQPQSALALWFEKRVRRNGGRLKKTTIVALARKLLVALWRYVTAGVVIEGAVMKTVGQ

SEQ ID NO: 353765 - protein, 409 aa, unidentified
MGVDIGSQWHYARAFDWRGIEITKKASRFSNGLDGYTAFEKWVHETAENSAKMEVLIGCEPTGHYWYTFARYVGLHGMRLAFVNPYHVKQSKEMDDNSPRKTDEKDPKTIAKLVTEGRYFFPYLPEGIYAELREAMSVRDQIVKAMNAAANWIQRWLTIYFPEYLKVYKVFDSVSGLTVLWRAPLPEDVVKLGTDGIVALWHEKKLRAVGKKREQTLVEATKSSIGMPGGNCAKMDPHLLLEDYFTKKEQLERITAVLKEELLKVPNAKKLLAVKGIGIITVAGFLAEVGDLGRFTSPKQIQKLAGLEPKENSSGKHKGLTSISKRGRRKLRRLLFQAVLLLIRSNENFREVYTYYTTRKDNPLKGTQAVIAVGCKLIRIFYVLLSHGTDYSSTRFRPDILRPEQAKAA

SEQ ID NO: 353766 - protein, 335 aa, unidentified
MKKIFIGIDISKEKLNLCFRTSSEIICEEEIANTVTAIKRQLGKDLKALSVDKNDVMVCAEYTGRYIYPLVVACEETGVFLWMEDPTRIKNSFGITRGKNDVVDARRIAEYAFRFNDKAIAYAMKDKDIATLKNLLADRDLLLNDRKKYEAQLKDQKKYMSGEDYKNKEKRWKKVIKSLKEQIASIEEEIRAVVDVNEKICYQVGLLKSIPGVGDKLAVNMVVITECFTRFENARQFNCYAGLAPFQYTSGKSVYSKSKVSQRANKHIKGLLHMASVCVSTHMLAGEYKEYYQRRITEGKHPMCILNAIRAKLVARMFSVIRRDTPYSEKYSYAG

SEQ ID NO: 353767 - protein, 352 aa, unidentified
MIIIGVDFHPEFQQIASVDTDTGEFQEKRLGHREDAEAFYRALAGQKVRVGMEASGHARWFERLVAELQFELWIGDAAEIRTKRVRKQKTDRQDAQLILRLLLEDRFPQIWVPSWENRDLRQLLWHRHRKVQARTRIMNQLQAVALNEGLRCKKRLWREHGRQQLESFRLAPWASRRRRDLLELLDRLNPTIAELSQAIEQEVEKCPEAERLSTHPGVGALTALAFVLIIGRTERFHCGKPVASYLGLVPLEESSGNRRRRGHITKQGSSMLRFLLVEAAQVTVRSVPEWRSKYLHLMMRRGRKTAKVAMARKLAVRLYWMWRKGWDYEQVKKFGSHAGQPGNRDGVPSNTE

SEQ ID NO: 353768 - protein, 419 aa, unidentified
MKNQPNEPGLFIGIDWADQKHDIYVIDRNGKGFHRELEHSPENIDTWVSEMLKLSNGRPVAIMLEQSRGALFYALMFREDVLLYPVNPKQLARYRESYPGGGKSDPTDAMYLARMLHERITTLTAWQPDDENTRLLAQLCQQRRKIVDGQTKLRQQLTALLKSYFPVVLELFGKEHQLTLLLCMLGRWADPRKFRRADRRLIRRVLSEHTIGNEKQQDAIIDCVRSAQLLSRDEALIIPSAMAVELLVKQIQDARKTIKEFDAKIATVMKQHSDAHLFTSLRGAGPALAPRLLCAFGSQKDRWADADSLAAFSGIAPVTRKSGKQCQVQRRFACPKYLRQTFHEFADSARLYCPWTKARYRMLRDRGMKHHAAIRKLARSWIRILFRMWQTGTPFDCDRYIAQLKQRCPEITQYLAQEK

SEQ ID NO: 353769 - protein, 363 aa, unidentified
MNYGSKAATKMTAGIDLGDKYSYLFVLDNDGGEVVEEGRLRTTPEDLRRRFDSAERMKIAIEVGTHSTWVSRLLEECGHEVLIANPRKTRLIYGEKRKTDKLDAQKLARLARADPELLYPVKHRGAQSQAHLALIHSRDALMRSRTQLINHVRGTVKSFGARLPKCSAQSFHKKVAGQLPDELAETLEDIVVTIASLTERIRNYDRRIEHLSKEHYPQETELLRQVPGVGPLTSLTFVLTLEDPGRFEKSRSVGAYLGLVPGKDQSGESDPGKGISGEGDQMTRRLLVSSAHYILGPFAPDSDLRRHGQKIASGGGKNAKKRAVVAVGRKLAVLLHHLWISREVYEPLHNARLWGTLGGEEVA

SEQ ID NO: 353770 - protein, 316 aa, unidentified
MGEDVSRVLGIDVSKASLDVAWSGDGEVQRLANDTAGISAVVAKAHQLDVQRITVEASGGWQLPLVAALLHAGLPVVVVNPRQVREYARATGTLAKTDRIDARVLCAFTLAVQPPLRPLKDQQAEALSALLARRQQLSGMRTAEKNRLTLGATGLVRKNLKAHISWLDRHLRDTDRELKQLIEASPAWQAKEDLLTSAPGIGNTTARVLIGQLPELGQLSHKQIAALAGLAPFNRDSGTLRGQRMIWGGRHEVRTALYMATVSAIRANPPIRDFYQRLKSNGKPSKVALTACMRKLLVTLNAMLRDQTPWQHTAKA

SEQ ID NO: 353771 - protein, 405 aa, unidentified
MDLLYLKCAGLDVHPRSVSACTRLVVDGQATHEVRTFGTSTRELRAMADWLSSLGCTHVAMESTGVYWKPVWHVLEDRFELVLANAMYIRNIPGRKSDVKDAVWIADLLAHGLLRGSFVPPEKVQDLRDLTRTRKQLTREITRHTQRIQKTLEDANVKLTEVISSVLGTSGRAILRALIAGETNPARLVDLTEGRLKAPRETLIDALQGRVTEHHRFMLKLHLDQVENLERAVRELEARANQGSFRAATELLTTIPGVSDVTARVIVAEIGDDMRRFPTAGNLISWAGLCPRLDESAGKQRSNRTRRGAPWLKTVLVQAARAAANKRDSYPRAQYLRLKARRGPNKAVLAVAATLLTAAYHMLKYGVEYRDLGPNHFDRDKELQASRLIRRLKALGVEVTVKPAA

SEQ ID NO: 353772 - protein, 337 aa, unidentified
MECERIAVDTSKSVFTLHGVDELGRPILRRDLGRARFEEFLGKIPPTEVVLEACGGSHHWGRVAQALGHKVRLIPPQYVKPFVKRGKNDRNDAEAICEAASRPTMRSVPVKSAVSQAEAMDLSARGLLVRQRTQLINAVRGHAAEFGVIAAKGIAQVDLLLAKIAEADVPQAAKETLVHLGRCIEQLDAQLAVLDQRLAARHKASPVSRRLAAVPGVGPVTALTMAMTVDARQFESARHFAAWLGLTPRERSTGGRQRLGGISRAGHERLRQLLVVGAMAVIRHAKPTSKAANPWLLGLLERRPRKLVAVALANKMARTLWAMMANGTAYRRSPQAA

SEQ ID NO: 353773 - protein, 350 aa, unidentified
MVIIGCDYHPGFQQIGFVDTETGDYGEQRLEHSEGAEKFYRDLAAQGKKVRVGMEASGHARWFERLLAELTFELWIGDASEIRAKRVRKQKTDRQDAQHILQLLMENRFPKIWVPSGENRDLRQLLWHRHRLVQMRTRIMNQLQAVALNEGLRCKKRLWRQHGREQLESFRLAPWASRRREDLLQLLDRLNPTITDLTQVMEQEVEKCPEARRLRTHPGVGALTALAFVLIIGRAERFQCGKQIASYLGLVPLEDSSGNRRRLGHITKQGSSMLRFLLVEAAQVTARSIPEWRSKYFHLAMRRGRKIAKVAMARRLAIALYWMWRKGWNYEQLRKFGSHAGQLGTGDGVQ

SEQ ID NO: 353774 - protein, 431 aa, unidentified
MKNKINAKIEEITINTLIVGVDIAKSVHYARFVDYRGMEVGKTVSFTSDKKGFEKIITQIDKICNMKTIKNPFNKIIVGMEPTGHYWKPFADWLVKKEYMVVCVNPYHTKKAKELDDNSQTANDKKDAITIARLVKDGRYFAPYLPEGVYSELRTLTNIRHGILKRNSAAKNNIIAVIDEYFPEITTVFKNPLTGKASRQVLKSCPFPVMILALGESGVLEEIKKAVKKTVGVKKVRELLVAAADSIGVEYGLESAHLKLRILLEELELVEKQLVEVEVTMEKMLHSTGYSKQILSIKGIGVISAASFLGEVGDPLRFDNDRQISNYAGYNLTEDSSGKSKSGTVISKRGRSQLRSVLYKMALVMVAQNNEMKQLYGYLKTRKNNPLKKKQALVVISKKIITIIYSLFKKQETYNPELVLGAVRKEMMSAA

SEQ ID NO: 353775 - protein, 408 aa, unidentified
MYNAVGIDASKLKSTITIIQPAGVVIRKPFDVLHTSDELNTLVTYLKSLVGETRAVIECTGRYHEPVVKSLSEAGIFISAVNPKLIKGQKQNTLRKVKSDPADARKIAKYALDNWAELREYSSMDTTREQLKTLNSQFTFFMKQKVAAKTNLISLLDNTYPGVNKLFDSPTRDDGSEKWVDYAYSFWHVDCVRKIGLKAFTERYEAFCKKHHYNYQKNKPALLFEESKQLVAVFPKKKSYKLLIQQSIQQLRLASEHIEIIRKEMNELASTLPEYETVMSMYGVGETYGPQLIAEIGDVSRFTHREAITAFAGVDPGVNESGQFKQRSNRASKNGSTRLRKTLFQVMSTYLQNKPVNEPVYQFLDRKRAEGKPYLVYMTAGANKFLRIYYGKVKECLRNLEQSQIEES

SEQ ID NO: 353776 - protein, 387 aa, unidentified
MSEMFNPHAPAAAYDHNTTIVAVLELSGKNWLLGAVAPGLSRRMKRSFEARNVEAVVRALEQAKGEAAKARIEVGRIVVGFESGRDGFWLARALQQRGLEVYVMHAASIAVERRGKRAKTDRLDLDLLLTTLMGWLRGEPGRCTMAPVPSEEEEDLREAGRRRETLVHARLKVENQIASLLIRHGIEGFRPRLKNAETKLCELRTFDGRSLPANTMNSLRLLLAQHRLLSAQLKEIEEARQRVVNVAEPDRLQRMIQALARVVGVGVETATVLVHEVFSRSFKDRRALGAFVGLTGTPYNSGSSKTEQGISKNGNGRVRRMLSQLAWRWLGHQPESALAQWFNARLGGAKGRMKKVLIVALMRKLVIALWRLAETGEVPIGARLAAR

SEQ ID NO: 353777 - protein, 408 aa, unidentified
MNAVGIDVSKGKSMVAALRPMGEAALLPQEFLHTDVGLEQMAYAIIALGEDTRGVMEATGRYHEPVAAALHEYGIYVCVLNPLYIKQRGGGSIRKVKTDKADAMKIAKYGLDNWVDLREYTPMDTVRQQLKLCSRQYNLYMKTVVSLQNNLISLTDKTFPGVNELFSSSERADGHQKWVDFVMTFWHCDCICRVSEKAFTERYRKWCKRKGYHFSAEKALDVYAGSCGHFTTLPKNDNTRLLITTAAQQLLAGKTTLAALRAEMTRLAKQLPEYDTVYSMYGVGETTAAQLMAEIGDVRRFPRRSSIVGFAGVDPAVDQSGKHEAQSTPTTKRGSPHLRKTLYQIVYTYLRKAPEGEPVYQFLDKKRAEGKPYFVYMTASQNKFLRIYYARVKECLEAFDARQAIPQD

SEQ ID NO: 353778 - protein, 466 aa, unidentified
MTPPKDYCLEAPCPPTPLLPPLPVLSDALHVCNPHAAGIDIGEAEHWVAVPPGRDPQPGRRFGTFTVDLDALADWLIDCGVITVAMASTGVYWMPLFELLEARGVQVLLIDPRQAKRAPGRPKTDRLDCQWLQRLHAYGLRAGACRPDDQVCVLRAYLRHRQRLLTYAAHHIQPMHKALQQMNLKLTQVVSDLTGVTGMAIIKAILAGERNPQHLAKLRNPHCHHDADDIAKALQGTWRAEHLFALRQAVELYEVSHQQMAQCDQQITRHLETFADKSDGQPLPPKARRHKKTNEPRFDARTPLYRLAGVDLTTIEGIEENTALILLSEIGTDMHRWPSVKHFCRWLGLCPQHKISGGKVLSRRVRPGAHRVTVALRLAARRLHHSQSALGAFFRRMQVRLGTPKAITATAHKLARLVSSLWQHGSAYVQQGLDAYEAQYRERKVTTMAKQAKALGYTLVLLAAQG

SEQ ID NO: 353779 - protein, 391 aa, unidentified
MVCVGIDVAKDKHDCCILDSDGMVRADCFTIPNNMDGFKQLLQTIRNCTQKSDKIKVGLEATGHYSYNILGFLLDNGLPTYVINPLHTNLYRKSLSLRKTKTDRVDARTIATMLLSDVDLKSYTDTAYHNEELKSLTRYRFDKVRERAKLKQSVSRLVTILFPELEKLVTSLHIASVYALLSEYPGAKQISEIHLTKLTNLLATASKGRYEKEKAIQIREAARTSIGSVMSAKSLELKHTIKLIKELTSEIDEIEDSIQQIMDELHPPILSIPGMGVHSAAMILAEIGDFSNFESPDKILAYAGCSPSTYQSGKLTNCYAHMEKRGSRYLRYALYNATKYVCHWNPVFAEYLAKKRAEGKHYNVALSHATKKLVRLIYALQKSGKAYLVAA

SEQ ID NO: 353780 - protein, 325 aa, unidentified
MNTTQVFEKRKIAVAIGIDLAKDHCDVVAYNADNKICFTKANWAYPHLMEWLANAQPAVVLMESCKGCHVRARDIADLGHDTRLVKGADVKALRNVCQKNDIRDANYIARLLYVPGTKFVFVKNQRQQSLQFLQNEYKSIQELRIQVGNQIHAGLEEFGCPGPKSKKFIQSRMMAHLEKNAEPIPDEVMSSFLRRREMWLNLFEQEEEAKKRMEEIAKTDDDAQRIMTVPGVGAQTAVGMLVHIGGDIGRFKNSGQFAASIGLVPKQNSTGGNTTLNGITKCGPKRLRANLVQCGQVILMHADKLRKLFKTPIFERWGKQICLNE

SEQ ID NO: 353781 - protein, 359 aa, unidentified
MQAKVKTISFQGQNIYIGIDAHLKNWTVTAMTENSLTKTLSQDPDAGVLYSYLQRIFPGGNYYSAYEAGFCGFSVHRKLQEYGIQNIVVNPADIPTTDKERKQKEDRRDSRKIARSLKNGELNGIHVPDLETEELRSLVRYRKTLVKEISRNKSRIKSHLYCFGIDIPATLAQASLHWSGRFTQWLETVQLSTCYGDIVLQSTLQTVKHLRSELLKINRQLRGLEKESKYSFKIKLLRSIPGVALIVAVTLLSELETIIRFKNLDKLCSFVGLVPTTNSSGDDERVGRITRRSNKPLRSLIIEAAWIASRNDPTLAQCYIELCKRMKPNEAIVKIAKKLLNRIRYVMKNEKEYVHSVVQ

SEQ ID NO: 353782 - protein, 369 aa, unidentified
METNIFVGLDVHKATVCVATAESGRGGEIRQIGVFENRPEILSKMAARLGKGGHRLSFCYEAGPCGYGLHRLLTGSGHDCVVVAPSLIPMKVGDRVKTDRRDALMLAKLHRAGELTPIWVPDAAHEAMRDLIRARATAVRVLGKARQHLQGFLLRHERLYCGTRAWTLAYRRWLTTVRFEHPAQQIVLQDYIHAVQDAEARRDRLTRQIEELLPNWSMAPVVAALQAMRGVALVVAVTVVAEVGDFRRFANPRQLMAYLGLVPSEHSSGSTVRRGGITKAGNAIARRVLIEGAWTYRMSARVSRKLHDRLEPLSMAVREIAWKAQVRLCARYRRLAAAGKPKVVVTTAIAREMVGFIWAIARIAQPALA

SEQ ID NO: 353783 - protein, 391 aa, unidentified
MIYVGIDVSKDKHDCYIVNSDGKVLADVFTVENNLEGFDLLFQRLKSVARDLDNVKVGLEATGHYSYNILGFLLSKGLATFVLNPLHTNLFRKSTSLRRTKTDRVDARTIAAMMMSGVVLKSYTAISYHNEELKSLSRYRFDKVCQRAKLKQAVSRLVTILFPELEKLVPSLHIASVYALLAELPGAKQVASCHLTHLTNLLSAASKGHYDRSKAVELRNAARRSIGSAMPAKSLELQHTIRLIRELDAEISEIEAAIKQIMDQIASPILTIPGISYRMGAMILAEIGDFARFDSPDKILAYAGLSPSTYQSGKLDNAYAHMEKRGSRYLRYALYNAAKYVCHWDASFCAYLAKKRAEGKHYNVALSHAAKKLVRLIFALQRSGQPYCPTA

SEQ ID NO: 353784 - protein, 350 aa, unidentified
MERQQLVIIIGIDPHKSSLTAVAVEPNGQTHPPIRLVVDKNTPATLLTWAAQWPERQWAIEGATGLGRGIAQQLVTVDENVLDVPAKLAARARLLGSSSARKTDVADAISVAAVARHNRRLNRVRLEDHTTIMRLLTERRDDLVAEHTRWINRLHVLLRDLHPGGAEVRLDTTDASSLLAKIRPVTPADQQRKQIARDVVRDLKRHEASIKDLEKQLRAAVIASGTTLTQIQGIGSLTAAKLLALTGDIRRFPNQEHYASYAGTAPIDVSSGEQETHRLSRRGNRQLNAAIHVAAITQARDPGPGRDHYRRKIAEHKTVIEARRSLKRRISNAIYRRILADHLRLRLEAA

SEQ ID NO: 353785 - protein, 355 aa, unidentified
MDDFKYIGMDVHSATTTIAVRDGGGRLVMEATVATQAAALSDFLRGLRGRLWLTFEEGNWAAWLTQVLTPQVEKLIVCNPRRNASLKQGNKSDPLDARQLAHLLQANLLRPVYHEAAGPQTLQELARAYTTCVGDTTRVMNRIKARYRARGILCSGSRVYRPRFRQPWFEQLTDPGARQRVELLYLQLDLLQELRKKARRALLTEARRYPACSLLRTVPGVGPVRAALLLALISTPFRFRTKRQLWMYAGLGLITRDSGQYQTVRGQIIRRDRPACVRGLNPEHNRELKEIFKGAALTATRSSSPLHAFYQQRLDQGMRPHLARLTLARKIATLTWILWKKGERFNAHDLTSQAE

SEQ ID NO: 353786 - protein, 347 aa, unidentified
MNYVGIDWAYRRAAWCALSEGGQIKGEGMVPADEGGLADLVLELGTEVEGCVETMSGAVWVKDQLEAAGWSVKVANAAKVRDVAPLACKTDKVDARVLAELCRRDLVPAVWVASLEDRAISERLRRRAHLVKQRTSHRNRIFGLLTQFGLRISFTRLRQPDAIELLERRGVPAVWRESIAHHLEQVDEIQQRICPIDAELGPIAASDPRAKLLQTIPGVGPLISLVFASEIGEVSRFSSASKLVGYAGLAPRVIQSGDRSATGRLSKAGSRTLRWAAVEAANQAWRESNPFHEHYRRLAARHGANPAKVSVARKLLICSWHMLSRGQVFKPHRSTTAPASSSRFQTA

SEQ ID NO: 353787 - protein, 307 aa, unidentified
MQFIGIDAAKATFDIALPLSYGKYQTKAKLPNTPKGFDELLAWRAKHAPNAAVGMDATGIYHEALARALVEAGVVVHVANPARIKAFGQAEGIRTKTDRSDAKLIARFFEAQRSEKLHSYVPPTPSEVKLRALVRRRDDLQEMLQMEHNRLDVADISVQQGIEDVIRTLEEQIKQVQKAIEDHIDNDPDLRRRHQLLTSIPGVGNTSSAQLLAMLGDLSKYSDVRQVVAHAGLNPAQRQSGNYEGKCRISRVGDANFRKKLYMPALTGKTHNPTLKSFADRLSAKGKPFKVVMCAVMLKLIHLVGAY

SEQ ID NO: 353788 - protein, 304 aa, unidentified
MLYVGLDIHTTRISVCALNQTGQVVHRSQVRGIEDMLRVLGGLGDRFEVCYEASCGYGHYHDLLRPLAARVLVAHPAQLRLIFRSKHKNDRNDAERLAKLLYLGETPTVHVPPPEVRTRRELINCRAQLIAKRTRAKNTLRALLRSAGVTPPKHPGLWTKAGLKWLRRLELPTFSQQLRRDLLLEEIETLARQVRRIQQELDRQARRTPAVGLLRTIPGVGARTAEAVAAFLDDPHRFPNAKAVGNYFGLVPCQDQSGDRNRLGHITREGAPVVRQLLAEAAWQAIRRSPSVRAFFERTRRGDP

SEQ ID NO: 353789 - protein, 341 aa, unidentified
MSLFAGLDVSVKTTAICVLDANGRILLETVVDSAPEAIAYRLRGLDLPFERIGLEAGPLSQWIYAGLVDMGLAAICVETRHMHAALSARINKTDRNDARGIAQMMRVGLFKAVHVKTPASQVRRLLLTSRKLLQRKIYDIENDLRGSLRNFGLKVGVVGAVKFEDRIRELVDDHPLVAAIVGPLLEARTVLRVQFAKLHRMLLELVRTDPICRRLMSAPGVGPIVALTFRTCVDNPARFLRSKCLGAHYGLTPRLYQSGEVARTGRISRCGDAMLRASLYEAALVVLTGPGRWNPLKAWGVAVARRRGMQKAIVAVARKLAIILHRMWRDDSDFRWTATVA

SEQ ID NO: 353790 - protein, 451 aa, unidentified
MNHYSLFVGIDVAMRKHDCCIMDKDSKILLKKFTFSNTLPGYQKLVDKLTAITTDKACISLGMEVTGIYGDNLYERLKMDGFNVIMIQPESVNSYRKYKKLPKNDKLDARCISEILVRNEAVPVSPQKKEYAELKSLTRRNACLKKTLTQEKNRFLARINVYFPDLLNVFKTGFTTMKAVFSSYSTPYSIINADQEELLTLIKSASKNRYGEEKMKELVEAAQNSIAVRTHISDEERFHILSLMDFVHYLESQIHELERLIDAKASHFPAYRMLLSFTGCGKPTAATIIAELGDLSRFHKASQIVSFAGLFGYNSDSGDSVNKRGKLSKKGSRELRHALYMVAEFARRNNPILKDYFTRKKNGDRKKHILAVNTVANKLCTILFSIMRNESLYVIKYRDLAKLPELTRNEFFYNVETDFSATTRKKKYFYEDALGEVHEFVYRSTSMLSIE

SEQ ID NO: 353791 - protein, 413 aa, unidentified
MKQLLDPVAGLDVHRDNVVAATRTVGADGEVAFTKVRFPTNRRGIAELAGHMTQAGVVRVAMEATGVYWKSLYYSLEGLFPELWLCNAQHVKNVPGRKSDLSDAEWLADVAAHGMVRPSFVPPPEIRELRELTRYRKTQIDERAREIQRLEKTLQDAGIKLTSVASGVWSVSSRRIVEALIAGEADPAKLASLALGRLRPRTAELEEALAGHFGPHHGIVCQQVIDHIDFLDSSIAKLSEEIAARLLPFEAAVALVSSVPWIGEISAQVIIAEIGVDMARFPTAGHLCAWAGLAPASHESAGRRRPAGTRNGSRWVRRTLIEVARVAARSRGTYFSAQYSRIARRRGPNKAAVAVANSMLAAIWHLLTTGAFYEDPGADYFERRHDPMLEAKRLQTRIEALGFVVTMTPKAAA

SEQ ID NO: 353792 - protein, 365 aa, unidentified
MSAYYVGLDVHSRESVFAIARAEGAPVAHGRIPTTPDGFRELQTVHGLPPGTPVALETGTLAFYAARELARLQFAPVVIDAREVRLKVRRPRQKTDRGDAWELCDGLRRGFYRCLVHVPNATMAALRETISRRRHFRRLQAAEINAAKHLLRAAGLTPLSRNLRSPLGWQKLLLAVPRGTALHTYLAEHQALWVAARTHVATLERLLTHQRADVAEAARQLETIPGVGPIVALTVIGAFADVARFPSAKHIASYAGLVPAMYQSGDCDRRGHITKQGPAELRAMLCQAAQHAARASHPLHPVYAKVCARRGHKRALIAVAHKLCRIAFALLRDHTDFDPAKAGIEEGVFQRTVTHRYRLAARHGH

SEQ ID NO: 353793 - protein, 374 aa, unidentified
MENTITYAAMDTHKKQHKIALQYPGREEIVECTVDNTAEAIRKVVNKIRKQAPGDIEFCYEAGVCGFTLKRRIEQFGCRCRVIAPSLVPKKPGERVKTDRRDAKKLLALFKAGLLTEVQSPDEHQEAARELTRLRETAKDNLKRVRHQLLKFLTRHGYVYRQGRHWTQRHIAWLRGLEFTEPMLKEVFESYFNEMIYCAGRLESLDKEVTLLADAKEYKELVGLLCCYHGIDTLTALTIITEIFEFGRFASPRHLMSYLGLTPSEESSGEKEKKGAITKTGNKRVRRLLNEAAWHYRHRYVPSAALKKRREGRPKWGVEIADTAGRRLSKRHRYLIAKGKMPCKANIAVARELAGFLWFTITQYYTRKDMVDAA

SEQ ID NO: 353794 - protein, 428 aa, unidentified
MDEVNRNRLEEFRQLRQEIRQSEEHLIVGIDIAKDRHHAFFGTATGKTLLRRLVFSNDGEGFGKLLDQTEALRVRHGLKRVVYGMEPTGNYHKPLGEYLIQMGRMVVLVSGVTAKHNRESLDGRWDKHDDKDSANVADLISQGKCLYYEYPPVELRGLRGLLSLKRRLKRQEQSYRVRIRNHLIAQYFPEMDRDYERLGAEGLSIVRWCLAASEIAQLDVDPFIERVTSRRVNMEKRRRLEALWEKAGESIGCDEVPGVDHEAKMMVEGLKQIREMIKETKERIEELCNRFPEYPFLLTIPGFGPDVSSKVLGAVGDPDRFENRKQVLKQAGLDLSANRSGKNSARAIPQISKQGKADLRYALYQAAFIASTKNRDFMRYYTSKLRGREKEKGINGKILVKLSAKMLLIAWTLMRKKEAFNPTYLNAE

SEQ ID NO: 353795 - protein, 412 aa, unidentified
MDANMEVVYERCCGLDIHKTIIVACLLISGAKKEIRSFGTMTGDLLELCGWLKLNNVQMVAMESTGSYWKPIFNIMEVEEIPAILVNAQHIKAVPGRKTDVKDSEWIAKLLRHGLLKASFVQPREDRETKELVRYRSKIIDERAREFNRIDKVLQGANIKLSSVASRVSTVSGLDMIRSIAKGNFDPELLASMARGTMKAKMNELEKALTGLIQPHQQMLLNSMLSHIDVLTQQIEQLDAEIKKRFEDRQDVIDALDGIVGVAERTAQVIISEIGSDMSQFPSAEHLASWAGMSPGQNESAGKKKRGKTRKGNGTLKKTLVQSARSAARSKNTYYNSFYSRLAARRGANRAAVALGRKILEVCYYIIRDGTQFNDLGADYFLTINKSRILKSSIKRIESLGYSVEVTPINAA

SEQ ID NO: 353796 - protein, 337 aa, unidentified
MIVIGVDVHKHSLSAVAVDEVGRQLDCLETSEAAELVAWSKRVGRRRLWALEDCRHVTRGLERTLQRQRQRLVRVPPRLTAPERRRGRVRGKSDLIDALAIARAALREPQLDSPRPEEARLRELKLLVDHRDDLVDERRRCQQRLRWHLHELDPSLRVPLGALDRNVWLERLGRQLARREQTTQVRIARELLGRCRSLTRSIGELDRELQAQTTAIAPQLLELPGCAALTAAKLLCEIGPIQRFHSDARLARHAGVAPLDASSGKHQRHRLDRGGNRQLNCALHRIAVTQGRIHPPARAYLERKQGEGKSRREAVRCLKRQLARTVYVALKSEPLLT

SEQ ID NO: 353797 - protein, 408 aa, unidentified
MNAVGIDVSKGKSMVAALRPMGEVALLPQEFLHTEVGLEQMAYAIIALGEDTRVIMEATGRYHEPVAAALHEYGIYVCVLNPLFIKQSGGGSIRKVKTDKADAMKIAKYGLDNWVDLREYTPMDTVRQQLKLCSRQYNLYMKTVVSLQNNLISLTDKTFPGVNELFSSPERADGHQKWVDFVMTFWHCDCICRVSEKAFTERYQKWCKRKGYHYSAEKALDIYAGSCGHFTTLPKNDNTKLLITTAAQQLLAGKMTLAALRTEMTRLAKQLPEYDIVRAMYGVGETTAVQLMAEIGDVRRFPRRSSIVGFAGVDPAVDQSGKHSAKSVPTTKRGSPHLRKTLYQIVCTYLRKAPEDEPVYQFLDKKRAEGKPYFVYMTAAQNKFLRIYYARVKECLEDFDAQQNSAQS

SEQ ID NO: 353798 - protein, 364 aa, unidentified
MDSVVYVGMDVDKEKIVLAVLSGVDTELAEELVIRNEASAVQRYFSRLKGRGEVIACYEAGSFGFGLYRQLAEMEVACLVVAPGLIPHRPSERVKTDRRDARTLVRALRNGDLTGVYVLTKKDESVRDYLRMYEDAKSDLKKVKQRVLHFLLRRRLRYEGGNNWTEKHRVWIRSLEMEHPIDQETLSEYLSQTADLEERCRRIGSRIEELCEEERYRSRVATLKAFKGIETLIALSLVVEIGDFRRFGAAEQFMAFLGLVPSERSSGNKRRLGGITKAGNSHLRKLLVEAAWHYRSYHATSSRLMKRRTGLEASLVSYANRAGRRLNSKYLRLVFKGKRTQVAATAIARELSGFIWGAMVGKAA

SEQ ID NO: 353799 - protein, 358 aa, unidentified
MMYVGVDVHKRVCRAAIVNAEGTVVDEVSFRNSKTGIDELVTRLDAATDRVVVAVESTATLWIQIYDRLEERGIRVVLSNPYKTRLIAEARIKTDTVDARTLAQRLRADMLPLCYVPTKTQREARQFIRHRITLGGMRTAVKNRIHTLLDKHGLRCPYKTLFSKRGVEWLRSVELGVTDDTVLQSDLAVLAVLDEQIASMDAKIATVAVTDERVLLLMTMPGLGYFAAYLLVVEVCNINRFRSDRRLVRWAGLAPGVHQSGDKTYGGRITKQGNKLVRWVLVEAARNACRYDARFRAFYARYSRRHGGQKAVVAVAHEMLRIVWFMLSRGEPYRGGRTGLSERTRKRWERIADRGLRA

SEQ ID NO: 353800 - protein, 339 aa, unidentified
MSSCKKPEQSPGPVEESESTSEGYLVVPDEIFVGIDVSEEKLDVHVLPKGLSISCRNNAKGIDGLVKQLKKSPPSIIVMEATGGLERLPAAELGSSGFAVAVVNPRQVRDFARGIGKLAKTDSIDAYVLARFAETTRPIPKALESHEEALLKDLVKRRRQLVDLRTGEKNRLRRARSQAIQQSILMLIQALEDQIRKIDLDLDDNLKKSPLWREKEELLKSFTGVGTVTARTLLALLPELGKAHRGQIASLAGLAPRNKDSGKMRGPRKISGGRANVRKTLYMAALTAISHNSTIRTYHERLIAAGKPFKVAITGCMRKILVILNAMVKSNRRFEELFS

SEQ ID NO: 353801 - protein, 348 aa, unidentified
MAVTIVETRAITCGAGTHAGTHVAAALDPVGGLLGVREFPATSAGYTGLLGWLGGFGTVCLAGIEGTGSYGAGLARHVTAAGVRVVEVDRSDRQDRRRQGKSDPLDAVSAARAAQSGRARGAPKGRDGAVEAIRALMVAKRSAGGERTRTINQARALVLTGPDDLRARFAAHATADLVTDLASLRPRPGAVVGYHTRIALRELGRRAEFLDSQIVCLDALIVPLVTGHAPGLLALHGVGSDTAALLLVAAGDHPERLRSEAAWAHLCATAPIPASSGKTKRHRLNPAGDRQANHALWRIVITRMSSHPPTRAYAGRRTAEGLSKKEIMRCLKRYVAREVYPHLRAAAD

SEQ ID NO: 353802 - protein, 388 aa, unidentified
MPQTPNDLSRSLTALEQTTTLVAVVEMSQASWLVAGMIPGLERQPLKKIAPNEAALLSLLQRWQEEAIKICQTIRRITVAYEAGRDGFWLARWLCSRGIEAHVIHPTSVAVSREHKRAKTDRLDTAMLIRVFLGWLRGERGHCGMVAVPTLEEEDAKRPSRERENLVGERTRIINRMKSALVRLGIRGFKPELRRAPQHLEKLRTPEDVPIPLRTLEELRRDMARLAMVRAQIEAIEQIRLQRLEQAPQDVAHAMVRMLANIIGVGVETADMLVREILAKELRDRRALARYAGLTGSPNESGSKRREKGLAKSGNARVRRGLIQLAWRFLRFQKDSALAQWYRTRTEGAKGARKTSLIVALARKLLIALWRLVTIGEVPQGIVLRQAT

SEQ ID NO: 353803 - protein, 378 aa, unidentified
MSDRATRREEATTSEGILYMALELGHRKWQIRFGDGERTRDVAMPARDLGRLWEEIGKAKARFGMKEEAEVGSCYEAGWDGFWLHRHLVGAGVKNLVVDSASIEVSRRRRRAKTDRLDAAKLLAMRIRHERGERVWSVVRVPEEEAEDVRQIGREVERLKKELRQHRSRIESLLVTQGVVEKVRRGFGDRLEQIRRWDGSGLPEHLQEALRREYERLELCRRHLREVERRQREMVEAGESETMRKAAALAELRGIGNRGSWVFTTEIFGWRRFRNRKELASCVGLTPMPYQSGECSREQGISKVGNRRVRWLLVEIAWGWLRYQPDSRLSRWYMERFAGGGARMRRIGIVAMARRLLIELWHYVEHGAIPEGAQFKTT

SEQ ID NO: 353804 - protein, 416 aa, unidentified
MNPSDPPSSAVDASSFQYVVGVDIGMESCSFCVCSPEKSLLIKPTTMTNAAQGFAQLHEKLRQLGVAPDRILIGLEATSRYGENLYHFLESQGYHLCLLHPRQTHEFAQRRGLRAKTDKLDAQTIARVLLSGEARRGYVPSELIASYRELVRLHTQLSDEVAGYRNEIHAELSVLFPEFTQVFADPSRPTALAVLQLYPSARAMATASVESLTTKLRELAPCNYGERTAKLLVALAQHSVSSGKATAARATSLKILCNQLQHTQKNLALLEAEIDRLLVGDSGATGLGSVPEFGPKTVVVLRAELGDVSRFQRMDQAVAYAGLDIQVKESGQWKGQAKLSKRGSGRLRRILYLAALRCTRLEGSAFGAYYHRLIARGMRKREALMAVMRKMLIVAVHLLKTEEEYDPGKVAVTGAG

SEQ ID NO: 353805 - protein, 309 aa, unidentified
MKEQLVYCGVDIAKSHLDAAIGKEKRCLPNDATGHRQFIKWIKQIEAQVQVICEPSGGYERRLIQALVGAQIKVSLVQANRVRQFARAAGILAKTDTIDARVLCAFGEAMRPQTFSASALEQERLRELESQRRHLTHLLVMEQNRAARVSEVLVRRLNRRLIHQIKKQIEQLDLLIQEHIEASPELSHKASKLTAISGVGERTAALLLAQMPELGQLNRREVAALVGVAPFNRDSGKWRGKRAIFGGRRFVRHGLYMAALVAARHNPILRPFYQRLRVAGKPAKLALTATMRKLLIVLNSALKPQSIYA

SEQ ID NO: 353806 - protein, 378 aa, unidentified
MIEHTAEALDAWLTELHQKVKGRIAIALELKKGPVVYALQKYPFITVFPVHALSLARYRQAFSPSGAKDDPQDAELALELMLRYPQKIKAIEPDNADIRLLQQLVEQRRQLVEDTRRFVNRIINTLKQYYPQPLEWFSHRGSLLLCELIIRWPSLQQLKRARRETIRNFLNAKGGRAMALTEQRVVSIDNAIPLTTDSSVIEANALMATALATQIKVVSEIIKTYDERIEALFDTLPDAGLFKSLPGMGPCMGPRMLAALGDNRDRFNSAEEIQNYAGIAPVTERSGQKCWVHWRWQYAKFVRQTFVEWAAKTVNSSYWARLYYQGLREKGKSHQSAIRALAFKWIRIIYRCWKTRTQYDEAKYLLALEARHSPLLKP

SEQ ID NO: 353807 - protein, 364 aa, unidentified
MDPPLKDGVIMCQHRISIFKKRRRSMKDIKILGVDIAKDVFQLCGIDEWGKVIYTRRVKRAQYVSTVASLKVGCVVMEACGGANHWYRTFMGMGIPTQLISPQHVKPYVKSNKNDRNDAQVIAEAASRASMRFVRGKTVEQQDVQALLKIRDRLVKSRTALINEIRGLLQEYGLTMARGAKRFYEELPLILASEAVGLTPRMKRVLNCLYTELLNRDEAIGDYEEELKAVAKANEDCQRVQSIPGVGYLTALSVYASVGDIHQFHRSRQLSAFIGLVPRQHSSGNKEVLLGISKRGNVMLRTLLIHGARALLRHVKNKTDKKSLWLKALIERRGMNRACVALANKNAPIIWALLTRQETYRCGA

SEQ ID NO: 353808 - protein, 343 aa, unidentified
MSEISTIGLDLAKNVFQVHAVDPLGGVVLRRQLRRGAVEKFFAQLAPCTVGMEACGSAHHWARVIGRYGHQVRLMPPAYVKPYVKRNKNDGRDAEAICEAVGRPTMRFVPVKSVEQQATLAVHGTRALLVRQRTMAANALRAALSEIGIVAAQGLKGLRELMARLEAPSGEIPEMMRGALLVLARHWQTLDADERALERQIAKAARADHEARRLMEVPGVGPIIASTVLAKVPDAKVFRSGRDFAAWIGLTGRDHGTGGKHRPGRISKQGDRMLRALFISGASAHLRQQKARGVSDPWLRELLARRPYKVAMVAFAAKTARIIWAMLVKGEVYRDRASASAAA

SEQ ID NO: 353809 - protein, 404 aa, unidentified
MWYAGIDWANDHHDALVIDEHGHKIGSLRVSHTKAGLGKLNTFLEQLSATASKEQMACIIETTHGLLIASLLEAGWPVYPVNPRTVDRRRSASGAKTDTIDAYLLAKTGRADFADLHRLTPDSEKVAELKTLTRDQDSLIQMQTRLVNQLTACLKAYYPVALELFGKLQQKSTLLFLQHYPTPQKAEGASVQEIREILKQARHPQASLVATSIWQRLHEPHLQADAVTTRTKSRLMLALVNQLLPLIEQIAQYEKEIDSLFLTHEDHEIFESLPRAGQRLAPRLLAEIGDDRSRYRDASSLQALGGTSPVLFQSGMYSKAHRRMGCIKPLRNALHQFAWQTTQSEPWARDYYQRKRAEGKSHTVAVRALANVWVRIIFALWTHHCCYETATFEHAQHLHARRAA

SEQ ID NO: 353810 - protein, 345 aa, unidentified
MTNNIQFSSVCGIDIAKSVMQVYKVSSDGVVSNKAVKRADFLDEFRNIPPALIGIEACGGSQHWAHELQSLGHTVRLMPPKLVKPYVTGLKNDKNDARGIYTALVMDVREVPVKSAAIRDLALLQTMRTKRQREKVAKINHIRGILSEYGLIMGKSVNAFLAKAGSLIVELKERADVSPYIVSELDALFQEVKEAIAKIKELETNIESIAKTLKHYDLFQSAPGVGPITAATMLVLLCNPEVFKNGREFAAYIGLAPKSSGSGGKNFVTHIPKKYECKNEVRTLLVQCAHAICRSRHKSDWVSSILARKPKKVAIIAVANKLARQLWIMAKKGEKFERRFILAAV

SEQ ID NO: 353811 - protein, 338 aa, unidentified
MSLQKTFFIGVDVSKSSLDVAFCTSPNEIIAFKKFLNNQQGFKKIEQLTKTLAAKYECLDVHFCMEATNIYSDALGEFLQDKGFKVSIMNPAQTKFFCKSLMIRTKTDKTDAEALAFYCCIMKPKVTPKTSDEVKRFRGLVREREYLVRDRAKEKSKLDSVQDEFVRKITNSLIAHYDLLIKEIDKEIKAHARTYLHLQEKLELLKTIPGISDVTSQLFLSEIHIHEEEKLCVKSQTAHAGLAPQQFQSGTSVRGRSRINKTGNARLRTCLYMPTLNAIRTNPIIKEFYKRLLENGKPKIVAIVACMRKLLTLMIGVINNNSAFDPNWSKNRVVLVGC

SEQ ID NO: 353812 - protein, 370 aa, unidentified
MKTNTITPVVPTLTPAMIVPGGFTLGLDLGDRSHHVCVMDDTGQIVREGALCNSRPALAKLLAEFPRATVAMEAGTHSPWISRYLTGLGAHVLVANPRKLHAISRNERKCDRRDAQMLARLARVDPALLHPIQHGSAQAQHDLLGLKLRDALVRTRVNLINAVRFTLKSLGHSVRNPSSESFHKTVLADIPADCLPVVQPLLAVLTQVTEQIKGMERDLVQRGKQEYPATQRLQQIAGVGPLTALCFVLKIGDPQRFSRGRDVGAYLGLCPRRDQSGGTDKQLRISKCGDGLLRRLLVSAAHYVLGPFGPPCALREHGQRLTGTGSAREKKRAVIAVARKLAVLLLSLWKHGTDYEPRATASPVLVMVPA

SEQ ID NO: 353813 - protein, 478 aa, unidentified
MPACAVHESDRGFSMKGDKRRRQIKQRRISRHLEQVNLFAAGIDIGSQSHYAAVPEELDSEPVREFGCFTGDLNRMADWLVEIGIQTVAMESTGVYWIPAFEILEARGLVVLLVNARHVKNVPGRKTDVQDCQWLQQLHTYGLLEGAFRPPEETVALRTYMRQREMLVQRASDHIRHMQKALRQMNLLLDNVVSDVDGVTGMKIIRAILVGERDPVVLAQFRDKRCKQDKKTIAASLEGHYREEHLFTLKQSVELYDVYQQQIASCDATIQSQLDRMESRGDKDDLPPTKKRKTKSSLDFDVRGELYRMTGVDLTRIDGFNETSVLKILAETGIDITPWPTEKHFASWLGLSPGNKITGGKILTSKTKPSANRAAAAFRMAAFGLFNSKSALGAYYRRQRTRLGSPKAITATAHKLARTFYSMLKNGSEYVDQGQDYYEKQYRDRATKKLKKRAAFLGFDLVPNKEEKNMPDAELSTT

SEQ ID NO: 353814 - protein, 360 aa, unidentified
MIIIGCDVHPEFQQVAMVDTETGEYRQARLQHPEQARTFYAALVGQEVLVGFEACGYTQWFERLLSEMGHQWRMGDAARIRAAQPRRQKTDQRDADHLLTLLLEERFPAIWVPSPAERDVRQLLMHRHKAVQMRTRVKNQLQALAINQGLRLRHQLWTQRGQQQLQALELLPYAAQRRQELLALLDQMERMRAPLDAAVAREAAARPAAVRLMTHPGVGPVTALAFVLTIGDVTRFARARQVASYLGLIPGEDSSAGKQRLGRLSKQGNALLRFLLVEAAHHARRGDPELRRCYARLSHRHPSGVAKVAIARKLAVRLYWMLRADLEYAQLKVVRMPASPSHPVVARTIDRLSGPPASRP

SEQ ID NO: 353815 - protein, 433 aa, unidentified
MQDVQDEPLFCERVAGLDIAKAEVEVTIRVPSDTTAGRRQQETRTFGTTRRELESLGDWLACWGVTRIGMEATGDYWKPVFFLLESRGFDCHLYNAAQVKALPGRPKTDRADSIWLARITERGSVCSSFVPPEPIRALRTHTRYRRHLTQARTAEKQRVEKLLEDGHLKLSSIISDIHGVSGREMLNAIAAGQRDPRVLAQLARGTMRAKIKRLEEALDCAFFTGEHAAVLAMMLATIDHYTTQIDNLTAKIEVLAEPYLHQIRQLDEIDGVGPVCAQDIIAEIGTGMTVFPTAPHLVSWAKWSPQVKQSAGKRKGSNATGRGNPYLSAALGEVSISAGRTQSFLGAKYRRLARRMPKKKALVATGNSALTIIHALLSDPAARYTDLGPDYYEQRMHARRQARNHVRSLERLGYKVTIQAINPDTGELLAAAG

SEQ ID NO: 353816 - protein, 415 aa, unidentified
MEGLQPLHRRVAGIDVHRMLHVVTVLIEQPDGSIEQMSREFGGFRRDCRALAEWLAELRVELVVMESTGIYWKSVHAHLENAGIAAWVVNAHFIKHVPGRKTDMSDSQWLAVLARFGLVRASFIPPKDLRELRLVSRYRRKLTQMHSAEINRLHKVLDDAGIKLGGVVSDINGVSATAMVTGLIQGQGIASLLGLARGALKLKRDDLQAALDGDLSARHLFVLKHIHAHIESLQRELADIDAYLLGAMQPYALAHGLLQTIPGIDRIAAALILIEIGDDMQRFGCAERLASWAALCPGNNESAGKRKSGRTRHGNGVIRYILCECANAARWTRSSLAAKYRSLTVRKSHKKAIVALAHKMIRLIYVLLTRKQVYLDQHIDYAAMSAKKNAPRWIKQLKLIGKWPAPQSAPATASA

SEQ ID NO: 353817 - protein, 405 aa, unidentified
MYDELAEAAVPEIWAGVDIGKEHHHCVVINAQGKRLLSRRVLNDETELLKLVTDVLELSQDVLWAVDINHGGAALLLGLLVGHDQHITYITGLAVHHASAGYRSQAKTDAKDAFVIADQARMRTDLGVLRPGDEISVDLRTLVTRRTDLVCDRTRQINRLRAQLLEIFPTLERSLELTKKGPVMLLTGYQTPAAIRRAGVARIATWLKNRKVRGSAALARTVVEAAETQFTTLPGEKLAATMVARLAKGVMALDEEIAELDALIEARFREHPHAEVIQSLPGMGTLLGAEFLAATGGDMDVFGTADRLAGYAGLAPVPRDSGRVSGNLHRPRRYHRGLLRAFYLSAFASLRGCPASKRFYERKRAEGKGHKQALLALARRRANVLWAMIRDGACYQATPPVTATA

SEQ ID NO: 353818 - protein, 401 aa, unidentified
MSKKNTRNALDTSLSYAVIGLDLAKADCAVAAVPCADDELGLIDRMDYESLFEQAEKLGPTLFAMEPCCGYSQISLRLQNMGHEVKVISGHAVKNWIATHKSNQKTDLNDATALAKLALYDHDLQPIRVKNVEECRIASVQAIRIQLRTQATKSLVCFKSLCQCWGIVIRRGSLNTKKMAEAVAAVEKLLGVEVASSLMILRDAYKFTMKQINALDKLLDALVEANEQARTMKTVLGIGTQTAARLAVTTGDIKRFPMPRSYVAYFGLAPRNIITGHSGTPSPSKRDALKPVSSRGQGKVSRRGDRVARSFIIQGAATIYMLYCKDMLPECQLRRWLHEQIKRGKPYGKIIVSLAAKLLRIVWALLTYGEKFDIHKAGVPRSVLAAMEKPLKHDAAAESAA

SEQ ID NO: 353819 - protein, 351 aa, unidentified
MEKRNTVFIGCDLGDRFSEVCVLDAAGAVVDRSRVRTTQQGLEKYLARFDRACVVIEVGVHSRWVAELVEGSGHQVVIANPRQVRLIWQRRTKTDRSDALLLARLGRVDVELLAPVQHRNRGKQIDLTALRSRDVLIGARTKLVNHVRGTLKPFGLRAEDCGTEAFPDRAEGVIPPELLPALAPVLAAIRTINEQIAHHDRQIEQTASTIYGETTRRLTQVNGVGTITALAFQLTLDDPARFRKSRFVGGFLGLVPAKDQSGDLDPQRHITKTGDAFVRKLLVQCAQYLLGPFGPDSDLRRWGLRLAERGGKNAKKRAVVAVARKLAVLLHRLWLSGERYQPLGYSSQQAA

SEQ ID NO: 353820 - protein, 460 aa, unidentified
MGKNTRDTQTLSIGNSKLIPKHLEHINLWAAGIDIGATAHFVAVPEGSSETTVREFKTFTSDLYALADWLKQCGIQTIAMESTGVYWIPVYEILEEKGFEVKLVDARQVKNVSGRKTDVLDCQWIQQLHTYGLLNGAFRPVEGICELRAYVRQRSMLIQSASRYIQQMQKALTQMNVQLHHVISDITGDTGMRIIRAIDKGERDPSILAEHRDRRCKSSIDDIKSALTGNYRAEHLFSLKQSLELYDYFQEKIQACDDEIEKNMAKFLTDSKVVDTPLEQLNPNKKKVTKNSPTFNLGRELHRLTGVDLLAIPGINNVSALQLIGEIGLDMTQWKSAKQFASWLGLCPGNKVSGGKRLSGKTKPSNNRAAATLRMAASTLYRSQTALGAYLRRLKSRKGPMKAITATAHKLAKIIYNMLRHGIEYKEAGQAYYEEQYRGRIIKNLKRKAAELGLNLVEMT

SEQ ID NO: 353821 - protein, 425 aa, unidentified
MNYKQNEKINQVKESTLVVGIDIGSTTQYARAFDWRGIELGKVFTFSNSREGFEAFKAWMQHLQDKYRKSDVIVGIEPTGHYWFDLGAYLEDEGILLVMVNPYAVKQTKELDDNSQSKNDRKDPKVIAKLVTEGRYSAPYTPDGVYADLRIMVANRKRLIREMTQIKNRFARWFAIYFPEYTDVFGDYEAQSSMLLLKKVCTPEAIVELGAEKINQIWRDAKLRAVGMKRATTLCETAKRSIGLKKGSSAARYEMKLLLEDYEYKKAQLDAVMEEIEKLCRKIPESEQMLAIKGIGVITVAGFLAEVGDVRRFESPRQIQKLAGLSLRENSSGKHKGQTTISKRGRSKLRAVLFNAAIPLIAKNPEFKSLHEYYTTRANNPLKKKQSVIAISCKLIRVFYAILANGVTYDAQKMLSDIHRQPQAA

SEQ ID NO: 353822 - protein, 287 aa, unidentified
MAEVVTIGLDIAKSVFQVHGIDAAGAVVLRRQVRRAHLLLFFAKQPKCLIGIEACASAHYWGRELSKLGHQVRLMPPSYVKPYVKRQKNDAADAEAICEAVTRPTMRFVEIKSPEQQSVMVLHRVRMMLMRQRTQLSNAIRAHMAEFGLVAPIGREGLQNLIKLVETSDARVPEEASACLQLLATQLKLLNSQILATDRRIRTSARATETGRRLMGIPGVGPLLASALVATVPDPKAFKSGRNLAAWVGLVPKQNSSGGKERMGGITKQGDRYLRQLLVVGAQSDFR

SEQ ID NO: 353823 - protein, 349 aa, unidentified
MLIVGCDYHPGFQQIAFVDTETGEFEERRLQHRGEAEKFYRDLAARGVKVRVGMEASGHARWFERLLAELQLELWIGDAAEIRAKRVRKQKTDRQDAQHILTLLVQDRFPRIWVADWENRDLRQLLWHRHRMVQTRTRIMNQLQAVALNEGLRCKKRLWGKKGRQQLEGLRLAPWATRRRRDLLELLRLNPVIAELTHEIEQEVEKCPAAQRLMTHPGVGALTALAFVLVIGTAERFQCGKQIASYLGLVPAEDSSGERRRLGHISKQGSAILRFFLVEAAQVTVRSVPEWRSKFFHLAMRRGRKIAKVAMARRLAVHLFWMWRKQWDYQQLNEFGPYAGKPGTGVGVH

SEQ ID NO: 353824 - protein, 372 aa, unidentified
MKKSTTKLFIGLDVHKDSIAVAYAPEPRGAEIISLGSFGTRPCDIDKFLKKLLAHSCNLLFTYEAGPCGYWLYRLLTKKGYPCLVVAPSLIPKRPGDRVKTDRRDAIMLARTLRAGDLTTVYVPNVQDEAIRDLTRSREDAKRDLRAAKHRLKSFLLRQDIRYEGKANWSLKHLRWLATVTCETSAQQFVFQEYVHAITERNERVERIEAELLAQVDSWRLKPVVTAIQAMRGIQFITAATLISELGDITRFDNPKQLMAFLGLTSSEHSSGNKRKRGGITKTGNSHARRALVEGAWSYRFPAKISRQLQCRLELVPKEIQAISWKAQVRLCKRFYRLTTSGKHRNKVVVAIAREMAAFVWAIAMQTPIKGV

SEQ ID NO: 353825 - protein, 343 aa, unidentified
MQVVTTVGLDIAKSVFQVHGVDAAGQVVIRRQLKRRYVLAFFEKLPACLVGIEACASSHHWSRELKTLGHTVRLMPPAYVKPYVKRQKNDTADAEAICEAVTRANMRFVATKTPVQQSCLTLHRTRHLFIRQQTAVINVIRAHLAEFGIVAPVGRKGIETLLDVVANPTDKRVPVIARACLAALGAQLRRLKEQILEFDRMIMAWHRSNEASKRLDAIPGVGPVLATALVASIADPKAFRSGRNFSAWIGLVPKQHSSGGKDRLGNISKQGDRYLRSLFMAGALAVIRHAKIHGTTHRPWLTALLARRPTKVAAIALANKMARMVWAMMTRGERYKDPIALAA

SEQ ID NO: 353826 - protein, 465 aa, unidentified
MVRKQESTDLRSGRQRRRAKLKPQDWALGLEVVHPKAAGIDVGNEEHWVAIPPSLDEEPVRRFGCFTADLMALARWLQERGIETVAMQSTGVYWIALYEILEQHDIHVFLVNARDTRNLPGRKSDVQECQWLLKLHVYGLLKNSFRPPEEICVLRTYWRQRQQHIADASRCVQRMQKTLTQMNVQLANVISDISGWTGQAIIAAILKGERDPQQLVKLCDPRIKASPATVARSLEGNWRPELLFVLRQEREAYAGFQSRIAECDQALERHYRSLASKADAHALPPVRREKRPHGNVPDNFQLRGELYRTAGVDLTAIDGLNVLTAQTILAEVGSDMKQFETEAHFVSWLGLCPNNKISGGKVVGRDRRKTVTRAGLALRMGASTLLRSQTYLGAQYRRLRTRLGAPKALKAMAGKLARIVYRMLKYGETYVDKGKEFYEQNHRQQQIRMLTKRATELGLQLVQSA

SEQ ID NO: 353827 - protein, 386 aa, unidentified
MRGKPEERFSPPGFHKRSIPMKYVGVDLHKKSISICVVVLEGRKRKVLARKRFACQDVDGIYQFFRELGTFQVVVEATASYEWFAGLVERLADRVVLAHPKKLRIIAESKYKTDKIDAWVLAEFLALDMIPEAYRPTPRQREHRALVRYRYYVQKRTVSVRNKMRHILANYNADVKELFTAQGLAYLGEQKVSAADRFVLNHLLEEWREHRRRLAEAEKQLETFAKEAPLAEQESRHVLATFPLAGPVTIDIVLSEVGDVKRIRSLKRAGSFAGLAPGFRESAGRRKEQGITKEGPRLLRWAMIQLAWRVVGRTAYWGGIFAKLEHRVGKKKAIVAVARRVFCVIMSMLRSGQAYRTPGGEAAAGGDAAPRPAKGAHPGDVPAGLG

SEQ ID NO: 353828 - protein, 404 aa, unidentified
MNAVGIDVSKGISMVAALRPMGEVAITPRSFPHTPAELENLGYLILSLGEDTRVVMEATGRYHEPVAAALHEMGIYVCVLNPILIKQSGGGSVRKVKSDKKDALKIAKYGLDNWNKLREHTPMDATRQQLKLFSRQYNLYMNTAVSLQNNLISLLDKTFPGANELFKSPQRADGSQKWVDFVATFWHCDCISRVTEKAFVERYQKWCKRKGYYFSLEKAEDLYASSAGNITTLPKNDNTKLLMTAATTQLTATANTLATIRAEMIRLAKELPEFNTVRAMYGVGDITAAQLMAELGDVRRFDNRGSIVGFAGVDPSVNASGKSERMSNPSTKRGSPHLRKTLYQVVCTHLRRSPIDEPVYRFLDKKRSEGKPYYVYMTAAANKFLRIYYARVKECLNALDKTES

SEQ ID NO: 353829 - protein, 412 aa, unidentified
MQVLYRRCAGLDVHKRTVVACVRRVESAGAVSSVRSFASTTAGLLQLSEWLAQSDCTHVAMEATGVYWKPVWHVLEADGFALVLANAAQVKNMPGRKTDVSDAAWLAELLAHGLIRASFVPDAATQELRNLLRTRKQLVREKASHTQRIHKTLEDANIKLDAVIASVLGQSGRAMLEGLIAGECDPTKLAALAHRKLRVPKSELRAALDGRVTAHHRFLLHLHLDHIDAVEKAIAAIDAEVARNLEPFRAAVQLLSSIPGVGTLAAEIIVSEIGTDMRRFPTAGHLLSWAGLVPRNDESAGKRRSTRLRQGAPWLKTTLIQCAWASSRKKQSYCQAQFHRLRARRGPKKAICAVAASLLTAAYHMLSTGTPYADLGPHHFDRRSSAQHVGRLLRRLRDLGYAAELTPLPSAA

SEQ ID NO: 353830 - protein, 315 aa, unidentified
MNSKEVFVGIDVSQDHLDIGVHPTGKTWQLVHDEAGKGQLCQELRKLKPDLIVMEASGGMESALAVKLQEAKLPAVVVNPRQVRDFAKAHGILAKTDRIDAQVLARFAERIRPEVRPLPDEAQRALGGLMVRRRQLVIMMTAEKNRLRRASKEVAQGIQDHIEWLKRQLDEVDREISRRIQHNDVWKQKEKLLKSTPGVGPVVSRSFLSGLPELGTINGKKISALVGVAPFNCDSGKFKGRRRIWGGREHIRSILYMGTVAAVRWNPIIRSFFLRLVKAGKSKKLALTACMRKLLVMLNAIIASNKPWKYGKVVY

SEQ ID NO: 353831 - protein, 432 aa, unidentified
MERIRENAAGIDIGARKVFVSVEGKEVKCFFTFTEDFEKLRDYLFENAIKTVAMEATGVYWNILYEILEEAGIDVWLVDGCQTKQVPGRKTDVKDCQWIQQLHSYGLLNRCFVADSDIKELRIYQRLREDHIRSASMHINHMQKALTEMNIRLTEVLNQIHGASGLAIINAILKGERDKEKLLKLCHIKIIKEKKEEVLKSLNGRYTKSGLFALKQAFDSYFFYQNQIKQCDAMLEEVLKRMSNGKPNQTNSSHRKPIRHNKPDIANLGSTMLKIFNGKDATALSGITDYTWMQLLSETGTDLSRWESEKHYTSWLGLAPGQHTSGKMKKNKRKKGRPKAGQIFRQIAQSLLTSKRIALGAFGRRLSSRKGSPVAIKAVARKLAELYWRIMVKGMDFVEKGIQKYEEQLMAQKQRSIIRLAKELNMQVTYNV

SEQ ID NO: 353832 - protein, 396 aa, unidentified
MSSWQVFVGLDVGKAEHHCVALNAAGERLADRPLPNDEQALRALFGQLAGQGVPVVVVDQPASIGALPVAVAQAMGLDTAYLPGLAMRRIADLHPGEAKTDARDAFVIADAARTLPHTLRSVDIAGPALADLAVLVGYDDDLRDQVTAGTNRIRNLLLGIHPALERALGTDLAHPAVLALLARYGGPSGLHRAGKARIDAVLAKKAPRMHAQLADRIWTALGEQSVVVAGTAAVETILPRQADALAGLLDQRKVIAAEVEKVLDDHPLAEVLTSMPGVGVRTAARILVEIGDASSFPSAGHLAAYAGLAPVTRRSGSSIKGEHPSRSGNKRLKNALFLSAFAAPHDPHSRAYYDRKRSQGKKHNAALICLARRRTDVIYAMLRDGTHYSSRTPKAA

SEQ ID NO: 353833 - protein, 342 aa, unidentified
MGQVSTIGLDIAKRVFQAHGADSAGNEVLRKKLARDKVLMFLASQPSCVVALEACGGAHHWGREIAKLGHRVKLIAPKYVKPFVKRQKNGAADAEAICEAAQRPTMRFVAVKSAEAQASALVFRTRDLLVRQRTQIINALRGHLTEYGVVVAQGPAHVTKLIEYVKDPKCDLPQEALSIMPVLIASLKDLDEKITLLDREIAKRAREDQVARRLTTIPGIGPIIATAIAALAPPVETFKRGRDFAAWVGLTPLQRSTGGKQKLGATSKMGERTIRRLLILGASAVVRQVVRRGAPQGSWLARMLARKPRMPVIVALANKMARIAWALLAKGEVYKAPVAVAV

SEQ ID NO: 353834 - protein, 487 aa, unidentified
MHPRTTNKFLETFDVYRFSFESAGALALDNEYSGFAVLPAHYIAFAERKRARPWTSIYHCGRYDVKPLATQQFTAYVGIDWADTKHDVCLQVPGNELREFDCIRHQLADIDQWAQSLHQRFGGPIAVALELAKGPIVYALQKYDFFVLFPINPLTLAKYREAFMPSRAKDDPTDAELALDLLMRHPERFTPLRPQSVQMRTLLSLTEHRRELVGDKTRFTNRLTNTLKQYYPHALDWFEQHDTLLFCDFLTRWPTFPQVKRARRASLEAFFYAHNGRRPNVISARLGAIKAAIPLTEDMGVIAPCRLQVLVLIEQLRTTLQAIDRFDREIAQLAPRLPDYCLFQDLPGAGPHLAPRLLAAFGEDRQRYQHADELQKYAGIAPVTERSGKKSWVHWRLRCPTFLRQTFVEWGGRPLNKSFWAGAYYRQQRAKGSSYQATVRSLAFKWIRILHRCWQTRTPYDESAYLNALRKRGSPLLKHLELDAQSA

SEQ ID NO: 353835 - protein, 355 aa, unidentified
MDSTKYIGLDVHKETISIAVLNSSGKLVMETIIETKASMLVQFVQGLRGNLHVTFEEGTWAAWLYDLLKPQVTKIVVCDPRRNALLKEGNKSDRIDARKLAELLYLNKLKPVYHGEHGVRALKELSRSYLTISGDLARVMTRLKAMYRSWAIPCAGKQVYAPRYRSEWLGKISEAGVRRRAEFYYQQLDALRALRQQVRRELLAESGKHKASKLLCQIPSIGPIRAALLIAILQTPHRFRTKRQLWAYGGLGIETHSSADHRYVEGQLRPSKRPVSLRGLNRNHNHELKNIFKGAAIIAATKAGPFQEFYAALVAKGIRPEMARLTVARKIAAITLLVWKKGVCFDAQHLKPQTA

SEQ ID NO: 353836 - protein, 422 aa, unidentified
MVLKGVPMALKIVYQICCGIDVHKTFVVACIASTNKQGVTTYKRHRFSTFTQGLKELLQWLLDNHCKDVCMESTGKYWIPIYNVLEKDCNIVLAHPKYVKAIRGKKTDKKDAKWIADLFKHDLVAGSFMPPADIRQLRDLMRYRFKLTCFMSSEKNRLQNCLTVSNIQLASVVSDTFGKSSQRILDKILENPDDTSFDIEPLIHGSMKKKLPELELAIDGFITPEQAGKLKVIKKHFEDLESRKAELEKLILALASPYQQELDLILTAPSFKNKFTAIGIISEIGVNMEAFPSAKHLCSWAGLTPTNNESAGKKKSVRVSKAGCYIKPLLVQCANSVVKSEKHPEIRNRYLRLRKRRGHKKAIIAIARMLLTALYNMLKNKEPYNAELYRKSDVLPVNREITIEQAILMAQFQGYKIKSAAE

SEQ ID NO: 353837 - protein, 427 aa, unidentified
MKGNQLNQRLEEITAGTLIVGIDVAKSLQWARFVDYRGVEVAKTMSFKNDKIGFENIVSEIEKICKTGFQKVIIGMEPTGHYWKTLANYLINRGYKVVGVNPYHTKRAKELDDNSPTKCDKKDAITIARLVKDGRYFIPYLPQDIYAELRALTNARTSLMKRNNAIKNTVVAVLDEYFPEITQVFKYVLNGKASRQILKSCPFPSEIIAIGTEGVLEEIKKAVKKSVGIKKSEQLVEIAKTSIGVEYGLISTKIKLQGMLAELELLEKNLENIENMMEEMLMKTGYGEQILSIKGIGIVTGSMFLGEVGNPLRFNNARQISKLAGYDLVEDSSGKNKSGTVISKRGRKGFRSVLYQMAFTMVGKNPEMKELYRHLLIRKKNPLKKKQALVVISKKIITIIYSLIKKQEKYKPDRVFGAVRQEMLLAA

SEQ ID NO: 353838 - protein, 346 aa, unidentified
MNKHDLCGIEVSAAHLLAGLEREGGSGTRREFPNTPQGHQALVNWLLAPGRTVRVVMEATGLYGLDLALRLDAETGIELMIANPRAVRHFAHALMKRSKNDPIDVGVLLEFARRMPFRPWVRPSPAALALHALAHRLESLTEMRAAEKNRLHAAKLSLALPAAVVRDLQRSLRSLERALVRITRQAVEVIRQDPGLNLRYQLLLSACGIAPTSAVQILAQLAMLAPDLDVRQWVAQAGLDPRQYSSGSSVHKKTRISKTGNRHLRRALYMPALVAIRHEPHLRAFYQRLVARGKTKMQALVAVMRKLLHGIFGMFKHQQPFDGSRLCPLPDEISRPQPSFSTTEAA

SEQ ID NO: 353839 - protein, 332 aa, unidentified
MKKKQIIMGIDVSKATLDCFIHGNVGKHFIVENNSKGFVTLLETVLKFSKCSKEDLLICFENTGKYSKMLSVFLDTHNISFAMVPALEIKKSLGITRGKNDKVDSRRIALYAYEKREKLVLTVLPGEKIDRIKSILSLREKLVKHRTSYKNGLSDLNDCYKEGETIFLRDVQQRMIAVLNEEIEAVENEIETIIKQYPLMNKNFELILSVRGIGKIVGYYLIAFTANFTTFIDARSFACYCGIAPFANSSGIITGRSRVHPIANKQLKSLLNMAAMSAIQLKGEYQTYYKKRVEAGKNKMSTINIIRNKLLFRAFAVIKRGSPYVDLFKFAA

SEQ ID NO: 353840 - protein, 386 aa, unidentified
MAQPNDDLSRSLVVLEQDKTLISVVELSLSTWLVGGLVPGVERDPLKKIAPDPQILLKLLHRWRDEAIKAGQTIQRIAVAFEAGRDGFWLARWLRGRGIEAYVIHPTSIPVSREQRRAKTDRLDIGLLKRSFLGWLRGERKHCSMAAIPTLEEEDAKRPNREREHLVGMRTRIINRMKSTLIRLGLRSFNPKLRKAPERVATLRTPEGALIPPNTLVELRRDMAHLRFVDEQIAEIENAREERLKQAPECEANARVLELKRISYIGIETADMLTHEVFSRTLRDQRAVSRYAGLTGSPDGSGKHRRERGLAKAGNARVRHGMIQLAWRFVSHQKESVLVRWYEARVAAGKKKTTMIVALARKLLVALWRFVTDGVVPEGVALRPAQ

SEQ ID NO: 353841 - protein, 404 aa, unidentified
MEQVTTIGLDLAKRVFQVHAVNAAGAVRVRRSLRRKQVLTFFAKLPPCLVGMEACATAHYWAREIAKLGHDARLIPPAYAKAYVRRNKNDPADAEAICEAVSRPSMRFVAIKTEVQQAAAGIHKVREMLVKHRTMLINSLRGLMAEFGIVVAEGPQHVDELVAIVADPADKRIPTPLHEGLLAIVETLRGLKRRIEIVEKQIVGWGRNNQTCRHLITIPGYGPILSSAMAAFAVDPAAFASGRHFSASLGLVPRQDGTGGKVKLGPISKRGNGYLRRLLVNGAMSVLCSKRAKEDPWLAKLLETKERKVAACALANKMARIGWAVMMRQEDFRRRRHDQPCPDPRQSGAVLAAVKTASRAPAAVALPLVGPVLTAAARGAPRNPGRDGETVLRSNKETGSSCHA

SEQ ID NO: 353842 - protein, 402 aa, unidentified
MYTVGIDVSKGKSMISVMRPGGEEVLRPFEVHHTSHDLTLLCDKLKSLGDETRVVMEATGSYHLPIAWLLDHEGFYVSVVNPVLIHGYGNNSIRRGKTDRKDALKIAGYGLQYWNELPRYMPQDPARQLLKTCYRQYQEYSKTSSVFKNSLISLMDLYFPGVNDLFTSPVRPDGSQKWIDFVAAFGHCDCVRSLSERAFITRYQRWCAKHSYQFSPDKAKKIHAFALNCVAVSPNSKTVRILVDTAVSQLRTNLISLAAVRAQMQALASSLPEYPVVMSMFGAGPSLGPQLMAEIGDVRRFHSKKALVAFAGIDAPPCQSGQVNVLSRSISKRGSPALRRTLFLVMNVINMCSPAEDPVYQYMAKKRSEGKKYQVYMMASANKFLRRYYASVNAYLGTLGSN

SEQ ID NO: 353843 - protein, 369 aa, unidentified
MEKDTTYVALDDSKRKIVVGILRSGDTQPELREIANDPRQIRRLFERLKREGPVAACYEAGVSGYDLHRQLIALGVAGAVIAPALTPRRPGQRIKTDRRDAAKLVRLFRAGELTAIHVLDESEEAVRDLVRCRDDIRRDVLRWRHRVLKLLARHGRACLTGKNWSRAHWQWIREQRFDLPPLPRAFEATLFALEQALARQAELDQELEAVAATAAYREPVGWLRCFRGIDTLSAIILLAEVVDFQRFRRPRELMAYLGLVPSEYSSGESQRRGALTKAGNSHARRILVEAAWHYRHRPTIGRALASRTHGQPDEVVAQAWRAQQRLHRRYRHLVSHGKRTPVAVAAVARELVGFIWAAMTRHESRRAAA

SEQ ID NO: 353844 - protein, 411 aa, unidentified
MLKIVYQNCCGLDVHKTFVVACLAITDGHGITTYKRHRFSTFTNGLRSLADWLELYSCFDLCMESTGKYWIPVHNILEKRDIRITLAHPKYVKAIRGKKTDKKDAQWIADLFKHDLVAGSFMPPADIRQLRDLLRYRFKLTNFTSSEKNRFQNSLTVSNIQLASVVSDTFGKSASKIIERILENPLEPDVDLPSLIHGSLKKKLPELELAIDGVITPEQAEKMKLIKQHYEQLVANKQALETIILELAKPYAKEIELIQSTPGFGSSMMSSISVISEIGVDMTKFYSAKHLCSWAGLTPTNNESAGKKHSVRISRAGCYLKPLLVQIANAVVRSPKHPEIRNRYLALKKRRGHKRAIIAIARQLLTAIYHMLSEHVVYTPPVIKEQNQPTRAMTVEAAIQFAKQHGFRVTA

SEQ ID NO: 353845 - protein, 387 aa, unidentified
MRVAAHRAEAPSAICVDLGAIFVSLELSRSKWLITSLSPGGGEKMSKHMVAGGDVAGMLSCFAELKRKAQARTGRCLPIIVIQEAGLDGFWIHRVLQAEGIESHVVDPASIATSRRRRRAKTDKLDGEALLRALLAYKRGEPRVCAMLRAPTPEEEDRRRIVRERKALTNERIRHVNRVKGLLFGQGVSGYEPLRSDRRRRLEELKTGDGRSLSPNLKAQISRELDRIELLLTHIKDVEEARDTMLESAQAVAPAPKLLLNLKGIGPEFAAVLWSEGLSRHFDNRRQVAAYAGLAPTPWQSGIVDHEQGVSKSGNPRLRSMLIELSWLWVRHQPQSALTIWFKERVKQNGGRFKKSTIVALARKLLIAIWKYVNAGVVIEGAALKAA

SEQ ID NO: 353846 - protein, 428 aa, unidentified
MKVLYERVAGIDVHKDMIKVAIRSPGDKPWTRKTEILEYRTFYGVLQQMARELRKRGVTHVVMEASGVYTEPVYYALCEQDFIQVAVINPAHAKALRGHKTDAKDCARLAELFECGLLRGSYIPAPELKEVRDLTRYRMKTVQARTSEIQRLGKALESAGIKLGSVASSITGTSSTAMIEALIDGERRGPVLADLAIGRMRTAGKLADLSMALAGRFTEHHALLCRLHLDRIAGFDDAADGLDKQIAGKAARWQRETGLLTSVPGFGDVVAQAWLGEIGPAPHRHFSSHEKLASWVTLCPGNNISARKRKHGRTGDAGTYIKPMLVQAAWSAIRVRGRLQARYSRLVRRFGGDKNPAAKKKAITAIAHTLLKIAYQVLKSGTPYQDLGADFYTRRESPEQKQAWLQRQLQRLHPGCTITITISPPEAA

SEQ ID NO: 353847 - protein, 410 aa, unidentified
MRTIGLDVHRDFCEVAIIENGAIRSAPRVPTTPEDLGAFARALLPTDQVVLENTSNARAVASIISPHVERVAIANALAVKLIAHARVKTDRIDARVLAQLLAAGFLPEVYFGDDQTRVLRRRVSRRAALVKQRTAAKNEIHAVLIRSLKDRPPVSDLFGVKGRAWLASQLLAPDEQETVAGCLRQIDLFDQEIATMDVALAGAALGSTDIRRLMTIPGLDMLTATAVASAIGDVTRFPTPRHLVSYLGLNPTVHQSGIKPARMGRISKAGSSVARWALVEAAWAASKSPGPLHAFAQRVGARRGRNIAAVAVARKLAVLCWHLLTKGEDYAYQRPSLTANKIRKLELLGGAPQARGVRRTGYRNPEVASAERAIVAQAEASYARMVADWKAKRPSGKKKGAGATTGTRIR

SEQ ID NO: 353848 - protein, 318 aa, unidentified
MAKSIMACAGIDTGKRTLEVALLAEAAERLGLDNDAAGYVSLLRWLRRHRVKRVGIEASGGYEAPVVAELRRAGFVVIVFQPAQVRAYAKFVLQRAKNDRIDAGLIARCTAAATTIHAPPDPRLAPLAEHLRLVDQLGEDVACLKTRRETCRDPRIRQHWSEEIARLKGRWRRELHGLAQAIRQHPDLARRLELLASIAGIGLVTAVAILVRLPEIGRVSREEAAALAGLAPYDDDSGERVGTRHIDGGRQRLRKALYTAAFPAAFHWNDQLKTLYRRLTAAGKPHKVALIACARKLLIYANAVVQRGTPWRAKPAAA

SEQ ID NO: 353849 - protein, 426 aa, unidentified
MKFKQREAQNQRIAHISTQHLLIGIDIAKEQHVASAVNYRGIEIGRPLTFQNSEEGLKKLMRWMQTLQHQNSFSSVMIGLEPTGHYWLNLADWLAAQGLEVVLANPLTVKRNKENRDNSQSKNDIKDSLVIADCVSRGFYSAYDPNAEIYQRIRIVMNDREYWVKQFTSLKGRLLRCLDLYFPEYQRVFPDWEIVRSIATLKAFPLPEDLKQLTSHEIITAWKEKGGMKRAGGKTGLESSARLLAAARHSIGRTLGVQEARNELKRLVEEYERHSQRLKEMEQELEVLLEQAPHVTLLRTIKGLNTIVIAALLAGCGDLGKYAHGRQLLSQAGLNLTDNRSGLNEGQVGISKRGRRQLRKYLYLGTLSLVANHPQFKAWHEQNVKEKKMKKHRSIFKLIGKLARILVGMVKRGEGFQIEAAHQTAA

SEQ ID NO: 353850 - protein, 403 aa, unidentified
MNSVGIDISKGRSTVAVMRPFGEVVISPFEVRHTDSELSELARQLKSLDGETRVVMEATGNYHTPVAKLLHDAGLYVSVVNAKLVHGYGNNDLRRVKTDRKDAVKLANYGLDRWLTLPRYVPEEDTRLLLKNCYRQYRQYSKVQTVLKNNLISLLDTVFPNVNRLFSSPIRGDGSEKWVDFVAEFWHCRCVSEKSQKAFTNKYQRWCRKHGYNFSEAKAHTIHAEACGHIDVIPKSETTKLLVEQAVAQLRATSAALAALKHEMQSLASMLPEYPVVMDLFGVGPTLGPQLIAEIGDVRRFYSKKALVAYAGLDAPPNDSGDVTGRHKSMSKIGASSLRRTLFLVMSVYLQTAPLDEPVYQFMDRKRAEGKPYRVYMMASANKFLRIYYATVKACLESLEHTA

SEQ ID NO: 353851 - protein, 411 aa, unidentified
MELIVERPAALDVHKAQVTACVRVPGERGERSEQIAEFATTVRGLLGLRDWLAAQRVQQVVMEATGVYWKAPWVILEDEFECLLVNARHVKQVPGRKTDVSDAAWLCRLAEAGLLRASFVPPKPIRQLRNLTRYRKTQIAERQREVNRLHKALEDAGIKLDCVAADIMGKSGRDMLDALVAGTTDPEVLAELARRQMRKKIPQLRDALAGHFDEHHRLWIGAILAHIDFLDEHIERLSDAIEEQIRPFAAAVELLCTVVGIQRRGAQCILAEIGTDMTRFASPRHLASWAGQCPGNDQSAGKRRSGKTRNGSKWLDIALEEAAMAAIRVKANYPAAQYQRLKPRRGHKRALGAVKHSLICAIWQMLTTGETYRDLGPDYFTTRDPARHTQRLVKQLERLGHHVTLQEAAAA

SEQ ID NO: 353852 - protein, 424 aa, unidentified
MKVTFQTCCGVDVHKSFLVATIIKTTGGIEPSYQKRRFSTFNNSILEFKRWLLENECLDVCMESTGKYWIPVFNLLEDEINVTIANPKWVKAVKDNKDDTKDSKWIGDLFRLGLVRGSYIPCKKIRILREFTRYRYKLVSCRSSEKNRYQNALTVCNVALDSVVSDIFGKSSTSIIDYLLEQSGTSIDHEVIASKLLKRLKAKEDAVIESIEGYQMTDSQKYRMHLVRTHMDHITAAINDVDSEIESLITSDPDYQNAIELLCTIPGVKHDSAVTIISEIGIDMSQFCTSKRLCCWAGLTPGSNESGGKKKAVRITRAGVYLKPALVQCAHAAVKSDKSPYYKKKYESLVKRRGKKRAIIAIARMILTAVFQMLTTGEAWNPCDLYKIDMPEILLEKQKQKAIKQAQKLLIREGLLPPIETVAS

SEQ ID NO: 353853 - protein, 372 aa, unidentified
MNQNIVYVGIDVDDVRYHGSALNPSTGEILAFHCRPTLKGLVGQLAKVQGYFGEAQLKLCYEASYVGFSLQRDLRDRGYDCAVVAPSSIPRRAGKSVKTDRIDAAELAEFYANGLLTIVATPEAQLEQDRDLLRSRQQLKQQQGALRRHIQSLLRRNGLHYKVETQHKTLWQTHHYGWLDRTIEGCSGSLKVNLSLLVRQLKSLDETLAAYGEAVETLAAAPKYREPVKALTCYKGIKNLFALTMITEIGDVKRFAHPRQLVSWVGMDIREYASGGKSHRFGITRQGNPYLRTAFIEANQRGYRSARLGKDLKARRANSTPQYIAIADRCLRRLNKKGNRLLLAGKHPNKVKVACAREMVGFIWESLNRAAA

SEQ ID NO: 353854 - protein, 351 aa, unidentified
MKIGNTKTIGCDLGDKRSAICVVDADGKVIKESTVATERESFLRFFTKHAPSRVVLEVGTHSRWVSELLGGLSLEVIVANPRRLGMISGSLSKNDRSDAEMLARLGRADELLLAPVLHRSTQAQADLAVLKSRDAVVCVRTKFINILRGLLKSFGLRVPRCTAEAFAKRAKGVVPPMLEAALGPCITLIESTNEQLKVLDKSIEALTKTKYPETARLQQVTGVGPITSLAFVLTVESPTRFAKSRTVGAFFGLRPKQDQSGDSDKQLRITKAGDGFVRRLLVGCAQLILGPLGPPSDLRSFGERLANRGGKNAKRRAVVAVARKLAVLLHRLWVSGEPYVPLGYRAQRATA

SEQ ID NO: 353855 - protein, 268 aa, unidentified
MQWSAFDEGGVEAARGVVVPERDGLSDLAERASRHGAPVLAAIVSMTGSRFVHDQLELRGWDVRIADAQRVKGLAPLACKRDRIDARVLAELAWRDLIAEVWLPDAAVRAERERARFRLHLVKHRTALKSRIHQTLVAHGVPCPGSDLSGVGGRRLLRELELPEPWRGNVAASLALIDQLSAQIDSCEAELRRLGATHPYLRQLVTVPGIAWILAYTIGSEIADISRFRRPAKLVADTGLCPRVYQSGERDRRGTTGQERGPATCVGR

SEQ ID NO: 353856 - protein, 413 aa, unidentified
MNYIGVDLHKKSITVCVMDQNRKVLARKTINCKETNEIVDFFRKFRPFKVVVEATASYPWFVELVEPMADEVILANPKKLRVIAESTKKTDRLDAQILAEFLVLDMIPRAYQPTPRQRQHRALVRHRQYLQGRITSVRSKIRHILSNYNADRKDLFSAKCGPAYFKEVPLSDADRFVIKQLWALWQEFVAQREALTKKIKAFVAKAPQREAEDRALLKTAPGVGFVTAEVVLSELGDYSRFRNSKAVSAYAGLAPAVRQSGDKRSKDMRITKEGSGLLRWALVESAWRLVGTSPKWSAMYARLKQRKGSKRAIVAVARKLLCVLYAMLRTRTPYKIVATETKAPQKTRKRLVLVRTSTAEQTTTTETATARTTRKRSAKAPVVEQTTTTQAAVPRVTRRRSSRTLAPKQTTTA

SEQ ID NO: 353857 - protein, 352 aa, unidentified
MREQRNKISFRGQKIYVGIDVHLKSWSVTVLSETSVLKKFSQHPSPEALYGFLTRSYPGAEYHSVYEAGFCGFWIHERLTALGIDNIVVNPADVPTKSSEKLRKTDTVDSGKLARSLRANELKGIYTPDSVSLEMRSLIRLKNSITKDTTRQKNRLKSQLRYLGIEIPQEFLTPFSNWSKEIETLTPSGRQALDIHIRHLEELRRQKLEMTRALRTLAKTDRFREPLRLIMSVPGFGQATGMAFLSEICDITRFRNAEQLAAYIGMIPMCHSSGEKDGTGDITIRKHAVMRCNLIEAAWVAVRQDPAMNLFYTEQCKRMPKSKAIVKVARKLVNRLFFVLKHQTEYVNSIVS

SEQ ID NO: 353858 - protein, 431 aa, unidentified
MNYTQNSKIMQVTEKTLVVGIDIASEEHYARVFDWRGIELGKVISFENTIEGFNKFSDWIEKIKTISGKTKVIVGAEPTGHYWFGLAGYLKEKEMKLVLVNPFHVKRSKELDDNSPTKTDRKDPKTIAKLVIDGRYSEPYIPQGIYADLRIINEIRLRLTKEMIGIKNRVERWIKIYFPEYSTVFGDWSKKGSMMILNKMCLPDEIKERTSEEINKIWRDEKLRAVGRKRAEALIKAANRSIGIKEGLTSARKDIQLLINEYELKKEQYDEVIKEIEEICKKIKNVDKVLEIKGIGIITIAGFLSEVGDVSRFDSAKQIQKLAGLSLMENSSGKHNGATSITKRGRKRLRQLLFQVVMPLIANNDEFKALHSHYTVRENNPLKKKQSIVALGCKLIRVLYTVLKTGSKYDSSKIIEAIEKKKEYQEMKKAG

SEQ ID NO: 353859 - protein, 332 aa, unidentified
MNMHQQGGVANGSVKLNAGIDVSKLHLDVCVGATRQRVPNDANGWNELTAMLQAAQMDLVVVEATGGYERGLVCALQSAGVCVARVNPRQARDFAKSMGVLAKTDQVDARVLRDFADVLARHADRRKFITPMIDRARELLAELMTRRRQLVDMRVAEHNRLEHAGQRAARSIASVLKLLDKQIEAIDAHIDDHMDQHFKAQRQLLDSVNGVGPVTILTLTAALPELGQLGRRQIAKLVGVAPLADDSGGRSGKRRTWGGRSEVRSVVYMAAIVAMRHNPVIREFYERLLKAGKPKKVAIVACMRKLLTILNAMLRDQALWNATRHLKPTESS

SEQ ID NO: 353860 - protein, 343 aa, unidentified
MAYFAGLDVSVKETSVCIVDDAGKIVREVRVASEPEALLQVLTNTIYRFKRVGLEAGPLSQWLYSVLAEAGFPVICVETRHMRAVLKAQINKTDRNDARGIAQMMRVGLYRPVHVKTLRSQKLRVLLTHRKLLQSKAIAIENDLRGSLRNFGLKVGMVGTVKFEARIKKLVENLPDLTVLVEPLLIVRRVLREQLGILHRRLLAIVRDDDVCRRLMTIPGVGPVVALTYRVTVDVPARFRNSKAVGAVFGLTPAKYQSGENDRTGAISRCGDEMMRMMLYEAAQSMLVRAAKWSWLKAWAMKIARHRGMKKAIVALARRLAVIMHRIWVDGTDFRWTREVAAA

SEQ ID NO: 353861 - protein, 376 aa, unidentified
MTNVAQVGLDVHRSFSRITERDALGKVVGRGRLDHRDRAGLRERIGKWPARTPVVLECTFGWGWLSDELTAVGLAPRLANSRKVAAWREARGIAKSDRTDADLLSELPMESERWWEVWLAPPAVRDQREWMRYRMTLVQIQTGLKNRIHAVLHRHGIVQEHSDLFGTSGRSFLRDLTAPDDVTLSRSAQATLSGYLTLLEQVRRMIADVTREIRGQLTRAPEGERLRSLPGISWVLGYVIFAEVGKIERFANARRLCSYSLLTPLGYDTGDSGDEPPKGRHVGHVGRRTLKWAFIEGAHGAVLKSARFRAIFDRRTDGGKRDRNRGYIAVAHELCRMAYVIWTKQVRYKETGSARPAQTQRAGKWSKRRMSRSERG

SEQ ID NO: 353862 - protein, 315 aa, unidentified
MTGPAVWVGIDVSKATLDLALRPTGERWTLANDEAAIQSLVQDLGPHAPSLIVLEATGGFEHAVVAALAAAGLPVVVANPRQVRDFARATGQLAKTDAIDAAILALFAERVRPEPRPLPTEAAQALDALLTRRRQLLDMLVAEKNRLGFARPVVRRGITQHIRWLERRLSDVDHELGQMIEHSPIWRAKDDLLRSVPGVGPVLSRTLLGELPELGQLNRKQIAALVGVAPLARDSGTLRGKRLVWGGRAPIRTVLYMSTLAAVRCNPVIRAFYRHLRAAGKPAKVALTACMRKLLIILNAMVRSNTHWQQAPAVV

SEQ ID NO: 353863 - protein, 380 aa, unidentified
MVVKPKVVDGVDRRSSSRRREPSVSSTLGVSRPTRRRRKETPVEQQRQYAGIDLHRRRSVIVRMAEDGTVLDTVRIENDPLALAAELAKAGPECEVAMEATLGWYWAADVLAECGARLHLAHPLGIKAFSYQRVKKDETDAKMLADLLRMGRLPESWIAPPEVRELREAVRYRHKLVEARANAKAQVHGVLGKAGVKVPVSDLFGLAGNALLDSVALDDVYLIRVESLRDLVALHGREITMLDRLIARRLEGHAGYEAIQAIPGVGKVLAAIFVAEIGDVTRFERPEQLASWAGMTPRHHESDTTVRRGRITKQGSRLVRWAAVEAAMRPHSYSWLKSDYRRIATRRGKKIAAVAVGRKILTLVFYGLRDGEIRCLAEAG

SEQ ID NO: 353864 - protein, 436 aa, unidentified
MKQIVIGVDPHKLSATIEVVDQHERVLGSGRFATDKAGYAAMLGYVAQWSRPTWAVEGSNGAGRSLAQRLVADGEHVVDVPAKLAARVRLLDTGHGRKTDAHDAHAVAAAAVCAKKLRVLSENPELESLRMIVDRRDELTRQRVQTVNRLQRLLAELIPGTSKKDITVLQAKARIASVRPRDLLGKTRRRIAADELADLVAVEKKIKTLTKDLKTIVEDSGSSLTTLPGVGTIVAARVLAEVGDVTRFADRNRFASWTGTAPLEASSGEQVRHRLSRAGNRRMNHMLHIAATTQIRLDTPGRAYYRRKLAAGKTRMEAMRCLKRRISDAVFRQLLTDARADANRPVGAGPGGHCGASQESSAVDLPPHIDTSDQPLPGPAHPTLPGTKPYANPCAASAPRPSRRRGGAVKVERPTGRTTLTATSAGAHSAAPKPPS

SEQ ID NO: 353865 - protein, 369 aa, unidentified
MMFLGIDLHTNCFTCCYLDPVGSKRLETFELNTDGLARFTATLTLDTHVLVEATINTFAFVERFQQHVAQVVIANTHKLKIISFTDKKTDKVDAEKLARVIKTQVLSGEQQASSVMIPSHLVQNLRSLFSTYQLLRKQITATKNRIHSLLTQNLMPYTKKYIFGKASRTLLREVTVEPVLSYQINFLFDELEHLEWKTEQFVEKILVTAHPFMHEIELLTTMKGLSTFTAAAIMSDIETVNRFPNSKAFTSYLRSAPRVESSNTKTIIKSTNKSGRKLSIVLLSQSLNHFRDADPALKAWNDRLTQYKKKGLVRMGVCRKAFTQIYQMLKKDQPHYYSDPVVHKKKMNEYRHLLHSHGIEILEKKQTSA

SEQ ID NO: 353866 - protein, 428 aa, unidentified
MSEKKCTRLKEFRQLQKEIRGSKEHLIVGIDVAKERHNAFFGTATGKTLFRRLVFQNDREGFERLLLQAEAMRIQHGLKRVVFGLEPTATYHKPLGEYLVTGGHRVVLVSAKSVKRNRELLDGRWDKHDTKDSANVADLISQGKCLYYDYPELRLRELRSLLSLRRRLKRQEHGLRVRIRNNLLAQYFPEFDRYFGRSESESLAIVRWCLAPSVIAGLAYDEFVRLVAPGNRAIRQQERLREIWDKAAASIGCEVGEAVRFEAKLMVEGLRQIRQALGETDEKITDLCVQFPEYEYLLSIPGYGPDVSSKVLGALGNPFRFTRGTQLLKMAGLDLVADRSGKRSDGVVPVISKNGKADLRYALYQAAVVASSRNREFIMWFTNRLRGRQREKGIKTRMRVKLSAKLLIIAWTLMKKKEPFNPDYLRIE

SEQ ID NO: 353867 - protein, 377 aa, unidentified
MKKNIRFIGLDVHAETIAVAVAEASGEVRSLGVIPNRAEPVRRLVRKLGPAQSLRVCYEAGPCGYVLYWQLTGLGVHCDVVAPTLVPVKAGDRVKTDRRDAQKLARSYRSGDLTAVWVPDAAHEALRDLVRAREAAKKDQLRARHRLQKFLLRRGLQPPEGIKSWTLRHLNWVKTLRLEQFALDVTLLDYVTEVDRARERIERLERAIDQAIEMAPAAIRAVVDALQSLRGVARLSAATIVAEVGQLSRFPKPRQLMGYTGAVPSEHSSGGSVRRGAITKTGNAHLRRILIEAAWAYRYRPNIGSELRHRQAGASEEVKAIAWRAQHRLHHRYARLSARGKTKQHIVTAIARELAGFIWAVGVEVESKLATNSARAA

SEQ ID NO: 353868 - protein, 398 aa, unidentified
MTESSDYESVQVFIGVDVGKDTHHAVAINRSGKRLFDKALPNDENKLRSLISDLKQHGQILLVVDQPATIGALPVAVARSEGVLVGYLPGLAMRRIADLHAGEAKTDARDAAIITEAARTLPHALRTLKLADEQIAELSMLCGFDDDLAAQTTQASNRIRGLLTQIHPALERVLGPRLEHPAVLDLLQRYPSPEKLASLGEKKLAAQLCKLAPRLGKRLAADIAQALAEQTVVVPGTNAAAVVLPRLALQLITLRKQRDEVALEVEQRVLAHPLYPVLTSMPGVGVRTAARHLTEVACRAFASAAHLAAYAGLAPVTRRSGSSIRGEHPSRRGNKALKRALFLSAFAALRDPLSRAYYTRKMSQGKRHNQALIALARRRCDILFAMMRDGTFYTPQGS

SEQ ID NO: 353869 - protein, 428 aa, unidentified
MADAMDTTTKPHLLAIDVARRSNAVFVELATGEQRRFKMTNSAQDFDRLVQFLKATTGSWRAALEPTGDYHRPIAHRLLEAGVDVVIVSSIAQARYREAKFNSWDKNDPKDASVILDMLKHGMVMRYIDPMVAGHHDLQELSKTYYQVTRARTKVLHAIANHHLPLYFPEMQRYWQTTRTEWWLRFMLEFPTPAHVRQLSQEAFVRQAWELVGRKVEKTAKLNEIWQMAEHSAALPHAPGCLAVETFRVSLRQAQHLNELRRSLEQRAEDVLASNKDYEQLISLPGIGPIIALTVLAEVGDIRRFSHHRQFLKYCGFDLAKLQSGGQRGREQLSKRGNARLRLAFWMAGQVAVRLRENAFKDKYDRYIRSDPGNSDLRRKALTAVAAKMARVAYSIIKSGQPYRRFYEQSLPSGSIPISRAVEAALNR

SEQ ID NO: 353870 - protein, 428 aa, unidentified
MNNRFAIDNVLAVGVDPHRESLDVVGIRFPEEIVLDETFDNTPASHHALLSKAQELATEHELTLVFSLEDSGNYGYTLGRYLAQQGCRIKEVNPRMTNRQRDFYGEDKTNHLDALAAAAIALRAYERLPDVTAIQEATEATQKLSRYREQLVKEQTANLNRLHGYLANQYPAYKGFFSEVNGVTALHFWARYPTPSHLKETTQDELVDFLYEKSNHRLGKAASRKKAQQILTPIDGKHVPDLDLLTEAQGQIVSDLAQRLLQLKRSIETIETGLEETIAATGQQLETFNGIGIALAGVFIGETLDTARFDHDKDRFASYNGSAPATKGTGKHVRQVENRWCNRRLKSALDLLALNARRCEPLSTEYYQQCLDRGLDPAEAHKRLMRRLSDIVFAMMRDKTPYDPAIHQRKQQAHKAKGKSVAPTVAGS

SEQ ID NO: 353871 - protein, 408 aa, unidentified
MQVEHPVCCGIDVHKDMLTACLRRVEGNGQVSKEVREFATTYQALLALADWLAEQHCPVVAMESTGVYWKPVYHVLVGTVEVFIGNAHELRSRPGKKTDKRDAAWIAELLAHGLIRPSFVPPPDICALRDVTRTRVALVQTRSQSKNRVHKLLEDTNLKLGSVVSDLFGVTGRRMLAALVAGERDPQVLASLALGSLKRKRPQLELALTGQFTAHHGTLLAVLLELIEVLDRQIATLDQQIGALVAPLQAQIAQLDSIPGVDIIAARDILAEIGTDMSRFGDAARLASWAGGCPGNHESAGKRYHGKTRKGNRYLRRVLVQCAWGARKTPTFLGRTFRRLEVRIGKKKAALAIAHKILVIVYHLLALGTCYEETRYDQWNPRQEARERQRAIKALERLGYTVTVERAA

SEQ ID NO: 353872 - protein, 346 aa, unidentified
MGTQITGGVDTHLEVHVAAALDEHGGLLGTASFATTPAGYRELVEWFASLGTVVLVGVEGTGSYGAGLTRHLQALGIAVVEVDRPNRQRRRRSGKSDTHDAISAARAAFAGDALGEAKTRDGNVEAIRVLRLARNSAKRDRTRALNQMRALIATAPDELRSQLRDLTIPRLVRAAAGFRPARRTDVTNANRVALKTLARRVLELDAEIDMLDELLTPLVAQTAPEMLARVGVGTDTAGALLVAAGENTSRIHNERSFARLCGAAPLDASSGKQQRHRLSRGGDRQANSALWRIVITRLSSDPATRHYLERRCAEGKTKPEAIRCLKRYIARELYACLPREDWLDST

SEQ ID NO: 353873 - protein, 411 aa, unidentified
MTHPKMQYTYVGIDSHKDTHTAVFIDCFFEKLGQISFNNLPSEFDAFFDNAQQYLQHGTAFIFGLEDTSSYGRMLAVHLTNRGQRVKHVNALLVARERRNQNIVQKTDAVDAECTARVLLSKFSELPDADTQDIYWVLRSLVTRRDFLVKNKSAAKAQLHGFIMQHYPNYNQFFSNIDCKTSLSFFERYPSPGLLKHTTVEELTEFLQHTGGSYYTLDFACNMLATLQDTAVQHQEFRDSVIQSTIRQIRFDAEEIDQLDEAMSVFLKKFNCTLTSMVGIDTVTAAQILSCIGDIKKFSTPAKLARYAGIAPVTYASGKKDLQYANQHGNRELNSLFFWLAVRLSNPMSGKHRVMNSFFYDYYHRKMSEGKTKRQALKCIERRLVNIVWGMLTNNEEYINPPAYDLITKEY

SEQ ID NO: 353874 - protein, 342 aa, unidentified
MAKIATIGLDIAKSVFQVHGVDGAGQVVVRRQLRRSHVLKFFASLPPCVVGIEACATSHHWSRQLRALGHSVKLMPPSYVKPYVKRQKNDMADAEAICEAVLRPTMRFVETKSPEQQSVLMLHRIRLMLVNQRTMLTNTIRAHMAEFGVVAPIGRRGVDDLLAVLSDIDDHRVPALARDCLIAAAEQLLLVKKQVLEMDRRITACHRSNEMSRRLAEIPGIGPLLATALVVTVPDPRAFASARNFAAWIGLVPKQNSSGGKERLGGITKQGNRYLRSMLTIGALAVIRYAERHGTKRPWIVKLLARRPTKVAAVALANKMARMAWALMAKGERYREPVVAVA

SEQ ID NO: 353875 - protein, 416 aa, unidentified
MNAVGIDVSSRKSTVAVLRPLGEVVCLPFDVTHDIAGLASLAEKLKALDGETRVVMEHTGRYYEAVAKALHEAGLFVCAVNPLLIKEYGANSLRRVKTDKADAVKIARYALDNWADLRDFTPMDAIRYDLKTLNRQFQLASKQRTASANNLIALLEQSFPGIRKCFDSPVRSDGTQKWVDFAHSFWHVDCVRKQPFPAFCERYRKWCKRHAYLFKLSNAEEVYALAKRAVVLTPKSKVVKVLVQEAANQLISISRSVEVYRAEMDRLAAMLPEYPFVMAMYGVGKSYGPQLMAEIGDVRRFERKQALVAFAGIDPMPNQSGDKNVRSNKSSKRGSPYLRKTLFNVIRTYLQCAPQDEPVFQFLNRKRAEGKPFYVYMLAAANKFLRRYYAKLRDYFASLDTLQPVDPIPATLKASL

SEQ ID NO: 353876 - protein, 340 aa, unidentified
MTIRTIGLDLAKSVFQAHGVDERGAATLTKRLHRKQMLPFFSKLPPCLIGIEACGTAHYWARTLAAMGHEVRLIPPSYVKAYVKRGKSDALDAGAICEAVQRPTMRFVPVKTVEQQSILMAHRARSLLVRQRTMLANALRAHLAELGLVTNPGIANLAKLAQQALSDKDALPSYARTTLEILVRQIMTLSEEITALDHKLLAWHAESEASQRLTAIPGLGIVTATAMAATVTDPEQFRSGRQFAAWLGLTPQQHSTGGKTQLGGISKQGDRYLRRLLVVGATAVIRHTKDKPTPMANWIRKLLKKKPFRIVSVALANKLARIAWVVLTRKEAYRPSQLAA

SEQ ID NO: 353877 - protein, 405 aa, unidentified
MDCKAFSVFVGIDVSKDKFNVCAISTPNSIIFEHVFEMSKQGFSSFVDNLSSFSKNSIILAMESTGCYHLNLLSFLSLNNFSCVVFNPLTIKDSPSISLRKTKTDKIDARSIARTLFYLQQELPSSPFLNTEFRDVVRERESLISRISKIKNNIEKLLNLLFPELESFTNIYNDSILNLLSSFPSAKAIQNASFNSLRVFFSKSAGRKPILSPVSLKELAINSIAQYWPMKEKILIQNIKELRFLKELLKEYDEMLNQYCQYASFNVDIGLLTSIKGIGQNSAMHFLAEVGNVSRFSSYKKLIAYCELDPSIYQSGKRKTESHISKRGNAHLRRIVWLMSVSVVIHNEYFRDYFERKRAHGLPYKKAMIAVSHKLLRTMYAMLKKQEKFNVDYALSSSKLNLNFT

SEQ ID NO: 353878 - protein, 443 aa, unidentified
MINPDAAGIDIGHREHWCAVPADRSAKPVQRFGTFTEDLEKLADWLKECGIKSVAMESTGVYWIPAFQILERRGFEVRLVNARQVKNVSGRKTDVLDCQWLQRLHSYGLLNASFRPADEMCVLRSYLRYRDELVCARSVQCQHMQKALQQMNVQLHQVLSDITGLSGLRMIEAILAGEREAEKLANLADRRVHASKATIQRALKGDYRSEHMFLLKVAFELHGTYEKKIHECDEQIIAEMAKLPARVDPKQKPLPPRKPGRAPIRDMVAGKDIREELYRWTGVDLTAIEGIGVLSAQVILSEIGTDMSRWRTEKHFTSWLGLCPDNRISGGKILSSHTRHVINPVADALRIAATTLERSKSALGAFYRRMKARLGPASAITATAHKLARLIYRLLKHGDAYVRQGMEVYEQKHRERLIHNLKKTAASFGFQLTETKELTQCVS

SEQ ID NO: 353879 - protein, 319 aa, unidentified
MPQHHRPANAGLRILGADVAKSHVVFHDSLTGRSWTTANAPADLGQALYAYADYDWLVCETTGGYERQLLEAAMQLGLTSCRADAAQVKAFIASHGGRAKTDRIDAAWLARYGLERAHRLLSWQTPDPHRQAFAELLRHRQSLLAQRTQAKNRRSAPGGGQRLQALLDEQIAFLTRQIDRIDQDMADLVQAVPDLARDEQTLRAIPGVGPVAARSLIALLPELGRLGPKQAASLAGLAPHPRESGKLKGRRRMNGGRNGLRPVLFMAALAAARAHPSLSPVYQRLISAGKPKRLAIAAIARKLVVIANAKLRDHHQQLT

SEQ ID NO: 353880 - protein, 332 aa, unidentified
MHYLGLDISKDTVDTYSDACGHLKIENTIQGIQTLLAHLQTNGLNQENTHICCEATNVYYLLVAKTLHQNGYAVSVVNPLAIKGYAKMQLKRIKTDKQDAKLIAEFAKKEEPQYWQPNNQTGKAIQSLHRRTEQLNSLLVAEKNRQETADEYTNASVEKMIAALEEELENIREQIQAIIESDEQLKAKQKILATIPGVGKNTAQILLSVLVDLEKFRTSKHLISYLGLSPIIRDSGKYKGAQKVSKMGDKTLRKSLYMPARAACTRSKLWRGWFDEQVARGKHPKQVYVMMMCKILRYAYTCLKTNAPFDATLHKKADKAERSWKTVKGEAL

SEQ ID NO: 353881 - protein, 418 aa, unidentified
MLWTGGEEIVSIIAVINRTMDLPMRKPRPRNRSQRKPNDLSRSLAVLDMDRTLIAVIEMSASTWLVAAIVPGVERQPLKKLEPDEHALLALLQRWRGEAERSGRTITSIAVAYEAGRDGFWLARWLLSRGIEAHVIHASSVAVSREHRRAKTDRLDTQMLKRAFLGWLRGERDHCKMAAIPTLAQEDARRPGRERESLAGEASRIVNRLKSALARLGVRKFNPKLKKASERLNDLRTPEGEPIPPNTLDEMKRDMERRQLICAQIRKIEQERLKHLARAPDTGPHAMVRLLARVIGVGIETADTLVQEALSRHLRDRRAVARYGGLTGAPDSSGSINREKGLSRSGNARVRRCMIQLAWRFLRFQKDSALAQWFFHRTGNARGMRKTMIVALARKLLIALWRLVHEGVIPEGIVMRPA

SEQ ID NO: 353882 - protein, 398 aa, unidentified
MISVGIDISKRKSTAAILNVQGEVICNPFEFRHTKSGFEELLMYVKDYPQDEVKFIMEATGIYHLALLEFLKSKGYFVHVANPLLIKKFFDAEIRKGKTDRKDALKLSLYGTEKWFKLDDHLISEKIYSELMMLSREYNQLIAIRTKSKIQLNHLIERIFPGIEKILTDYYTELLLDFLLKYPHVSCVVKQSEKVFTKQFVKMAEKKEHTKGPQLAKKVYDLALECVPAISSSRSLEIAVESCIHVLRSTQTSTDAIITQMRLLAKELPEYDMVRSMPGIGDTLAPRLIAEIGDIRRFKNAKSLIAYAGIDAPPYQSGQFEGTRRHISKRGSASLRKCGFEIMFILMRREPSEDKDIYEYIQKKRAEGKAFKVALFAGFNKMLRIYYARTMEIYSKLT

SEQ ID NO: 353883 - protein, 384 aa, unidentified
MINTSIVFVGLDTHKEFVEVAYVEDSRQSRPVHIGRVPNTKASIIKLTRQFQSKHPQATLHFVYEAGPCGYWVYRLLTSMGLPCYVVAPSLIPKKPGQRVKTDKRDAMKLAVLLRLGDLDPIYVPEPEDEAIRDLSRARETAMKDLKDAKYQLKALLLRNNIKPPVTDNWSLKHLRWLTELVLPYPSQQIVLQEYLQTINERIKRLERLDNELLHHVKKWRYYPVVKAIQAMRGVRLLVAVGVIAELGDLTRFDHPRKLMSYLGLVPSEHSSGGHRRQGSITKCGNGRARRLLIEGAHSYRYSANISTDLQKRQEALSKEIVDIGWQAQLRLCRRYQRLMKRGKHYNVVVTAIAREMIAYIWAISREVVLSPVDPAKRLSRVPA

SEQ ID NO: 353884 - protein, 314 aa, unidentified
MLESVRIVNDVERLASVMARAGECPEVVLEATYGWYWAVDALQAGGASVHLAHPLGVKAFEYRRVKNDVRDAADLADLLRMGRLPEAWIAPPATRELRELVRHRAKLVGLRSHCKAEVHAVLAKCGVQVLMSDLFGVAGTALLDGLDLPAPYAARIASLRRLMDDLDFEVDLFAGMVRGRMAREPGYTAVQKIPGIGPTLGAVFVAEIGDITRFASAPKLTCWAGLTPRHHESDTHVHRGRITKQGSRLVRWAAIESVKRIPAGSPAGALRERVADRRGRNIGSVAAARRQLEFVFYALRDGHVRALEHRPRVA

SEQ ID NO: 353885 - protein, 414 aa, unidentified
MVAVDVVHERCAGIDISKADVKVCVRVPSSARRRRSEIRTFTSMTNDLLAMRDWLVAQSVTVVGMEATGDYWKPVFYLLEDGFEVQLLNARHMRNVPGRKSDVADSEWIAKLIEHGLIRASFVPPEPIRQLRDLTRYRTVVVRERVREAQRLEKLLEDAGIKLSAVVSDILGKSARAMLEALVAGERRPQVLAELALGSMRGKKPLLAEALTGRFGAHHAFLVRAMLDRVDEADAMIARLNRQIETQVAPFRRVITLLDGIPGISTRVAEVIVAEIGADMSRFPTAAHLASWAGMCPGNDESGGRRKSGTTRPGDAWLRAALGEAAMAASHTKGTYLAARFRRVASRRGKKRAIVAVGHSILIATWHMITSDTEYRDLGGDYFIERTGKTRVTQRLVGQLSQLGWRVNLTPATA

SEQ ID NO: 353886 - protein, 318 aa, unidentified
MTQDLFIGIDISKAKLDVAASPGEHSWSVSNTEEGIQELIAKIRQLGTPKIVLMEATGGFERRPLAMLGAAGLPVAAINPRNARDFAKSLGLLAKTDKVDAKALALFAEKIQPPCRPLPDAQTRALQDLIVRRRQMVDMISAEQSRLAIVENPKVRRELVQHIAWLKKRIHIADYDLDQAIKDSPAWQPKSDLLKSVPGVGPVTTSTLLALLPELGALTNKQVAALVGVAPFNRDSGTMRGRRCIWGGRTSVRNVLYMATLAATRFNPTIRAFYQRLCKLGKLRKVALVAAMRKLLGILNAIVRDQTPWRSDNVEISS

SEQ ID NO: 353887 - protein, 341 aa, unidentified
MELKRIAIDTSKHVFTVHGVDHQDRVVLRRDLKRAQLEPFFRKLPPTEVVLEACGSSHHWGRLLSALGHTVKLIPPQYVKPFVKRGKNDRNDAEAINEAASRPAMRFVPVKTAVQQAGIMILKTRDLLVRQRTQLINAMRGHAGEFGVIAAKGTAKVEALLDRVAGDETLPVEAREMIALLGEQIKDLDIRITALETRMKQAHKANPISQLLEGIPGIGPISALSLALTVDPGHFHSGRHFAAWVGLTPKERSTGGKQRMGGISRAGDERLRHLLVIGATAVIRHVKPGSRNASAWLMSLLERRPRKVAAVALANKMARVVWAMMTSGEAYRGARSAPLVS

SEQ ID NO: 353888 - protein, 421 aa, unidentified
MKESVRIVGFDCGEDEHAAVLLDEAGEFERRVDVVNERGQIQESLAELLLAVGPDSQLVVVVESKRSHGRIVADVACELGCELWQVNTVALNHFRDLEGQPRKDDEWDAYLGARMVYLRMGGCRVAIETTEEERILSRLTRIYSRVTEDRKRHVARLRAVLLELAPQMLHSSWEGPQPGSKAMQYLLERWPGFKGLERAQMRSIEKILHRCRYGSKAPHVAKLVREAARGISIAAEERSTLTLELDLLVRQIRVCNESTDQVYADIAHRVERHPMGQKLVEMHGNGPVITGVLMSELFPVARTSTEPKCATYAGVTPLSRKSGKSLDKDRLTQGVNKRVLHALYTASVVAIKNSAVDRAYYHKKLRDYAGHPKPHVAAFIALSRQRHKLLYKLMTTDARYDKEILIASHLERQEQERIATA

SEQ ID NO: 353889 - protein, 410 aa, unidentified
MNPLYVGIDVSSRSNVAFLMRPDGSKHSVFPVDNSKAGTEQLIKRIASALVKEELSEVKIGMEATSVYGSHLVYSLKDDFSLFSYKKEIHVLNPKQVNKFKASYDGLPKNDYVDAFVIADCLRFGRINNEVYLGDYRYEALKQLTRARYLVVQNLTKEKQRFLNTLFLKYSTMSQEKVFSNTFSTTALAVYEEFDSVDQLALMDLHDLTEFIKDKGKNRFPDPNAVAKAIQKAARSSYRLPKTINDSVNQVLSISISSMRALEANIKQYDEAISEQMKAISNPLISIKGIGPVYSAGIIAEIGDIHRFHNQASLAKYAGLAWSQYQSGGFEAENTHLIHSGNRYLKYYLCEAAMSLVRCDTEYSRYYHLKYKEVNRAQHKRALVLTARKFVRLVYSLLTENRMYISPEER

SEQ ID NO: 353890 - protein, 412 aa, unidentified
MLKIVYPICCGLDVHKSFVYACIASTNERGITMYKNHRFSTFTKGLRELSAWLADNNCCDVCMESTGKYWIPVYNILETTCKVVLAHPKYVKSIRGKKTDKKDAKWIADIFKHDLVNGSFIPPPDIRQLRDLIRYHFKLTSYTTGEKNRAQNCLTVSNLKLDDVFDDIFGKSASAIINRILENPNESFDVKPFVDGRCRTPIEEIQSAVDGVICSEQADKLRIIRAHMDDLDKAKDNLMSAILTVAEKFVPQVNLVSSVPGIKAFSAIATIGEIGIDMSVFSSAKHLCSWAGLIPQNNESAGKKKTTRIGRAGAYIKPLLVQCALNAIRCKDNPEIANRYLKLKKRRGHKKAIIAIARMLLTAIYHILKKNEPYNPVLYIKTDSEHPKNFTISVDYAIRVLQSKGYAVSPPG

SEQ ID NO: 353891 - protein, 350 aa, unidentified
MMIIGCDLHTRYQQIAMVDTDTGELVERRLEHESGEARAFYAGLKGAVRVGIEATGHTAWFEALLAELGHELWMGDAAKIRAAVVRKQKTDARDAAHLLDMLCTNRFPTIWRPSLPERDLRQLLWHRQKLVWMWGAVKNQMHALAMGEGVCRKKKLFTAKGRTELEGLKLGPWASYRRQELLRMFDELQSSVKKLDQAVELAAKSEPLAARLMTHPGKGPITSLAFVLIIGPVERFDRSKQVVSYLGLNPQEHSSGGRQRLGSISKQGNPMMRSLLVEAGHTAARLDPQLQRVYQRLKFRRGAAVAKVAIARKLAVRLYWMLRSTADYAQLVRMRGSSWATLVEDSPSLG

SEQ ID NO: 353892 - protein, 463 aa, unidentified
MSKGKRPSQPTSAGVEAVQSQPVVEAQAAGIDIGSRHMHVCAPVGEGQREVRIFPTTTDQILACANWLGENQVKTVAMESTGVYWIPVLEILESCGLATLLVDTRALSRVPGRKTDVSDGRWLQTLPSHGLLQGSYRPSEEISQLRSLVRGKATLVADPADWIRRLQKSLDQMNVRVHQAVSDLSGTTGMAIVRAIVAGERDPQKLAGLRDPRCQKSQEEIVRLLTGHWRADHLFNLANSLKMYDAHQDRIAEYEEEIQRRMKQLTPSGRQDQSAPPLPNRERMKAIKRRHQDERRQILFRRVGADLTTIDGIGVETAEAVVSEYGIDLHQFAHEKKFVAHLQLAPHSPKSGGKPLKKKRRTQRTSRAGQALPTAAVTLGRSATALGAYYRHIARKKGPDVAVFATARKLGTLAYRLLRWGQEYVDIGQKAYEELYQKARLRALAKTASQLGYQLSKTEAITA

SEQ ID NO: 353893 - protein, 355 aa, unidentified
MSQEKYIGMDVHQATISVAVMDSSGKLIMECILETKAATILEFIDGLRGTLSVTFEEGTSAAWLHDLLKPYVSHLVVCDPRRNALLKDGSKSDRIDARKLAELLHGNKLHAVYHGEHGVRTLKELGRSYLTITKDLTRVMSRIKALYRSWAIPCSGTTVYAVRQRAEWLAKIPEPGVRLRAERLYQQLDLLQPVRQGARRDLMAESHKHHAVKLLRQIPSIGPIRAALLVALLQTPHRFRTKRQLWAYSGFAVETHDSGEYRFVRGKLVRNRERITVRGLNHNHNHDLKNLFKGAALSASTRPGPLCDFYVALIEKGMRPTMARLTLARKMAVITLTIWKKGVAFDAQQLDRQAA

SEQ ID NO: 353894 - protein, 438 aa, unidentified
MSNKVIFNLDELFISVGIDVGADFSWMSIALPNQQFVGKPYKILHNSIDSLTTAVSKIKEAEELYSLESRIFLESTGIYHYPLFCYLRDKGFNCSVINPIITKNSTNINIRKVHNDRFDSKKAALVGLKPDLKVSLMPSDLALNCRNLCREYYDLIDNRSAYVNKLQGELRMAFPQYLGIFSKVTINTSLTLLETYTSPSAFLKADKQEIIDIIKSTARFGLTYAQNKYNAIIQAATDANQFGYIIDSNIKRIRLYISFIRKYDEEINSILESLHELVDANEDSDFVKQIHLIETFKGAGFLSAVSIMGEIGDFSAFSKPKQLFAYFGLDPSVKQSGKFEGTKVQMSKRGSAIARRVIHTLTLQSISISRNREAKNPVLREYYLKKCDSKPKLVAMGAVSHKVCNMIFAILRDNKPFKIIAPQEHIKQYNAAKCDMTA

SEQ ID NO: 353895 - protein, 309 aa, unidentified
MGTIVVGIDVSKDRLDVHVHPAGTVLSCSRDAAGIEELIGELERLGAHLIAVEATGGFETVVVASLAAAGHPVVVVNPAQVRAFARAIGQRAKTDPIDAAVIAHFAAATKPPVRPLPDATTQALADLVARRRQIIQMIVAEGQREKRASPRARKSIARLRKTLQSELSDLNDDIGETVRGSPVWREKEDLLASVPGVGPVTARTMLAEMPELGSLDRRQIAALAGLAPFTRQSGKWRGKSFIGGGRASVRAVLFMAAMTAMRRNPTLRAFHQRLRLAGKPKMVALIAVARKLLTILNAILRDKTKWQTA

SEQ ID NO: 353896 - protein, 354 aa, unidentified
MEFFAGVDTHRDTHSVAVLNQLGEVVQSFTIAATSTGYADAIARTAEFESLVWGLEGTGSYGRPFADALLKNGATVYEVPGTISKRHRRRLRRRGKSDPQDAHAIAEAVLRERDSLPQHLEVDAEEATRLLYERRDRKVMERTEKINRIRALALRLELEVPKDLTSVRALDQLDAALSEHPVKGYADFELVDEIRDIIVELRRIHDLVLDLEKRIRPFVERLAPQLLELRGCSIISAAGLIGHTGGICNYRNADAFAAHAGTAPIQCSSGKYQSVRLNTGGNRQLNRCLHNIANTQMRTDGHAGKIYYDRKRAEGKTHREAMRCLKRRLASVVFRLLQTAALTRESSHPLPLAA

SEQ ID NO: 353897 - protein, 343 aa, unidentified
MQTITTIGLDIAKSVFQVHCVDGNGQVVIRRQLKRRHVLAFFQKLPPCLVGIEACASSHYWSRELQAVGHTVRLMPPAYVKPYVKRQKNDMADAEAICEAVTRANMRFVPTKTPEQQSGLVLHRTRHLFIRQQTSVINAIRAHLAEFGVTAAVGRKGIEELLRVIADPSDKRVPDAVRACLAALGNQLLSLKKQILAFDRMILAWHRSNQTSKRLNCIPGVGPLLATALVANVADPKAFQSGRNFSAWIGLVPKQHSSGGRPRLGSISKQGDRYLRGLFVAGALAVIRYAKLHGTKYRPWVAALLERRPTKVAAIALANKLARMAWAMMAKGERYNYPASLRV

SEQ ID NO: 353898 - protein, 355 aa, unidentified
MNYVGIDLHRRFSQFYVYDDQTNTETTQRLNNDKPAIQQFFEPLKNDCKIAVEATGNWYWLVDLLQDLDTEVLLANPLQTKVIAHARVKNDKVDARMLAHLLRADLLPTCWIPEKEERNMRDLLRIRLRLLMFRTQFKNVIRAILSKFNITSECRQIWCGEGRDSLIEIISPKEKDALTQISLPSPYAEAIKQCLRHIDFLSDQIDYWEKIITEKAALSADAQLLMTFPGLGKLSAFTIIYETGPITRFPDAKRYAAYVGLIPKTKSSADKQHHGHLCKQANMYLKRIFVEIALHASHTNRTDHRLIQYYYRLMKRKGKSVARIALARKIAGIIYHMLKDQIDYQTAMQKNMMAG

SEQ ID NO: 353899 - protein, 299 aa, unidentified
MWLKPIWMWLGPAASRRFPNERNGHAALVLWIKQSAAPVQLICEASGGYEQALLESLEQNNLAVTLVQAIRVRQYARAAGILAKTDTIDAKVLAAFGAAMQPKPTPPLSAEQKRLRQYEAQRRHLSKVLLAEQNRLAQVSCAELRSLNRSLISKIKKQIDTLDTGIANLIAQDQVLCVKAQKLTAISGVGARTAALLLAQMPELGQLNRGEAAALAGLAPFNHDSGSIRGKRAIFGGRRALRSGLYMAALSAARYNPILSSFYQRLRAKGKPHKLALTAVMRKLLLALNSSLKPEPILA

SEQ ID NO: 353900 - protein, 314 aa, unidentified
MDKPAVWVGVDVSKEQLEVALRPSGEHFSLPNDERALRTLVKRLLPLKCARIVVEATGGYETLVVAALQAAALPIVLVNPRWVRSFAKSVGQLAKTDRLDARVLALYAERAELKVRQLPDEQTRELRALCARREDLLDMIVAEQNRLEHAPKRLHREIRGHIDYLRKRLTHLNRDIDSAVRGSELWRQKAELLDSVPGVGPVLRAALLAWLPELGRLNRAEAAALIGVAPFNHDSGAMRGRRAIGGGRAPLRRALYCTTSAAILWNPPLRAYYEHLIANRKLHKVAMVATMRRLVLILNAIIKTKTPWRSPCPG

SEQ ID NO: 353901 - protein, 356 aa, unidentified
MAIIGGFDLHRRQLTYDYLDAVTGEIQRGRVAPADRAHLRSFLARFDGQSEVAFAVEGCTGWRYVVEELTRVGIGAHLAEPAETAAKRGRKRRAKTDRSDARHLRELLVKGDLPCSWIPPTQVLEARARVRLSKDLEEERTGWLQRVQATLYHQGVPVIGSLTSAEGRARLATAELSPAGRQAVEVGLRQLDRLTGELDPLRAELARFSRRQPGCRVLRTTHFGIGPITSVAIWAEMGDTRRFSSSDDAVRHAGLDITVYASDTKRARGHLARQGPATLRWALYEAAVCATRPNSPDHAPTSWRSSAGPTATWASSRWHASWPGGSTTPCAPSATRPGSRCRRSDGGARCAFSPST

SEQ ID NO: 353902 - protein, 358 aa, unidentified
MGQVSTIGLDIAKRVFQVHGVDAAGAVVFRRQLRRTEVLRFFAKQPPCLVGIEACGSAHYWGREIAALGHQVRLMPPTRVKPYVKWGRKNDKVDAAACCEAVSRPSMRFVPLKTVEQQAALMLHRARQLLVEQRTRLGNAIRAHLAEIGIVAAKGQAGLGALLAMLGNPEDEHVPAVIRPILMPLVEQWRSAAAQIAVLERQILAWHRNNPDSQRLATIPQFGPILSSAMVATLGEAARFDSGRRCSAWIGLVPKENSSGGRERLGGISKTGDRYLRQLLVVAASGLIGRARAHPEVAPWFAALLARMPAKQAAVALANKMARIAWAVLTKKTVYRAAAGTFTPPGPGDAAPTQAQAA

SEQ ID NO: 353903 - protein, 338 aa, unidentified
MECFVGIDLHKYVSQLAVLRESKSPSQLRFANDVVTVERVLKKLPERSKIAVEAMGSWWWLVELAQKTGHEVFLSHPKQTKAIASARLKSDKVDALMLAKLLKADLLPTVWIPPATQRHVRELLTHRARLVRQRTAAINELRAVYAKRNIDPEARLQRTRPIVSGAEGLSGYGPRIVEEDLKLLEFINRQIGGLDKELIKIAHEDPQAKRLMTIPGVGPVSAVAISCWIGEISRFSNAKKLASYFGLAPRVRQSGDTERHGHITKEGNRMVRWLLIQAALVHTRRGKGPSRKHYLGVVKRRGKQIARVAVANKLIGAIFHMMKEGIDYHDFIKRSGAQ

SEQ ID NO: 353904 - protein, 308 aa, unidentified
MSSHCIYLGLDFSKEKFDFHGADTRGTLANTPAGHRRFLAKLTPGTHLVCESTGSCHRALVTAAHAAGLALSVANPRQVRDFANGLGRRAKTDPIDAQSLYDFGRLAQPKADLAPSPTQMALQELVVARQQAVLERSTLLVQAPHHRVALIVSLQRARIVLLTRHIAKLEAALTATLAQEESLAAQAARLAQVKGVGLLTATTALALCPELGTLTRGQAASLLGVAPFNHDSGPLQGQRHIAGGRYRLRCAIYMAALSAVRSNPLLRAFYQKLRARGKAAKVALTAAMRKLFLLLNHLLKNPNFVLAS

SEQ ID NO: 353905 - protein, 340 aa, unidentified
MVNRTAVGVDIAKNVFQVHYIDQETGEIVNKPIKRAKFLEHFVNRVPCLIGMEACGGAHHWARQLMKMGHEVRLMPAEFVKAFNIRNKNDAADARAIWLAVQQPSKPVAVKTEMQQAMLGLHRMREQLVKFRTMQSNGLRGLLTEYGEVMAKSRAKLDKEIPEVLARLAERLPAALIDTLRAQWNGLAKLDEQVAEIERRMREWKKDDKAVKAISEIPGVGLLTATAAVAMMGDAKAFKSGREFAAWAGLVPKQTGSGGKVNLHGISKRGDTYLRTLLIHGARAVLTHAKEPGPWVEQMKKRRPTNVVIVALANKMARTIWAVLAHDRQYQKDYVSVNPA

SEQ ID NO: 353906 - protein, 386 aa, unidentified
MQASNASTPITGNISTIFIAIELSQKSWLVTMHCPDKDKISRRKLDGGDHAGLLALIDRMRDRAARALAATPAVVSCYEAGYDGFWLHRLLLAAGITNYVFDPASIAVDQRARRVKTDRIDGEKMLRTLMAYLRGEPRVVRIVRVPTPEQEDARRDAREHHRLTKEQTAHTNRIKALLRLQGIAVGNPRHRDWLSWLATQRDWQDQPVPPRILAEIEHEHARLMLVSNQLDALAQPPVPAKLTPAAAEMAQRSDLLLRLKSLGPAFATTLTHEVFYKDFHNRREVASYFGLTPSPWQSGGIDRDQGISKAGNPRARCAAVELSWLWLRHQSESALSRWYRQRTLNASKRIKRIAIVALARKLMVALWRYLTTGLVPEGAVLKAMNA

SEQ ID NO: 353907 - protein, 370 aa, unidentified
MAQSTPLFVGLDVHKDSIAVAHAAGGSSAPPVFVGAIGSRQADLDQLLRRLQSKAASLAVAYEAGPSGYGLYRYLTAKGVACQVVAPTLIPRKPGDKVKTDRRDAITLARLLRSGDLTPVYVPSVEDEAIRDLCRARDAARVTMKDAKLRLKALLLRLGLHYVGRADWNAAHQRYLAKVVCPTPAQQIVFQESVRAVDEHVARVARLEAELREATPHWRLAPVVEALQALRGVQWLVAITVVAELGDLTRFDNPRQLAAFVGLIPSEYSSGASRRQGGITKAGNGRARRALIEAAWAYRHPAKVSAHIQLRIDRLPKPLQDIGWKAQVRLCKRFRRLTARGKHPNVAVTAIARELIAFMWAIAKAVPLTA

SEQ ID NO: 353908 - protein, 370 aa, unidentified
MRKDTSSNKKQIKRTSSKEDREDFSFHIGIDLGDRKSDVCILDQSGERSKEFRLRMNEADFEACFAKIPRSRVAIEVGGQSRWVAEVIEKCGHEVYVSNTRKVPYIHQSDDKNDPGDAYKLAELLYFKPRLLHPVRHRRREAQADLSWIRAREVLVESRTQLINAVRGISKAFAGRLEKCSAEAFTAKLAGQIPEAIRATVAPLLETIDHLNEQIRYYDQMEEHIARQRYPKYRLLEQVSGVGVHTALSFMLTIGDPERFQKSRMVGSFLGMRPKQQESGESKPQLGITKAGDMYLRKTLVNCAHHILGPNRKDSDLRRFGQRICERGGKNAKKRAVIAVARKLAVLLHRLWITGEVYEPLRNSKQSMAA

SEQ ID NO: 353909 - protein, 345 aa, unidentified
MEDARVAYQLYVGVDIAAATFVAAWLAPGGKPGTPFTGEQAPAGFAALQRRLQGTGSPPAATLVVLEATGNYWVAFAVALHEAGYRVAVVNPRQAHHFAKAQLRRAKTDALDAADLAQLAAALRPAPWTPPPAVYHEVRQRLVARDGLLAMRTQARNQCHALVQWPVVVAAVRQHLDELIADLDRRIAALEAAIAAVLKESAWAESLACLTSAPGIGLVTAAWLLVGTLNFARCAGPESLTAYAGLAPVPRESGRSIRGRPRIGHDGNGRLRTALYMATLSAARYNPAIKAFYQRLRAAGKPKKVARCAAARKLLHQAWALGSKLQRFDPHHGQQHQEASSGLAA

SEQ ID NO: 353910 - protein, 426 aa, unidentified
MEIGNVVYPICCGVDIHKTFFVATLINTEGLMPRYQKKRFSTFNNEILAFRQWLLDNNCFDVCMESTGKYYVPVYNLLEGYVRVTVANPKWVRAVKGNKDDAKDSKWIGNLFRLGLVPGSFIPDKDIRILREYTRYRFKLVSCKSGEKNRYQNVFTVCNVALDAVVSDMFGKSASSITDYLVNSDTFDPEHCVSLLQRSLKKKADEVVASIEGFQMTETQKARARLVLEHYKYLVAQIQKIDGIIEALAAPFVSGINLLCSIPGVDRSSATTVISEIGTDMSQFGSSKRLCCWGGLTPGSNESAGKKKSVRINRAGVYLKPMLVQIAHAAVKDKENPYYRIKYEHISKRRGKKRAIIAIARMILTAVYHMLSTGEVWNPCDLQQIDMPPELREKELQKSLRRAAKLLVAHGVVSMDAISLPVQDSA

SEQ ID NO: 353911 - protein, 482 aa, unidentified
MKPKPQEKTKKATDHPRQQHWREMNRRQRREMMRNIQSEDINLEVVHPDAAGIDIGNESHYVAVPPSRNSQPVRRFGCTTAELKAMADWLEQCGIRTVAMQSTGVYWIAVYDILEQAGLEVYLVNARETKNLPGRKTDVQESQWLMKLHTYGLLRNSFRPSQEIRMMRTYWRQRNDLVQSAGRHIQRMQKALTQMNIQLANVLSDVSGVSGQAIIKAILGGERDPHKLAAFRNPRVKASGEQIARSLEGNWQEDLLFVLKQEQDGYEFCEKQMAECDRQFNHYLKQRADRSHGAPLPEEKRKGRLKKKSGNKPQFDLRTGLFRMSGTDLTRVDGIDVITATTILSEAGWDMSKWVTEDHFVSWLRLCPDNRISGNKVIGKGRLPTNNRVTIALKMAASTLRLSDTYLGAQFRRFRTRLGAPVAIKAMAAKLARLVYRMLCYGMKYVDKGAALYQAQHRHLQIKQLNRKAASLGYQLIPVPAA

SEQ ID NO: 353912 - protein, 344 aa, unidentified
MKVSVLGIDLGKNVCSIVGLDASGAVVLRRRAKRETLIGLVAKLPPCIVAMEACCGAHHLGRLFARQGYDVRLMSPEYVRPYVKAQKNDDRDAEGIAEAATRPTMRFVELKSQEQLDMQTLHRSRDRLVAERTALINQLRAILLERGIVIPRGKRKLEQYLVTLMGEQDAQGLSPRMRMLIVDVRVQWQELDRRIGVFDREFAAFTKENEDARRLATIPGVGVMIASALIAAIGKAEAFEHGRDLAAWLGLVPRQSTTGGKPTLLGISKRGNKYLRKLLIHGARAALPHIAERDTALGRWAKGLLARVHQNVAVVALANKLARIAWAVLRREEKFTAKGSSLAA

SEQ ID NO: 353913 - protein, 432 aa, unidentified
MEDVREEPLFVQRVAGLDIAKAEVEVTIRVPSGTIAGRRQQETRTFGTTRRQLLDLADWLASWGVTKVGMEATSDYWKPVFFLLESRGFDCDLYNAAQVRALPGRPKTDRADSIWLAKITEREMIASSFVPPEPIRRLRTHTRYRRHLTQARTAEKQRVEKLLEDGHLKLSSVISDIHGVSGRDMLDALAAGQRDPHALAAMARGKMRGKIRRLEEALECSFFSAEHAAVLAMMLAVIDHYTAQISQLTATIEELAEPYLPQIGQLDAVPGIGTICAQDIIAEIGTDMAVFPTASHLVSWAKWSPQVRQSAGKRKGSNATGRGNPYLGAALGEAGISAGNTQSFLGARYRKLTRRMPRKKALVATGNSMLTIIHALLSDPAAVYTDLGADYYEQRMHARRQARNHVKSLERLGYKVTIEAIDPATGELTAAS

SEQ ID NO: 353914 - protein, 404 aa, unidentified
MWYAGIDWANDHHDALVIDEKGHQVGSLRIDHNPSGLSKLNTFLEQVIGAQPKDQMACIIETTHGLLIAALLEAGWPVYPVNPRTVDRRRSASGAKTDTIDAYLLAKTGRADWADLRRLTPDSEKVAELKLLTRDQDGLIQMQTRLVNQLTACLKAYYPVALDLFGKLQQKSTLLFLQTYPTPQAAQAASCEQIQQVLQSCKHPQAKAVASSIVEQVHQSHLQADAVTIRTKSRLTLALVSQLLPLIEQIAHYDKEIDTLFLTHEDHQIFESLPRAGQHLAPRLLAEIGDDRTRYQDASSLQALGGTSPVLYQSGMYSKAHRRLGCIKPLRNALHQFAWQTTQSEPWARDYYQRKRAEGKSHTVAIRALANVWVRIIFAMWIHHQCYESRTFEQAQRQHARKAA

SEQ ID NO: 353915 - protein, 412 aa, unidentified
MDWADEKHDVWLWDAATGETRHRVVEHTPEAIVEWLGDLQERYAGGRIAICLEQSRGALIYALMGHAFLALYPVNPVTLSRYREAFSPSRAKDDPSDARLLCEILRLHRDKLVLWQPDDEQTRSLTFLNEERRKAVNLRTKLVLRMQSALKLYFPQALDWLGVHLYNTLACEWLIKWPTLDDVQKAKPQTLRNFYYAHNCRRPEQGQAYIAAIAAAEPLTKDRAVITANRLTVLMLAKQLRTLYASIQEYDRQIAKLFADHPDRFIFESLPGAGSVLAPRLLSAFGTDRQRHPSPKDIQTYAGIAPVIERSGKQSWTHWRWSCPKFLRQTFHEFAKNSIPYSTWASAYYEQQKKRGKGHNAAIRSLAFKWIRIIHRCWMDGRPYDENLYLQTLKQRGSPLGLLLGTPETQTK

SEQ ID NO: 353916 - protein, 447 aa, unidentified
MVVRDQPLVILQRCQKGGDTVKKRIKIDHLSTLCVGLDIGSRNNFITALDFDSNLLINMQLVPNAVSGVEAMESMILEVLEANSQFKYLLIAMESTSFYGVHVANYLSTSDRLKPYSAKVFCLNPKEVANYKKSFTGLGKNDGLDSFIVADYIRVGRIDISPWRGAQYLALQRLTRQRRHVTEAISREKNYVLNNIFLKFSEFALLTGEESPLSNKFSATAEAILTEYKTTEDIANAPLEELVEFVASSGRGRFSDPDQVAQLLQKAARDSYRLDKALYEPITTSIACSFNCIRAFEKEKKALDKAIAETVEGLNPTEYQILKSIPGIGPVYAAGILAEMGSIRCFSNNNALAKYSGIVWRDNQSGEFDSEETPMMKAGNTYLRYYLIQAAGSVASYCPEYMAYYEKKYAEVPKHQHKRALALTARKLIRLIFGLLDNNQLYSAARG

SEQ ID NO: 353917 - protein, 341 aa, unidentified
MTMFAGLDVGGRRTAVCVIDAAGKIVWRGMVDTHPEMIGAALERFKGMLDKVGLESGPFTPHLFRSLATMGYRMICMDARRAADAIKSRRIKSDKGDAWALAEMLRTGWFTSVHVKTVDSHRLKALLGARDQLVKVKRSLGNQVRGLLRPFGIKLPSRVGAKKFDEAAYEATRHDPMLHAAVRALLEALASIDAQQALLDEELNELAKRNEIAWLLMSVPGVGRITALAFIAAIENVERFRRTRDIGAYLGLTERRYQSADTDVGMGISKQGDAMARHYLYEAANVLLTTVKKRFALRSWGLKLIKTVGPKRARVAVARKLAVLMGRMWKDGVHFEAAVTA

SEQ ID NO: 353918 - protein, 430 aa, unidentified
MICAEIERCAGIDVGKQRLAVCIMVGPLAGEPRVEYREFGTIRAELEQLRQWLKAEGVTHVVMESTGSYWKPVFNVLEEQVQVYLARPQDVKNRKGHKTDKKDSWWLAHLLRHAMIRPSFVPPRSLRELRDLTRRRRKMIGVATSERNRVDKILQDANVKLSNALTDIFGVSGQLMLEALLEGQATPEQIAQFAQRSAKRKIPQIIAALEGHRMTSHHRQMIRYSLEHLRFLEEHIMELDEQIVAKIQALGLAPQWELLQTVPGMKENSAASVLAEIGPDMGQFETEKSLSSWAGVCPGNNRSAGKNKGSQTNHGNRWLRGALTECAWGVSGKKDCFLKEKFWRLVTKKQRKPPATMAIAHTLLVLAYQVLKTGRPYQERGLPVMDEKQRQRLICHHVRRLGKLGIRVHSLPIAKERQVRKAKDATARGD

SEQ ID NO: 353919 - protein, 404 aa, unidentified
MNAVGIDVSKGKSMVCVMRPFGEIVASPFEVTHSDSEISALAKRLESLSGETKVIMECTGSYHLPIAFALHDAGFTVCAVHAQLIHDFGNNTIRKVKTDKADAIKIANYGLTNWLDLTEYVPEDDIRHMLKVYSRQYNKYIKIKTMLKNNLISLLDQTFPGANELFTSPPRKSDGHEKWIDFAAAFWHCRCVCDLTQEKFVATYRKWCRKNGYNFSQSKAEDVFIESLGHFCVMPKNETTKLLITQAITQISTMSESIAVVAREMKSLAEQLPEYPVVMKFRGVGDVLCPQLMAEIGDVYRFARKESLVCYAGLEAPPHQSGQVAAASTSISKKGSPHLRKTLFQVMDCLIKHKPADDPVYQFLDRKRAEGKHYYNYMTAGSAKFLRIYYARVKQFLDEFYGEE

SEQ ID NO: 353920 - protein, 328 aa, unidentified
MECLSVGIDVSKRELVIAVHPTGDQWTTATTPAGIATVVKRLQTLGPGIIVVEATGGYERALVAALAVAELPVAVVNPRQVRAFAQAIGRTAKTDAMDADVLALFGGRLDPAPRPVTDVATQALAALVARRRQLLEMIGMERGRLEHAPPTGHLTRELRRHIRWLERRVKDVDDEIGSCIAAHPTWRVQEELLRSVPGVGPTTARTLLGELPELGQLDRRAIAALVGVAPFNCDSGQQRGQRHIWGGRASVRATIYMAALSAARYNPVRRVFYRRLRDAGKPAKVALVATMRKLLTILNAMLKHQSPWATQVASTPASLSGPARAATV

SEQ ID NO: 353921 - protein, 380 aa, unidentified
MGKIIRIGIDTSKSVFVLHGVDENELPVLRKRLRRSQVLGFLARLEPTRIGLEACGAAHNWARQIGALGHEVVLLPPQYVKPYVKRGKNDDRDAEAICEAMSRPTMRFVPVKTAEQQAALMLAGVREGLIRRRTQLANTIRGDAAEFGLVAPKGLAHIKPLLARVAEDGGVPDLAKPLFATLGSEYDRVDIELKAIDRKMMAWHRNNAASRKIAKVPGIGPIGASLGVMKVPDPHAFRRARDFAAWVGLTPKDHSTAGKVRLGVITRAGDEALRRALVVGATAVIKEVTRGKGPRSPWLVDLVRRKPPKLAAVALANKNARILWRLMVSGDDYDPQRGMASGARRARREERVAALHGGSAPHSSLLATPSIAEGSAMTNA

SEQ ID NO: 353922 - protein, 345 aa, unidentified
MQPMYYIGLDLHKRTISCCVKDVSGTIHAEGTIPAIRFHLDQWMNTLPQPWTAAMEATVFTGWIYDHLQPHAAGLKVAHPLMLRAIAAAKKKNDRIDARKLSDCLRCDFLPECYMAPTAIRERRRTLRYRNLLVRQMVQMKNKIAVLLMEAGVSYNKQRLHKAGYFRELLATNPDINEGLCSLLRVCRETVVRLQRTESALVRSLERDSLLKERVERLMTIPAVGPITALTWALEVGDVWRFSSIKKAISYCGLCGAEKSSANTVQRTPLSKQRNKHLQTTLIEAAKMAARYSPHLALLYDKEKQKGSANRATLAVARKLVAYLMAVDRGQRPFELVEASHSTAA

SEQ ID NO: 353923 - protein, 328 aa, unidentified
MKMAHFEAVVGIDVSSGKLDAHVLGADCEESRQVTNDAAGHRALVAWAKAKRATTAVMEASGGYERDLARALRRAGLAVYVVDPKRVRHYAKAVGQLAKTDRIDARIIAEYGTTMLAAGRLVLPRPDDPARDRLSALLGARAALIEHRDTLEQQSHAMPAGPGRQALKDAHASMKPRIKQLDRHIDALIAGHAAFAALARRLGTVPCLGPVAIAALIAWLPELGYVGGAQISALVGVAPVADDSGDRTGKRRIAGGRKKLRNLLYMPVVGALRWNPVLAEYYKRLLARGKEPKVALMACMRKLLVIVTAMIANQEDWAPRSGAQAAAA

SEQ ID NO: 353924 - protein, 348 aa, unidentified
MGYFAGLDVSLEETAICIVDDEGRILGEARVASERYALVAFFNALGMTMERVGLEACSLTAWLHQGLSEAGIPAVCIEARQAKAAIGAMPNKTDRNDARGLAQIMRTGWYRAVHVKSPSCRSWRALLTARRMLLNKRRDIENGVRALLREAGLKVGAPSRKDFPARVRELASGDAVLTGLVESLLSVIKVTTDEVARLTKRVLDEVRVEPTCRHLMTVPGVGPLTALAFRATVDRPDRFRKSRDVGAHLGLTPRRYQSGETDVQGRISRCGDELARTALYEAAHSLLIRSRKWSALRAWGMQVAKRRGIARARVAVARKLAVILHRMWVDKSEFRWGKQAATAAKAAR

SEQ ID NO: 353925 - protein, 483 aa, unidentified
MAAKNKDATTHTDGNSAGTAPEHGGDGAEVAEDLVQVVERAAAIDVAKGSGMVCTRVPGSRPDRRRQKVWRVQATYAQVTALMDHLRCEGIQRLVLESTSDYWRIFYYLAEAAGLEVWLVNARDVKHLPGRGKSDKQDCVWHCKLNERGMLRRSFVPPQPVRDLRALTRTRARLAQDQARHQARVEKILEDALLKISVVISDLFGASGRRFLDALVAGERSPKALAALGDPRLKATRRELEDALTGRFRDIHAFEIRTHLRLIDAINDEITRLDEAIGQQLAAVPGTAPACTACGLAGGGHAPGCAQEETTPLGLAERLDEVTGIGAVNARAVIAELGTDPSQFPTPGHAAAWARLTSRSRQSGETAKPGRTGKGNRYIRGALGQAAMAAASTDTRLGAMYRRIARKRGKQKAIVAVSRVICEIAWILICDPGARYEELGPDYYRSPRSRARQTRDKIREIERLNPGKKVILAPVDAEADTAA

SEQ ID NO: 353926 - protein, 323 aa, unidentified
MQGYVGIDVSKERLDVMLLRDGQREAQHFTNTSTGFAKLHSWLGRRLTVEAVQVCLEATGQYSQGVADFLFEQGYWVSLVNPSRISAYGRSQLSRNKTDQLDAALIADFCRTQQPPRWTPLPPEVRHLQALVRHLEDLTSARQQARNRLSTPVQTDPVHDHLQAQLTLLDQQLAQTKQAIADWLDQHPDLKVQKDLLISIPGLSDLTIGKLLAECRDLRSFRDPRQLVAFAGLNPRHHVSGLSIHKKTAISRTGSLSLRAALYMPALVAMQHNPPLRDFANRLRLRGVSGKAIVVAVMRKLLHLVVGVLKSGQPFDPNWLARA

SEQ ID NO: 353927 - protein, 216 aa, unidentified
MKNIITYVAMDTHKKQHKIAYQQPDQMEIIECNVLNTARDLQKMVKKILRQAPGPVHFCYEAGVCGFTLKRRIEEWGGRCLVIAPSLVPRKPGERVKTDRRDAKKLLELFQAGLLTEVQAPQEAQEAARELTRLRETAQENLKRIRHQILKFLTRHGYLGLTPAEDSSGERQRKGAIISVGSARPRRVIHEYQTDSLSKPPTPQRLEKNKKLLSKK

SEQ ID NO: 353928 - protein, 460 aa, unidentified
MSSQFVPQNALSVGIDPHRDTLEVVAIRFPEVMLMDRKFENTPAGQRALVQRAREVALAHNLRLTFGVEDTGNYGYNLARYLVEQGYEVKEVNPVKTDRQRDFYGQDKTDHLDALATAAVVLRAYDSLPDVKPVREAVQATRQLSRYHEQLVKAQTAAVNRLHNLLAKQYPGYKSYFRPITGTTALAFWELYPTPHHLEDVSIEELADFFYEKSNHRISHEAGRKKAQLILSNCEQVLSSKQGLLIKTQAHIIQDLARHLGELKQRIEDVKTQLELTVSATGQQLETFNGLGIVLAARFISDTVSTERFENNPNRYASYNGTAPAIKGSGQRYRHVENKRCNRRLKAAFHQLAINAVLHEPLSKAYYEHLVQEKGMESNHAIKRLMRRLSDIIFAMMRDKTPYDPEVHRRKQARRGKKKEESVAAARQRQEPFAFPSPSDVTISCPREPVKQREAALSPV

SEQ ID NO: 353929 - protein, 322 aa, unidentified
MQGKVPPEQSAPRVYVGVDVCKDWLDVYLHPIGHQFRIASTPDGLKRLKRHLAGLQVVVIVMEATAKYHRQPHRTLSAAGFAVAVVNPLRSRLFAEATGQLAKTDRLDARVLAILAESLEPAATPPVAEALAALQELVRARAAAIADQTALTNQRAASQTAFLKAELGRRLKAIATYIARLEAEIDRRIASDPALKRRYEIVRSIPGIGPVAAVALIIGLPELGTCSGKAAGLLAGLAPLACDSGATAGQRRIRGGRAHVRTALYFAAIAAARFNPGLSGFYRRLRAAGKKPKVAITAVMRKLVVLANVLIREDRLWQAHQA

SEQ ID NO: 353930 - protein, 407 aa, unidentified
MPDYDWYVGVDWGGERHHVAILDATGARVAEHQVAHSGAGRESLVEHLARLGADPGRVAVAIEVPRGPVVDTLLMRGYHVFALNPKQLDRFRDRYSVAGAKDDRREALVAASALRTDQLAFRQLQPDDPQVIRLRELSRTYDELLGEERRLANQLREQLWRYYPQALTHCPGADESWLWELLHEAPTPAHAQRFTRPALRALLARYRLRRITGDMLYETLQARSVTLTPGAAEAAAEHVELLLPRLRLVHEQRQQWERRMDALLDALGPPVEGRQEHRDVTILRSLPGVGRVVAATMLAEAWGLLAARDYQSLRAQSGVAPSTQQSGKQRLVLMRRSCNHRLRTAVFHWARNSVRLDPRCRAQYQRLRQRHSQARALRSVADRLLSVLVAMLCSGTTYDVTRCPNAA

SEQ ID NO: 353931 - protein, 409 aa, unidentified
MQVIHERCAGLDVHKKSIYACSLWWDEKGERHQQIRSFGAVTAELLRLGDWLQQHQVSHVVMEATGVYWRPVWAVLEGRFELMLVNPHHVKAMPGRKTDVKDCEWLADLLQHGLVRGSFVPPTDIQDLRDLTRYRAELTQAQNRVTNRIQKVLEQANIKLSSVASDTLGVSGQRMIEAIIAGEDNPESLADMAQKRLRQRIPELQMALTGRVRDHHRFLLREHLDEWKALANRIRRVEQEIDRRIVPFEHAVTLWKTIPGINHVTACSLVAEIGVNIGQFPSAQHLASWAGLCPGQNESAGKRMSTRTRAGDRWLRRALCQASWAASHKKNCYFSGQFKRIAARRGIQRALIAVAHALLIVVYTMLKTGSSYQELGGDYLERIRKDQLQKYYIRRLQRLGLSVSVQPAA

SEQ ID NO: 353932 - protein, 340 aa, unidentified
MEIVRIGLDLAKNVFEVHGVDAEDKAVLRKTLRRDAVPQFFADLPPCIVGMEACSGSHYWAKVFADLGHEVRLISPQFVTPYVKSNKNDRNDAEAICEAVSRPSMRFVPPKSSEQLEIQAVHRIRQRLVSDRTRLVNQIRGLLAEHGLVVARDISRLRYALGRIADSTDNNLGHIISELACDVRDELSELDQRIAAYNKRIRDLFRSNQMCQRIGKIEGIGPITATALVAAVGDRTCFKNGRQFAAWLGLVPKQRSSGGKSRMFGISKRGDRYLRTLMIHGARAVLAKAGGKTDARSLWIGRMRDRRHPNVVAVALANKNARIVWSVLSSGTEYQPAVSG

SEQ ID NO: 353933 - protein, 407 aa, unidentified
MRYYIGVDWADEEDAVWVANDAGDKMLSRRFAHTVAARSEWARWLRERQAEGIELWAAIERPHGRIVDFLLDHGVVVYPINPKSLDRARDRFRVGGSKSDPFDAKVLALFLRSDHLQLRPLRPNSEAAQELQGLTRDYRRQVHLQTRLLNQLTATLKEYYPRALELGEDLTAGWAQAFLARYPTPAAAAALTEPDWQAFAHAHRLSPTRTAALWETLQQPQLPLPAHVVRLKARLLQALLRELAPTLATIAEYRQAIDDFFATMPTAEIARSLPVGKSGTTVPTVWAELGDHADRWASFRHLQAYAGSVPETDCSGKHHVVKFRFACNPALRDAMHQLAFLSLPHSLWARAYYDRYRERGHTHHQALRALGAKWLKIIFVMWKRHVPYSETHHLATMARQHLHQTAA

SEQ ID NO: 353934 - protein, 422 aa, unidentified
MLEETNDTEEIIKRVAALDIGKAELVCCIRVPGAGKRGKRLQEVRTYQTMTRSLLVLADRLGELGVTRVVMEATSEYWRAPFYLLEAQGFEVWLVNARDVKHLPGRPKTDRLDAVWLCKVAERQMLRPSFVPPPEIRRLRDLTRYRADLVGVRTAEKQRVEKLLEDAQIKLSVVASDIFGVSGRAMLAALLAGERDPKVLAQLARTRLRAKLGQLEEAFTGHFTDHHGFLLATMLDRVDAVSADIATLEAKIDQEIAPFAAAADRLDEITGVGRGAAQVIIAEIGTDMGRFPTPGHLASWAKFAPGVKESAGKTKGKATTGHGNPYLARVLGEAAVAAGKTNTFLGERYRRIARRRGTKKAIVAVGRSILVIVWHLLADPTARFHDLGAGFYDTRINPERSKRNHVRQLEALGYKVILEPAA

SEQ ID NO: 353935 - protein, 424 aa, unidentified
MKPKPDVEFAAFAGIDWADAKHDICLQAAGSEEREWAVVPHRAAAIDAWASTLRQRFHGRPVAVCLELAKGPLVYALQKHDFLVLFPVHPATLAKYREAFTPSHAKADPTDAELALELLLRYRAKLKPLTPQSGPLRMLLRLVEQRRRLVGDQNRISSRLADALKQYFPDVLAWFPEKDTLLFCDFLTRWPTLKQLQRARRATLLSFFHEHHVRSQSRIDERLLAIKSAIPLTDDLAVIRPNQLLVLTLVEQLRVTLRAIESFDAEIAAVSQTLPDYDLFRALPGAGATLAPRLLVAFGEQRERYQSAAEVQRYAGIAPVTESSGKKCWVHWRLQCPTFLRQTFVEWAGATIPRSFWAAAYYRQQRDKGCSHQAAVRALAFKWIRILYRCWKTRTPYDESTYLNALKRRGSPLLNSIAATAKNT

SEQ ID NO: 353936 - protein, 313 aa, unidentified
MTTVSKVFIGVDVSKNSLDIYIYPIGKFFKIDNSETAIEQFGSDLSQYYAPEIACEATGGYEKLLAKVLKRFSYHLWVVDPRRIKGFIISSGCKSKTDKIDAQKIAEFAAKNSKDYESINKTENQVILQAWVNRKQDLTLFLVAEKTRRKHPSHELCTSSINKLIKILEKEIKAIDQEMLKLIHNDLELQKKSTILESIPGIGKATAALLISFVPELGQISNKQISAIIGVCPYNRESGNYKGKRFIRGGRMIPRNALYMCSLTTIKYHLPLKIFYDRLRNAKKPFKVAMIAIIHKLIIIANSLLKKGELCRA

SEQ ID NO: 353937 - protein, 344 aa, unidentified
MGVTVGVDSHKSSLAVAALDELGRVVGTKEFPNDARGHDALLRWSKAQDSDRVIGIEGAGSYGAGLARYLIDAGENVYEVPAFLTHRERKRAPSKGKSDPTDAVAVARVTARGEGLSSPRRIDIFVDLKLLSNHRDQLVRARTRLINRTHTDLVISHPGYEKKMPKLNSKKNQDGAMTLLRGDHSVRAGLIRDRIREIRRLSNKIADVERQIAGKVNESGTTLTELQGIGFVIAAKILGEVGEPGRIRSKGAFAMWTGTAPLEASSGATKRHRLNRGGNRQLNYALHMMARARLRHHADTKAYVARRRTEGKSEKETVRCIKRHLSNLVFRQLVADVRALPEAA

SEQ ID NO: 353938 - protein, 371 aa, unidentified
MKKHNSCTRSPRGRAKARPGSITIGMDLGDKASRYCEVNGGGETIQEASVGTTKKAMTQVFGSRPRCRVAIEVGTHSPWVSRLLNSLGHEVMVANARQVKLISQSSRKDDRLDAQTLARLARVDPQLLRPIRHRSEKAQGDLMRIRVRAALVDTRTGLVNTARGLAKAMGERIVVCDPDALNMERLEELPTGLRDALEPLVKMVEALTAQIKHSEAEIEQIARDRYPETALLRQVSGVGTLIALTFVLTLEDPQRFRKSRDVGCYVGLRPKRSESGESQPQLRITKEGDRYLRKMLVQGAHYILGWRGPDTDLRRWGLKLAERGGKNAKKRALIAVARKLAVLLHRLWTTAEVYEPLRNSQAREGGRKAAA

SEQ ID NO: 353939 - protein, 403 aa, unidentified
MNGSGAEVFVGVDMAKAEHYAQAITADGVEGFGRPIDNDQAAIEAMLEDAGRHGTVALVIDMTASGAQLLLAIAAERGVPVAYVTGLQMRRAAELYAGTAKTDPRDAWVLADFARRNADRLTWLEVSDELLVRLRVLNGRDVDLATDSNRVINRCRDALVAVSPALERTVGHRLGQPGVRDAVARWSTPSALRSAGRTKVRNAIKKRSPRLADKVTDEIFDALDAQSVTLPAEETWGEVIADLLADLERIHARRTELGKTIEEVFLAHPLGAVLVTLCGFGPRTGARTLAEIGDPNRFETGSRLASYAGLAPTDWRSGKSINGSFQHRGGNHRLKNAMFIAAFVATQFDPDAKAYYQRKRDEGKRHNAAVICVARRRCDLILAMLKNRTPYDPSRHEGLPIAA

SEQ ID NO: 353940 - protein, 408 aa, unidentified
MDSVFRFFAGIDWGSEKHRVCLMNRDGQIMAERWIEHSGDSLAELAAWLRQHTSDSPSLLAAAIEIPRGAIVETLLEHGFTVFSINPKQLDRFRDRYSPAGAKDDRRDAFVLADALRTDMHCFRAVKIDDPDMIRLRELSRLDDELAQEQNRAVNRLREQFHRFFPQLLQLSECADEPWLWALFELAPSPLGAARLTEARIARLLRQHRIRRLTAAEVRAVLKTKPLTLAPGAAEAAAEHALLLLPRLRLLHQQRTDLVRRISALLDQLATPAEGQQEHRDAAILLSLPGLGRKIAATMLSEASQAIADRDYHALRCYSGAAPITRQSGKKKIVLMRRGINQRLRNALYHWARVSVVFDPQSKKRYAAMRACGHSHGRALRGMADRWLKTLTSMLTTRTLYDAQRRAA

SEQ ID NO: 353941 - protein, 359 aa, unidentified
MIADRTFVGLDVHARSVVACAIDAVTGEVSRARLTPGFEELWRWLQGFAGPVAVAYEAGPTGFGLGRFLTGRGMRCVVAAPSKITRAAGDRVKTDARDALLLARLLKMGELTAVAVPSIEAESARDLVRAREDCRSDLMSARHRLSKLLLRQGIVWSGGQAWTGAHDAWLRRQRFAEPARQLAFESAYETVAMTLARRDRLDAAIAVMAADSAFTPVVVRLGCLRGISTLTAFGLAVEIGDWHRLTGSTIGSYLGLTPTEASSGASRSQGSITKTGNTHARRLLVEAAWHHRRQNRAGKVMLDRWQQAPVAARLRGQEGNRRLHARWQRFDARGKRPVIANVAIARELAGWCWSLAVMD

SEQ ID NO: 353942 - protein, 345 aa, unidentified
MEVLIGLDPHKATNAVAAIDDRGQLLEYAVFATNRAGLRSLVRWAKRFPTRRWAVEGAGGLGRSVALHLAAAGEKVVDVPAKLSSQARLLATGNARKNDQVDAIHVALAALRGERLAEVGEEEQAEVLRMLSERREDLVKERTRTLNRLHGLLRDLLPGGAGKNLSAEKAARALRTVRPRSAPARTRRRLAADLVRDVRRLERQLSELEGRIREAVEEASTGLTQLFGVGPILAAKIIGRVGAIARFPSKAHFASYTGTAPIEASSGDVVRHRLSRAGNRQLNHALHMIAICQVRHDTQGRSYYRRKLAEGKSAKEALRCLKRRISDAVYKQLRSDLENRITLAA

SEQ ID NO: 353943 - protein, 374 aa, unidentified
MSKVRFLGLDVHADTIAAAVAEPNGEVRQLGIIPNRLESIRKLVNKLQPVGSLRACYEAGPTGYVLYWQLTALGVKCEVIAPSLVPTKAGDRVKTDRRDAVKLARSHRSGDLTAVWVPDAEHEALRDLVRAREDAKQDQLRARQRLGKFLLRHGKRPESTMKVWTGKYMEWLKSKVHFEIAALEATFLDYVHEVTHQAERIEDLEKAIDAAIAAAPAQIRAVIEALQALRGVAKITAVTIVAEVGSFSRFENPRSLMGYSGMVSSEFTTGNQVRRGKITKTGNAHLRRVVGEAAWAYQRRPWVGGFLRKRQQGLDQEVKDIAWKAQTRLHSRYTKLTGRGKNKNQTVVAVGRELLGFIWAIATRTEAKFQKQAA

SEQ ID NO: 353944 - protein, 466 aa, unidentified
MSTLQPRPKTLHVDGLPTIHPNAAGIDIGADEMVVAISPDRDDHPVRAFRTFTPDLHALVDWLLACGIDTVALESTGVYWVPIYELLEQHGIVPYLVNARHVKMVPGRKSDWNDAQWLQKLHALGLLAASFRPDGEIVALRTLVRYRSELIQHRAPHILHMQKALQQMNIQLERVLSDIMGVTGQAIVRAIVAGERDPLTLAQMRNATCKSSEETIARALTGSWKAEQVFVLTQALVIYDVYTAQIAVCDEQIEQYVQQMESRHIPDAPLPDLPAAKKKSKTKNAPAATTRAQCARIVGVDLVAVMGLSASGVQTILSEIGTDMSRWPTVKHFCAWLGLAPRNDISGGQVLRSRTQKVVNRATQAFRQAAQSVSRSDSAIGAYYRTMRARKGPQQATVATAHKIARVVYHLLKYGEAYEGESAEQFEQQRQERERRQLERRAQKLGFTLTPAATSQSEPVIEPGPH

SEQ ID NO: 353945 - protein, 294 aa, unidentified
MAFAGVDLHKSFCQAIVCTSEGDVLKEGRIPTEQEDIEEFFSGLECLEIALEASTNYEYFYDLLESLGHHVVVAHPLKTRMIADAKVKTDKRDARILAELLRGDLLPTSYVPPKEQRELRHLLRHRIELGRLRGRLKTQIKTELRRKNIKYHEGGNCFTEKGKAELKRLHNPVINSYLTIYAVVEDELKKMDRAIAEAGTQYEAVKLLTSIKGIGVYSALVIYSEIGDGSRFPTEDQIFFSYAGLVPRVHQTGNEQYYGRITKEGSKYLRCGGSWWRLHGSTCSGARRADNETL

SEQ ID NO: 353946 - protein, 338 aa, unidentified
MNIARIGIDLAKQVFQIHGVDRTEKVLVRRQLRRSQMLGYFSKLTPCLIGMEACGSAHYWARELGKLGHEVRLMAPQFVKPYVKSGKNDANDAEAICEAVGRPNMRFVAIKTAEQQVIQAEHRIRARLIKSRTALSNEIRGLLAEFGIVVETSIGRLRKALPELLEDSENGLPRSFRVLLAGLGEELRALDDSITAFDAGIAQRAREDGRIRRLLDVEGIGPITASALVAAVGNGTQFNSGRDMSAWLGLTPRQYSSGGKNRLGGISKRGDKYMRMLLIHGARAALNAAKNKEDGRSRWVKSLATRRNKNIATVALANKNARIAWSILSRGESYRKAA

SEQ ID NO: 353947 - protein, 353 aa, unidentified
MRRPKDKLIAGMDLHSNNVVIGVINQDGKRLMHRKLGCELGEVTDFLKPLKPQLQSMAVESTFNWYWLVDGLRAANYPIDLANPAQIEQYNGIKHADDKDDAFFLAELQRLNILPKAYVYDPQLRPVRDLLRRRTGLVHQRTSLLLSFKSLYTRTTGQKLDLSEVKKLEPKHAPELYEHPANQLIAQVQAEHIQALDQSISRIEKAVLGCAREIPMYEKLLTIPGIGRILGMTITMEVGDIHRFKSDGDFASYCRMVDAKRLSNGKCKADNNRKCGNKYLAWAFVEAANYARRFDEHCRRWYDRKAAKTNSIIATKALGCKLAKAAWHVMVGECDYDEKRMFPELVVKSAKAD

SEQ ID NO: 353948 - protein, 372 aa, unidentified
MQQKSKVFVGLDTSKLKISVAVAEDGRQGEIRFLGEIDNTPEAMRRLVHKLASRHSELLFCYEAGPTGYGLQRQIAALGHECAVIAPSLIPKRPGERVKTNRRDALTLARLHRAGELTAIWVPDPGHEAVRELVRAREAAMEDLREKRQHLQSFLLRHGRIFPGRQPWTRAHARWLAELVFEHSAQYLVLREYRQAIEEAEARLDRLTQQVAEVVATWSMAPVVEAYQALRGVALLTAVTFVAEIGDVRRFESPRQLMAYLGLVPCESSTGERVRRGRITKAGNARVRRVLIEGAWTYRFPARMSRLLQERQKGLPAIVRAIAWKAQVRLCARYRRLMAAGKRQTVVTTAIAREMAAFLWAIGREIEPRSAA

SEQ ID NO: 353949 - protein, 333 aa, unidentified
MEKKRFVGIDISKKTLDVVIYDSKKKHADCNTYRRVTNDEEGYKNLLGWFKSERIKLSELVVGLENTGAYGYDLCLFLESKQVDYCSFNPLTLKRSMGLVRGKNDKVDAERIAYFTWLHRDELKYTKLAGSTILRLRELSTERKRFVKQRAEYEGLLTERKRPDMTSSSLRAEKMRRILEEEIDAVEKEMEEVIKQDPQIHQNFQLLMSIKGIGKVNAISTIIHTNNFESFQTARQYACYLGIAPFEHSSGTSIKGKPKVSCVGAKQLKADLSQAAMSAVQWDREIRLYYVRKINEGKTFGVVLNAIKFKLVCRMFAVIRRGTPYVDLMAYKN

SEQ ID NO: 353950 - protein, 339 aa, unidentified
MNSMAVGVDIAKQVFQVHYVDRETGEIVNRQIKRAKFLEHFANRAPCLIGMEACGGAHHWARELTKLGHEVRLMPAEFVKAFNIRNKNDAADARAIWLAVQQPGKPVAVKTEMQQAMLALHRMREQLVKFRTMQVNGLRGLLTEYGEVMRKGRAALDKEIPAALGRIAARLPAALIDTLREQWNGLARLDEQIAEIERRMREWKQQDRAVKAISEIPGVGLLTATAAVAMMGDPKAFRSGREFAAWAGLVPKQTGSGGKVNLHGISRRGDTYLRTLLIHGARSVMTHTKEPGPWVEQMKQRRPMNVVIVALANKMARMIWAVLAHERPYRNDYVSVKPA

SEQ ID NO: 353951 - protein, 354 aa, unidentified
MEQGYHIGIDLHKRFSQVAVLNGEGEVLDNRRVDNDPPLLLQHLSPFPKETPVTLEATIGYEWMSDLLTENGFEVNLANPKKVRLIAEATIKTDKVDAVTLAQLERTNFLPAAYLPPPEVRDTRELLRHRIKLVNLRKGLKNRIHAVLAKRGVLFYPVKDIFGKAGRSFLSSLQLPSIYRKEVDGYLSLIDQIDSIIKQREKDIKNQVVKENKEAQLLLSIPGISYFSALLLVSEIGDIERFPSHKKLASYTGLTGTISESADKTYQGSLKKDSNKYVRWILIEAVEHAIKKDPGLFAFYRKISYKKGNNKARVAVAHKLLISIYFMLKNNQVYQIRKPNTLPSGKPLFCHGHH

SEQ ID NO: 353952 - protein, 425 aa, unidentified
MKYRIAGIDVHKRMLAVVIADIAVDGEFQFQRRMVGTSPSELCRLAEWLAAEQVEEVVMESTAQYWRPVWAALERQWRPRRLQEGSGAKSGQLHLAQAQSNRGAAGRKKDFPDAERLVKRLAAQELRLSFVPDNEQRLWRTIMRRKHQLTRNRVQFQNRLECLLEEAHIKLSSLVSDLLGKSARRMLQAVAEGAASPEAIAALADRRLRATAQQLSDAFGACRDIHPAYRQLLKMALEELQLIEEQIDTLDQEMARLLGAQRDVVQRLAEVPGLGADSAQQIIAEVGPAAAAFPSAKHLASWVGVCPGEQESAGVNYSHRSPKGNRQMKGLLNQAANAAVRTKGSIFEFVYRRLVPRLGHAQAIGAIAHRLCRLIWMILHQAIRYEERGPAVSRSKTERRARLMIRELRRLGYRVEPVAAEGVSA

SEQ ID NO: 353953 - protein, 443 aa, unidentified
MPIIRRNVAGIDLGSERHWVCAPTQDRSGREVASFGATTAELLRMAEWLKARQVESVAMESTGVYWIAPHEVLEAQGLQLLLVDTRQLARVPGRDKKTDPTDCEWIQRLHSCGLLRGSFRPEEAVCMLRTLVRDKANLVGESGDWLRRMQKSLDQMNVRVHRAVSDIDGATGMAILRAIAGGERDAQKLAKFRDARCRKTEQEIAEQLSGHWREDHLFSLQQALKMYDAVQERIAAYEKEILRKLDEMEREEPPEPTAPPLQNANKARTIKKRGQEAKRQALYRMSGVDITQIDAIGVETVEVVLSEYGSDLNCFPTEKQFVSHVTLAPRVPKSGGKPVRKKKRNSASTRVAAALRMAALSLRHSQTALGAYYRRMAQRRSADIAVFATARKLATLIYRLLRWGQPYVDEGAAAYENRYRQHRIGRLAATAKQLGYQLTPVST

SEQ ID NO: 353954 - protein, 361 aa, unidentified
MQKIRDYVLKGKKVFVGLEDAKKSWKICVRSNRTVVHETSMPAEYENLRNYFRNKFPDCSIRVMYEAGFRGFELRDSLVADGWECIVTPPHTVTQEKCNQQKNDRTDCRRLAKNNENGDYRECFVPDRQLREDRQISRLLSQVQKDITRASNRIRRTLEFHGIDSHFAPGRWSSKQYWEAEAKLKSLSLSESLQFAFACYFEELRILRTKKLQILKRLRVLANSDRYQKQVELLQSAPGIGQLTAIRLTLEWGDLTRFKRKQNFSSFLGLIPSDYSTGEQDRKGHITKQGNQQVRAWLIESAWVAQRKDPVLLEKYMAVLSHCGSGKKAIVAVARKLALRLRTIVLRGEPYQIGLVECAEA

SEQ ID NO: 353955 - protein, 418 aa, unidentified
MHETQSWFAGVDWASQKHDVWLTDASGKRLGKRTFAHSGVGLAQMCDWLIATSGGKPEDIHVAIEVPHGAVVETLLDRGFKVYSINPRQLDRFRDRFSPAGAKDDSRDAETLSSSLRTDRRAFHQVSLAGPAIIQLREWSRMADDLRADQIRHANRLREQLQRYYPQMLQFDSDLAEEWVLKLWEAAPTPAKAARLRQAEVEKLLKRHRIRRIDAAKVLAILKEQALIVAPGVTEAAVAHIRVLIESIRLFTRQLKEAHQQLDKLCKLLAEPAARENEQTGPEPEQTLGAILQSLPGAGRIVISTLLAEAFETLQRADYPILRKLCGVAPVTRRSGKSRAVTRRLACNPRLRNAIHYLADAARRCDEKSKAKYLALKARGCSHARALRTIGDRLLYVACAMLKNRTLFDPGLESQKCA

SEQ ID NO: 353956 - protein, 336 aa, unidentified
MDHLAIDLGGKESQICVRRGDGQIVEEKRCRTATLPAYLASRPRSRVVVETCSEAFRVADAALAVGHEVRVVPATLVRSLGVGARRLKTDRRDAQVLSEVSCRIDLPSVHVPSQQARQRKTMCGMREAVVGARTKLVNTVRGWLRAEGRRPRGGDAATFPARVRVLYADTPLPTYVERQLRTIESLNKEIVAADRELAATAKADPIARRLMSVPGVGPSTSVRFVAALDEISRFRGAHAVESYLGLVPGEDSSAERRRRTSITKAGPAALRWCLVQAAWAARRARRKDPMHRWADEVEKRRGTRVAILALARKLAGMLYAIWRDGAVYEPRLSGAA

SEQ ID NO: 353957 - protein, 290 aa, unidentified
MDKYKETFGVDTSKDVFDVYSSEGGHSQFKNDSSGFKLFVSTLAVDTLVVMEATGYYHYRLAQFLYKNGIPVSVVNPLSVKRFIQMKLSKIKTDKSDAKAICDYGLSTEVALYNALNDVQAECLQLFRLLDSYLKKRTATKNKLHGEEVLGIPSKYVYRSLKRNLKHLDKEVKGIEARLLELVKQEQQQQLTLLTSIPGIGIKTALFLVVVTDGFAKFEKASQLCSYVGITPTIRESGSSVRGRSRISKVGNKKLRNLLFLCAFNACKHNKGCRCKLPLKPNCLKVEYLS

SEQ ID NO: 353958 - protein, 343 aa, unidentified
MKTTREFRETPLAWYVGIDISKAWLDVHLRPTGHALHCENTATGFAALDRWLRQQGARPPTTILCMEQTGLYGHRLLATLTDWGWQCAVEQTTILAKVGPAHHRKADAYDAALMAEYAERYRDTLHLYAPAEPAVEQLRILYAERRRVVRARAATKTKQAQADQVVHLPALLPEVWADQRVFYDAQIARLEARMQALVDGHDGLKRYFALLTSIPGVGPVTAWLWLFVFYGQPPLHHKQIASRFGFAPHSHQSGSALRGKPRSSGHGVAAMRAQMTMVARSVSTHCPKFQGYKKKKTQENKCGPIIRNNLINKMIKIMCAIWNSQTLYDPQHTSRFDRQKQAA

SEQ ID NO: 353959 - protein, 335 aa, unidentified
MEFTYFIGTDVSKNELDFAVMRGKTLLFHQEIANTEQAITVFIKELNKLPAFDLCNAVFCMEHTGIYNNHLLVYLHKKKANIWLESAIQIKRSSGNIRGKNDKVDAIRIADYAYVQRDKVRLWTPKREVIQQLANLAGVRTRLIEAKKMLKTPLQEQDSFNTKRIIKQGAAVCSHTLKAIDADLEKAEKAIDQLIAKDPELKHLFSLICSVTGIGRVTATQILITTNEFKDINNPKQYACYAGVAPFIKESGIFKGKGRVSQMANKKVKTLLHMAAIVAIQYNQDLKFYFDRKVNEQKKNKMSVINAVRNKLILRIFACVNHNSPYQNNYQKLLA

SEQ ID NO: 353960 - protein, 369 aa, unidentified
MDNDSTVFIGLDVHKDSIAVARVGSATSDPVIDVGSIGTRQYAIDRLIAKLSGHGPLQFVYEAGPCGYWLQRYLTAKGQDCVVAAPSLIPRRPGDRIKTDTRDARNLALGLRAGTLTAVHIPGPEQEAFRDVVRAWQQSKREVAKGKQRLKAFLLRNDLRYAGTASWSEAHRRWLATRVLPSAAQQVVFQELVDTITEREARRSRLEAQLAELAPHWSGYPVAQALLAFRGVQQAVAYGVVAEAGDFARFSHPRRFMAWLGLVPSEHSSGGTRRQMGITKTGNRWARTLLVEAAWAYRHTPKVSAIIETRAQDIDPAIRAIAWKAQLRLTRKYRRMRAHGKQHNVIVTAIARELAGFLWDAARLAITAH

SEQ ID NO: 353961 - protein, 465 aa, unidentified
MSTDKKLWRNRKAKKELARRLQSENPGLEVVHPHAAGIDVGNGSHYVAVRPDRDPHPVRRFECFTADLYRLAEWLQSCGVQTVAMQSTGVYWIPLYDILEERGFEVYLVNAQHTKNLPGRKSDVQESQWLLKLHTYGLLNNSFQPPSKIRILRTYWRQRLQHVTGAATCVQRMQKALTQMNIQLANVISDLSGVTGQLIVRAIVAGERDPRKLAELSHPRIQASRTEIAKSLEGTWRPELIFVVQQELEMYDNYQRRVAECDEQLQKHLAGFADTVPPLVKEDLPPKKKKKQNKNNPHFHLADELQRITGVDLTRIDGVDVIVAQTVISEVGVDMSPWKTEAHFASWLGVCPDNRISGDKVLARRTRHVLNRAATALRLGASTLLKSQTYLGAQYRRLRSKLGAPKAITAMAHRLARLVYRMLKYGQQYVDKGAEYYERRNRQQQIEFLRKKAARFGLQLTPAQS

SEQ ID NO: 353962 - protein, 411 aa, unidentified
METTYKIVGIDVHKSMLAVVVTEVATEGDFQFERRKFGTTESELRQLAQWLAEQGVREAVMESTALYWRPVWQQLEGQCDLYLAQAQSNRAPRGRKRDFADAERLLRRHVAGELILSFVPGPEQRMWRTMTRAKHQLTRDRVRIHNQLESLLEDGRIKLSGCVSDLLGLSSRRMLKALAEGERDATRLASLADPKLRAAPEQLQDALYAASTLSALHRQILGLFLTRLELVEHQIEVLDQSVGQALRAHQDAVLRLAEVPGYGVDSAQQVIAEVGPAAATFPSSEQLSSWVGTCPGREESAEVSKNNRSPKGNRMMRRVLNQVAHAAVKTKGSVFQALYRRFVIRLGHNKAIWAIAHRLCRLTWKILHQGVRYMEFGTRSNSKTAKARIDKLIRELRSLGYHVQLSQMATP

SEQ ID NO: 353963 - protein, 394 aa, unidentified
MKLIGIDIGKNKHFFCIMDQQTGEIISQPISFSNDKEGFDFLVQKIKSYPKDSILIGMEDTGHYHFALLKYLLDLQYTVALINPKTTDFNRKMQGGITKNDKLDTINICDVLDTPERKKQYRITKVNSFDLYEQKQLTRHHHNLKEEENVYKNRLQKCIDIVFPEFNNLFNSKYGTVYMNILKMFGSAENIANTDIRTIRKCFEIEGRGNRISLTPERLKECARSSIGISSSAEVIQIKHLTAQIELIEEQLTEIDKKIEEFSIQNNSPILSIPGISHFSGTSILAELGDISNYSKPSQIIKFAGVAPLHYESSQFNAQHTAITKKGSKYLRKTLYQIILPVIRHNPVFNKYYQLKISQGKGHRCAQGHCVRKLLRIIYHLLKTNQQFDPQLLR

SEQ ID NO: 353964 - protein, 418 aa, unidentified
MLTASWFVGIDWASEAHEVCVLDRDGHVCERRQVRHTAPDLQTFVDALLARADGDPRAVAVGIEVPRGGLVDLFVERGFLVYAINPKQLDRFRDRFTAAGAKDDRRDALVIGDSLRTDSQAFRHVRLDHPVIIQLREWSRIDEDLGGELTRLTNQLRDLVYRSTPGLLSLCPAADEPWFWTVLGMAPTPAAQQRLSERRLERLLHTHRIRRLTAKQVREVLQQPPVFTAPGVAEAVADHLAVVLPRVELTATQRRAAERQLDRLLEALDQDMPSAGDQREHSDIAIVRSMPGIGTRVAARMLAEGSQPLVDRAYHVLRACMGVAPVTKQSGKRRSVSMRYGCNARLRNAAYHWARAGAQKDPASRTYYETLRARGHSHGRALRSVADRLLRILMTLLSRGQIFNPSHGQSPPSVPATA

SEQ ID NO: 353965 - protein, 309 aa, unidentified
MNCKEKVYCGVDVSKLHLDVLFKGRPDRFDNTIKGVESMLARIGKVHYVLESTGGYERMAAWKLMDAGADVSIVNPSRVRYYALSMGQLAKTDPIDAGVIGDFAAAVHPERSEKPTKEQRLLCALVDRRQQLNEMRTAERSRLETAADPSFLKMVKKHLNWIEKELKMLEEKIAETISTNAQMKEKNERIQRIKGLGKICAATLLAHIPEIGTLSRQEIAALAGLAPYNRDSGSTCRRRHIHGGRKRLRACLYMAAVCAIQHNPAMKEFYTRLVEDNHRPKKVALTAVMRKLIIAANSAVKNPDFLVVV

SEQ ID NO: 353966 - protein, 344 aa, unidentified
MPIVKAPAVTGGVDTHADTHVAAALDGIGGLLGVSEFPADPAGYRQLLGWLQGFGTVCLVGIEGTGSYGAGLARHVAGAGIRVVEVNRPDRADRRRSGKSDPLDAVSAARAALSGRATAAPRGRDGAVEAIRALMVAKRTARSQRTQTINQARALILAGPDDLRGRLGKLAAADLVAALAALRPRPGSTPGHATRTALRELGRRAQFLDAQLTRLDDLITPLVTARAPGLLTLHGIGPDTAAALLIAAGDHPGRLRSEAAWAHLCAAAPIPASSGKTTRHRLDRGGDRQANHALWRIAITRMASHPPTRAYVTRRTAEGRTKPEIIRCLKRYIARETYRYLTPS

SEQ ID NO: 353967 - protein, 327 aa, unidentified
MKRVYVGIDISEKTLDAAVCKNLKEEVDVVFQVRNNIKGIDKMVSKCRKYGKELWFCFEHTGNYGLLLSSQLEALGQAYSALPPLELKRSLGLVRGKNDKVDARRIAIYAASHAHKLKRTQLVRETLLKIKSLLTYRMQLSETLRRFKNSLKSHSITHSTIKIESIVNGIKDNIQNLEKQIKAVEKEIMELIGSDDKLKENFDKISSVTGIGPIIASYMLVLTNNFTFFNNPRKFNCYSGLAPFEHRSGTSIIKKTKTSRLRNKKMKALLYNGANSAARYDMQLRAYYNRKKKEGKHHQLIMNNIACKLVYRVFAVVNREEPYVKFQ

SEQ ID NO: 353968 - protein, 470 aa, unidentified
MSKGSGMTRGDRRRNARRERLRAVLPRDGAVTGIDLAEDKQAIAVIDHDVRVLARKTVQVKAFRLGEALDWAVGQARAKGFASVTVACEPAGPRWLQVQRLCAERGLPLVCIQPLMSHIAREQQDYTTHKTDEADCVLIARLAVELHCYLPEELDETWAHLRHLGRRRQQLITSATASAQRIQDFLSVAWPTVTETCAQPLESRTWLAALQVVTSRCGADPGKLAVMGPEAFTALVRGAVPGWGGKKGWGTICGRIFAALTSTEGVVVSSRRGLLRRVADELGDLQRVRAQLRAVEADMAAVLDELGLSRLADIPALTAVGAAAILAEAGDPRRYDSSSSLVKHAGMSPSDNASGAFYGEAHISRRGRPGLRLTVWRAVWPTLRYNPVMAAKYHAMTQAAGTAAQTAEAQSGAGSRQVSAAAAAARARRAKARAACAASLLRWIYSMVVHDTSWDPATAAGTASCPAEAA

SEQ ID NO: 353969 - protein, 372 aa, unidentified
MTSIIYVGMDVHTTNYTLCCYSMEDDRFFAEVQVEPDAKNILKYLARIEKQQSRDCRIVCGYEAGCLGYSLYHQLHAHGIDCVILAPTTMMTKPGKRIKTDRRDARLISKCLAFHTYSPVYIPTEVDDAVKEYIRMRDDANSALARVKQQIIAFCIRHGKIHDGKSYWANKHLEWLSSLDLGNKILSEVLQEYLIRYYQLREQVDMYDMRINELAQAEPYRQKVEKLGCFRGIAAHTALSFCVEVGDFRRFATAQQFASYLGLVPGECSSGDKQQYTGITKAGNSHLRKLLVETAQVFGRSATKSGKSVALKERQAKCDSLTVAYADKANARLKKKYFKIAMRSKVNIAKTAVAREMACFIWGMMTDNISCA

SEQ ID NO: 353970 - protein, 403 aa, unidentified
MTSFSYFAGIDWASQSHTVCVLDAAGRVELRLDLPHNKEGIERLIRQLKSFPGIVIAIERPSGLLVDALVEAGLRIVPIHPNVLKASRARYRGAGKSDPGDAYMLADILRTDGHRFRTLEPQSDEIRALRALVRTRDDLVAERVALANQLRSLLQSFWPGAVEIFAEIDSPIALAFVARYPTPQSAARLGEKRLASFLAQHGYCGRRPVVALLERLRGAADGHAGELEGEARGELAHSLAAILERLVNELAKLSARIEHTVANLADGQIIMSFPRSGRICAAQILAELGSVRERFPTESHLAAEAGVAPVTYESGKHRSVVFRFACNHRLRRALTCFADQTRHAHPWAADVYLRARSRGCDHPHAIRILARAWVRVLWRAWFTRTPYQPHLHRSAAALQATMG

SEQ ID NO: 353971 - protein, 430 aa, unidentified
MNLKPIAGIDVSKYFSEMVVISPANEILARLTIHHNNPSDFDRAIEILKKVEEDFAARPIIVMEATGHYHKILSRFFNCRGWDVSIINPLQSNSIKNAGVRKVKIDKNDALWIALTFRLTNSAIAQPSSEILDCLKNLCRQYYNLSDELTSYKYRLTSVVDQIMLNFKEVFPDICSKTSLAILENYPTPNDILSADSEKLISIIQQTSKKSYQWAEEKYELLIAKAKEFKPFSISNLANVTMLKVYINMVLTLQQNIDKIFEAINQLVQQSSQTQPSISENINLLQSIPGIGFLTAATILAEIGDFEKFSKPNKLVAFFGIDPSVNQSGQFVGTKNKMSKRGSKILRRILFTIALANIRTKRDSKPCNPVLLEYYQKKCQQKPKKVALGAVMRKLICIIFAVMRDKKPFELRTPEEHIQKCFNKTAVYCV

SEQ ID NO: 353972 - protein, 384 aa, unidentified
METVVERPAALDVHKEQVTACVRVPAGRGGREQHLAEFKTTVRGLLALRDWLKAHGVTQVAMEASGVYWKPPWAILEDEFECLLVNARHVKQVPGRKTDVSDAAWLCQLLEAGLLRASFVPPKPIRTLRNLTRYRKAQIGERQREANRLHKILEDTGIKLDCVATDILGVSGRAMLDALVAGTTDPAVLAELAKGKLREKLPALREALEGRFDAEHGIVVGAILAHIDFLDEQITLLSDAIEEQIRPFASAVELLCTIPGVQRRTAEVVIAEIGADMSVFPTAGHLASWAGLCPGNDESAGKRRSGRSRKGSRWLSIALTEAAQANTRSRDSYLSAQYRRLKHRRGRDAGGDYFTRLDPDKQARRLVAQLERLGHLVTLQEAAA

SEQ ID NO: 353973 - protein, 276 aa, unidentified
MKEYIAFDSHKYYTLMERENAQTGRTVQQRIEHQRGALCAGLRECPPHQTVAVEATGNWYWIIGEIEQAGHQPLLVNPRKAKLMMGMINKTDKLDVHGLNRLQRNDTLPTVWIPPAELRDQRELTRTRLVLVASRTRLKNRLNATLAKYGLNIEASDPFGRRGREQWLACLPALPPQTRFVTEQLLQQLDFLQGQIAQQEQRLEELLKVTPPMQRLQTLPGIGLILAATVALEIGEVDRFASHEHLASYAGTTPRVDSSGDKTRYGRLRMIKRREI

SEQ ID NO: 353974 - protein, 392 aa, unidentified
MEIYVGIDIAKETHWACALDARAQVLLDRAVDNDQAAIEHLVADLHGLGGEVVVGLDITGSLARFLEGILLAKGLRLVHAPGIAVNRAGQGFSGGERKSDPRDAHTIAELVRTRDLRPILPDDETAIALRLKVTRRRELSDDQTRRISRMRQLLGAIHPGLERRLDLTAKGPLVLVTRYVTPAEIRRAGLKRIMAHLKRIPHLHAVEALAQRALEAAEGQSIAVPGEASFADMVRELAAEALQAREAIARIDRDLEALLERHPDGALIRSLPGMGAVLSAELIANIGTIERFHSADAMASAAGLTPVIRQSGKSRNWRRALGGDKALKRVFFQSAFCAVSTRDPLSKAFYDRKRREGKHHTQAIIALARRRVTVLWTMLRTRQTFDPTQKAA

SEQ ID NO: 353975 - protein, 319 aa, unidentified
MAQKTRIVGLDVAKNKVDACIRSAGVRLMTPSTPEGQAELVAWLRAHRVRRAVMEASGGYERSWAEALRAAGFEVLIVDPRQVRCFAKAAGRLAKNDPIDAETIAWFAETFSDREAQPADPARQEIDRLVQARTALKDLEERITQQGEHCPPDIVAKALGAIAKAMRAELRKLEAAIAAKIKANAVFARRAEIIDSVPGLGDQAIAGLIAWAPELGRITNQAAAALIGAAPYDDDSGERKGVRHIKGGRRKLRNLLYMPVMGAATQHNPVLKAYYQRLRARGKEAKVALIACMRKLIVILNTMLARDQTWSPPPAKAAG

SEQ ID NO: 353976 - protein, 410 aa, unidentified
MLVPPKVYVSVDVGCRRHSVAIGLSSGELLEAFDIDHRPEGFKDFFSRIERHHRRYPGAAPVVAMEGYNGHARPLDTLVQERGWQLLNINNLKLARFKQVFPAAAKTDPIDARRGLELMQLGEHLPQARRALQEVHAPTPENAMLKRLMRRRRALVDEKSRVLSRMQGDLRAVCPGLLDITNDAENLWFLNLLTHSEDLAKLAGLREKTLLSIRGIGAKYAARIRQWQGQAQFSHETPYAGPMIIDDARRILALGKAIDALERQCEGLAEASDMARLIDTLPGFALICSCELAGEIGTLDRFTGEASLAVYIGMANLDNSSGERKGARAPGQVNKRAKAAMMTGVDRHRKQVPESQRYYEKKRAEGKTHNQAIRALGRHLCRVLYRMLKHGEAYRIREPASVATEQALAA

SEQ ID NO: 353977 - protein, 350 aa, unidentified
MPRKFDTAVVTIGIDPGKNTLHLVGLDARGEIVLREKVARTKIVSRLANVPPCLIGIEAGMGTHYVTRQLLALDHDVRQVPPVYAKPFRQTHKNDFRDAHAIAEAVQRPTTRCVPPKTDEQLDLQALHRVRYRLVGQRTAIINQIRCFLLEHGITVRQRLHWLRHTLPDILAQRTDVLSPRMVRILEDLAQDWRHLDDRIEAVSGEIEALSKNTKLCLNLMTIPGIGPIISSAVVAAIGDGVAFARGRDFAAWLGLVPKQISTGDRTILGRITKRGNRYLRMLFLQAARVVLLRPKNWMQHSFGPWLAAAAQRLHHNVLATALANKLARIAWSVLVQHREYEARLSVATT

SEQ ID NO: 353978 - protein, 345 aa, unidentified
MKITTAGIDLAKNVFQVHAVDERGKTVLRRQLRRDQMTAFFANLPPCLIGMEACGSAHYWARTLQSFGHTARLMSPQFVKPYVKSNKNDVADAEAICEAVARPTMRFVPVKSVEQQTVLSLHRVRQGFVKARTAQANQIRSLLGEFGLIMPAGICHIAKRVPSLLEDTRNPLPGALRQLITRLTEHLKDLDQRVAEFETQIKAWHRSSELSMKLEKIPGIGPLSASALVASIADATSFANGRQLSAWLGLVPRQHSSGGKPTLLGISKRGDVYLRTLLIHGARSAILAAQRKAVNSNVWLAGLLERRHPNVAAVALANKNVRTVWALLAHGREFRANYVPRPVVA

SEQ ID NO: 353979 - protein, 342 aa, unidentified
MSGDYDGRQYVGIDLHRRRSVIVRTTEQGEQLGWVRIDNDPVALGLELAKAGPDPEVVLEATYGWYWAVDALQTAGAHVHLAHPLGVKGFAYRRVKNDVRDAADLADLLRMHRLPEAYIATPQERELRELVRHRAKLVALRSGLKAQVHATLAKQGRLPAASDVFGRAGMAWLRSAPLELVYRQRIDSLLELIDAYDGEIETFRTMIANRFTGHRGYRAIQQISGIGPTFAAVFVAEIGEVTRFSRPEKLCCWAGLTPRHRESDTTVHRGPITKQGSKLVRWAAIEACQHTRAGTKLSADRSRIIAARGRNVGIVAAARRLLTLVFYGLRDGEIRALAARAG

SEQ ID NO: 353980 - protein, 341 aa, unidentified
MQQVYVGLDVHKKFIQGCILDKEGKVILEQKFKNEPHSTDLFLSNITKDSKVALESCSCWQYVYDYLSDAGYKDLVLANPSRVRLIATSRKKTDKHDAKVLADLLRMNMLPESYAPPLEVRYERQITRHRLSLVRLRADVKRKVNALLLRHGYQHEYSDLFGKAGMEQLYSIDLPMCDRFELDNYLKTIEFLTEKINNTQERVKDFVSYNPQARLLMSIKGVDYYSALMISAEIGDVRRFNSAKKIISYAGLNPSISQSGDKCYVGHISKQGNNNLRWILVECANIAVMHDSNLALFYHRIKKRKNHKVAIVATARKLLTIIYAMLMSNRNYVPQKKCKAS

SEQ ID NO: 353981 - protein, 401 aa, unidentified
MSKKNTRNALDTSLSYAVIGLDLAKADCAVAAVPCSDDDLGLIDRMDYESLFEQAEKLEPTLFAMEPCCGYSQISLRLQNMGHEVKVISGHAVKNWIATHKSNQKTDLNDATALAKLALYDHDLQPIRVKNVEECRIASVQAIRIQLRTQATKSLVCFKSLCQCWGIVIRRGSLNTKKMAEAVAAVEKLLGAEVASSLMILRDASKFTMKQINALDKLLDALVEANEQARTMKTVLGIGTQTAARLAVTTGDIKRFPMPRSYVAYFGLAPRNIITGHSGTPSPSKRDALKPVSSRGQGKVSRRGDRVARSFIIQGAATIYMLYCKDMLPECQLRRWLHEQIKRGKPYGKIIVSLAAKLLRIVWALLTYGEKFDIHKAGVPRSVLAAMEKPLKHDAAAESAA

SEQ ID NO: 353982 - protein, 349 aa, unidentified
MPVMIGVDPHKASHTAAALDEHGQLLDRQRIATTLDGYRLLRQWAVRWPDRCWAVEGAHGIGRALAQRLVGDGEQVLDVPAKLAARVRVLSVGHGRKSDPCDAVSVAVAARNAGGLRQVKVEDQATVLHLLTKRRQDLVATRTQTINRLHRLLMDLVPGGARRNLTANRAAALLATVIPAGAPAVTRWQLAGELVADVRQLEQRIAAIEARIKAAVAQSNTSLLELFGVGPVLAATFLGEVGDVGRFPSKHHFAAHTGTAPLEASSGQVIRHRLSRSGDRKLNHALYMMAMVQVRRPSAGHVYYQRKLAEGKSPKEALRCLKRRLSDAVYRCLVIDQAKQPPVMATTSN

SEQ ID NO: 353983 - protein, 403 aa, unidentified
MNAVGIDVSKGKSMVAIMRPFGEIVSTPFEIKHTSSDINSLVKLIKSIEGESRIVMEHTGPYYEVLAHQLSEANLFVSAINPKLIKDFDNDSLRKVKTDKANSVKIARYALDKWQNLKQYSVMDELRNQLKTMNRQFGFYMKHKTAMKNNLIGILDQTYPGVNTYFDSPARSDGSQKWVDFASTYWHVDCVRKMSINAFIDHYENWCKRKKYNFSKSKAEEIYGKAKELVPVLPKDDITKLIIKQAVDQLNSASITVESLRTLMNETASKLPEYPVVMAMKGVGTSLGPQLMAEIGDVSRFTHKGAITAFAGVDPGVNESGSYEQKSVPTSKRGSSDLRKTLFQVMDVLIKTHPQDDPVYQFLDKKRAQKKPYYVYMTAGANKFLRIYYGRVKEYLSVLPDPS

SEQ ID NO: 353984 - protein, 454 aa, unidentified
MAQETARKLISFKSTRFCRTTSQCRIFKILYLGGFMAFKIFRKNCCGLDVHKTWIYACIGITDTNGRTEYKQARFSSFSKGLTELADWLAKYSCTEVCMESTGKYWIPVFNILEKSCFVTLAHPKYTKPQKGNKTDRKDAKWICDLFMCDMIKPSFIPPADIRQLRDLVRYRTKLTNILTGEKNRALNCLTVSNLKLDDVFSDVFGKSSRSIIGYILEHPGQSFDVTPFVDKHCKKPIEEIQAAVDGAISREQAAKLKECLRHIDEIRAHKQNIELEIQRLAEPYAYALELLQTVPGLSSDPITAISVISEIGADMSVFPTSKHLVSWAGCCPRNDKSDSKVKSTRISRAGTYLKPLLVQVANAVIRSDKNPEFKERYRRLKARRGHRKAVIAICRMLLTAIWNILSKLVPYSPNGYLKDKITEHSVLISKAEGLALLRKRGYIFKDEVAASSS

SEQ ID NO: 353985 - protein, 325 aa, unidentified
MRYIGVDLHTTQITVCYLTEKEDFSIKKYQLCEIEKFVSDLRKTDEIAVEATGNTRWFVEQVKRVVKRVVLVNPREFDVVKNSVKKTDRHDARNLARFLRADLLPEVRGKSEEAEKVQSLVQTRIKLVRLKTSLINKIHGLSVSNGRKIKKTSLSSEKGLEKVLQAEWSAIERIELEIIIEQIRFLKVSIKKLDKAIATESEKLKGFNNLLSISGIGSLSAGILLSVIGNIQDFGTADKLASYFGIVPRVSNSNETVNHGRITKRGNKTGRTTLVQCSLSAIKQNDYLKKYYEQVKTRRGHGKAKIALARKYLGIIYNTLTKPES

SEQ ID NO: 353986 - protein, 401 aa, unidentified
MKYGVGIDISKGKSTVAILSIEGEVIEEPFEINHDIEGLNLLEEKIKDIPKEDLKIVMEETGIYHLPILGYLLDKGYFVAAENALKIKKYLDRGLRKAKTDKKDSLKIAEYACDNWYKLNKVRDSDEIYGNLKLLSRQYLGHMAVQTKQKINFSNLCDLLFPGYYQLLNDNSFILGLEIFKKYYHPEIVLNKKQSQFVNEIDKLAKKLGHKGAGITLANKIYLLAQKTISPCPNNEYAQLSAISCADALILTIKTTTTIISEMNKLARELPEYGVISEIPGCGKKLTSRVIAEIGDVRRFKNAGSIIAYAGIDAPPYQSGQFEATNRHISKRGNKYLRKTGYEIMKSIKSSCKSDNELKLYIIKKENEGKLKKVAKIAGLNKFLRMYYGIVKKKYKELGIW

SEQ ID NO: 353987 - protein, 415 aa, unidentified
MALKIVYKICCGIDVHKTFVVACIATTNNQGVTTYESHRFSTYTKGLKELLQWLLDRNCKDICMESTGKYWIPIYNVLEKQCTIVLAHPKYVKAIRGKKTDKKDAKWIADLFKHDLVAGSFIPPADIRQLRDLMRYRYKLTCFSSSEKNRLQNCLTVSNIQLGNIVSDTFGKSSQKILDKILENPLDSSFDIEPLIHGSMKKKLPELELAVDGYITPEQAGKLKVIKGHFEDLESRKAELEQLILALARPYQQKLDIILTAPSIKNPFTAIGIISEIGVNMEAFPSAKHLCSWAGLTPTNNESAGKKKSVRVSKAGCYIKPLLVQCANAVVTSKKHPEIRNRYLRIKKRRGHKKAIIAIARMLLTALYHMLKNEENYNAELYRKSDILPTGREITIEQAIIMAQFQGYKIKSVTE

SEQ ID NO: 353988 - protein, 339 aa, unidentified
MVIVGCDFHPGWQQVAVFDSGTGEIRELQLRNSEGEAERFYGSLPSPALVGFEACGNTHWFEDMLDRLGHEVWIGDAAEIRASYVRKQKTDKRDAAHILKLLMEGRFPRLWRPSKADRDLRQLLIHRDRLVGVRTRVKNGLHHLMLNKGVQLKRKLWSKAGQKILHELPLEGWAAQRRTDLLQLLRTLDPQIEELDVAVERAAYANERARLLMTQPGVGPITSLAFVITMGDVTRFPSGKQVSSYLGLIPSEHSSSKRRRLGAISKQGSPFLRMLLVESVQTVCRLDEGFRKQYNHRCHRMKKGIAKVAAARKLAVRLYWMLRTNTAYPEIAHIEGSPR

SEQ ID NO: 353989 - protein, 435 aa, unidentified
MDEVTDEPLYRDRVCGIDIGKAQMVATIRVPSDRDRSRRAQETRTFGTTKREVLALADWLRCWQVPAVVMEATGDYWKGPFYRLEAEGFECVLADAKQVKNLPGRPKRDPADSRWLTACFERGAVSACFVATPEFRIIRLHTRYRRDLIDERSRDKQRAEKLLESAAIKVSSVLTDLHGVTGRDIMDHLIAGERDPKVLAQLARKTARRKIAQLEEALDGAEFFTAEHAALLQTMLARIDRVTEEITRLTAVIETLLAPYEEQLAQAGSMPGWGRRSAQDALAETGVDMTRFPTGSHLASWGSRAPLDHQSGARKGRARVKKGNRYLAGVLGETAVAAGRTQTREGARYRRIARRRGKNKAQVALGNTQLKVYHKLLSNPGMRYEDLGPDYYERRADTRRQIAHHVGKLGALGFEVTLARIPEPDPDTPGQTQAA

SEQ ID NO: 353990 - protein, 351 aa, unidentified
MKYYTSTTEFNCGIDLHAQQMYVCVMDRNGNKLVHTNIQGNDFAFFLKRVAPYRHSLTVVCECTFNWYWLADACFEAKLPFVLAHALYLSLIHGGKNKNDRIDSEKLAHLLRSNLIPPSYIYPSERRPIRALLRQRMSYVWQRSALMTHVSMNQTAEGLVPAAKGGHNRDVWVERILAQYENPLHRMAVTCEMDMIRAYDTQIQTLEDEIIRQAKQHEGRDYHLLITVTGIGRILAMTILFEIDAIERFPSVKNFLSYARLVKGSVASAGKIKGLTGGKMGNAYLRWAFGEAAVICKRNHPLLTPYADRLIAKRGKFKGNAILAAKLARAVYFMLQKGTAFDAEKLIATSM

SEQ ID NO: 353991 - protein, 322 aa, unidentified
MSVMILGIDIAKQKFDVALLADGKIKNKTCKNSAEGFESLSLWLGKQSSQKVHACLEATGNYGEDLAIYLHEAGHIVSIVNPARIKGFAQSELIRTKTDKVDAGIIARFCLAMKPEPWIPPSPEIRSLRALVRRVNSLIDMRSQEKNRISTAHESVIPLIKEHITYLDQEIEKIRQQIAELIEQNPHLKQKKDLLASIPGIGKATIPAILAELDDLEKFNNVRELVAFIGLAPKETLSGSSIKGKPRLCKIGHARLRKALYMPALVSIQCNPVMIAFYNRLKEKGKNGKVIVCAIMRKLVHIIFGILKSGKKYDPNYKPTFV

SEQ ID NO: 353992 - protein, 351 aa, unidentified
MDRYVGVDGHSRSCTFGIVSASGRRLESKVVETNGRALVEAVRLIPGRVHVCLEEGTQSAWLYELFKPHVAEVVVSMPSKAKGAKDDKRDAWARAQELRLGAVETRVFKAPQHLAALRSAVRAYGFAVTDVVRAKNRLKAVFLGRGIVADAGVYDPERRDGWLAKLSGPYRQLAEVLSRQLDLVVPAWDEAESWLLKESKSHPIIRKLLTAPGMGPIRTAQVVAIVAVPDRFRTRQQFWSYCGLGIVTRSSADWRPGRKGGLERAQTLSTRGLTRKRHPLLKAVFKGAAMTVITQLPNDPLHAHYQRMIEKGIKPPLARLTVARRIAATVLSMWKNQEVYDSKRHAVVEQP

SEQ ID NO: 353993 - protein, 426 aa, unidentified
MKEHIDYLSTLFVGIDIASRIHVISALDFNQDFYIKMKPFENTKDGAGIVEKLIADVLADNHQFKYVVIGMESTGFYGVHLANYLSTSELLAPFSVRVYCLNPKEVKNYKKSFNDIGKNDGIDSFVIADFARVGRIAIKPWRGSQYLALQRLTRHRMHITECITREKTYMLNNIYLKFSQYALLRNGEHPFSNKYGATAEAILTEFTTNEDIVNSSIEELVEFINSKSKERIADPEETAKIVQAAARNSYRLDKCLYEPLTISIASSFNCISSFEKELKAIDKAILQTVQGLNPEEYTVLNSILGIGKVYSAGILAEIGSIKAFQNANQLAKYCGIVWNDNDSGDFESEDSRMSKAGNRYLRYYIIEATGSVINHCPEYKAFYQKKYAETRNHQHKRALALTSRKFIRLLFGLLDKGQLYSPENGR

SEQ ID NO: 353994 - protein, 424 aa, unidentified
MKVTYQTCCGVDVHKSFLVATIVKTTGGIEPYYQKKRFSTFNNSILEFKQWLLDNDCHDVCMESTGKYWVPVFNLLEDEINVVIANPRWVKAVKGNKDDTKDSKWIGDLFRLGLVKGSYIPCKIVRILREYTRYRYKLVSCRSSEKNRYQNALTVCNVALDSVVSDIFGKSSMSIIDYLLEQSGTSINHEEIASKLLRSLKSKEDAVIESVEGYQMTDAQKYRVRLVRAHMDYITAEINDVDKMIENMISSNPDFENAVQFLCTIPGVKRDSAITIISEIGTDMSQFSSSKRLCCWAGLTPGSNESAGKKKSVRITRAGVYLKPALVQCAHAAVKSDKSPYYKKKYESLVKRRGKKRAIIAIARMILTAIFQMLTTGETWNPCNLYKIDMPEALLEKQKQKAIKQAQKLLIREGLLPPTEPIAS

SEQ ID NO: 353995 - protein, 471 aa, unidentified
MIRSVGIDLHQGRHRARCLDERAQPCDSFSFPTTPEGLAALEERVFRDGANPIIVLEPAGLPWLIVAVYLRSRHPDCHLVKAKTQKVAALRRYLRGPVKSDRLDALTLAKMPFIDPEKLDDIYLPPAKIHALQRLTRQRKRIESDVSGRKIRISAIIDGYLPGVRQAFDNAWSSPFRAFLRSRLSPFAVIRDGEDALHAYLSKASNRSKWSRAQTGEVFLACQSMATVCELSKSAGTVDEEFFTDLQDEIARELRMLEADEVESEALAQRIAGLYRKLHPSDNLCTIPGVGEHTAPIFLATVGDPARFPNQSAFANWEGVVPGARQSSDAQAKGLRMTKAGPSIMRMALYQAGDIGRRWDPQLAAVYHREMVYHGKNHRQAMGAVMSHLGARVLRVLKEDSPYEMRDIEGNPINKNEARRLVLSKYHVSEDIRRERRRRNRKVGKDRETATYRTNEADKAPQPVQVQAVSQ

SEQ ID NO: 353996 - protein, 313 aa, unidentified
MTTSGAWIGVDICKTYLDVGSTTGTPVRAANDADERAALARRLKSDNVRGVIVEATGGLERALVQALEAEGVPAAIVNPARVRKFAEGTGQLAKTDRIDAVILARFGAYMQPAPTLLADAPRQQLRDLIAYRSQITREITARSAQIRFYAAPGLLERAKAAIEALRCERKALEREIEALIKSQDAMRALHRRLVTVPGIGLIGAATLIAELPELGRLSRRQIAALAGVAPFPNESGDRKGYRAIRGGREEVRQALFNCARVAIQHNPVAKPFYERLRARGKAHKVALVATMRKLLTILNAMLKTSTDWTCKPA

SEQ ID NO: 353997 - protein, 406 aa, unidentified
MELTPLYKRVIGLDVHHEQVTACAIVDESGENDSVIFQTFGTFHNDCQRLAKWAREFRPDLVVMESTGIYWKAVNRALQKEGLKTIVANARHLKRVPGRKTDLADSQWLAILGRAGLVSGSFIVSPDFEHLRLISRQRQKIAGMLISEKNRLHKVLTDAGVRLSLVVSDLHGVSARQMIKCLVAGGSADEALSKIHTKLHTPLEVIRQALDGDLTASHRFVLCEIMEHIESLEAAIVRFEEELLSGLVNYEWALRILETIPGIDRVGAAMLLVETGVDMGVFVDAAKFASWAGVCPGNNESAGKRKSGKLRKGNPYLRRILCEMANAARRSHSMLKAKYQSLVIRRGHGRSIMALAHKLIRVIFALLSKKLPYQDKTIDYDELVVRRQAPRWIRALKKYGFLAASV

SEQ ID NO: 353998 - protein, 342 aa, unidentified
MQISTIGFDLAKHVFQAHGVDIHEKVVVKKQLRRAQVIPFFEKLPPCLIGMEACASAHYWARELTKLEHKVKLMPAKDVKAYVKRSKNDAADAAAICEAVARPTVRTVPMKTPDQQARLMQHRTRDLLVRQRTQLSNAMRAHLAELGLIAAQGREGLKSLLAIVANENDDRLPADARASLGVLAAQILACNAQIATLEKRIHTQHRTCEASQRLETIPGIGVIGATAIAATVPDPSVFKTGRDFAAWIGLVPRQDSTGGKQKLGPVSKQGDRYLRRILVVGAHAVLKHARTHPEKHPWLMQLLARRPAKLVAVALANKMARIAWAVLARGETYRAPRIAATV

SEQ ID NO: 353999 - protein, 482 aa, unidentified
MKKKNIFQNRSQQLLRLFEKAGNRLKMMCVPIDYAKKDHMVMFCNGYGDIVRKPFSVKNTLKGVKYLIDQVMRSCRQRRIKKEYVFFGGEDANSYAENFANALRAKGFLVANVNAHDAKKQRETLQASTDRIDLMGIATMLLNLRAKCSPAQDGIYRNLRTLVRHRKKLVVMKTEVKNRVHTLIDRLFPGFLNEKNTGINPFSESSLVLMEDRFSAQQIRRRQQRTLIKILKRCATPNAESLAAKLHSYASQVITTPEEYAATLQLSLQHHIKHFRCLQENIDQLLTEIALVLAQTQAAFLTSIKGVGIVLAAGVSSEIGNPFEQKPLNNLTSYCGIIPRVKQSGGIEGHTHTGRVSKRSNHLLKDYVVQSALQMGVRGPEPLLQDYKRREASGQHADFGIGRRFLRMAMCLMRSSQIYLPPTLRSPKTQMHERAGYYLTTWPLLRDKWKKAHAHQTAFAKDQPLGQWRQVVQELYDIKLKL

SEQ ID NO: 354000 - protein, 480 aa, unidentified
MSSKCNVPSEKNQTAKYTKSLEIVNPCCAGLDIHKEKIWVCTSPFRDGVAPEISTFATDTASLGKLALYLQERKITTVAMESTGVYWLSAFLMLRQENLNPILVNPCDIKNIKGRPKSDRADCVWICRLHSYGFLRASFVPADTVLDLRSLYYAHEKFTAESASTIQRMNDELVKMNIRVDLILTDLSGVSGVRLVEAILRGVRSPESLYQLLDKQIAKKDKNTILCYLKGRDQAGNISILCSWYRVYLKLREEISCINEQIYGILQSLPKKADAKDIPRVKKNYREDKLDFPYELRPIFFEIYGVDLTQLPGIGAGVLLALICMVGTDLSPWPTAKHFVSWLGLAPINKESAGHCKSSSTRRIHNLLGNAFKMAAMAAKRTKTYIGRTARQLASRILPKKAKVAMARKLAELVYNILQNGMDLKVKTEEQYEQRRKQRDIRFFVKGLCKYVVNGKLLPEVEEAYHEYCQGMKAASLTNA

SEQ ID NO: 354001 - protein, 387 aa, unidentified
MSTSIRNVAQCSLYVGLDVHKESVMIAVLPQGAQTPSRIDKMPNDLKVLRRYFARLTDTGEIHACYEASGAGYVLQRALKEWGYHCDVIAPSLIPQKPGHQRKHDRYDAKQLAHLYRSGELTPIRIPTEAEERVRDLVRCRATFQRELLRARHYVLKFLTRRGLRFHGGKCHWTRAHHAWLQGLIRGAVLIEEDQIVFTEFLGLLTYAQQRRDALDTQIEQLALAPALATSVAWLSCLRGISAPAAVTLATEVVDWRRFAKPTQLMAYLGLVPREDSSASSERRGPVTKAGNSHCRHVLVQAAWAYRHAPRVGAALARRQRGQPPLVITHAWKAQHRLHKLYHRVAARKGSQVAVVAVARELVGFLWAIMQDCPDPIATTSAASAAA

SEQ ID NO: 354002 - protein, 396 aa, unidentified
MKFNTQNAKIEAITEKTLVLGIDVGSETHYARAFDYRGIEYSKKPFKFSNTEAGFVTFKEWILDLKERHEKDKVVPGMEPTGHYWFNLGKFLQDNEMKPVLVNPHHVKKSKELDDNNPTKNDRKDPKVIAGLVREGRYMIPYLPDGVYADLRTVSNIRFQLQAELTRIQNRISRWFNIYFPEYKTVYGKPDAKSGILILKAAPLPEDILTLGINGVNQIWRDAKLRAVGKARAKTLIEAAKHSVGSKEGAVAARMEIRMLLEDYESRNIRLQEVMTLIEGLIKQIPMAEKLLEIKGVGIRTVSGFLAEVGDISRFNNPKELQKLAGLALVENSSGKHKGETTISRRGRKRLRYLLFEVAMSLVAKNPEFRELYNYYTTRRLNPLKKCSHLWRLQPS

SEQ ID NO: 354003 - protein, 429 aa, unidentified
MRTESTPGARGPVFCGVDTHADSHWLCVLDWRGRKVLSRQFPADAAGYEALAGAIAAAGEPACVAMEGTSSYGAGLTRHLASLGMPVREALSPAGTQRRRPGQGKCDESDAERAARAAMSGSKLGTPKSQDGWVDGVRCMLAAHPGAVKARTSAINTARSLLTTAPEGLRSRFRGMGGPRLMEELPSVRAEGALGAALGALADLWEAARDAALDMERAIEASLEENCPALLAMYGCGPVSAAKLAVAAGDNPGRLRSEASFAAICGACPIPASSGKTVRHRLNRGGDRQANSALHEIARQRVMRDPETAEYAERARGRGKSDREVMRCLKRYVAREAYRALMHPHEIRRPEDASELVAARRAAKVSQVRAASILGTSEKYISMLERGQRELKPIRRAYEAWVEAGLPLDWDRQAFEAERKKDSKKHLAK

SEQ ID NO: 354004 - protein, 359 aa, unidentified
MGNPSTKRLKGKAPVVDKNDRIYVGLDVHKHSVHAAVRINGELYGTAVLPALPKKVLAFLKPYQDGIRKVVYEAGPTGYGLVRVLLKAGIPTAIVAPSKIPRPAVQGAKSDQLDCRKLAEFAEKDLLREVAVPTVQEEEDRQLQRLRDGLVDRRRKAKQRIRGFLLQHSLPEPENISGWGQDAIAGLQALPLSKTFRFCLNSLIEDLVHVLDQMQQVNRQLKELASEKRFAESAKHLKSHPGVGDITCMQVLTELYQPRRFENSKQVAAYVGLAPQVRQSGGTRTEGPLLRGGRGALRSTLVEAAWAWVKVDKRAGKIYGRMVKNTGNGKKAIVAMARRMLINLWIMLVRKEDYRPQAA

SEQ ID NO: 354005 - protein, 467 aa, unidentified
MTPRAGKAFRKSAQTEDLAVTHRHAAGIDVHSREHFVAVAAEDVPAGFVNADDKLPAGVRKFGTNTGDLEAIAAWLKDCGVTTVAMESTGVYWIPLYDLLASQGFEVLLVDPRQTKHAPGRPKTDVVDCQWIRRLHSYGLLTGSFRPGDEIIRWRGLQRQREMLIRYGAMHVQHMQKVMEEMNVKLTEVVSDIVGQTGMKIIKDIVRGERDPLKLAKHRHESCKRTEAEIASALYGNWRSELLFALKQALKLYEFYQKQLRECEGQIEECLRSLKDKSDGRPLPANLRKRKPEKNEVRFGARELLFRMSGVDLTQIEGISESTALVVLSELGTDLSAFAHEKNFVSWLGLCPQHRGSGGKIFKRRIRRGANRVARALRMGAQGCHHAKNALGAFYRRVQSRAGGAKAIVATARKIAERVYRMLKYGQEYVRQSEETYAKAYQQRLHKSLAKRAASLGYKLVPETMTP

SEQ ID NO: 354006 - protein, 337 aa, unidentified
MEYYAGLDVSMEETHICVLDREGTLIREGKTYSSPAAIATFLTDGPPCRKVIFETGRMAPMLYHGLVEQGLPVQCVESRQAYQALKSLAGHKTDRNDARGLAHLARTGFYKPTHVKSLSAHAVRSLIAARKKLVGQRVTIDNQIRGLVVVFGVRLPRALSPAFKDAALIVSDGVPGLHAALHGLFAAREAILAAVSAIDADIKKMTRKSEVCRRLMTVPGVGPITALAFAAAIDDPRRFKRSRDVGAYLGLVPRRYQSGEVDYTGSISKRGDVRVRTLLYEAANVMLTRYARPLKLKTWALAIGARSTMRKARVALARRLAIILHAMMRDQTEFQIA

SEQ ID NO: 354007 - protein, 441 aa, unidentified
MRSNQKANRIDDEQKPEAITTKSKKKAEEERMNAVGIDVAKGKSMITVRQPLDVVTVKPYGILHTAIELEKLAEFLRSLNGETRVFMENTGVYHLPVADYLHESGIFVSVVNAKEIHGYDRNPLRKYKTDKADAVKIAEYGLAKWTKVRRYEPAEDARRQLQVYNRQHWHYSKIKTMHKNNLDALLEQVFPQIKTAFSKSNRDDGHEKWVDFASTFWHCECVSSLSEAKFHEKYRKWCHKHDYHYRKKQAAKIYEIARKNVAILPKDGFTENLIKSAAAQINSVAETQAALLLKMKELAMSMPEWEAVIEMSCVGETIAAQLIAEIGDVNRFDSKKSLTGFAGADSPRNQSGTVDRQGKPITKSGSPHLRRTLYLILFNMLRTKPDDDVYHFMLKKKSENKKFLVYMVAGFTKFLRVYYGKVKEHLAQLDSAKSAPALSCQ

SEQ ID NO: 354008 - protein, 344 aa, unidentified
MEYYCGIDLGNKSLDLCVIDESRKVVFSQSVGTRADLVKKAFEAFTGRLICVVEAGALAEWLVDVLEPLGHEVSIVCPRKAKIALQSNGGKKTDSLDARALAEYCRTSWFTPVHKKSAEARELRSVMKARTQICECSRKLACSIRGLLRANGVTESLPGSDDPEFSSEVKRLSMQLSPALRRTISSMLCAFKDLRTRHKKMYAQLNKLSKKSPEMKRMQQVEGVGPAVAASFYSAIDNPDRFKSGEQVSSYLGLVPSVHQSGETLYHGRITKQGDGYTRWLLVEAAHIILSRSKADTPLRRWGLQLQQKKGAGKARVAVARKLAGILWRIWRDDIDYQPELTAA

SEQ ID NO: 354009 - protein, 380 aa, unidentified
MKKGITTAQRFVGLDVHAETIAVAVAERDGGEVRTLGIIPNREQSVKKLIGKLGPIGTWKACYEAGPTGYALYWQMVKLGCSCEVVAPTLIPVKAGDRVKTDRRDAQRLARALRAGDLTAVWVPDAAHEALRDLVRAREAAKRDQLRARHRLSKYLLRHGRRPAVKMKPWTQRYLDWIRKEVKFEQNPQQTTLEDYLEEVNHQAQRIARLEQSIDGAIEQAPEAMREVVAALQALRGIAKLTAVTSVSAVGQLSRFPTARQAMGYSGLASSEHSSGERTRRGRITKTGNANLRRVLVEAAWAARFAPTLTRSLRIRQEGLSAEVVEIACTARHRLHARYLRLLGRGKTKQQVVTAVARELMGFVWAIGKTVETRHRPMTA

SEQ ID NO: 354010 - protein, 348 aa, unidentified
MTLTIVETRAITGGVDTHADMHVAAALDPIGGLLGVQEFPATPAGYGRLLGWLGGFGTVCLVGIEGTGSYGAGLARHITRAGVRVVEVDRSDRQDRRRQGKSDPLDAVSAARAAQSGRAAGASKGRDGVVEAIRALMVAKRTARSERTQTINQARSLVLTGPDDIRVRFAHHSAAGLVAALAALRPRPGGVVGYATRIALRELGRRAEFPGAQLGRLDELIVPLVTARAPGLLSLYGVGPDTAALLLIAAGDHPERLRSEAAWAHLCAAAPIPASSGKTVRHRLNPGGDRQANHALWRIVITRMSSHPPTRTYAERRGKEGLSKTEIIRCLKRYVAREIYPHLRPPAG

SEQ ID NO: 354011 - protein, 453 aa, unidentified
MEREEKRLEQFRQLRKEIRGSQNYLVVGIDISKDTHNAFMRTTSGQTLYRRLIFDNTREGFETLWMQVEAVRVQHGLKEVVFGMEPTANYHKPLGEFLINQEQQVVLVSPEAVKHNRPLLDGRWNKHDGKDCANIADLMCQGKCLFYEYPSPELRDLRNLLSLNRKLKKLEQGLRLRIRNHLVAQYFPEMDQYCHWGAQEGLALVRWCLDPAVMGKLSDEELVKRLHTSGRTLAQRKRLSALKDKAPSSIGCQFGSSVEFEGQSVVKLLKEVRQSVADTQEQIEQACVKFKEYNCLLSIPGFGPSLSAMVLGAIGNPWRFQNGAQVIKMVGLDLSASQSGKSEGPASVSKKGKAEIRYALYQAAMVASNRDKHFVAYFTDQLRGREKEKGIKTKKRVKLAAKMLMIAWTLMKKQERFDPKYLSAETEPIAARQGVKAESGGIPKVQPSSDRGL

SEQ ID NO: 354012 - protein, 346 aa, unidentified
MLYAGLDLSRKRLDVHLLDQAGATVEVKAARPDADGLRTLALRLGRFGVPIRAAIESMNGARFVHDQLERQGWQVEIADAVKIKGLAPLACKTDRIDAWVLAELSRRELVPAIWLPDPAVRAERERARFRLHLVRHRTSLKQRVHAVLLAHGRPCPVSDLFGASGRKLLARLQLPEPWAGSVEASLYLIDELEREIDACERELQRLGAEHRYVPLLRSVPGIAWVLAYTIAAEIGDSARFPTPAKLVGYSGLCPRVYQSGDSDRRGPLAKQGPKYLRWALVEAATGACRHPVYRERYERTKARLGKQRGAKVAQVDLARRLAEAIWHMLSRNRPFAPAGATCPLAA

SEQ ID NO: 354013 - protein, 343 aa, unidentified
MTQYVGLDVSLKETKIHVLDEAGNRIWRGRCATEAAAIAAALRRYAPTAVRIGLETGPLTTWLWTALTAEGLPMICLDARHAKKALDMKVNKTDANDAEGLAHLVRAGWYREVRVKGRSAMLAKALLGARSQLLSMSLALENQIRGILKTFGRIVPKGAGGLFEKNVRALIMDDAEITAVIMPLLQARQVARGKCAALDRRIIRSVQGDATCRRLMTMPGIGPITAVAYVAALEKPDTFKRSRAVGAWLGLTPRRFQSGEVDYDGHISRRGDRQLRALLYEAAAVLLTRVRRESALRCWGLMLWKRLGFKRAATALARKMAVVLHAMWKSGTAFNPTLSAITP

SEQ ID NO: 354014 - protein, 372 aa, unidentified
MNQNILHVGLDVDDTQYHGAAFNKATGEVIDFKCRPTLKGLLTQLDKLQRHFQGLSIRLCYEASYVGFHLQRDLRAHRVHCDVVAPSSIPSPRGKAVKTDRIDAGFLAQFYANDLLTVVQPPDEEQEQDRDLLRTRQKLLRQRTQLRTHLHALLRRNGLHFKTQTGYKSHWTKPHYAWLQRTIKNSSGSLRVNLTLLLRQIRGLDELLAEYGQHIEELAVTLRYQEAAKSLTCYKGIKNIFALTMITEIGDIKRFSHPRQLMSWVGMDVREYSSGGRHNRMGITKQGNRYLRTAFVEANQRGYRSTRMGKDLKARRQNTAPELIRIADRCLRRLNKKGNRLLLAGKHPNKVKVACAREMVGFVWESLNAVAA

SEQ ID NO: 354015 - protein, 370 aa, unidentified
MRIIGCDLHARQQTLAILDTTTGEAVNLTLMHESDKVREFYSQLPRPVLVGIEATGSMHWFLNLMEELGIECRVGHPAQIRAAEPRKQKHDRRDADLILKLLAENRFPAIWLPSKELLDLRALLLHRHQWVRMRVRMQNALQAIALANGLRRGPALWSYDGQAKIAFLPLMPHAAYRRSTLQAMYKNMQSEIENLTRRVAEQAGNRCGARLLMTHPGVGPVTALATEVFLGDPQRFTNRKALASYVGIIPREYSSGGHQRLGGVTKQGSPLLRFLWGEAGAHAARHDPELKCFYRRKLVQKGLGKARVAVARKLGIRLWIMLRDEIDYQEFCRRGQMQQKTVRPVVGMPETGNGAKSHRPSDEATRLPES

SEQ ID NO: 354016 - protein, 334 aa, unidentified
MSNVTTVGIDLAKNVFSLHGVDARGVVVLRKTVSRARLASFVAQLPASVIGMEACSGAHEWARRFAQHGHTVKLMAPKFVVPYRKSGKNDGNDAAAICEAVSRPSMRFVPVKSVEQQTMLTLHQVRLGFVEERTATINRIRGLLAEFGVVLPQRAMEVRRGAAASLEQLPAAAARALSDLLAHVRVLDERVNEYECELEQHARRDERAQRIQSLSGVGPISASAIVASVADAHEFKNGRQFAAWLGLTPKQYSTGGKTRLGHITAHGDPYLRTLLIMGARSMLQTALRRTDRLARWALGVRARRGYHRACIAVAAKHARIIWAMLAKNEVLQLS

SEQ ID NO: 354017 - protein, 354 aa, unidentified
MPKTASAQIAVIGIDIGKNSFHVVGHDKRGSIVLRQKWSRGQIEARLANLPPCLIGMEACVGAHHLARKLTAFGHDARLMPAKYVRPYAKGQKNDFNDAEAIAEAVQRPTMKFVAVKTTDQLDLQALHRVRERLVSQRTGIINQIRAFMLERGIAVRQGIRFLRIELPIILASRTDVLSPRMLRVIEDLAGDWRRLDERIETLSREIEEIARQDAGCDRLMSVPGIGPITSSAVVAAIGSGDVFSKGRDFAAWLGLVPKQISTGDRTILGKISKRGNRYLRVLFVQAAWVVLVKPKSWERHGLKSWIEAAKKRLHHNVLAIALANKLARIAWAVLAKGRGFESTRTIGGSTQAA

SEQ ID NO: 354018 - protein, 316 aa, unidentified
MTTNSVVVGVDVAKDRLDVAVRPSGEVWSEANDETGITTLVGRLRPLRPALIVCEATGGFERAAIAALAAAGFPVVVANPRQVRDFARATGQLAKTDQLDAAILALFAERVRPTPRPLPDAAAQLLDAVLTRRRQLLEMLVAEKNRLGFAPKPLHRGIQAHIRWLERQLDDVTKELAGLIEASPVWRAKDDLLQSVPGVGPIVSSTLLGELPELGTLSHKQIAALVGVAPLARDSGTLRGKRQVWGGRASVRTALFMAAMCGRRWNPTLKVFYERLKAAGKPTKVALIACARKLLTILNAMVRDQSRWTSNVQYSC

SEQ ID NO: 354019 - protein, 309 aa, unidentified
MEIIVGIDVSKDRLDVAVTSQGEAFAVGNDHAGIDDLIARLKTIGADAIALEATGGYETLAVAGLSSAGLTVLVVNPAQVRAYANAIGRRAKTDPIDAAVIAAFVLATKPEIRPLRDAETQALSELVARRRQIVQMVVAEENRLRMALAKQAQKSIKRLLTALRRELESLDADLDDHIRKSPVWRVRDTLLVSVPGVGPTTARTLLAELPELGSLDRRQIASLAGLAPWTRQSGKWKGKSFIGGGRGKVGAVLFMAALVASRHNPSLKAFRDRLVAAGKPRIVAIVATMRKLLTILNAIIRDNKPWQNA

SEQ ID NO: 354020 - protein, 349 aa, unidentified
MLADEVDYVIGVDTHRDQHTLAVVVAPTGAVLAQTVVLASARGYADALCFAEKHARGVRAWAIEGAGHYGAGLARYLGERGETVLEVGRHARGERRLRGKDDPLDAIRAARTGLTAETLTLPRSGERQDALRVLLLARRSAVDARRQALVQLRSVIVTAPECLREELRRLPTTPLVRRCSRFRRSHTRTPDELATVLALRSLARRIEAATEEANELEREIIGHVRALVPELLNESGVGPIVAAQLIVSWSHRDRVRSEAAFARLAGVAPLPASSGQTIRHRLSRGGDRQLNRALHTVILHRRQHDAATRSYIARRVSEGKTAREATRVLKRYLARHLYRVMQNATPLTT

SEQ ID NO: 354021 - protein, 445 aa, unidentified
MARKRKKQRLEIIHPRCAGIDIGSREHWVAVDPQSCEQPVRCFTTFTDDLQNLAQWLKSLGVDVVAMEATGVYWIPLYELLDSQGFDVHLVNSRATRQVSGRKSDVLDCQWIWQLMSHGLLTGAFRPADDVCPLRSYVRQRATKVQEQSRCIAHMQKALTQMNIQLDNVVSDLMGKTGTAILRAIVAGERDPQQLATLRDGRLRADEATVARSLHGNWRDEHLFALAQALAHYDFLGEQISACDHQISHALAALPKRAEEAAAEPVKPLRSPHRTAAQQKALHQALHVVMGVDLCAIPTLGIETALVLASEIGADLSRFPTEGQFCSWLSVAPPTYISGGKPLPGRKPKSLNRAGQALRQAASNARRSESYIGACHRARLARMDTAKAIKATAHQLARLIYAMLTKGQAYVEKGIKAFEAQSRDRQLRALQRKASKFGLALTEAA

SEQ ID NO: 354022 - protein, 467 aa, unidentified
MSAPKGRGRKRRRRKAGQLPAGFEQVNLNAAGIDIGAESHWVAVPADRDPTPVREFSSFSADLHALADWVVSCGITTVAMEATGVYWVPLYELLEARGLEVVLVNAKHFKSVPGRKSDVLDCQWLQQLHTFGLLRGSFRPEADIVKLRTYLRHREMLVQLSAQHIQHMQKALTLMNLQLHHVLSDITGETGMRIIRAIVAGQHDPAVLARFRDPRCHASQDKIAAALTGTYQADYLFVLQQALELYDVYLAKIHACDHQIAGAVQALTPKVDVQQTPPPAARSLQAPRGHHMRINLREPLYAAAGVDLTQINGIASHVALAVISEIGVDMSPWPTEKNFTAWMCVAPGTKITGGKVLSSRTRTSANRVATLLRNAASSLLRSDTALGAFGRRLAARIGTAKALTAVCRKLAIQIYHSLKHGRVYKDPGAAAYDLQHRNRVLRSLKKRARILGYELVHIEPATQSAVS

SEQ ID NO: 354023 - protein, 346 aa, unidentified
MNKNIVKQVVGIDVAQKELVVSLGRMYDDWSPEIYSHKVFPNTTNGFLTLAIWVKKTVQPDAELRFVMEATGVYHESLAYFLEEKGYVLSIVLPNKISNYMRTLETKTVTDKTASQAITMFGLERKLIDWKRPKRIFKSLRQLTRERDQVVQLRTMAKNHLHAEQAEAEPNKDSVVRIKKQIVFLNKQDQEIKSAILVLTKKDEEVKKAIDMACSIPGVGTLTAATVLAETNGFELIRNKRQLVSYAGLDVREKQSGTSVKGKARISKKGNKYLRKAMHMPALAAIRHEDRFKAIFARLVAKHGIKMKAVVAVQRKLLEIIYAIVKTNKPYDSNYFKKIESRQAAL

SEQ ID NO: 354024 - protein, 355 aa, unidentified
MDSKKYIGMDVHKESISIAVMNGAGKIVMECVIETKASMILQFFDGLRGDLQVTFEEGTSAAWLYDLLKPHVTKLLVCDPRKNASMKEGNKSDKIDARRLAELLRLNHLNPVYHGEHGLRSLKELVRSYLTITKDLGRVMSRVKAIYRSWAIPCTGKQVYAPRHRAEWLGKIGEPGVRRRAEFYYQQLDALRTVRQEVRRELLAEGKKHQAWKRLCQIPSMGPIRSAVLLGILQTPHRFRTKRQLWTYSGFGIETHSSADHRKVDGQLQRAKKQISIRGLNRNCNHDLKNLFKGAAIVASSKPGPFQEFYTALLTKGIRPEMARLTLARKIATIVLIVWKRGACFDAQHLKPQTA

SEQ ID NO: 354025 - protein, 342 aa, unidentified
MQEYHYIGLDVHKKVIAYCIKDVKGKIVDEGTVAATRRALGAWVSGLSGPWLGAMEATLFTGWIYDFLLPHARELKVGHSYMLRAICAAKKKNDRVDARKLADALRCDLVPECYIAPRELRELRQVLRYRNLLVREATRFKNKTSGLLMECGAEYDKDRLHGQRYFQELLDGLDYVPRSVVELLALNESSMKLFDQQQRRLVRALQDHPSLKEWVARLMSIPGVGEVTALTWALEIADPHRFSRAKKAVSYCGLCAAQSESAGKSRRGPLSKQRNKHLQTMLVEAANLAPRWNPGLALVYEKARARGANRNEATLEVARKLVRYLLCVDKSGKNFEMKEGGI

SEQ ID NO: 354026 - protein, 379 aa, unidentified
MEAVTSQPHTPAAIRTDLAAIFVSLELSRSTWLITSLSPGNGEKMSKHSVGGGDVAALLHRFAQLQEKVRSRTGNHVPIVSIQEAGLDGFWIDRVLKANGIESYVVDPASIAISRRRRRAKTDKLDGEALVRALLAFKRGEPRVCAMVNPPSPEEEDRRRICRERKVLIAERVKHVNRIKGLLFGQGISGYEPLRKNRRKQLDELHTGDGRPLPTHLKTQISRELDRLELLLEQITAVENERDTLLAAQKDSVAATATLIPAGAMLCDVKGIGLELAAVLWTEGLFRHFDNRRQVAAYAGLAPTPWQSGTIDHEQGVSKAGNPRLRTTMIQLSWLWLRHQPQSALSLWFTARVQSSGGRTKKSAIVALARNYWLLYGNM

SEQ ID NO: 354027 - protein, 373 aa, unidentified
MPKYSTAFGMDVHLRSTTVCALDADTGEAVTRRFPGNPWGEIAGWMDGFPGPSLAAYESGYLGFAPQRELAGLGVECVVAAVSKIPRSAADSASKNDRNDAARMAKAILAHDISPVWVPSPEVEGIRDLAGAYDEATARLATAKQRLLAFLAKRGFAYGGTTPAGNPRKYWTYDFLRWLDKVRPEDDGGVRTLAALRNEVEAAAEARADLLSEYRAAVDASPIAAEVAALQSIKGCAFALAAAFSAEVGDFTRFRSGRQVTAYFGLAPSQRSSGDSVRLGGLSGAGNALVRKLAVEGSWCYAAARHQPKLMPRDTGVPLEIRMHGRKGSERLLRRREEMLARGMPQAKANAATAAELVRWLWALGMMCREGAE

SEQ ID NO: 354028 - protein, 327 aa, unidentified
MSRSLVTGHSPRSHYKEESMSNSSSIQVGIDVSKPTLDCFFANQFHCLPNSTAGLRKLCSLLPASSHVILEATGGYERKLVRHLQEHCIPLSIVNPLRVRNFAKAKGRLAKTDRIDARVLADYGLAMNPRPTPAAHPTRQSLAQLAALREQFIAIHTQLLNHSEHLELPIAKGVLKATLATLQRKIKALEAASQKLIHADPLILCQYSTLTAHHGIGEFTATTLLAQLPELGSASRGQIAALAGLAPFNRDSGSMRGHRHIHGGRSNVRRALYMASLSAIRCGPLKSFYKRLRSNGKPPKVALIASARKLLILLNSSLKSSSPHSPS

SEQ ID NO: 354029 - protein, 343 aa, unidentified
MQTITTIGLDLAKSVFQVHGVDAGGQVIVRRQLKRRYVLTFFQKLSPCLVGIEACASAHHWSRELQALGHTVRLMPPAYVKPYVKRQKNDATDAEAICEAVTRANMRFVPTKTPGQQSGLLLHRARHLFIRQQTSVINAIRAHLAEFGIVAPVGRHGVEELLNVVADPNDKRVPEIARACLSAFGAQLRRIKEQVLEFDRLIRAWHRSNELSMRLDEVPGVGPVLATALVAAVADPKSFRSGRNFSAWIGLVPKQHSSGGKNRLGGISKQGDRYLRGLFVAGALAVIRYAKIHGTKHRPWLTALLARRPTKVAAIALANKIARMVWAMMVKGERYKEPVALAT

SEQ ID NO: 354030 - protein, 465 aa, unidentified
MPKDPKQRSKRSETARNVDATEGLPPLNVNAAGIDVGSAEHYVAVPTDRDAEPVQSFGSFTADLHRMARWLKNCRIQTVVMQATGVYWTALYDVLESYGLEVNVAHAQHTKTLPGRKTDVQECQWLQKLHTFGLLNKAFRPAEEIRVLRSYLRQRENLVAAAAMCVQHMQKALTEMNIQLANVISDISGTTGMAILRDIVRGERDPEKLARHKHARIRASHQEIARSLEGTWREELLFVVGQSLELYDTYQEKIQLCDQRIDEHLHRMEAKVDPASEPIPEPTRRGKGSRPRQPHFDLRGHLYRITGVDLTQIDSIDVRIAQTVISEVGLDMSRWKTEKHFASWLGLCPDNRTSGGKVLKRGTRRVVNRAATALRLAAWSLIRSRSALGAKFRRLRSRLGAPKAITAMAHTLARLVYRMLKFGHHYVDQGIEYYEAKYRQQQLRWTAKQAAALNMQLIPLPEVGG

SEQ ID NO: 354031 - protein, 336 aa, unidentified
MVQIYGIDLGMSSFDVSFLSESGSVRHLSGVKNTVHGISKFLLSLPSSAVLCAEHTGVYGDLLLRLCTLNRTCLCFVPGYQIKHSLGLQRGKSDPLDACRIREYAERFYDLLRPCFYPGEEMSELQELYRTRSLLVESRKRLDTLNIGDNCKSSVSLAADHARRAVLAELNTQISGLDHEIEALIQNSSEFSRNYQILTSIVGVGPVTSCELIIKTENFRKLDTAKKCAAYAGIAPYPKESGKMKCGHKISPRVDKQLKTLLFLCACSAKEHNKEIRLYFLKKHKVEKKHFFVAMNNIANKLLRLIYSLIQKQQTYDRDYIQRDPRCVVISDTNKC

SEQ ID NO: 354032 - protein, 418 aa, unidentified
MFKIFRKNCCGLDVHKTWIYACIGITDANGRTDYKQARFSSFSKGLRELADWLSKYGCKDVCMESSGKFWIPVFNILEKTCWVTLAHPKYTKPQKGNKTDRKDAKWICDLFMCDMIKPSFIPPPDIRHLRDLVRYRFKLTNCLTGEKNRAQNCLTVSNLKLDDVFSDVFGKSARSITNYILEHPGEQFDVAPFVDKRCKHPTEEIQAAVDGSIAHEQAVKLREIMQHIDEIQIHKQNIESEILRLAAPYQTLLELIHTVPGFFADPMTAIAVLSEIGADMSVFPTAKHLSSWAGCCPRNDQSGGKRKSTRISRAGVYLKPLLVQVANAVVKSDKYPECKERYRRIKAHRGHKKAIIAICRMLLTAIWNILSKLEPYSAEGYLNDRKTDSRVITKTQALYLIRLRGYIIEDDLPLSASP

SEQ ID NO: 354033 - protein, 404 aa, unidentified
MKRYYLGVDWSDKFHEVCVVEEAEKKLAEMKVEESPEGMSEFGRWLDEQRGQGIELWAAIEKPEGRIVDFLLDHGVMVYPINPKALDRARARFRMSRSKSDPFDAWVLSEFLRTDHAHLRPLKPSSVEAQELKILTRDYQRLVQQKTQLLNQLRATLKEYYPRPLEVFADLDSQIALAFLKEYPAPKRISRRKWERFAREHRLGEVRALKMWEAVKKPQLSMPEHVVRAKGQLMEVLVEELEVVVKAVDQYTERVEHFFAALPAAKLTERLPGGKSGITVPTLWAELGDAIGRWESFRHLQAQAGTVPVTRSSGKSQIVEFRFACNKHLRHALYLLAFISLRQSDWAKAYYRSQRAKGHRHHRALRALGAKWLKIIFVMCRDHVPYDENYHLANMARQSLHQAA

SEQ ID NO: 354034 - protein, 339 aa, unidentified
MKYMGIDLHKQYFVATVMDGVGEVLRRDRVSTDRSAIRDYFEDVGPAGDITAVMEACYGWEYFYDEAREYVGDLRMAHPLKTRLIAEARIKTDSIDSEALAHLLRADLVAEAYAPPFETRDRKNLMRFRASLTRLKVMVKNIVHAVLARNHVEDEALRSLSDKFGKKGRERMRKLTLRGNDTEILNHYLDLLGEMEARQSEVEKRIRTLYREDGICGLLGSVPGIGPILSVLIRYEIDDMERFSSASRLCSYAGLVPGTYSSGGRTFQGRITKQGNKWLRWAMVEAAQRSVINDLQMRSIYRRIKAKSGSKVARVAVARRLLEIIYRIWKEKRPYYEKL

SEQ ID NO: 354035 - protein, 406 aa, unidentified
MFIGWDWATETHDVTVMDATGKRIDRWELAHTEEGFTKTLARLRKHGAPADLPVAIETSRGLAVDRLLAAGHPVVPVHPNAFNAMRARWGASKAKTDAGDSMKLADYLRTDGHLLPRLEPTEQATLDLQALTRQRADHIEAKVAAVNQLASLLDEHWPGGKAVFADLDSDIAMAFLERYPTPTKAAKLTAGRLEAWCKRRGYSGKKPGSVLIERLRSAPKAASRLSDAVAEQLVRVQIQLVQGIRATIRTLDKAITEATGTHPYAPLFATMPRIGKVSLGQVIGEIGPILERAQSCEQLIAEAGVVPVTRASGKSRTVAFRFATNRRARVALTTFVDNSRHGSAWAAKIYNDARARKKRHPHAIRILARAWLRVMWACWRDGTCYDPAIHQANDKINAPADEPLAA

SEQ ID NO: 354036 - protein, 434 aa, unidentified
MQTEFAALVAIDWADRKHAWALQIPGSSDRETGTIDHTPEAVDVWAAELRLRFGGQPIAVALEQSRGPLVFTLTKYEHLIIFPVHPTVLVNYRKSFRPSGAKDDPSDAGLLLDILMLHRDKLRRLNPDTAETRTLQFMVEERRKLVHEKTRYSNRITAHLKMYFPQALRWFDEIGSNIAAEFLERWPSLAQLQRARPATIERFFIDHSSRDHERIAERLEEIRKAIPATADTAVLASCSTAIVAWAALLKQLLTAIAIYDEKIDGLARAHPDYALMNSFPGAGSALTPRLIAAMGSHRERYQVAHEIQCYSGIAPVVASSGQQHWVHWRWACPKFLRQTFHEWALHSIAYSQWAREYYEQQRAKGKRRNTAIRSLAFKWIRILFRCWKDHKPYDEAAYQRALDARRPKQQTAAQPVEVQWKKVAGFSKIAAAEA

SEQ ID NO: 354037 - protein, 327 aa, unidentified
MKNIFIGIDISKQTLDICIKADNQITFCTIENNISSCKKFFKSYTNNSSNIYVCLENTGRYNYNLYEVLEHLSFLVYVINPIHIKKSLGLVRGKSDRVDAERITCFIKKNHMDLQQWKPNTISIKQLKVLQSERKYRIKIKSGLAKQQYDYKVMKSMKMDKELLKLNESLIKNIDNQICKIEAKIESIINNDELLNEQAARIRTIPGVGKVLTWMILTKTEGFTKITEPRKLACFAGVVPFDHQSGTSIKYKPKTSNFADKELKKVLHLGAMSAIRLDNDLRVYYLRKIEEGKNKMCVLNAIRNKIVHRIFALIKNENFYKKDFVLS

SEQ ID NO: 354038 - protein, 373 aa, unidentified
MGKHRLAFVAFDSAKEKHAVAIADDGRDGEVRYLGEIDNSPDAVRKLVAKLSQQYQRLHFCYEAGPTGYGLHRQLTDLGHVCNVVAPTMIPKRSGDRIKTNRRDSVTLVKLLRAGELRPIWVPDPVHEAVRDLTRAREAAMIDLKKKRQQLLSFLLRNGRIFPGGKNWTKMHERWLAKQTFNHPAQQIVFQDHLEVINAAQVRLAALEQQLREVVPTWTMAPVVAAYQALRGVSFIVAATFVAEVGDVRRFATPQQLMAFLGLVPSERTTGDTVRRGSITKTGNHRARRVLIEGAWTYRFSARVGETLRSRLKDRPLGVRRIAWKAQVRLCARYRRLLANGKKAPVVTTAIARELAAFLWAIGQQVAPQAPAA

SEQ ID NO: 354039 - protein, 333 aa, unidentified
MVYAAIDIHKRVFQAAVLDADSGQLGQERLPATREALDDWATRWAGKLEAVALEATTGWRWVARELQARGFDVRLCDPGEARALGGSKRRPKTDRLDAAWLARLLAKEMLPEAWLPPAEIQYLRDRTRLRHALAQDRNRWAQRLHALLTHEGWPCGRGRLLTVSGQQWVSALALPEPARASVEAMLTIIHALGEQIELLDRELRRLARSDPRLKALCAIFGVGPVLAAHILAELGAASRFRRARQVVRLSGLDPVVSESANVRRRGRLSKQGSPELRWALAEAAHHACRRTSPDHALYTSAKQRRGTQRATLTVARKIARRAYHVLADLEQAA

SEQ ID NO: 354040 - protein, 444 aa, unidentified
MKFKALQMKRHFIAGKTVIGIDPAKKKHQAAIIDEKGLQLSKPFTFTHNYDGFNTVLWQKIQPFLPECNPENVVFAVETSCNLWQKLVHYLDAQNYPVVLVSPLTTKRSRPFFNHDFSHTDPKDALLMASNAKDGYFDHYQHHTPRIKAMHQLSITYCKLVQNYVQQRTRLRALVELIFPEFTDILPLRTKSAQYVLGKYFFPTNFLSLDIETETKELEKVSGKQHGEITLLKLKEAAKHTIGISVQELEIQAYRITLDAWLSMLQIVEIHMNSVLEQLIPLVEQTPYFDILTSLKGISVKLAALFIAETRELCNYRHYKQLEKLIGYNLRQTDSGQYSGARHMSHIGNRRLAWIVYKMTEEAAKYVPEVRLKFLRRQLRKRSYRKNIIASAPTLLKLIVALVRENREYRYNPDLSEELKELEQKYLELKAKEKTKPSMTKKAA

SEQ ID NO: 354041 - protein, 335 aa, unidentified
MEFDFFIGVDVSKNELDFALQQGGKLLFHRETANRPEAIKAFLKELGRQPGFELRKAVFCMEHTGIYNNHALSVLHQKKANICLESAVQIINSSGNIRGKNDKVDAIRIAGYAYTQREKLRLWQPKREVVQQLACLAATRSRLIEAGKALRIPLKEQDAFNTKKVAGESAKLYTQTLKAIDADLKKADKAIQKVIDEDPELKRLFGLITSVNGIGKVTAVQLMITTNEFKDITEAKKFACYSGVVPFTRESGIFKGKARVSPMANKKVKTLLHLSAIVAIQHNADLKLYYQRMVNQEKKNKMSVINAVRNKLILRIFACVNQNRMYENNYQKAVA

SEQ ID NO: 354042 - protein, 341 aa, unidentified
MKSFIRIGIDLAKNFFQVHAIEREGAPAVARKLSRGKVLGFFAQAAPCRVGMEACGSSHYWAREIQALGHEVVLIPPAYTKPYVKRGKNDANDAAAICEAMSRPDMRFVPIKSADQQAVLMLHKTRELLVKQRTMTVNALRGHLSEFGLIAPKGIHRVKELLALALADETLPEEAKQASAMLASHSGGLDEKIDDLEKTIARASGKNQTSQLLDEIPAFGPLIASAIAALIPDPSVFRSGSDFSASLGITPSQHSSGGKDKLGAITKKGNRYLRKMLVVGCTSVLRVAHKHKGALAEWIVAMRARKPERVVAVALANKLARIAWAMMSTGESFRTELYTKA

SEQ ID NO: 354043 - protein, 497 aa, unidentified
MPNKPSIYPRGNPQLIKLFDEAGHPAKVMCVAMDYAKAKHTILICNGKGDRLKPDFVVENTAAGAEQLLSEVRACAKKRKIAGEHVFFGGEDYPSFVVNFLRKITQEKFLVVQVNAWEAKKQRDNFQASNDSLDLLGIARCLLNRRGQSIQELPEAYPNLEITTRERDKLVRTRTGFSNRIHTYADRLFPGFLCPSKSGLEPFGRVSLDMMQEDRFSPAQLSRRSRQSLAEWLKRRGVEQPEDKAEELKQLAKEALGPAPEQTVTLQRSLAQLVDVYRGLEKSITMLDREVAHWLAQTPGAWLTTLPGFGITLAAVWTAELGPPSQWSAVRRLCSYAGVVPRSKQTGGPDKEAVVGTVQQRCNKRLKNVVLQAVEKVLQWGPEELRQTAQELDARGAHTQFAMAKRLVRLAKHLAVNGTVYRPKALMDPNTPKATLAAYYQSLWEKLLPKWQAKADLHKVFGPKNPLGQWRKMVQELYGLDLRLPQSAAKKSETATP

SEQ ID NO: 354044 - protein, 352 aa, unidentified
MIIIGVDFHPEFQQIASVDTDTGEFQEKRLAHREEGETFYRALAGQKVRVGMEASGHARWFERLVAELQFELWIGDAAEIRTKRVRKQKTDRQDAQLLLRLLLEDRFPQIWVPSWENRDLRQLLWHRHRMVQARTRIMNQLQAVALNEGLRCKKRLWRERGRQQLESFRLAPWASRRRRDLLELMDRLNPTITELTQAIEQEVEKCPEAQRLMTHPGVGALTALAFVLIIGKAERFGCGKQVASYLGLVPLEESSGNRRRLGHITKQGSSMLRFLLVEAAQVTVRSVPEWRSKYLHLMMRRGRKTAKVAMARRLAVRLYWMWRQGWDYQQWNKFGSHAGQPGNRDAVQQNTE

SEQ ID NO: 354045 - protein, 359 aa, unidentified
MAKIVSNKQNWFNRITLTKDDRLYVGVDVHKKSYAVAVWLNDAFAIDFVMPADNLQLAAMLDKTRIALKQVVYEAGPTGYSLARTLQQANLPIQIVAPSKTPRQSAPDSKTDRLDCRKLAEYAAKGLLKPITTPSVQQEADRQLCRLREIITDKQRKIKLQIKSFLLQHGIDEPAGLASWSLPSLEALSRIRLSSQLRYCLDTLLANLHFLRIQLKQTEQQLRQVFAQKHLCTKIKILMTHPGVGPTIARQFATEIFNPKRFKDKTEISKYIGLTPMVNQSGESFRQGPITKTGRPQLRSNLIEASWIWIRKDAYAYKTYIRLLHNTGHSNKAITGMARRLAIHLWRMSCDNRPYIQPA

SEQ ID NO: 354046 - protein, 354 aa, unidentified
MKKLFIGIDFAKEKFDAAIIDAIGLKEFGDRQFGTFSNDSKGYRQFLKWVRSHCGTSMETEWLFCGEDTGQCSQGLSKWLYGKGLDIWIESPYAIKHSSGIQRLKTDKADASMIAEYAWRHQDKASLFKPLSESLEQLREVFLYRHKLVQQRVAMEIRDKGKEREESSKGLSFIRRKAKHLIAELDKTIKECDLMIDRIIESDEELMANYKIVTSIKGIARQNGACLLIYTNNFTRFDMDARKIACYYGVAPFGKESGTSVHSPARTSHFANKLIKSLLTQGANIAKMFNPEIRSYYDRLIQRGKHKSVALNNVKNKLLRIIVALVRKKSMYDPKTFKFYQQRWQEKNQKALAL

SEQ ID NO: 354047 - protein, 304 aa, unidentified
MNGIGIDVSKRRLDIGTTDGETVQVSNSPSGYAELSTWLSTRPAIQIVLEATGGYEQTVLDFLHKAGHPVIRANALRARRLAQGLGKVAKTDRLDALVLAQMAALVELPSYQPLEPWQRKLREFVRARRQTMQALTVARQQQEMVTDRELRRQMQGNIIRLQTLVERLGKQISEQVAQQPQLAVLKSMKGVGPALQAVLASYLPELGQISGKAIASLVGVAPISHDSGAMRGRRSIHGGRAEIRQVLYMAAMSAMRHEPRLRDFYRSLRARGKEGKVAIVAVMRKMLVILNARVRDTQGGSIPA

SEQ ID NO: 354048 - protein, 431 aa, unidentified
MRVLVNPIALRKPALNYNRGDTIMIEAMFKRVAGLDVHLSNIVVTTLVEQEDGKLQETTREFRTFAKDLDILARWLKEEKVELAVMESTGIYWKKPYSTLEDHGIKTFVVNARHVKQVPGRKTDVKDSQWLASLARFGLLKASFIPEKVLRELRILSRYRKKLTGMLASEKNRIHKVLVEAGIRLNEVVADVNSLSAQDIIAKLIEGEISEDLTKYLRGRARDKKHLLEDAIAVKLGSYHRFTLRMIREHIKHLEKELAMIDGEIYKGIEPYDEQWKLLQTIPGINTIAAALIIIEIGVDMQRFGSREQFCSWAGMCPGNNESAGHKKSGKTRKGNKMIRAILCESAHAAAKTNSQFKTKYRGLVVRKGCKRAIVAIGHKMLRVIHCVLTKRKPYSDPTISYELLVTHKNAARWMRSLKKFGYLPQYSPAV

SEQ ID NO: 354049 - protein, 326 aa, unidentified
MKKSNENKLVGVDISKKTFDVYCLDAKGQAVQRQLPQSSKGYRTLAGLIGSSAVCVMEATSTYHLPLAQWLYDHGIRVVVENPLRIKRFSQMHLQRHKTDKTDAKMIYEYGTTIVAKNIVPWCPQSSMIQELQQCDSLSQRLNKELTSITNTHEALAQLSVVNAEVTRIVSSTIKQLKKSLQQLDKQMQALIKKHYLENYKLLMSIPGVGPKTSVMLICQTDNFTRFDNVKKFLSYIGMSPRTYESGTSVKGKGHITKVGNGRLRSLLYMCSWTAKRTNPQCVAVYEKMHTKGKPEKVIKVAIAHKLLRQVFGVVKHQQPFNKQLA

SEQ ID NO: 354050 - protein, 445 aa, unidentified
MAVRRRVQTLEVAHPNAARVDISSASHFVAIPPDRDGEVVREFRSFTQDLEALVQWLKDSGVDVVAMEATGVYWIPLYELLEARGFSVHLVNARHVKNVSGRKSDVLDCQWLQQLMSYGLLSAAFRPKEEICVLRSVTRQLDMLTKYQSQHVQHMHKALTQMNVQLDNVISDVAGETGQKIIRAILAGERDPLTLARLRNTRIRASEEDIVKSLQGNWREEHLFALKQALSLYDAYGRAIAECEQQLALVLGRLARHEVPQAPPNRRGRPRNMARFDLRRALHCACGVDLTRVDGIDVATALKVIAEVGPELSRFKTSKHFCSWLGLCPGTKISGGKVISGASKRTANRLAQALRLAASSLRTSQSALGAYYRRLCGRLDKPKAIRAAAHKLARLVYTLMTKGEQYVDQGQNYYEERHRQRVLHHLNRKAVAMGFKLVALESIPS

SEQ ID NO: 354051 - protein, 418 aa, unidentified
MGRLKIVYPICCGMDVHRDFVIACIATTNAQGVTEYQSRRYYTYTEELRALKTWLADNNCKDVCMESTGKYWFPIHNILEDTCNVVVSHPKFVKAIKGKKTDKKDAQWIADLFKHDLVNGSFIPPRDIRQLRDLCRYWVKLTSYTTGEKNRAQNCLTVSNFKLDDVFSDVFGKSASAITTQLLEHPGESFDVTPFVHKRCRTPIDKIQKAVDGIFSYEQAEKLKIIRSHMDSLENHKAELQSLILGIAEKYISQIELLMTVPGINDVFTAIRIIAEIGVDMSVFETSKKLCSWAGLTPQNNESANKKKTTRIGKSGAYLKPLLVQIAISSSRSEKHPEIREKYLALKKRRGGQKAKIAIARKLLTAIFNILAKDEPYNPNLYHKDENPPSARIISQEQAISILANMGYVLDPSVLSTR

SEQ ID NO: 354052 - protein, 334 aa, unidentified
MTSIAHTRKVTVTRIICGVDVSSDCLETRIGREGAAASFPNHAEGIAALAVFCREHDVALVAMEATGGYEQQAFAQLSETALSVAILNPRAVRQFAQSMGRLEKTDRIDAGMIAWYAEVKQPPPVCLAPQNQQHLRALVTRLRQLTDIRTAQLNQQRLITDRSVQASFAKLLAFVAGQIRDLEQRIAKLIGQDPLWRELDQQFRTIKGVADRTVCRLMAEMPEIGTLSNKTISKLAGVAPLARDSGKYQGKRTVRGGRAAVRQILFIVASVVGRYEPDFMAFQQRLRAAGKPPKVVRIALAHKLLVRLNAKAREVRQRMVTLRPNSSALLLGTN

SEQ ID NO: 354053 - protein, 351 aa, unidentified
MLQKTNAVSVRTIGIDMGKNTLHLIGLDQQGTIVLREKLARGRIGRRLANASPCLIGIEAGMATHYVARELLALGHDVRQVPPAYAKPFRQGHKNDFRDAHAIAEAVLRPSTRCVPVKTDNQLDLQALHRVRSRLVGQRTAVINQIRSFLLERGIAVRQGPRFLRQLLPEILAKRTDVLSPRMIGIIEDLSGDWRRLDERIERVTEEIEQLAHGSESCRQLMTVPGIGPLIASAMVAAIANGAAFAKGRDFAAWLGLVPKQMSTGDRTILGHISKRGNRYLRTLFMQGARVILLRPANWARHSFGPWLRAAAKRLHHNVLATALANKLARIAWTVLAQRRNYETRVVTEAA

SEQ ID NO: 354054 - protein, 376 aa, unidentified
MQDSTFVGLDVHKATISVAVARGERGGEARHWGTVPHRSDHVRKLVERLAAGGGRLHFCYEAGPCGYGLYRQLVELGHDCIVVAPSLIPVKAGNRVKTDRRDAVMLAKLHRAGELTAVWVPDAAHEAMRDLVRARATAMRVLGKARQHLQGFLLRHGRIYPGKKGWTVAYRRWLTTVRFDHPARQIVFQDYVDAVGDAEKRAERLTAQIADLLPSWSLAPVVEAIQSMRGVAFIVAVTVVAEVGDFQRFDNPRQLMAYLGLTPSEHSSGATVRRGGITKAGSSLARRALIEGAWSYRMQARVSRKLHDRLEGLPKAVRDIAWKGQLRMCQRYRHLMAAGKPKVVATTAIAREMVGFIWAIARLATPPHDAPARTQG

SEQ ID NO: 354055 - protein, 323 aa, unidentified
MQGKSAPEARADEAVYVGIDVCKAWLDVYLHPTGQSFRVPNNKEGIKALKGQLARTKVALAAMEATGKLHRLAHRMLSQAGYPVAVVNPARSRKFAEALGQLAKTDKIDARLLALYGACLGPKATPVPAKTLAELQELVLARQAAKADETALKNRHAAAESPVLKRLLRGQLDGCAWAIEGLDAAIGALLERDPALKRRYGILISIKGIGPIVAATLAACLSELGLLSAQEIAALAGVAPFNDDSGDGRRLRRIKGGRAHVRQALYMAAVSAARCNPDLKAFYTRLRAAGKEAKLALTAVMRKLVILANTLIRQDRHWTEKHA

SEQ ID NO: 354056 - protein, 369 aa, unidentified
MKKTIRFVGLDVHQKTITVAVAEPGSAPAQLLTTLPNDHLALAKCLERIGPAPTLQVCYEAGPTGYGLARWLLESGIRCRVVAPSLVPRDGRRIKTDRRDALKLAHFLRSGDLVAIAVPDAAAEAMRDLERAREDAKNAERVVRHQLSKFLLRHGRIWSGATKWTDAHWRWVRAQQFACPTLQRVCDDALQAVEQAGQRVAQLTRNLSEQTATWSQRPLVQALQALRGVQLVSAVVLTAEIGDYRRFASPRQLMTYLGLVPSEHSTGETRRQGRITRTGNTHVRRILVEAAWSYRYRPRLTKVIAARQKEVSPAVRAIAWKAQQRLHRRYVRLLSRGKSKQQVVTAVARELAGFVWAIARQDALLVEAA

SEQ ID NO: 354057 - protein, 344 aa, unidentified
MVVIGIDAHKRTHTAVIVDTNGRQLATKTCGSTSKDHLALLRWAGHHGADRIWAIEDCRNMTRRLERDLLAAGERVVRVPPKLMSHARDAARTYGKSDPIDALAVARAALREDGLPAAYLDGPDREVRLLVDHREDLLAERTRAINRLRWHLHELDPDWDPPARSLDRASALDRISRRVAGMSGTVARLAAAITERCRQLTIDINTLEAEIKTLTEQLAPTLLAIPGCASLTAAKILGETASVTRFRSAAAYARHNGTAPLPVWSSNRTRHRLSRTGNRQLNAALHRIAMTQARCHPPARDLIARRKAGGDGGMEALRILKRRLSDVIYQALRTDLNARHPVAA

SEQ ID NO: 354058 - protein, 420 aa, unidentified
MEEITEDAEIVQRVAGLDIGKATLTACVRVPHEDKPGRRLQEVRTFATTTPALLELRDWLICQGVTLCVMEATSTYWKPPFYLLEDAVECWVVNARDVKNVPGRAKTDKLDAVWLAKLAERGMLRPSFVPPPWQRELRDLCRYRRTLIQERTREKQRAEKLLEDTQIKLSAVISDIFGASGRAMLEALIAGQRNPAVLADLARGSMRGKKSVLQEALTGQFRDHHGWLLRMMLGRIDALTAQVDALTARIDEAIAPFAHQVAQLDEIPGVGKTGAQEIIAEIGIDMARFPTAAHLVSWAKFAPRARQSAGRAKPGTTGKGNPWIGGTLGEAVIGAARTKTFLGSRYHRLARKRGKRRALVAVGNSLLVIIYHLLSDPGARFTDLGPDWHDRLAPLRRKRQLIAELERLSGKKVTLQEAAA

SEQ ID NO: 354059 - protein, 351 aa, unidentified
MPRTTTVHAVTAIGIDMGKNTLHMIGLDARGAIVLREKVSRGRITSRLANLSPCLIGIEAGMATHYVARELTALGHDVKQVPPAYAKPFRQGHKNDFRDAHAVAEAVQRPTTRFVPAKTNEQLDLQALHRVRSRLVSERTAVINQIRGFLLERGIIVRQGLRFLRQALPEILAKRTDVLSPRMVRIVADLTSDWRQLDERIEVVTDEIETLAKSDGSCRRVMTVPGIGPIISSAMVAAIGSGAAFARGRDFSAWIGLVPQQMSTGDRTILGRISKRGNGYLRTLFMQAARVILLRPASWPRHSFGVWLARAAQRLHPNVLAAALANKLARIAWTVLAQERNYEARIMKAAA

SEQ ID NO: 354060 - protein, 343 aa, unidentified
MKATTIGIDLAKNVLQVHGVDERGNAVVRKQLKRDQVLPFFGNLVACRIGMEACGGAHYWARKLEKLGHSVKLMAPQFVKPYVKTNKNDAADAEAICEALSRPNMRFVPIKNGEQQAVLALHRARQGFVTARTAQANQIRGLLSEYGIVIPQGLHHIGKRLPEILEDGENDLPGVFRQLLQRLGDHLRELHRQVGELELQIQLWHRQHDASCRLAQIPGIGPLTASALVASIGDAKSFESGRQLAAWLGLVPRQHSSGGKSTLLGISKRGDGYLRMLLVHGARAVIRVAENKPGYADSWLARLVSRRHPNIAAVALANKNARIVWALLKHDRDYQARYQPAMT

SEQ ID NO: 354061 - protein, 358 aa, unidentified
MTQVKKLDFSGTTIYCGVDVHKKSWRVNIQDSEFELEDFTQNPQAVLLHKHLIRHYPGATYKIGYEAGFSGFSMHRSLSQLGCQCWVVNAADIPSSDKDKKQKHDKADARKLCNYLQSKKLKGIYIPDQTWEHARTLVRTRERIVNNQTRCKNRIWQLLHFSGLPIPAQQQEGKYWSKRFIEGLQKLECEGSIHLQQSLELHIKDYLQTRGLLLEATRGIRALCREEKYAGDIKLLRSIPGIGEINAAVMLFELQDVRRFKRFDHLCSYVGLVPDTADSGETKRTKGITHRHNPYLRTALVESSWSVVRKDPALLMKYKQYCKRMEKNKAIIRIAKHLLSRISFVLKNKKEYVTGVVV

SEQ ID NO: 354062 - protein, 417 aa, unidentified
MGGESKMSRRCIGLDIHRDFCEVAVWEQGQVRSAGRIEARPEALAEYATALRPTNEEALEEISGARQVAQILEPHVGRVVIANTHRLAAISDSKHKTDRQDARTLAQLLAAGVLESCWLPDEGTRALRRRVSRRHNLVVARTRAKNEAMAVLHRNLSQRPPMSDPFGAKGRRWLGALELPSDEVETLSAALRQIDFLSGEVEVIERELARFAAGSAEARRLMTVPGVAMVTAVTFLAQVGEIERFASPKQLVGYLGLDPRVRQSGNGAAFTGRISKEGASLVRHVMVEAAHAGIRSPGPLRAFYERVRSRRGHAIAVVASARKMVSLFWHLLKRKEDYRHSIELVTQKKLRKVELLAGAPRRRGGGRCEGPNRDERREIDRDRARAAAEEYQRFVAERQQGTGTGNGGAAMQAAPRT

SEQ ID NO: 354063 - protein, 310 aa, unidentified
MEHRRIVGIDVSKDRLDVHVLPSQEAWASRRDAEGLAELCRRLGDTADLVAIEATGGYETIVAAALSSHGVAVVIVNPAQVRAFAQALGQRAKTDPIDAGVIARFAEATRPQIRPLPDGAARLLGDLMGRRRQIVEMIASERQRLHRIEPARVRKSIERLLKALQRELDSIDLDIDGIVRSSPIWRDKEDLLASVPGIGRIIARTLLAELPELGRLDRKQIAALAGLAPFTRQSGAWRGKARIAGGRAVVRTALFIGAQVAKRWNPPLKAFYERLIAAGKPKMVATIAVARKLLTILNAILRDKTPWQNA

SEQ ID NO: 354064 - protein, 343 aa, unidentified
MKLHVIGIDLGKTIFHLVGLDSTGKAVIRKKCSRKQLLAFTANLEVQLIGMESCSGSHFLGRALREQGHEVRLMPAQYVKPYVQTNKSDYLDAEAIAEAVQRPRMRFVPIKTEEQLDLQALHRVRERWVMRRTAVVNQIRSLLLERGLTLPKGRRYVDEQLPRILEDAELRLSGSFRVLLAQLKIELEQLTARIEEMDRVMQKTARENEACQRLTEIPGVGPVIATALIGAVGNASTFGKGRKLAAWMGIVPGEYTTGGKQKLLGISKRGNKYLRTLFIQGARSVVQQRHKQAPGLSRWIEQLLERTHQNVVIVALANKLVRMAWAVLCKNERYRAPVLAVTP

SEQ ID NO: 354065 - protein, 356 aa, unidentified
MSTMPCLPAEVILGVDTHRDTHAAALVDTLGQFVAAQSFPTTRAGLRLLIRWAQQLGTVRRAGVEGTGSYGAGLNRALRLENIEVIEVTRAARVGRRHLGKNDTRDAEAAARNVLSGQATAIPKARDGIVESIRVLRNARASAVKARTQAIIHLKNLVVTAPDDLRESLSGLTTKQLVTRCARMRRSPRLDALSATRTALRTLARRHQILDQEITELDATLAELSARAAPRLLNEPGIGPEIAARLLLVAGENPTRIRNDSALAALCGASPVEASSGKTTRHRLNRGGDRQANSALWLIANNRMIHHPPTRDYVARRTAEGKSTKEIRRCLMRHIARGIHPLLIADLTDAQQLLLT

SEQ ID NO: 354066 - protein, 422 aa, unidentified
MSYCPVAGIDISKQFSDMCILSPDNKIFAQEKIYHDETSINRANALLQKAERLFFSKPVIVMESTSHYHLILFQFFSEHGYDVIVVNPLQSNSMKDFSIRKRKTDRVDAFKLAMMYRTKTLRPSQIPQTATRALRQLCRHRAELLNDVSSYKNRLTALLDQTFPGYDKVFSDVGGVTSCAVLVRFPTPTILLVEEESELVEVIAATSKSGYGFAKKKAGLLISAAQKAQTLGIHSCADETLIVCTIQMLRTLSESVLQIETAIDNLLAQIKEMRNNVSLLQSIPGVGSHSAVLLLGEIGDISLFKKPKQLAAYFGLDPTERQSGSFRGTKNKLSKRGSPYARAALHMGVVNSICKRGKDSAANPVLLSYYEKKCKNKPAKVAQAASMHKLVFIVFAVLRDQKPFELKTPEQHAVEQGFVKAA

SEQ ID NO: 354067 - protein, 409 aa, unidentified
MRVIGLDVHRSFAVAALLEHNVLSSGGRVELTRDAVVTFGRKLRPNDEVVIEATGNTAMIVRLLRPFVRRVVIANPLQVRAIAHAKIKTDKIDAAVLAKLHASGFLPEVWMPDEATETFRRLVAQRSQIVQQMTRIKNRIHGVLHTNLIPPYEGELFNMSGRVWLGTLPLERDEMLAVRRYLADLDQRMADLSVLDQALAEHALRDERVRRLMTLSGVHVTVAMGLLAAIGDIKRFASSEKLVSYFGLNPSVRQSGSGPAHHGRITKQGRSHARGMLVEAAWAAARVPGPLRAFFLRIQGRRGKSVAAVATARKLAVLVWHLLSKEEDYAWARPALLEAKLRKVELAAGHPTAKGRRQGRAHAYNSQEVRERERAWLAQTEHAYTRFVANWQTRPPEGRTDAANRKRTS

SEQ ID NO: 354068 - protein, 441 aa, unidentified
MAAPAIGETERTASKERTRGSARLRMTRTKREVTGSCRNVALSKGDNGGAKPPKNAGWRAKRQSRKRKEPVMDEGITFVGLDAHKASISVSMLLPNVVTPLEWQLPNEASAVRRMVRRIEREAPGEVRTCYEAGPCGYALQRQITEAGDASCMVVAPSLIPRKPGERIKTDRRDARKLASLFRAGLLTEVQPPSERDEAVRDLCRAREDARDDRMRCRHRLSKMLLRRGLIYSGRSSWGQAHRLWLGALRFEDPVDQAVLDDYVLAIDQLTDRLKALSQKLEDLSRVAPYAERVAALRCFRGIDTLTAMTIVAELHTFGRFTSPRGLMAFLGLVPSEHSSGGSKRQGSITKAGNSHVRRVLVEAAWNYRHRPATAALKKRRAGQSSRVIAIADRAMSRLYRRYFRMTSARVPAPKATVAVARELVGFIWAVLYPMSTHAAN

SEQ ID NO: 354069 - protein, 412 aa, unidentified
MEKSYKIAGIDVHKSMLAVVVADAALEGEFRFERRKFGTMASELKALAEWLAAQQVREAVMESTAQYWKPVWRELEGQCRLQLAQAHSNRAPRGRKSDFKDAERLLRRLVAGELILSFVPNPEQRLWRTLTRTKHQLTRDRVRLHSQLESLLEDARIKLATCVSDLLGLSSRRMLQGLADGQTDAAALAGLAEPELRATPEQLADALSAAATLSPLHRQILRLFLERLELIERQIATLHQTIASALQQHQQAVLRLAAVPGFGPDSAQQVIAEVGPEAATFASAGEMASWVGVCPGREESAEESKSNRTPKGNRAMRRVLNQAANAARKAKGSVFHAMYGRLVPRLGHHKTIWAIAHRLCRLAWIILHNGVEYIEYGKQRDPKATERRTAILIRALRGLGYQVIPPTANVVG

SEQ ID NO: 354070 - protein, 347 aa, unidentified
MNFYRLSHKYYCGVDLHSRTLYLCIVGQDGVVLLHRSLPCDPDRFLLAIAPFREDLVVAVECVYSWYWLADLCAREGIAFVLGHALYMKAIHGAKAKSDRIDSAKIAVLVRGGLMPVAYAYPADMRATRDLMRRRLLFVRQRGSLLAHIQITHHQYNVDPPGKRITYRSNREGLGEGFEDSSVRHSIAADLALADHYEVTIGELELAVLRQARIHDPNALALLTSVPGIGKVLALTILYEIHDISRFPSVRDFASYSRLVKCERSSAGKSLGSGGNKIGNAYLKWAFSEAAVLFIAKSEQGRTVLTRLERKYGKPKALSVLAHKLGRAVYYMLARKQAFDPQRFATS

SEQ ID NO: 354071 - protein, 653 aa, unidentified
MANSYGTPGPSATACDITTTTGGGLSSSSTPANTQDWRIRGQEPSGGTQAANGWSSLAPIATQGAEFQVNTGGNNNIQLSFDLYTTTAAESRAAVLYSLNGGTSWINVPSSAVTLPSIDTLETAPPNTMSQVIHSRPEAAPKASHREAVNNLAAAVAAIPGHTAAGSRFAPASPRSAPHHPARVLSRKPTTPAARVQKSERTSPREGHRIRLTMNRVIPTNAAITQRKESQMKTWNDITHFAGFDWAKDHHDVLVLDGAGKIVAELRFDHTASGWALCQEKLAQFPQVAIAVEGGHSAAIERLVTLDYRVYPVHPRSSKSYRTRKLPSGTKTDRADCWALADALRLEGESWRVLTAPEPLVQQLRLLCRDEVALIEQRTAMVNQLQQALYEYYPAALEAFEDWCAPSAWAFVERFPTPQSLVQAGKRKWQSFLHAQKLFHPEWNKKRMEIFAKADQFCGAEATIAAKSVLAVATVKILQTLEAQLARYRALITERFKQHPDHALFASLPGAGPKLAPRLLGELIALKPLADAPQALQCLAGMAPVSYQSGKVSVVYLRRQCNRFLRATVHLWVDLSRHYCDWARIYYETHRKKGQSHACALRCLGMRWLKIIAAMIRSQTPYDAAIHTRNQLQHGSWVMQLQPVKVVKKNGSD

SEQ ID NO: 354072 - protein, 441 aa, unidentified
MEEEREQVLPHVSEFPEYCTPVGVTVGRIRKVIHPRGTKRFIGVDLSKQSCYVCIINRDGQIELHRNFSLRSDKRSDLYEKLQEGDLVLMEASTGTFNIARAMNKLPGVLVCVVNPHSTRINETKKKTDKEDSLFLAKLILRTPVEELQLVSIPSDQEMENRDVISHYRQVDNRHTQVVNRLHALFFDKGFPEVGKSHDLHTKVGRYDAIEKCFGTDRAYSFTKRIAKDLSKELSLLEEQQAVGERQMARIVKQDDRVAAILGSIPGVGLKTIAAFIAFVGDIDRFYQGKQLSAYCGLVPRVYQSGQKDGVRKITKEGQAALREYLVEAVFAMMRTKFNFPLKEKYLELRQRMKSRKAAIAVARKLVVMIFSMLKNGTLYMVEKEEDREQVAAYHKRKYIQSVGRYYKIRESCKDISAMIEITNTFYSNELGVMKFRQQGA

SEQ ID NO: 354073 - protein, 325 aa, unidentified
MDVKHFIGIDVSKADFYACFGETTPPVKFANTPAGIHSFLQHINKTQGNKNNTEIGLESTASYHYLLCFKCTALGFTVKVINPLTVKKQNQTSLRRVKNDRKDAILIRHCLVLGFGYAFQETVDTLTIKSLVRQRNSLADYLLKINRQIKDIEYKQACVGVQLPNPYSEIKHLLKEKSKELELELKQHKTEEQHLLQTIPGVGPLTAAAFISEVQDIKRFKEPKQLTAYIGLDSRVHESGVSVHGKGYISKRGNKILRTRLYNACSVAVLRPNTFQIFFQKKVSEGKPYRVALIATMNKMARVVHSVWTNNKPFVDPTLNPKETV

SEQ ID NO: 354074 - protein, 402 aa, unidentified
MNAVGIDVSKGKSMIAVMRPFGEIVASPFEVNHTTEELSKLVEMLRNLDGETKIVMECTGVYHLPIAYALNESDLFVSTVNPIITRKYDNNSIRKSKNDKADAIKIANYTLTNWLKLQQFIPEEDVRHMLKVYCRQYNKYKKILTMLKNNLIALLDSTFPGANELFTSPPRKSDGHEKWVDFVAHFWHCKCISSISEKAFIERYRKWCKRAGYNFSQAKAEDLYIDALGHFFIIPMTETTKHLITQATSQINTISETINTLAVEMKSLAGSLPEHTVVMEFRGVGDILGPQLIAEIGDVYRYSKKSSLVRYAGLEPVENQSGKFRGGESISKQGSPHLRKTLFQVMDCLLKHAPSDDPIFQFLDRKRAEGKHYRSYMCAGAAKFLRVYYARVREYLEKHFVE

SEQ ID NO: 354075 - protein, 363 aa, unidentified
MPTRETIQIPAAEPTVPFVAHIGLDWADQKHFWTMLADGKKTRGQLDNTPEAIEVWAVELAQRWGGRPVALALEQARGAVISVLSKYAHLVLFPVHPTSLANYRKSFSPSGAKSDPVDGDLLLDYLVKHPEQLRCLRPDTLETRGLQFLTLERRKLVDAHTATLQSLIHWLKQVFPQMVRWFDDLGAPLVTDLLLRWPSLQALQRAKPKTLQKFFHQHNCRSEERTNERLEQIRQAVPATNDPALLQAGILSIQNFTRILAAMRQGIAELDRQIAATYQAHPDRFITESLPGAGPALEPRLIAAAGSLRERFESATDMQCCFGIAPVTEGSGNSLWIHWRWACSKFVRQTFQEWAACSIRSCP

SEQ ID NO: 354076 - protein, 344 aa, unidentified
MNYVGMDIHKRTIRAEVKDSTGRTIQRQTIRARRESLREWASGVPGPFMATFEATLFTGWVYDEMIRHAEKVRVANPQLLHYISKTKKKSDKLDAGKLADLLRVDMIPECYMLPEDARMLRELLRYRHWLIRECTRFKNKITGQLMTHGVEYDGSRIHRKRYFREFARTLEADKRLVEMLQFSRGQLEVLSELERRVMRLLYTDPGLSARVELLTSIPGVGEITALTWALEVWDPHRFSNSKKAISFCGLCSAQRESAGHEVRGPLSKQRNKRLQWVLVEASKIAVHRLGVPELVAVYERTAAQKNKNAATIAVARELVKWLLAVDKRGTPFTESNGKGSGSTV

SEQ ID NO: 354077 - protein, 316 aa, unidentified
MEQQISANVVGIDVSKSRLDVSVAGQDWAESNDIPGIEAFIDKLKPLAPGLVIVEATGGLERTVVSLLSLAGFRVAVVNPRRVREFARSIGLLAKTDKVDARLLVRFGEAIQPEPTRLPSEEEQQLAALMARRRQVIEMLTMEKNHLCSAHPSMKTSIEKIMQALQQELVELNHQIDDLIGHTPDFHEKNDILRSAPGVGQVTAAILLSDLPELGVLSRKKIAGLVGVATYNNDSGRHRGKRRIKGERPCVRTVLYMATLSATKCNFIIRSFYHNILAMGKEKKVALIASMRKFLVILNAMVRDRRPWQPFPSVLP

SEQ ID NO: 354078 - protein, 346 aa, unidentified
MIYYAGLDVSLKEISICVVDADGKTVARGVSPADPEGVAGWFRAKSLSPRLIVHESGQLSIWLQRGLDRLGLPTICIDARKAHKSLSARPNKSDAADAEGLAQLARTGWFTPVHVRSEDSDRLRCLISARAHLISLRKDLEGHVRGILKTFGVRLTGIGKGGQRQGFRDQLAAAGERNAVLRSIADGFIAAHSTLCQAAADLERAVKEKAKTHPVARRLMTVPGVGPVVALNFVALVDDPARFRRAENVGAFLGLTPRRYQSGEMDWSGRISRCGDGTMRSLLFEAATTLIGRVKKFSALKSWAVRLAGRRGFAKAAVATARKLAVLMLTLWRTETEFKWKKEAIA

SEQ ID NO: 354079 - protein, 356 aa, unidentified
MLIVKAVKEKNINTKKGDHMKDIIYDHYIAIDWAAKNMAIARMTKKSNKITAIDVPSDIVEFQFYLKNLKGTKILAIEETTTSQWLYTELKEYVDKVLICDPYRNSLLSEGPKTDKIDATKLVQLLKADLMKEVFHSTDKFIYLRRIVSGYEDLVKAGVRLKNQRYSMLRVCGKSGYEKKGIKLSSRDEQYVLECLDRQTQNYEEEKKGYEKEFARLARRHPEIRYQKSIPGIGLINAVKIVARVVTPYRFSGKGHYLSYSGLIKHEKMSGGRSYGKKNPRYCRMMKCVYKSGVIAAIGGNNPINDYYEYLLSEKGYPAYNARNKACRRLAILSFGVFKSGKKYEPYRRDHVKKGK

SEQ ID NO: 354080 - protein, 338 aa, unidentified
MPLYGGIDLHANNSVVVLLNEQDQVIYQRRLANHLPTILEPLAPHQADIMGVVVESTYNWYWLVDGLMEAGYRVHLANPAAMQQYNGLKYTNDHSDARWLAHLLRLGVLPEGYIYPKAERAVRDLLRKRAHLVRQHTAQVLSVQNLMARNTGSRFSAKRLVDLTPADLQGMLPEAAHVLAVTSSLAVVHCLGQQIKTLEKTVNTCLKPTPAYAQLQTVDGIGTTLAQTIVLETGEIGRFPTVGHYASYCRCVGSTKISNGKRKGQGNIKNGHPYLEWAYMEAAQFAIRFSPTVQRFYQRKQAKSHLMIARKAVAHKLARACYYILRDLVPFDVHKAFG

SEQ ID NO: 354081 - protein, 353 aa, unidentified
METIVAIDLGKRKSVVCTMDRSSLKTHYKTVRTQPEVFHDLFADLDVKNAIVLYEVGNQAGWLADMLRAMKLPFKVANTNDPAWKWTNHPVKSDKKDAERLAMLYCTGHFPEVYIPVKEVRQKRMLINHRQSLVDRQTQIKNSIRAILCTMAIDWPAGKSGWTKKRLAELAEHARPLEAIDDLCDLWRGQLYSELQLLAAVQQQLDNVTSKLDAIQKEQAAVNLLQTVPGVGPRTAEALVAVIDDPHRFKNCRQVSNYVGFTPRRYQSGDMDRTGRISKRGNPLLRMLLVQAGWASLQYAWAREIYNRVCRGSTKRRKIAIVAVARHILMRCWAMLRDNKPWQCSTVKTAAWK

SEQ ID NO: 354082 - protein, 311 aa, unidentified
MEVSLGIDISSKRLDCYWSHTNKHQSFENNPSGIARLVAKIKKETPQWLIFEPTGGYEIDLALQLAQAGVQFSMVQPHRLRSFAKSCGKLAKTDKLDAKLMATYGKTMEPKKTILGTKAQQELSSFVTRRRQLVDFLSMERQRLEQWLNPMMKKNIEEHCDYLKEQILAFEHQIQDCINQDTTLQQVSEALQNVRGVGPTSAAVLLADLPELGHIGSKEIAALVGVAPFNVESGNSKRKSSIRGGRLSVRCMLYMMALVAIRYNPVIREFYQRLREQKKPAKVAIVASMRKLLIILNAIARDHFKDQMLHA

SEQ ID NO: 354083 - protein, 346 aa, unidentified
MQDNPLHSNQTHYNFFIGIDVSKQHLDLALLVGGRVINSMRIENQPKAIGAALQKLITSHGVVVKQCLFCLEHTGIYSNDLVGLLEQQELAIWLEHPLQIKYSLGMQRGKNDKIDAQRIAQYAYKNRESVRLWKPTRKLLTQLQHLTRLRERLLSANNTLKVALSEGKPFSDKDTHQLLTQLLTKHCPSSLAALKKDLQAVEKQIQQLIDSDEHLSQLFSQLTSVPGVGPVTASELIISTNEFKDFDSPKKLACYAGVAPFEHSSGKSIRGRSRVSHQANKRLKTLLQMAAMRTVRLKNKFARYYDRKIEEGKNKMLVCNAVRNKLLHTLFALVKHNQKYDENYAL

SEQ ID NO: 354084 - protein, 351 aa, unidentified
MILIGVDFHPSVQQVAYVDTETGETCERRLNHSDGEAERFYRDLERRQVRVRVGIEATGHARWFERLLAELKFELWIGDPARIKVARVRKQKTDRQDAQLLLRLLIEGRFPQIWVPSPENRDLRQLIWHRHRLVQMRTRAMNQIQAAAMNEGVRRKKTLWSKTGRRQLEALPLAPWATRRRQDLLELVDRLNTTIDELTAAAEQEARKRSEVLRLMTHPDVGPITALAFVLVLGSPDRFGCGHQIGSYLGLIPCEDSSADRQRLGHITKQGSSLLRFLLVEAAQAAVRWDPDWRRRFVHLAMRRDRRIAKVAMARKLAVSLYWMWRKECDYPQTLQFGSHAGEPGFVHGVK

SEQ ID NO: 354085 - protein, 423 aa, unidentified
MISFPKRERAQRAAACVGVDAGKFAHTLVVRPTGRPDSKPCTFPTTRAGFEQAVAFVRQQVPGASPANILVGIEFAGNYGFTFAHYLRELGFPIVSVLPAHTKRWKDVAHNQPLKTDAKDAGTITDLLAQGHFVGFPFLEPAYADLRYLVTARERLAVLRRGAITQLRALLQVVFPEYETIFPLVSQRTAVLLLRAFPGPQQLLAAPKAKVLRVLRAGSRGHLGAEIYERLVGAARATLGLPGAQVRLRQEIVLTLDRLALFEHQIRALEVELVAALEAVPETPYLLSIPKVAAVTAAVFLGSIGDPRAYDAGAQILRVAGLSLVERSSGVLHGTKRISKRGRPLLRAAAYLFAVRSITKGGLFRADYEGLCARNGGQKLKAIVAVMRSGLQLLYSIARDRRRFTVEPPPRRRARPTLEVTPA

SEQ ID NO: 354086 - protein, 342 aa, unidentified
MKTVSTIGIDLAKNSFSVYGVNAEGKPMIQRTLTRAGVIRFFANIPACLVGMEACASSEYWARTIESLGHTVRRIHPRYVKAYLLGAKNDANDAAAICEAVQRPNMRFVPHKSPEQIDIQCIHRIRQGFVRSRTALVNKIRGLLGEYGIIIRQGVSVVRTRLPELIDDGTNGLSPIMRRNLSLLHESLRFLDDSILDQEKLLKEIVRENEACKRLLKIPGIGLLTATILLSAAGVASNFKNGREFAASLGLVPRQKSTGGKTKLLGISKRGDSYTRTLLVHGARAVMSALITGRTPQARQNAWLAELVARRGKNRASVALANKTARIAWSMLSQGTEYRQAA

SEQ ID NO: 354087 - protein, 435 aa, unidentified
MEEVEDEPLFCDRVAGIDIGKATVMVTIRVPSEARAKGRQQETREFGTTRRELLALADWLRCWQVERAGMEATSDYWKPVLFTLEQEGFDCLLYQASQVKALPGRPKTDKLDSVWLARITGQGSLAGSFVPPEEIRRLRTHTRYRRKLVQMRTAQKERCEKLLEDAHLKLSSVISDIHGVSGRDMLRAIAAGERNPKVLAQMARGVMRSKIARLEQALDCSFFTGEHAFILTMMLDSIDSLTAQAGVLDARIADMCQPYQRQLEQLDEIPGFGTTTAQDLIAEIGTDMNVFPTAGHLASYARQAPRVKESAGKRKGKNATGRGNPYIGGALGEAAISAGRTQTFIGEKYRRLTRRMPKRKAQVAIMRSQLVIAHALLSDPDARYQDLGPDYYERKADIRRRARNHARALERLGYKVTLEAIDPGTGELHLAATAG

SEQ ID NO: 354088 - protein, 372 aa, unidentified
MGEDSIVYVGVDVSKNKHAIAVAEGGRTGEVRYFGEIETTPASVERLVRKLEKRYGRLHVCYEAGPTGYGLHRQITAMGHVCEVVAPSLIPKRAGERVKTDRRDAVTLARLLRAGELTGIWVPDDVHEAMRDLVRALEAASDDLRKKRQQLQPFLLRHGRIFTGRKHWSAAHIRWLAAQKFEPSAQQIVFQDYVDAVRDARERLERFDTHIEELVPAWSMAPLVAAYQAMRGVSILVAATFAVEVGDVRRFDSPRQLMAFLGLVPSERSTGESVKRGGLTLAGNRRARRVLVEGVWSYRHPARVTETIRKRLENLPKAVRDIAWKAQVPLSKRYRRMTTGGKKGPVVIAAIAREMAAFLWAIGREVEPRPIA

SEQ ID NO: 354089 - protein, 373 aa, unidentified
MPKYSTAFGMDVHLRSTTVCALDADTGEAVTRRFPGNPWGEIAGWMDGFPGPSLAAYESGYLGFAPQRELAGLGVECVVAAVSKIPRSAADSASKNDRNDAARMAKAILAHDISPVWVPSPEVEGIRDLAGAYDGATARLATAKQRLLAFLAKRGFVYGGTTPAGNPRKYWTYDFLRWLDKARPEDDGGVRTLAALRNEVEAAAEARADLLSEYRAAVDASPIAAEVAALQSIKGCAFALAAAFSAEVGDFTRFRSGRQVTAYFGLAPSQRSSGDSVRLGGISGAGNALVRKLAVEGSWCYAAARHQPKLMPRDTGVPLEIRMHGRKGSERLLRRREEMLARGMPAAKANAATAAELVRWLWALGMMCREGTE

SEQ ID NO: 354090 - protein, 346 aa, unidentified
MKISRVGVDLAKNVFQLHGVDSRGKAVWKRQLPRDKWLRALSDTVEPGALIGLEACAGAHHWARLLIAKGYTVKIIPPQFVTPFVKSNKNDANDAAAICEAMVRPDMYPVTVKTVVQQDLQAIHRIREEIKAHRVAKANQIRGLVTEYGLVAPKQLSSLRPAITDWLEDASNGLTDFFRQLLHGLQEDLGRLDQRMAMLDQKIAEIAKAHPTAKRLQQLRGVGPLIATALVATMGDGKQYRKGRDMAAAIGLTPRQHSSGGKDRLLGISKRGDAYLRCLLVHGARSAIRTMNGRDDRLSRWIVSLQARRHNNVVAVAMANKLARIAWVIMAKGVDYDPDMNLATVN

SEQ ID NO: 354091 - protein, 361 aa, unidentified
MGEVSTIGLDIAKSVFQVHGVDADGAVVIRKRVSRVKVLEFFAALPSCLIGIEACPSAHYWSRRLQELGHTVRLMPPSYVKAYLKRSKNDANDAAAICEAVTRPSMRFVPTKSEQQQSALMLHRSRQLLVRQRTMLSNAIRGHLAELGIISAKGRKGTAELLEIVANQEDDRVPAAARLSLKVLAGQYAAITTEIGNIEKHIHAWHRSCEESRRLEEIPGVGPIVATALVAEVGDWTAFSSGRSLAAWIGLVPRQHSTGGKERLGRISKQGNRHLRWLLVAGAGRHPICASARHETALARSFDGASADQGRCRRARQQDRSYGLGHDGARRALPGGEVATGSRIETNNGRKLKRIGEGMTT

SEQ ID NO: 354092 - protein, 355 aa, unidentified
MKYYTSTTQFNCGIDLHARQMYVCLMDRDGKKLVHTNIKNNDFDFFLKLIAPYKHDLTVCAECMFGWYWLADACQAAGLHFVLAHALYLKAIHGGKNKNDRIDSEKIAHLLRSNLIPPAYVYPAAKRPLRALLRQRLFFVWRRSELLARIHSHQLAHNRVPQKQTRSNRDPWEAQLLAAEPEPLRQLALKNDLAMIKHFDHQIAQLEEELQRQAKRFAAREYALLQTVPGIGENLGMTILCEIGDITRFPTVKNFLSYSRLVKGTVASAGKIKGLRGAKLGNPYLRWAFGEAAVIAKRDHAVMGPLAQRLEARMNGNKFKANTVVAIKLARAVYFMLRSHTVFDPDRLVAALSRN

SEQ ID NO: 354093 - protein, 375 aa, unidentified
MIEHTAEALDIWLTELHQKVKGRIAIALELKKGPVVYALQKYPFITVFSVHALSLARYRQAFSPSGAKNDPQDAELALELMLRYPQKIKAIEPDNADIRLLQQLVEQRRLLVEDKRRFVNRLINTLKQYYPLPLEWFSHRDNSLFCELIIRWPSLQQLKRARSDTVRHFMNAKGGPAVAYTEQRVASIANAIPLTTDKSVIEANALMATALASQIKLAGDLIRTYDERIESLFGTLPDAELFKSLPGMGPCMGPRMLAALGDNRDRFNSAEEIQNYAGIAPVTERSGQKSWVHWRWQCAKFVRQTFVEWAAKTVNSSYWARLYYQGLREKEKSHQSAIRALAFKWITIIYRCWKTKLGTMKRSICWLSKRDTRPY

SEQ ID NO: 354094 - protein, 311 aa, unidentified
MTETTIGIDISKDHLDAHRLPGGEHDRFDNTSAGHKALLRWIGPTPTRVVYEPTGPYHRKLEVRLAAAGMPIVKVNPRQARRFAQAAGGLAKTDALDAAMLARMGAVLGLEARPVRGEVLNTLKDLHLAREALVKDRTAARNRAKVITLPLLKQHSVARLKQIDQQLAAIDAAIAERIGADPTLAARMAILVSIPGIAAVTAAMLVVEMPELGSLDPKAAAALAGLAPITRQSGRWKGKSFVQGGRKQVRHALYMPALVAMRFNPDMKAKYEQLTTAGKAPKQAITAIMRKLVVLANALLKKAMPWQPKLA

SEQ ID NO: 354095 - protein, 355 aa, unidentified
MEYIAFDAHKHYTLASVARPDGELVREERIEHDRGSLREFLGRCERGSPVAVETIGNWYWIVDEIEAAGCVPQLVHARKAKLMMGEINKTDRFDARGLNRLQRNGTLPTVWIPPGEVRDQRDLPRTRMVLVRQRTQLKNRIHATLAKYALHDFEVSDCFGVRGRTLLRQRFDLLPPHTAYASQHLLEQVEGLDHQVCEFEHRIQAVFKPTSAIQRLLTLPGVGLTLAVVIALEVGDVARFATAEKLAAYAGTTPRVHASGGKTRFGPSRPDVNRYLKWAFVEAANVICIARGRAPHRHVSRLYDRIARRKATRKPSGLWPGIWPKRRTGSSANTNPIGTRRRRPFRPRGISAGGS

SEQ ID NO: 354096 - protein, 410 aa, unidentified
MPKIVYPVCCGIDVHKSFVVACIAKTDDKLVTTYKRKRFSTFTGDLRRLAGWLSESNCHDVCMESTGKYWIPVYNILEPTCRIVLAHPKYARAIKGKKTDKRDAKWIADIFKHDLIVGSFIPPADIRQLRDLVRYHFKLTSYTTGEKNRTQNCLTVSNIKLDDVFSSVFGKAASAITERLLESNEQFDVRPYLTKGLKASPEEIQAAVDGAMCANQAEKLRIIRSHMDSLALCKANLQSEILSIAEKFLPQINLVSTVPGVQSFAAVAIIGEIGADMSVFETSRHLCSWAGLTPQNDQSAGKKKTTRITRAGAYIKPLLVQCALAAIKSNKHPEVRNRYSAIKKRRGQKKAIIAIARMLLTAIYNILKKEEPYNSELYRQSDKPPVQREVTVEQAIFILQRQGYLVTASQ

SEQ ID NO: 354097 - protein, 453 aa, unidentified
MPAPRKIKAKSNHQLPTLHPHAAGIDIGATQIQVAVPCDADLKPVRTFSTFTDDLHALRDWLKKCAVQTVAMESTSVYWIPLFQILEAAGLEVCLVNARHCKNLPGRKTDVSDCQWIQYLHSVGLLRASFRPPEQICALRSLLRHRANLLRYAASHVQHLQKALTQMNLQIHNVISDLTGVTGLAILEALLAGERDPQKLAALKDHRIKASRDTIARSLHGDWRPEHLFILHQALDTWRHYQSLVAQCDAQIQQLLARFDSKVDLADHPLPPSRLGHKRPQRNEPNFDARSELYRLCGVDLTQVPSLQINTTLVLFTELGPDFVRRFPTAKCFASWLGLCPDNRITGGKIISVKTRDVKSRVALALRLAAQSLWHSKDYLGNCFRRWKARLGTPKAITAMAHKLARIIWHLIKYRTPYDPSVWAQAEEKLKKKRLKYLQQSAAALGYTLLSNS

SEQ ID NO: 354098 - protein, 437 aa, unidentified
MRRKKNNANKSVNLQVLPVVNPNAAGIDVGAKEHLVAVPCDRDPQPVRTFQAFTPDLHELAAWLKRCGIETVALESTGIYWISLYEVLEQYGFEIRVVNARHVKHVPGRTKTDVLDCQWIQKLHSFGLLNGSFRPDQQIRKLRTYMRLRDNLVVASTQAVHHMQKALFEMNVQLSNVISDIVGETGLTILEAIIAGKRDPKQLAALCSSRIKASRETVAKSLHGNWDGALLFALKVALETYRFNQIKIQACDCCIQHHLAQFESRAELINSPQNLKTQLHRVCGVDLTKIPGIKEQSAQIIISEVGLGMTKWKTEKQFCSFLGLCPNNSISGGKVLHRATRKVYNRAADTLRLCAQSLTYSKSALGAKYRRLKAKLGAPKAIVAIAHHLARLVYRMLRYGQNYVEKGIHHYELKFRLQRIKWLKKEAHSLNLQLVAA

SEQ ID NO: 354099 - protein, 346 aa, unidentified
MVLIGCDFHPSWQQVSWLNREKGETGDQKLVHEAGAAEKFYRQFPAGSRIGMEATGNCQWFLELMAKLGHEVFVGDAAKIRASDARQQKHDKRDARLLVQLLAEERFPRIWVPSREEKDLRQLLIHRYKLVRIRAQVKNGLQHLALNQGLQRKKRLWSEAGQKALCELPLAPWASRRREDLLKMRSELDAKIELLDQAVMEAAEKNEKAKLLMTQPGVGPITSMAFVLTMGDVKRFPRGKQVASYLGLIPREYSSGGKQRLGSISKQGNSFLRMLLVEAAQGAARYDVGMRNEYLHRCHRKPKGVAKVAAARKLAVRLYWMLRTNTAYPEVVRVESSSRVPLVSAS

SEQ ID NO: 354100 - protein, 338 aa, unidentified
MAIIFADGLTETAPRVFNEFKTTVSGYKQLVKWVEQNSYGIDSSLWLFCGENTGDYSKGLCNFLYGKGYDMWLENAKSIKDASGLRRLKSDRADASMIAEYAMRNYDKAVMYEPLSESLAQLRELFLYRQMVVRHRCSFQVRRGEKRLTMEKSPVKTMISQSGRHIVSELNKEIEKIDKRIAELIKSDEELTEVFTIVTSVPGIGTQNAVCLMVYTDNFRRFNYDSRKIACYYGVAPFGKDSGTSVHSDPHVHYMANRQIKAMLTQAALAAVNFNPVMARYYMRLVERGKKKQVALNNVKNKLVHLVTAMVRNRQIFTPEYKISAKNENNGQNIWILT

SEQ ID NO: 354101 - protein, 373 aa, unidentified
MYRELLPLQERLAEELRETIALQMLPGMDPAKLLKAYIGQLTLYVGVDTSNETLTAVVIDNTGEILDSLVGFANDPEGFERFKRWMERVRAQHNARIVAVGGECTGVYYEEFWRYLAQCTDCARVLYNARTTEHMGEVLSTQVRDDEIDAYLLAEQLRLGSTPEAQLGQDVELLEARTCSRFARDIAQEINRKKNQIKSLIRTFNPAFYRASPGAKFWSAPAQNLLKSYIFPEDFIAAGVEEVQAASGGKLSRAETEALIEGCRRCYASPGQRHAVRQRIIDLTEDIARLKKCQRYYLQSGYHCIEHRPETSLVRAIYGAGISNTLAIVSEIPDAGRFPDGEHLASFLGLTTSKHISGTTLFSSKHITNFTFR

SEQ ID NO: 354102 - protein, 345 aa, unidentified
MIIGCDFHPSWQQIAWFESATGETGEQKLVHASGDAKTFYAQLSAPVLIGMEATGNSQWFIELVQDLGHEIWIGDAAQIRASYVRKQKTDKRDAAHILKLVVEGRFPRLWTPDREQRDLRQLVLHRHKLVEIRSRVKNELQHLSLNKGMQRKAKLWSQAGQQLLRELPLKPWAACRREDLLGLLAMLNQQIGKLDQAVQQAAEQHPQARLLMTQPGVGPNTALAYVLTIGNVTRFARGKQVASYLGLIPREESSGGRQKLGAITKQGNRLVRSLLVEAAQIAVRFDPGFRKQYLHRCHQKPKGVAKVAAARRLAVRLYWMLRTEKPYPEIVRIESSPRVPLVGAS

SEQ ID NO: 354103 - protein, 328 aa, unidentified
MSSDPTQFVGIDIGSKVHEVCVVDHGKIDKRTLKSAPVDHARFIKTLDPARCRVVMEATGVYYLDLAIDLVEAGIAVMVLNPRTAHHFMKALGKRSSTDAISAQALAEYAERMPFKAWTPPPPLWLEFRAIARQINRLKKEETKIKSRVHALKATRTCSPLILRDEQAGLLALGQRIERLLKAATEAIAKNDELKRFLDHLSVAKGFRETSIIPILGELLLLPRTMNGKQCACHAGLDVRLKRSGTSVESKPRLSKAGNAYLRAPLFMPMLSVIQHEPLAKAHFERLVARGKTPKQAIGALMRKYLTGFWSVIRYDQPFDTSKLFAPQ

SEQ ID NO: 354104 - protein, 347 aa, unidentified
MRFYTQQHVHYCGIDLHARSLYVCILDQEGKVLVHRKLPCDREKLLKTLAPYREDLAVAVECLFCWYWVADLCSEQGITFVLGHALYMKAIHGGKTKNDRIDSYKIAALLRGGNLPYAYVYPREMRATRDLLRRRLFFARKRGELLAHIQNTNTQYNLPPLDERAGKTKDRGAIIEHFDDDTVQMSIASDVALLDSYDQVIRDMELYLIHEVRKDHNREFYLLRSIPGIGEILSLTLLYEIHDLSRFPRVQDFLSYARLVKGTHESAGKTKKRTGGKMGNVHLKWAFSEAAALFLRGNPGGQKYFARLEKKHGKGKALSILAAKLGRAVYYMLLRRRPFELQRFVTA

SEQ ID NO: 354105 - protein, 324 aa, unidentified
MSDGMLGIDVSKNTLDVSLSSCNKVRARSFPNSSDGWRHLLDWLINQKVRRVHACLESTGRYSLGVACVLYEIGHVVSIVNPAQIRDFARTKLGRNKTDGVDASHIREYCDLFKPQPWAPPSEAHCRLGELQTIRAGVVAGLTEWNNRKKSGMVDAAALSLADATISHFTSQLGAVDEAIAKTIDNDSELRCKRDLLLSISGVGEALAGVVLTELPGPDVLRSSAEVVAYAGLNPRRHQSGTSIDRMTRISKIGNAVLRAALYMPAMSAMRYNPAIVALVTRLKSRGRLKPMQIVVAAMRKLLVLCFGVLKTGKRFDPALAMGC

SEQ ID NO: 354106 - protein, 598 aa, unidentified
MKRGLAVVQVTLRQDADHVVGVQVNRVGIRRRTITAAPAHDVPGAGSEEVLPRHRGEGRLDLRISDAGCRRDLLRIGPPDDLQFALAIHLDRIWLVRRSGQDRTAFECRVLAANRNPVADPMPAETMFPLSELDRMLTLSGHSLAHCRRKREGATQFPTIGLFERTRTILKEPETRRLKNRGHLARNRKMLWGRRRGDGTIVAVANRWSAPMPQPNDLSRSLVALDQDSTIIAVVEMSQSSWLVAGMLPGIERQPRKKLEPSAERLLGLLHRWRDEAVKAGRKITRIALAFEAGRDGFWLARWLRAHGVEAHVIHPSSVAVSREHRRAKTDRLDTELLKRGFLGWLRGERGHCTMARIPTIAEEDAKRPNREREYLVRERTRIVNRMKGTLARLGIRNFKPTLRKAAERVTTLHTPEGSALPPNVSAELQRNMARLGFVVSQIKEIEAARQKRLEQEPETEPHAMVRHLARVVGVGIETADMLVNEVLSRPMRDRKAVARYAGLTGSPDESGAKRREQGLAKAGNARVRRGMIQLAWRFLRFQKQSALALWYRARTADSRVGTRKTMIVALARKLLIALWRFVTTGETLEGVVLRPAG

SEQ ID NO: 354107 - protein, 306 aa, unidentified
MKEIATIGIDLAKNVFQIHGVDMQGRTVLRKTVTRGKLLETLVNLSPCLVGMEACGGAHHWARKITEMGHIVRLIAPQFVAPYRKSGKNDANDAEAICEAVTRPNMRFVAIKTPEQQAVLTLHRVRESIKADRTALINRIRGLLQEFGIVLPQGAARFPQRLLEAITDADMPLDAIGIFAALRGDLMRLNERLAECDQRIARLAREETTQRLVTIPGVGPVTATAIVATVGDAKLFRNGRELAAWVGLVPRQSSSGGKTRLGRITKNGDSYLRTLFVQGAMAVIHHMGDKEGPRFEWIRLFDILSG

SEQ ID NO: 354108 - protein, 340 aa, unidentified
MRGLYAGSDLHGNNNLLGIIDEQGKRIFNKRLPNDSDLIKDVLKPYKEEMVGIVVESTYNWYWLVDALMEEGYKVHLANPSAIQQYSGLKHEDDKHDAFWLAEMLRLGILPEGYIYPKDERPVRDLLRKRGHLVRLRTSLVLSLQNILSRNLGRKVSVNDLKRLGEDRVTPLLEGSEDLALAGRVSKEAIDFLTYQIHTIERVVQKRMTLKEEYRYLLTLHGVGKILALTIMLETGPVGRFETVGDYVSYCRKVASQWTSNGKRKGSGNPKNGNKYLAWAYAEASEFSRRDYPEPRAYYQRKMQKTNAAVAHSALAHKLARAAYYVMRDQVPFKPEKLFG

SEQ ID NO: 354109 - protein, 308 aa, unidentified
MIFVGIDVSKDRLDVHVRPSGEAFVVARDDKGLATLGERLRLRPPQLIVLEATGGLQVRVAGMLAAEGFAVAVVNPRQVRDFARALGRLAKTDRIDAEAIALFAERIQPVPRALPDEQTRALQALVARRRQLVEMMVAEKQRRSQATNQCAKTSLQAHLDWLRKAIEEIDADLDGAVRASPLWRASEDLLRSVPGIGPVLTRTLLAELPELGRLTRRRISALVGLAPLNRDSGKMRGRRTIAGGRASVRHVLYMAALVATRCNPVIAAYYARLLKAGKAKKTALVACMHKLLVILNAIMRDQNPWKIA

SEQ ID NO: 354110 - protein, 411 aa, unidentified
MRLFVGDDWAEDHHDVELMDEAGRVLARKRLPEGVAGMARLHALIGQQLGDDAEDAEVVIGTETDRGPWVAALVAAGYTVYGVNPLQASRYRERHGVSGAKSDTGDAHMLTDMVRTDSHQLRAVAGDSPDAGAVKVVARTHKTLIWERTRQVQRLRHQLLGYFPGALEAFEDLDAPEALELLGKAPDPARAARLTRAQVSAALKRARRRDIPGKATAILAALRSAQLGQPPAVTAAYAVTARALIALITVLNEQVKVLEEQVGTHFGRHPDAEIYLSQPGLGPILGARVLGEFGDDPGRYASGKARKNYAATSPITRASGKKKVVAARFIRNQRLTDALMAQALSALTASPGARALYDAERDRGTEHNPALRKLANRLVGILHGCLKTRTPYNEATAWPQQENIHQSDLAA

SEQ ID NO: 354111 - protein, 369 aa, unidentified
MGQDSEVFVGLDVAKARHAVAVADEGRSGEVRYLGEIDSDPVAVRRMVARLEKGARLLHFCYEAGPTGYGLYRQLTAMGHDCAVVAPSLIPKRPGDRVKTNRRDAIQLAKLLRAGELTPVWVPDETHEAIRELVRSREAAVDDLRRKRQSISSLMLRYGRSYPGKKTWGARHRQWLQAQRFEHPAQQLVLQEMILAAQHALERLKRIQAAIIEFLPSWSLAPVVDALQALRGVQLVTAATIMVEIGDLRRFDTPRQMMSYLGLVPGERSTGDSVRRTGITKAGNGRVRRALVESAWTYRHLPRTSKLKHYVHERVPTAVRDIALKAEARLCGRYRALAGRGKKLNVAVTAIARELVGFIWAIGRIVQAA

SEQ ID NO: 354112 - protein, 355 aa, unidentified
MNSVKYLGLDVHGASISAAVRNAKGELTLECTFRTERQALLDFIGGLRGTLQVAFEEGTQSAWLYEQLRGRVAKVVASDPRKNALLKSGNKNDQIDGRKLSELLYAGLLTAVYHGEHGLETLKELARSYLVLTEDTTRVLQRLKAIYRGQAIGTRGKKLYGTRHRLQWLVQLVNAGRRWRAERLYEQLDELQGLRQQARRQLILESQKHAATALLRSVPFLGPIRAALLLAWVQTPHRFRTKRQFWAYCGLGLETRSSADYQVVNGQLERRQRPVFIRGLNWNHNHALKNLFKGAAVTASARPGPWQEFYQVRLDKGIQPELARLTLARKIAAIALTLWKKGAKFDVQHLKLQAA

SEQ ID NO: 354113 - protein, 370 aa, unidentified
MGDHSEVFVALDVAKAKNAVAIAEGGRRGEVRYLGEIENSRDATRKLVAKLCKTYQRLTFCYEAGPTGYGLYRWITDLGHECIVVAPSLIPSKPGDRVKTNRRDAESLAKLLRAGELTAVWVPDEEHEAMRDLVRAREAAARDLTRKRQQVTAFLLRHGRTYPRKKTWGATHARWLTEQVLQLAPQRIAFEELVMAVRQAKDRVSRLDEAIAEFAPRWSMAPLVEALQAMRGIDLVAAAVLLSELGDLRRFDSPRRLMGYVGLVPSERSTGETVRRGAITKSGNIRARRILIESAWTYRHPPRLSTRKRFLFDRAPRAVREIAWKAQTRLSARTRALTGKAKRSTVVTAAIARELAGFIWAIGQEVAPAH

SEQ ID NO: 354114 - protein, 355 aa, unidentified
MTSTKYIGMDVHKESISIAVRNDAGKIVMECVIETKASMILQFIDGLRGDLHVTFEEGTSAAWLYDLLKPHVTKLVVCDPRKNRSMREGNQSDKIDARRLAELLRLNHLNPVYHGEHGLRTLKELVRSYLTITKDVGRVMSRVKAMYRSWAIPCTGKQVYTSRHRAEWLGKIREPGVRRRAEFYYQQLDALRLLRQEVRRDLLAESKKHKAWERLCQIPSIGPIRSAELLGILQTPHRFRTKQQLWTYCGLGIETHSSADHRVVEGQLKRAKKQVEVRGLNVNCNHDLKNLFKGAAVVAATKPGPFEEFYAELLAKGMRSEMARLTLARKIATIVLIVWKRGVSFDAQHLKPQTA

SEQ ID NO: 354115 - protein, 338 aa, unidentified
MSKITTIGLDLAKNVFHVVCCDEHGKVVKKKMLKRFQVLNYFANLPTCLVGMEACASAHYWARELGALGHEVKLIPPQYVKPYVRGNKNDYNDALAIAEAVIRPEMHFVAVKTPEQQDIQALHRLRERRLQERTALCNQLRGLLAEYGLILPKGIKVLRRRLPELLEDGENGLSELFRRLLAQSYQQLQELDGYIDFYTQEMKRQSQQSEACQRLQTIPGYGPIVAGVFHSVVGNGEAYRRGRDVSASLGLVPRQHSSGGKEVLLGISKRGDRYLRSLLVHGARSVVIQAAKKDDRLSRWINKVKAERGFNKAIVALANKMARIGWAVLVNKNVYQSA

SEQ ID NO: 354116 - protein, 445 aa, unidentified
MRAKPIHGPTPEEIPDADHELVIEQVCAIDVAKASGKVCVRTPRQRRRVSKVWDVEATTGAVTDLAEQLVELEIEKVTVESTSDYWRIWYYLLEAAGLDVQLVNARDVKNVPGRPKTDKLDSVWLAKLTEKGLLRPSFVPPAPIRRLRDYTRLRVDLTRERTRYWQRLEKLLEDALIKVSTVASTLDTLSARDMIEALIAGERDPRRLADLARGRMKTKRPALIKALHGRFDDHHGELARMLLDQIDTLSGQIGTLTTRIDHLLAQADADGGGVTDETAATTGPSTVERLAEIPGIGRAGAQSILAEIGLDMTQFPTAAHLVSWAKLCPRTVQSGPVTHGGKTGKGNPYLKGALGEAAAVAAKTDTFLGERYRRLVKHRGKLKALVAVARSLLVIIWHLLTDPFARFCDLGADYHISRINTERRMRNHIAQLTAMGYHVTLEPAA

SEQ ID NO: 354117 - protein, 394 aa, unidentified
MKLIGIDIGKNKHFFCVMDQQTGEIISQPVSFSNDKEGFDFLIQKINSYPKDSVLIGMEDTGHYHFALLKYLLDLQYTVALINPKTTDFNRKMQGGITKNDKLDTINICDVLDTPERKKQYRITKVNSFDLYEQKQLTRHHHNLKEEENVYKNRLQKCIDIVFPEFNKLFNSKYGIVYMNILKMFGSAENIANTDIRTIRKCFEIEGRGNRISLTPERLKECARSSIGISSSAEVIQIKHLTAQIELIEEQLTEIDKKIEEFSIQNNSPILSIPGISHFSGTSILAELGDISNYSKPSQIIKFAGVAPLHYESSQFNAQHTSITKKGSKYLRKTLYQIILPVIKHNPVFYKYYQLKISQGKGHRCAQGHCVRKLLRIIYHLLKTNQQFDPQLLR

SEQ ID NO: 354118 - protein, 347 aa, unidentified
MIIIGCDLHTRMEQIAVLDTETGELTERRLDHESGEARAYYEGLKEPALVGVETTGYALWFAEMLSELGHELVVGDAAKIRKMEVRKQKHDRRDAEHLLNLLMRGDFPKIWLPSPEERDVRVLVEHRHQLVELRTRAKNGLQAMALSYGLRRRSRLWNAAGREELQKLPLREGMARRREDLLRLLAQLEQWVKQLDRRIGQEVARREDAQRLMTHPGVGPLTALGTVLVLGPVQRFPDAKHVTSYVGLIPEEDSSGGRQRFGKLTKQGNRLMRFLLVEAAQIASRFDPGLGRVYRRLAFRKGAASAKVAVARKLTIRLYIMLRDRIDYQEFCRRGSHAGMLVSKPLV

SEQ ID NO: 354119 - protein, 363 aa, unidentified
MKKISTARIKSQAAKKKVTVGIDLGDRTSRYCLLDEEGVVIGEASTPTTKAGIAKVFGAMARCRVALEVGGHSPWVSRQLEEFGHEVIVANPRNVRLIGESTRKDDRLDARTLARLARIDPMLLSPVRHRGAEAQADLAVIRARRVLVRARTMLINAARGLTKSFGERLQKCGAGQVGSTLAAELSTQIRAAILPLLAEVEALNQRIAAYDRQIEQLVKEHYPEVDRLTQVKGVGTLIALTFVLTVDDPNRFQRSREVGCYMGLRPGRRNSGKSEPQLHISKEGDCYMRSLLVQGAHYILGPFGIDCDLRRWGLKMSERGGKNAKKRAVVAVARKLAVLLHKLWVSGEAYDPLRNSRPLARAA

SEQ ID NO: 354120 - protein, 333 aa, unidentified
MATTVFDCPQVCAPASSPRAFFGVDVASAHLDICSYGSSAVKRIANTPAAISRWLGCVPPGSAIAMESTGRYHQALAAGACAAGFAVYLLNPRDVRSYARGLGARGKTDRLDAQVIARYGAHEHHQLRLWQPVTLQQQALDELLRRRAVLVNCQQKLRMSAADCPAVLATLAPLMQEFDRALKAFDRQIRAAVQAVDTHGQAFDCITSVPGIGLLSGAALLGVFRRLASASADAVIAFLGLDPRPMDSGHKVGLRRLSKRGPPEWRRLLFNAAMSGSATKAWKGCYEHERTKGLSGTAALNVLARKMVRVAFSLFKSRTRFELAVLQNHAQSA

SEQ ID NO: 354121 - protein, 403 aa, unidentified
MSTIFAGLDWASRTHAVCILDEHSSVCAQFEIHHDAAGLAELRRQLTAAGVTAVAIERPSGLIVDALLEGGFTVVPIHPNVVKATRPRYRSHGGKSDASDAYLLADLLRTDGHRFQPLAPQSDDLRALRALVRGRDDLVATRVQLANQLRSLLQSFWPGAAEIFADIDSPIGLAFIQRYPTPESASRLGPKRMAAFCAQHAYSGRRSVDELLARLHQAPAVAVGELEMEAKGELTLSLARTLARLVTQIRLLTSRIEHHVGALDDGRLLMSFPRAGQICAAQILAELGSVRERFDSDEHLAAEAGVAPVTYASGKSKAVTFRWACNHRLRAALTCLADNSRHANHWAAHVYAQARARGCDHPHAIRILSRAWVRVIWRAWIDRKPYDPAHHRAAQMLLNTARG

SEQ ID NO: 354122 - protein, 412 aa, unidentified
METIVERPAALDVHKAQVTACVRVPAADGKGREQHVAEFATTVRGLLTLRDWLVAYRVEQVTMEATGVFWKPVWAILEDDFSLLLVNARHVKQVPGRKTDVSDAAWLCQLAEAGLLRASFVPPKPIRGLRNLTRYRKAQIQERSREANRLHKALEDTGIKLDCVATDILGVSGRAMLDALIVGTTDPQLLADLAKGRLRKKLPALREALEGRFDPLHATWIGAILAHIDFLDEQIDRLSDAIEEQIRPFVAAVDLLCTIPGIQRRGAECIIAEIGTDMSVFPSPKQLASFAGQCPGNDQSAGKRRSGRTRKGSKWLDWTLEEAALAAVRSKDAYLAAQYQRLRPRRGHKKALGAVKHSIICACWHMLTTGELYRDLGGDYFRKRDPERATRHLVRQLEALGHCVTLQQAVAA

SEQ ID NO: 354123 - protein, 342 aa, unidentified
MTAIGVDTHKATLAACAVDPLGTPIAEATFANDLKGHLAFIAWARSKAPDATIGIEGSSSYGAPLARSAQQAGLCVREVPPHLSRAERQRTRRPGKSDPGDALAIARVTAREASLPPIRLPDLTTELRLLVEAREDLIGDATRVRNRLHAHLIILLPGYGGTVANLVAAHNRTAIGRRLRGNSAVQAELARSLLGRLVVLSREVDGLTRRITAGVAGHPLLALPGAGPITVARVIAEVGDVRRFRTADALAALAGVAPIPASSGQIQRMRLNRGGNRQLNRALHVIALSQSRFHPPAKAYVTRRIEVDGKTWREAIRALKRRLVRPVYRLLLEGSNMQAAAA

SEQ ID NO: 354124 - protein, 402 aa, unidentified
MNAVGIDVSKGKSMVAIMRPFGEIVSAPFEIKHTASDIHSLVELINSVEGESRIVMEHTGRYYEVLAHQLSEANLFVSAINPKLIKDFDNDSLRKVKSDKADAVKIARYTLDKWQNLKQYNVMDELRNQLKTMNRQFGFYIKHKTAMKNNLIGILDQTYPGVNTYFDSPARSDGSQKWVDFASTYWHVDCVRKMSLNAFIDHYQNWCKRKKYNFSQSKAEEIYGKAKELVPVLPKDAITKLIIKQAVDQLNSASTTVESLRTLMNETASKLPEYPVVMAMKGVGTSLGSQLMAEIGDVSRFTHKSAITAFAGVDPGVNESGSYEQKSVPTSKRGSSDLRKTLFQVMDVLIKTHPQDDPVYQFLDKKRAQGKPYYVYMTAGANKFLRIYYGRVKEYLSSLPES

SEQ ID NO: 354125 - protein, 403 aa, unidentified
MSKSFCGLDWASRAHALCVVDEQGGVLVQAQVSHDAAGLADLVRLLRRHGCPPVAIERPSGLLVDTLMRAGLAVVPIHPNAVKASRPRYRSHGGKSDASDAYLLADLLRTDGHRFNALLAQSDEILALRALVRGRDELIHARVQLANQLRSLLESFWPGAAEVFADIDTPIALAFIERYPTPESAKALGPKRMAAFCAQHAYCGRRSTQELLARLHQAPAAACGELEMEAKGELARCLTRTLRSTVEHIRLLSSRIEHHVASLDDGQLLMSFPRAGRICAAQILAELGSERERFVSHDHLAAEAGVAPVTYESGKHQAVTFRWACNHRLRAAITCLADNSRHASVWAASVYAKARARGCNHPHAIRILARAWLRVLWRAWINRKPYNPALHGGLQTMLKTAAG

SEQ ID NO: 354126 - protein, 355 aa, unidentified
MQTKGKNLDFTGQPIYVGIDVHKNSWKASIYSSHTFQKTFILQRPFVDNLVKYLNTKYPNGEYQCAYEAGFSGFWAQEQLEAKGVNTIVVNPADIPTTDKERQFKNDKRDSKKIALTLRSGELIGIYVPDKQAQKDRSTVRVRSQVAKNQRRVKNQIKSTLHFYGLEIPEDFSQRYWSRKFVVWLEQISKKNKLEGLRLLIEEHLALRKLELKAIRVLRKLSKQKRHSELTKLLNSVPGIGLLTLMLLITEIIDMKRFKREDELYAYVGLIPTSASSGDKETIGEMTKRGNKRLKSAAIESAWVAIKKDPQLLMKYEEYRKRMGGHKAIVKIARILMRRIRRVWLKKEPYLITEY

SEQ ID NO: 354127 - protein, 423 aa, unidentified
MKYALVRVLPEVPPGGVCAGIDWASADHAVCVVDLAGRVRDRFTAVHDRAGIAGLIARLRENQAGEVAIERGDGVLVDALLAAGLTVVVIGSRQVKNLRSRYGSSGAKDDRFDAFVLADTLRTDRARLRPLVPDSPATLALRAAVRARRDLVAHRVSACNQLRAHLQVAFPGAVGLFSELDSPLSLAFLAAFPGQQAAARLDEQALAAWLATVPRRGNTAPAGVLAARLAAAPRGAAGADAAQAAVTTQLAAATAGLAGRVRALEAEIAAQLAAHPDQHIFTSLPRAGTLRAARLLAETGDCRARYPDPWSLAGLAGVAPVTRRSGTYISHEFRWNVNRQLRDAICDFADGSRHASPWAATVYAAARDRGKDHPHAVRITARAWVLIIWRCWQDGTSYDPAKHRALQDVLTRQAAAGTPQPHR

SEQ ID NO: 354128 - protein, 329 aa, unidentified
MDTELPRSIIGIDVSKASLAICYLRQEQVQHLEVSNSKTGFQQLVKTCGAHCLFVMEATGTYYLALAYHLHEQGGQVAVLNPLVIKRFIQMHLSKGKSDRKDAQWLLRYGQQQAVKIWQPDENVLVECRQLEQVTEQLLKQKTMVSNALEALQRQPVISKTALKRLQQTLKALTQQVEAVEKELLFLLEQRFGPEIALLCSIPGIGRKTASMLLLFAGGFTRLGNYRQLIAMAGLSPREHSSGTSIRGKVRITKMGGGLIRAKLFMCSFSAKKSNAACQALYDRLVAKGKNGKVALIAVCNKLLKQAFAIVKSGVPYQAGFTSKLALNP

SEQ ID NO: 354129 - protein, 359 aa, unidentified
MSSKTNTKYVGMDVHKNTISVAVLNTDGKLTMESVIATEREAILDFVQGLAGTVHLTFEEGTYSSWLYPLLVRRVAKLIVCNPRKNALLKSGNHNDRVDAKKLAELLRLGHLSSVYHADHGLQTLKELGRAYTTLTEDTTRIMGRLKALYRGQAIPSDGHKLYSRRRRTEWLQRLPAQPKGLRARAERLFEQLDAVQKIRCQARAELLAESRRQPAHPILRSIPFLGPIWTALLLARLQTPHRFRTKRQLWTYSGLGLETHSSGDYRFVEGQLQRRQKPVFVKGLNFHHQHELKRIFKNVATAASARPGPWREFYLRLIDHMEPDMARLTLARKIAAVTLAVWKKGERFDPQHLNRQAA

SEQ ID NO: 354130 - protein, 370 aa, unidentified
MAKKQKIQQTTQSSALKITHPHTAGIDVGKDLMQVSVPEESCEQSNRCFGAYTKDLREIVDWLRQCGIKRVVMESTGIYWINLFLLLQEAGMEPLLVNAKEVKNMTGRKSDVCDADWLRFLGSCDLIKPCYQVDAVSRRLREYSRLRNIKIRDMARELNRMQKAMEQMNIKLGSVLSDVDGISGMKIIHAIIDGERDPQNLASLASDRCKKSKGEIASSLEGTWDPEHIFSLRLSVETYEYLKRQVEECDGMMRTFLDSYPIEARVDEAVKPLERSKKQIARKNKMDFDIESYAYRTFGVNLMKVPGISHATLLTLMSELGPGFTDKFPSASKFCRWCNLTPVDKITGERLSQAMSLNVKTLSGKHSGNV

SEQ ID NO: 354131 - protein, 460 aa, unidentified
MNDYFLGVDASKGYSDFVMLDSKKQIVIENFQLDDTFEGHSQLYELLRRFNQDNPQATIYAAVESTGGYENNWFQSLLNFQGSLPIKTAHLNPLGVSHNSKADLKRNVTDKISAQNVAEYMIAHPEKVSYQHQDSLASLRKQWGFITMLTKQCTQLLNQLESLVYNANPEILAYCKDRTPQWVLKLLTRYPTARRLSRAKVNSLARIPYVSTQRAKELIATAKKSVGSANDKVTEQLIVSTVKQILHLKKLIDTQTEILANQCQIPEVELLKTFTGIGDYSAIGLMLQIQTVERFLTSKKLSSFFGIHPEYKKSGDGTYKYRMSKKGRKEGRRILFTVAMTAIQSNPLIREIYQRAVDRGMEKMAAMGLCMHKILRIIYGMLKHNQPFDPQIDLKNRQKKPPRQKKGGPDQNRRYQDFDSKAPVSRRQKMKRKERKQSQNAVDVKHGISEAPVPTDQLAN

SEQ ID NO: 354132 - protein, 402 aa, unidentified
MKVCGLDVHKDSIFCSIYDGKTSSEVKVFDSTTRFIYEMGEYLMTEGVNQVAMESTSIYWIPVWNILMEMGFELTLVNPFLIKQMPGRKSDIKDAQWIATLLHKNLIRGSMIPNSTIQELRFYTRKYMKLQQDKCKLLTKMDRIMVMANIRISSCVSKLTNKSVIIVIEALIKGETNPDNLVKLVYGNTKNKQSGKLREALTGYIMDHHRKSLKWEKESYDILERQILECIKEMERICNEHYKDEMLLLQTLPGVSKISAICLIAETGADMSVFENSGKLTGWAGLRPRNDESAGKFKSKAITKGNKYLRAILIQVAWGASRTKGSYFMEKYHRLAMRKSNKKAIVAIGRKILVIIWNMLKEKKPYNPNLVSIYDPIKIERQLAYHRKEMEKAAKLLHKEII

SEQ ID NO: 354133 - protein, 407 aa, unidentified
MDLLKTVFGIDVSSRKSNVCIMVNGQKVNDYAISNDMVGFNQLLGDLKQVTNPQIIFEATGVYSRRLQAFLNIHELRYVMMNPLEAKRKTKDDLHQNKTDKLDALYLAKLQSEHPQRLAYVQSEEYQELMANNRIYEQASHDLITNRNRLHKAIQLTFPEIEHLMVNPRGKNYWSIVLRFPHPDIVLETKEADIIDFLKGLTGIGKKRANDIAQSLIRLAKVACPAVKKNSAHIRGLKMAINNILSAEEECQTALQEMAKLAPKRDLEILTSIPGIGENTALRIISELGDIRRFNNPSQLNAFVGVDPQVYESGNLTAHLSISKRGTAIGRKVLYLAINQIQSAKKVGNPCHIADYYEKRKRSSETASHKKAAIASIHKLLRTIFALIKNDQLYSYDVAKHNQRLLS

SEQ ID NO: 354134 - protein, 341 aa, unidentified
MDVSVLGIDLGKNSCSLVGLDATGKVVVRRRMRRDTVITYAGGLPACVVAMEACCGAHHIGRALARQGHAVRLMSPEYVRPYVKAQKNDDRDAEAIAEAATRPTMRFVELKTEDQLDMQTLHRIRDQLVGDRTSLMNQIRSLLLERGHIVPQGRAKLAARLGEMLDGDEPVLGTRIHRLVSDMRLRWSALDERIADLDAEFADAARADGRTRRLLTIPGIGALNATALVAAVGDARAFGRGRDLAAWLGLVPRQATTGGKPRLLGITKRGSRYLRKNLIQGARSSLPTMSRTDTRLGAWLRGLLSRSHPNTVVVALAAKMARIVWALLRHERTYQSVAQAA

SEQ ID NO: 354135 - protein, 375 aa, unidentified
MATIARLGIDTSKSLFQLHGVDEREEAVLRKQVRRGQFLGFVAKLAPTKIGVEACGASHYWARQLQALGHEVVLLPPQHVKPYVGRNKNDKIDAAAICEAMSRPRVRERFVAVKSAEQSAAQMLLGTRDGLLHRRTQLSNTIRGHAAEFGLVTPKGLAHIKPLLERIAADDTVPALAKELFATLDEEFAELAPRIARLDKKLKAFQRSDELCRRLVEVPTIGPVIASSMVVKIGNPAAFRSGRRCAAWLGLTPKDHSTAGKMRHGGITRAGDEGLRAALVSGATAYIQQVKRGRTRPSPWLAQLLKRKPEKLAAVALANKTARIAWKLMVSGERYDRARAEAREGLGATQHQGSTPSPSLHPHTADQGASTMTVA

SEQ ID NO: 354136 - protein, 354 aa, unidentified
MPKTASAQIAVIGIDIGKNSFHVVGHDSRGAIILRQKWSRGQIEARLANMTPCLIGMEACVGAHHLARKLATFGHDTRLMPAKYVRAYARGQKNDFNDAEAIAEAVQRPTMKFVATKTADQLDLQALHRVRERLVSQRAGIINQIRAFMLERGIAVRQGIRFLRAELPIILASRTDVLSPRMLRVIEDLAGDWRRLDERIETLSREIETIARQDAGCDRLMSVPGIGPIISSAVVAAIGSGDVFSKGRDFAAWLGLVPKQISTGDRTILGKISKRGNRYLRVLFVQAAWVVLVKPQSWERHGLKHWIEAAKKRLHHNVLAIALANKLARIAWAVLAKGRGFQATRTIDGSTQPV

SEQ ID NO: 354137 - protein, 469 aa, unidentified
MKRKQQAKTPQRHAKRGKREQKLLERVHLNAAGIDIGSGSHWVAVPEDRDEQPVREFRSFTHELIELADWLEACGIETVAMESTGVYWIPLYEILEQRGIEVLLVNARHVKNVPGRKSDVSDCQWIQQLHTFGLLRGSFRPDAEITAIRTLVRHRDKLVEEAAASIQRMQKALTLMNLQLHKVISDVSGLTGMLILRDIVAGQTDPRLLARHRDPRCKASEEEIAASLTGHYRDEHLFVLRQELEAYDFYQEKIHCCDKQIEARIHALEVQCEPPARELPAPRRPSHKRKLQDNSPSFEIRTPLFKLSGGVDLTELPGIGPYGALKLISEIGLDMHCWPTENHFTSWLTLAPNNKISGGKLLGSCTQPSANRAAKILRIAAMNLGRSDHALGAFYRRLAARTEKPKAITATARKLAILVYRMLKYKMPYHETSAAEYNQRQHTRILRGLRKRAKTLGFELVDASTGLVA

SEQ ID NO: 354138 - protein, 392 aa, unidentified
MFSETRYALNGDLRVAYRTSRGGPRDIVFVPTWFTCCEVLPELPSIQGWVEAMTSLGRLIFFDQPGTGGSDPVTPGALPTLEQWADSITAVLDDLGSREAVLVAITGALAPAALFAATHPSRTTALIVIEATGKWHRPLRRSLDAAAIPVAVIDPFRVRMFAKAQGILAKTDRLDARVLASFAVVMTPPRRPPAPESLEELKELVVARASAVDARTALKNQLSAATTTFLKRQLKRRIERSDRDIAAIEREILNRIKADEDLHRRYAILTSIPAFGDIVAANLVASLAELGSCSPKQIGMLAGLAPIANDSGNHQGLRVIWGGRASVRRILYLAALSAARCNPDMKAFYLRRIADGKPVKVALIAVARKLAVLANALVSQDRLWLPHAPKHA

SEQ ID NO: 354139 - protein, 415 aa, unidentified
MALKIVYKICCGIDVHKTFVVACIASTDNKGIASYESHRFSTYTSGLKDLLQWLLTRNCKDVCMESTGKYWIPVYNILESDCSIVLAHPKYVKAIRGKKTDKKDAKWIADLFKHDLVAGSFMPPADIRQLRDLMRYRFKLTCFKSSEKNRLQNCLTVSNIQLGNVVSDTFGKSAQAILDKLLENPADTSFDLEPLVYKSLKKKLPQLRDAIDGFITPEQAGKLKIIKDHYENLGSRKAELEELILALAAPYQQELTILQTAPGISSEFTAIGIISEIGTNMEAFPSAKHLCSWAGLTPTNNESAGKKKSVRVSKAGCYIKPLLIQCANAVVTSKKHPEMRNRYLRLRKRRGHKKAIIAIARMLLTALYHMLKNGENYNAELYRKSDLPPVDREITVEQALIIARNQGYKIKSATA

SEQ ID NO: 354140 - protein, 317 aa, unidentified
MTFVGIDVSKARLDVAALAPTGEIQREAFENTVQGHADLVAWLASFPSCRVALEATGTYHHCLTSVLQDKGVYVSVLNPAQVSYFVKSQHRRNKTDKADALWLAVYAKERQPDATLELNLSRQGLAREIGTLSKDITRLKNRLEAAEAGHTHAKVVASLKRRVAALEEEKKDLEAELEQETKNTSEQELSLLRSIPGVGVRTACLLLAELGDVRRFADARKLVAFAGLTPTQFESGTSVLRRSSISRLGSSHLRRILYMPCLSAVRFNPIIKGFFERLVERGKHKKAALVACMAKLLKIVYGVLSHQMPFDPARMTP

SEQ ID NO: 354141 - protein, 344 aa, unidentified
MHGTTIAVDVAKSVFEVAVSEHPGQVRERYRLSRERFHRFLGEQSPATVLMEACGSAHYWARRAQTHGHRVVLVPPHVVRPYVLRNKSDRTDTKGLLEAVRNEDVRPVPVKSETQQALAALHRLRSTWLATRTARLNTVRGLLREFGVVIPTGARQVVPHVWAQLEDADGLVPSLLRPALAEAVREIREIEARMHAVERQLEAVAEHTPVVERLRTIPGIGLLTATALVAAVGDVQRFPTARHFASYLGLTPRESSTGARRQLGVISKRGDVYVRTLLIHGARAVLWHAQAKTAPAPDRLRAWALQLERLRGHNKAAVAVANKLARIAWAVWRRGNDYGGIPVA

SEQ ID NO: 354142 - protein, 320 aa, unidentified
MPECCSVGIDVAKATLDVASTVDQTERWQTTNDEAGWAALLTYVGTLRPDVIVLEATGGYEARVAGALVAAGWAVAIVNPRQVRDFAKALGLWEKTDALDAGVLALFGARVQPTVRPIADDLQADLQALVTRRRQLVDMLTAERNRLPLARGVVRTNLRAHIAWLEKQVGHTDHDLRTWIERSPVWRVRDQLLQSVPGIGPATSARLIASLPELGTLSHRQISKLVGVAPLPDDSGTRTGYRRIRGGRADVRKALYMATVVAITHNPRIRACYQRWRAAGKLPKVALVAAMHKLLVHLNALLKHHTPWCAMSAWPSTAPA

SEQ ID NO: 354143 - protein, 358 aa, unidentified
MKIVGCDFHPSWQQVAVFDPETGEIAELKLVNGDGEAERFYGALEAPALVGIEACGNSQWFIELLERLGHEVWVGDAAQIRASYVRKQKTDRRDAGHILKLLMENRFPRLWTPTAEQRDLRQLLIHRHKLVEIRTRVKNGLQHLAMNKGYQKRFHQCGVRGRAFFEKLPLEGWTSRRREDLLKLLTELDRHVGQLDEAVTGAAQQHPQARLLMTQPGVGPITSLAFVLTIGDVSRFEHSNQVASYLGLIPREHSSGGKQRLGAITKQGNRFLRQLLVEAAQSVTRLDEGFRKEYQARCHHKPKGVAKVAAARKLAVRLYWMMRQNVGYPEIVHIESSPRVPRRGDCHPVTLNERSRIQ

SEQ ID NO: 354144 - protein, 433 aa, unidentified
MPTTHPYDLVIGLDRSDRKADLHLIDTRTGNAQKHSLPTAPEELHDWLAGLRRDHPQERVAICLEQPAANRIFFLESYSWITLYPINPISLQKFREAFVTSRAKDDGKDAQYLAQLLLNHHDKLKPGQPDDVQTRQLQQLVSHRRAVVDERTGLTNRLKALLKQYFPQALDLCGEDLWRPLATAFLLKWPALQSLQKARKESLKQFYYLHGSRSQKLIEQRLERIDKAVPLTDEIALLQSYTLRVLLICRELQLLHKTIDQFDEQIATVFQQHADRPIFQALPGAGPVLAPRLLASMGSERERFARSQNLQSFSGVAPVTKQSGGKSHVHRRYSCPKFLKQSFHEYAKESIRHSRWAAAYYGQQRNRGASHHTAVRALAYKWQRIIWKCWQTQSIYKEQIYEAALKKNHSPLFDLLDQIELGKSPVKTDANKS

SEQ ID NO: 354145 - protein, 362 aa, unidentified
MTSAAAVVIGGVDTHKHTHYAAAIDGNGRLLGHREFRASEHGYAVLLAWMRSHGQVRVIGVESTGNFGATLTRFLTAAGEQVAEVNTPNRAARHRDGKSDRLDAEQIARSVLAQTGVAVPKSKSGPIEVIRTLRVARASAVRARTQAFNNLFGTMISAPSPVRDELIELTKRTFVNRCLALEPETGNLLELINHPERLVLASVKLTLRDLARRWKTLDAEVKELSRHITALVSHVAPALTELFGVSTELAGQFLVTAGDNPERIRTEAAFAKLCGVCPKPASSGRTNGRHRLNRGGDRAANSALYIVAIVRLRHHQPTRQYLQRRTAEGLTKREIIRCLKRYIAREVFAALPAPTTTPHQAA

SEQ ID NO: 354146 - protein, 327 aa, unidentified
MTNIQPTNKTIIAFDVAKQKLDICADEHLKVPSIINNTVPAIRKVLTVAKRQLEKQGLPELFIIVESTGGYERKILDLCISLNIDCHRAHANKPHHFALARGTLAKTDKLDTAMILAYAKTTPNLRLYVPPRPEVEKLQALMMRRNEIKDGITAEGNRLGTVHDKDVKNSLKRLQGHLKTELKRVEKLIKDLIKSDEVLKKNYTLLQSLTGVGPWIACATLAFMPELGTLNRGEAAALAGLAPYNNDSGKMKGKRHIKAGRKHFRKMLYLGAVSARTHNKILAPFAEKLIAKGKCEMLALTAVMRKMVVIMNAILKSEEPWKYAKKA

SEQ ID NO: 354147 - protein, 384 aa, unidentified
MDHGNNQTRSAIPQAVGGQLNRGRIRRLLGYIGIDLRSNNIWLSVIVNEQRPSGPVGKVIFSRSIGTQRVDGTLPEDLIKPVIERFCKDQPHIACVEATYNWYWLADLFEKNGWNLVLADPSTVSEAKTKAADDRKDAEYLADRLRYNALRYAVIMPKQLREIRDLVRTRGTAVEQRAREKIIVINKLTNLIGRKITGKELKELIKEHAEFGTQAPMLLNWGLTEEVRCILNYHLAMATNIDQEIQKLEEHINAVGKNLRYTKELQKMPGCGPVISSILASEIGSIRRFATAANFVSYCRLASTSKLSNGKSKGLGNAYLSWAFTELATLMVRYSEAAKRHFEKLMRKYGQLRVKAIRVLAAKLARSVYQCLSKNEPFDVLRCF

SEQ ID NO: 354148 - protein, 351 aa, unidentified
MRNLTIGMDLGDKKHVVSILDEDGAIVKSCLLDNVQTSIITFFKKYKGSTIAIEAGTHSPWISRELKALGCNVLVGNPRKLRSIWNSDDKADVHDSEMLARIARFDSGLLYPITHRSEQAQADLELLKARDMLVKTRTNLINHVRGAVKSFGERLPKCSAASFHKQCRDFLPENLKTVLQAILETIEHITGRIKEFDRRIEKISREVYPETELLKAIGGVGPLTALAYVLILEEPGRFGKGRQVGKFLGLTPRRDQSGETDKQLRITKAGNRFLRRLLVGAAQYILGPFGPDCNLRRFGLRLAERGGKNAKKRAVVAVARKLAVLMHHLWRNGEVYDPFCKSHRVEMKNAA

SEQ ID NO: 354149 - protein, 323 aa, unidentified
MQTQNAVVYAGVDVAKATLQLHLQGRQSELANTPEGRRQLFNQLQNVPGVHVICEATGGYEQAMVKVLHQAKIPVSVTNPAQVRAAAQARGQRAKTDPIDAEQLTDYGQRYQPKATPPTSATQDQLVALTQWLKQLIHGQAMAKTQAEHHQQPFVRRQHAKLMAHLQSQIKSVEKQIEALLNQDAPLQQRVNCLDDIQGVGPRTAWMVLAHMPELGQLNRQQVAALAGLAPWTRDSGTMKGMRCIGGGRPEVRLALYMAALSAARSNPVLRTLYKRLRAKGKLGKVALTAVMRRLLAYMNHQLKDLLSKTATEKPRRQKRKNH

SEQ ID NO: 354150 - protein, 314 aa, unidentified
MTWVGVDVSKRKLDVCVGTEGEPQVFAQPAELDEAVDHIAAQQQPSVVLESTGGYERALFAALVARGIACSVINPARARDFMRCTGRLAKSDPIDAQMLAVFGERMKPAPTKPKNALQLRLEQQVKRRQQLVELQTTQTNHREHSDDKQIVASVERLERVLVDEIKKLDAAITKLVEEDAELRDKSRLMQTMTGVGPAVSSGLLAHMPELGTLTKAQAAALPGLAPYVRESGQSRGKRRIRGGRSPARRLLYMAALVASRHNPVLKVFYLRLLAKGKPKKLALIAVARKLVVMLNAMLKHRQDWKPSFPSTSVA

SEQ ID NO: 354151 - protein, 421 aa, unidentified
MEEITEEPVALVERVAALDIGKAVLTACVRVPHDTKPGRRLQEVRTCTTTTRSLLGLRDWLVCQGVTRVVMEATSAYWKPPFYLLEDDIAECWVAGARDVKNAPGRPKTDKLGAVWLAKLAERGMIRPSFIPPRPQRQLRDLTRYRRTLTQERTREMQRAEKLLEDAQVKLSSVISNMFGKSGRDMLDALIAGQRNPYVLAGLARGSMRGKKSILAEALTGHFTEHHAFLLAMMLARVDALTAQINTLTTRIEQAVAPFARQVAQLDEIPGIGIIGAQEIIAEIGTQMSRFPTAGHLVSWAKFAPKARQSAGRSKAATTGEGNPWLGGTLGEAAISATRTSTFLASRYRRIVKRRGKKRALVAVGNSILTIAWHLLSDPSARFTDLGPTWHDHLAPLRRKRQLIAELERLSGMKVTLHQAG

SEQ ID NO: 354152 - protein, 351 aa, unidentified
MKYYKTTTKYNCGIDLHTRCMYICVMDRDGNILVHRNIRNNDFDFFLKLVEPYKDDLTVTCESCFVCFWLADACEDAGIKFVLAHAFYVKSIAANKHKNDKEDARELAECLRTNRIPQAYVCPRDLRPVRKLLRRRNKYVKNRAELSGHSTCEVMAAGHQPLSICANSKERWQEGIRSSFDNPVDSYTAEAELFMVESYDRIIMQMEQRIEKHARDFRHQDYRLLRTVPGIGKILALTILYETIDIKRFPTEKDFVSYSRLVAGTNESGGKDFGGKGRKMGNPYLKWAFMQAAILCKRADEQLSAYHAKLERKKGKHTANAIMAAKFARAVYFMLDRKTGFSKELLMKGRR

SEQ ID NO: 354153 - protein, 336 aa, unidentified
MFQLGIDVSKKTLDLCLLREGVKGRVKTRKLQNDINAVSAVIAWLSKQHCKPEDVHIIMEATGVYHESLAYGLHKAGGRISLANPHRAREFARGMGMLTKNDRVDAYMLACYGALKAPEPWLPPPEEVRHLSALLRRRDALVADSTREKNRLEKYLTTDTPSVIAESVEAMIGQLNAEIKRLDSLIRSHLNQHPELKKDFDLLTSIKSVGYQLGLNMLVILRSHDFTTAEQVAAFLGVVPVEKYSGTSVRGCPKLSKIGPPEIRAKLYLASLCGLRFNPLMKAMYERLCLRGKAKMCAIGALMRKLVHWCYGVLKTQKPFDVGYLSSYARSACKAA

SEQ ID NO: 354154 - protein, 430 aa, unidentified
MICAAIERCAGIDVGKKFLAVCVLTGPLEGEPRAQRLRYGTTVAELVKLRELLQSEGVTHVVMESTGSYWKPVFNVLEDVVKVYVANPQEVKARKGHKTDDKDGWWLAHLLRHAMIHPSFIPPRPIRELRDFTRRRKRLLGDMTSERNRVQKILEDANVKLGNELSDVFGASGQLMLDALLKGKATVEEIAQFARGRAKKKIPQIIAALEGHQMSDHHRKMIRYSLEHLRFLEDQIAGMDDDIRAKIREAKLEPQWELLQTVPAIAETSAAAILAETSGDVSAFPSVRNITSWAGLCPGNNRSAGKNKSSHTTGGNPWLRSALVECSWAATTKRDCFLKEKFWRIVSKTREHKKGPALIAVAHTLLRLVYEVLSTGKPYVEHGPPPLDARQKERIIRHHVRRLGKLGIAVYSMRAVGPATPSPARPAEAT

SEQ ID NO: 354155 - protein, 320 aa, unidentified
MTQDLFIGVDVSKATLEVVVLPGEHVFSVDNSEEGIHHLVTKVSQLGIPKIILMEATGGLERRALALLGAAGFPVTAINPRNARDFAKSIGLLAKTDRVDAKALALFAQRNLPPCRPLPDQQTRALQDLIQRRRQMLDMLSAEQSRLPVVENPKVRREIQSHITWLKKRIQVVDHDIDQSIKDSPAWQPKSDLLRSARGIGPVMASTLIGQLPELGKLTNKQIAALVGVAPFNRDSGTIRGRRCIWGGRADVRNVLYMATLAAIRFNPTIKAFYQRLCQAGKLRKVALVASMRKLLTILNAMVRDKQPWRSSPTEISLES

SEQ ID NO: 354156 - protein, 371 aa, unidentified
MSEPTTYVGLDAHKDSIVVAMLLPNERQPLEWRLVNEPSAVRRLARKLFRAASGKVSCCYEAGQGGYVLQRQLEAEGIACAVVAPSLIPIKPGAQIKTDRRDARKLAELHRAGLLTEVFPPSEDEEAVRDLCRCRDDARIDLTRARNRLNKFLLRRGRVYCVGRRPTWSAKYRAWLHGLAFDRSADQTIFENYLLHVEQIEARLEALDDELQRLSVAEPYRAPVAALRCFHGIDTVTAMALVAELHEPRRFPRARQLMAYLGLVPSEATSGDRRRQGGITGAGNRHVRRLLVEAAWHYRHKPLIGGALRLRRRGQPPAVIALADRALRRLTLRHRRMMYQGKHPNTVTVAIARELAGHIWNALQITASARV

SEQ ID NO: 354157 - protein, 355 aa, unidentified
MYEEKYIGMDVHQATISAAVMDVRGKLLMECVLETKASTIVEFIQGLKPPLCLTFEEGTSAAWLHDLVKPHVSRLVVCDPRKAALLKDGNKSDRIDARKLAELLRTNQLKPVYHGEHGMRRLKELGRSYLTLTKDVTRVMNRIKALYRSWAIPCSGTTVYAPRHRHEWLAKIVEPGVRVRAVHLYQQLDSLEPIRLEARRELLRESHQHAAVKLLRQIPSIGPIRAALLVALLETPHRFRSKRQLWAYSGFAVETHDSGEYRYVRGKVQRNRERITVRGLNDNHNKDVKSLFKSAAISASTRPGPLGEFYTARVESGMRPSMARLTLARKIASITLAMWKKGASFDPKQLQRQAA

SEQ ID NO: 354158 - protein, 336 aa, unidentified
MEKRIDYIVGIDISKQTFDVCLGKNNSTSSVKKACFKNNLNGYECFLNWLETASVELSEILFCLENTGIYHRQLVVHLLSKSGYVWVASAIDIKWSMGLQRGKSDQVDSERIMCYAYRYQDKAVGFKMTSQSIGQIADLMSLRERLINCIKRLKVPIKESKASGLLEQALLIEQACSESLASLEVELKALEGKIRKIIEQDDQLADLYEYITSVSCVGFVAASYFLVYTNGFTKFDNPKQFAAYSGVAPFEYSSGTSVRGRTKVHPMANKQMKKILHMCALSSIRHNPEMKSYFNRKVTEGKNKMLVLNAVRNKIIQRVFSCVKNQRLYVRHYQRA

SEQ ID NO: 354159 - protein, 434 aa, unidentified
MTRYVGIDLHKHLIVGHVVDAAGKKVDTFRYESAGAGTLEHIGRNRLKAEDEVVLEATTHCWAVVRALEPFVARVAVSNPMATKAIAKAKVKTDKVDAAVLAHLLRLGYLPEVWQPDPTTRDLREWTARRSRIVGQRTSVINRLRSTLAQRLLHCPYEMTSPSARRWIANLPVDDETRWLLESDLRLMDSVQAELDAIGKLLAKRGYVDPRVKLLMTLPGVSQHTAQALLAAIGDITRFRDADSLASYLGLVPRTRQSASHCYHGPITKQGRSHTRCLLVQSAHAVHSHPGPLGHFFRRLKKRKPHNVAVVAVAHKLVLLAWHVLTKGKPYRYAQPQTTEVKLAELRMRATGQARRSGPSKGSRVRRKVPEGSRVIKPLAVVYQNEGVSAPSPAPAGEHRHLAASKLEAFAASVQQERIVPRRSAEGLADKKTR

SEQ ID NO: 354160 - protein, 455 aa, unidentified
MPRKRVSRNKNKKVSLPVLNPDSAGIDIGATEIYVAVPADRDAEPVRMFATFTQDLNELADWLQQCGVRTVAMESTGVYWIPLMQILESHGLEVYLVNAKHVKNVPGRRTDVSDCQWLQYLHAVGLLRASFRPAQEICAVRSLQRHRASLVDMATCHVQHMQKALDQMNLQLHHVISDITGTTGLAIVDAILEGNRDVHSMAALRDPRVRASHETIAKSLVGDYRQEHLFTLRQSVGFYREYQRQIAACEDEMQRLMKGFETKADPTAVLPPPKDSVKKCKVMPPARAMALREEAYRILGVDLTTIPGISVLHVQSILAELGGDVSKFRSAGAFSSWMGLCPDNDISGGKVLWSGTRKVKNRIAVALRMAAQSLHQSESALGVFYRRMRAKLGAPKAITAAAHKLARIIFQMLTTRQAYDESVFAAAEQKHLQRMENRLKIQAQALGYQLLPAKG

SEQ ID NO: 354161 - protein, 401 aa, unidentified
MNEVGIDVSKGKSMVCVMRPFGEVVLEPFEVLHTAQNLNDLAGKLKALDGETRVVLEAIGNYHKAVAFVLHDAGLFVSVVNPVLIHDYDNNSLRRVKTDRKDSVKIANYTLDKWTRLRQYLPEDDTRLALKNCYRQYQQAVAIRTMLKNNLISSLDLTFPDANKLFSSPAKNNGCEKWVDFIGDFWHSECVSSLSPDAFSKKYLKWCQKHGYNFTRSKSDEIFACAVNAASLPKSPTSKLLIQQQVAQLKAVSQSVAAFQQEMLRLSQQLPEFDTVMEMYGVGPSLGPQLMAEIGDVRRFSSKKSLIAFAGIEPQPNDSGKVVGNDKGISKVGSAVLRRTLFLIMTVILQTQPQDEPVFQFMNKKRSEGKPYKVYMMASANKFLRIYYARVKSVMDSECSQ

SEQ ID NO: 354162 - protein, 391 aa, unidentified
MSMYFIGIDISKYKHDCCIISAADQKVVSKVTIKNNKAGFNELLTIIHSLANPADIRIGFESTAHYALNLELFLENSLLTFMEVNPVLISEYKKSKTLRRTKTDSVDCESIARWLMTVEYKPHSKGFYHAYSLKSLTRLRDKLIRQRSFYLIKITNVLDHTFPEFKPFFNERLSKTALYLLENYGSAEKMARMNSASYEKLRSVSRGKFSPQQFLRLKELAVNTVGVNNSIFDVELNSLLSLYKSLVKEINTIEKEINKLIEEVHPHYMSVPGIGPLSAAVIYSEYGDISNFTNPGQMLAFAGIEPGINESGTESHGGKMVKRGSSQLRYTLINCCLPLIRFDMTFATYYAKKRGEGKPHRVAITHVAKKLIRVIYALESQDIDFNAQELR

SEQ ID NO: 354163 - protein, 354 aa, unidentified
MSQTPSTAIAVIGIDIGKNSFHVVGHDTRGTVVLRQKWSRGQVEARLANIPPCLIGMEACVGAHHLSRKLASLGHDARLMPAKYVRPYSKGPKNDFNDAEAIAEAVQRPTMKFVATKTVEQLDLQALHRVRERLVSQRTGIINQIRAFMLERGIAVRQGIGFLRTELPTILATRTDALSPRMLRVIEELAGDWRRLDQRIDSLSGEIEALARQDQACSRLMTVPGIGPIISSAMVAAIGTGDVFSKGRDFGAWLGLVPKQISTGDRTILGKISRRGNRYLRVLFVQAAWVVLVRIKNWERYGLRSWIEAAKKRLHHNVLAIALANKLARIAWAVLAKGRAFELTRTNDAGVRPA

SEQ ID NO: 354164 - protein, 443 aa, unidentified
MSKKRSSHLRGERGQAFAELIRGVAPEQILCVSLDISKYFHVAMIHNGLGEIVIQPFDVDIYQSGFDQLCQAIAQARARTQAQVVLVGMEPTSHYFENLARHLIEHSQPVKLINSFSVKQNREQQLMRREKSDQIDVAAIGDLLRRGEGTPYQPATGIYLQLQQLDRVRLGKVKIAGILKNQIIGHIDRIFPGLVLMDESAKERYTPLFSVDFWKCQTLQDLIRICPNPNELVKWSPKQLVQAFHDQQCRLGPATAAKIIAQAHNTLLPDPELAAIRCELLQHDLALLEAVQARITLLEQRLTALLAQTPYQIWIMLKGLSEVQVASLAAAMGDPTHYTEAAQVFRRSGLVSGRNDSGNRQRKGKGNHILKTGDVYLRHALMSATATLILHQPFLAHFSRKLQITKPAGVARVATARKTIGILWAVLRDQSSNSLISCKGADM

SEQ ID NO: 354165 - protein, 290 aa, unidentified
MGSYVGIDLHRRRSVVVVLNEDGDRLSWCRIDNTPANLAAGIVAAGGAEAEVAMEATWGWYWAADVIAECGARLHLAHPLGIAGYENRRVKNDIRDATLLADLLRLGRLPEAWVAPPEVRELRELVRYRAKLGRMRSGLKTQVHQTLGKEGVIPELDDIFRGRGPRWLDDLQLGDVYLERIESLRELIELHDRQIRHCDARIHRRLKGHPGYEAVQVLRGVGPVLAAVFVAEIGDVSRFDNPRRLCSWAGLTPRLRESDAHSHRGHITKQGSRLLRWAAVEAVSGAVRDP

SEQ ID NO: 354166 - protein, 365 aa, unidentified
MEGQKKEKPRYVGIDLGKRTYNVAIVGKSGKPAMSNGKTFEAGRQSLYKRLRRTDTVGLEAGNMAFIMAKEIEASVGCRVYVLNPSHLPLIYGSMKKTDKEDCLKLARIIQYFPEGQLPLVPVPSDKEMLRRKLLAGYRRAQQSRIREINKLHAMFVAQGITSKVKSELSTSGQRKVAIKELTGLEREEAEYLVLCLDLHERRIAALELHIKKESAGDEVIQRLQSVPGIGPHTAFAFVSHVAVERFENAGQVSNYLGLVPRVYISGDAVRHGRITKRGNGYLRALLVQASWSLIRSRAGGKLKSRYEYMTIEKSISKKKAIVAIARRLAELLYTLMGYGTEYEPRPFIPEKIDVDKLAGLAMCA

SEQ ID NO: 354167 - protein, 346 aa, unidentified
MRLTDKDSLAKERVNMQAGEGIIGIDISKDSFDVVLRGTGSEQHRVFSNDQKGFKTLLGWAEKQPERVVHVCMEATGSYWEGLAEHLYQGGYTVSVVNPYQIKRYGDHLLNRNKTDKADASLIAEFCEKDRERLRVWKPYTPEIKALRSMGRRLDELQGMKQQEQNRLKSGVTDPVVIESLQENLKQLKDQIKALWKKIKEHVQQHPDLKEQQRLLTSIPGIGKLTAIKLIAEIGDIRDFENASQLVAYASLAPKEFRSGSSVHKQTHISKQGRTELRQCLYMPAVVASEHNPIVIDLKRRMLASGHVKMEVIVAAMKKILQLAYGVLKSGEPFDPDYGHQFCFNS

SEQ ID NO: 354168 - protein, 341 aa, unidentified
MKITTVGIDLAKSVFQVHGVDERGKVILRKQLKRAQFALFFSNLPPCLIGMEACGSAHHWARKLQSFGHTVKLIAPQFVKPYVKSNKHDVADAEAICEAVGRPNMRFVPVKNVEQQSILSLHRARQGFVKARTAQANQIRSLLAEFGLVVPKGITNVPKKIPLVLAESENELPGVFRQLIDGLLAHFHELHRQVTEMELQIKAWHQDNEASRKLAEIPGIGPLGATALVASIGDARAFKNGRQLAAWLGLVPRQHSTGGKQNLLGISKRGDVYLRTLMIHGARSAILATQRKPGNTSWLAKLLERRHPNVAAAALANKNARVVWALLAHDREYQPGYAAAA

SEQ ID NO: 354169 - protein, 328 aa, unidentified
MDVSKQSVDVCVLSGDDIFLEKQILGTISEIESFLQSFLKKHSFSVSDVLVCAEYTGKYTYPLCLSCQRVGVGLWLENPYAIKHSCGLERGKNDRQDARKIARYARPYEDKVRLFVLPQKAISSLRELVSEQELYIVDKKKYQGQLTDEKSFMNPQDYRQKSARLKILLKALTATIKEIEEKIQKIIEGDEKLSHQFKLLCSIDGVGERTAVKVIVETNAFRDFTDARKFCCHAGLAPFSYTSGSSIHSRNRVSQRADKSIKALLHMGALTAATRMEGELHEYYMKKVSEGKNKMSVLNAVRAKLVHRMFAVIRNNKFYEKEYRNILA

SEQ ID NO: 354170 - protein, 364 aa, unidentified
MSKKSHPLATASASMPKVTIGLDLGDRTSRTYAVNADGQCVGEATVRTTVAGLTQYFGGRERCRVVLEVGTHSPWISRLLTELGHEVIVANPSAMFAGRPRRRRNDRLDAEFLARQGRADIRLLYPITHRTAVAQRHLELLRARDQLVAGRTAFINHVRGAVKSWGARLSACSAEAFAVRVAPDLPAELRRVLTPLLEVIADLTRRIKHADREVAQLAATAYPVALRLQQISGVGPITSLAFVLLLEDPRRFAVSRDVGAYFGLVPRLDDSGDATPQLRISKAGDEFGRRLLVSAAHYILGPFGPDCDLRRHGRAIAGRGGKNATKRAVVAVARKLAVLLHHLWVSEVPYDPDHLAKQRKQRAA

SEQ ID NO: 354171 - protein, 421 aa, unidentified
MNMTSKSAQFAALIGIDWASQRHALCLYDCATAKRESSILEHTPEAIAQWARGLQERFKGKKIALCLEQSKGPLIYALLEYPFFVLYPINPATAARYRMAFKTSRAKDDPSDAQVCLELVLHHREKLNPWLPNDAPTRELSCLLQHRRAAVDLRTLLTNMLRDALKSYYPQALELAAQDLFAPLGCQFLLKWPSLQELHKARKESVRKFYYAHNCRRMDVIEKRLDAIAQMTPLCRDRALLEPAMVQVRMLARQLLQLGGALKEYDSKIEQLFAQHSDALIWESFPGAGPTLAPRLACAFGTQRSRYQSAVAIQQYSGTAPVTEKSGKNRHWVHRRWARPHFTHQSFFEYASQSVLHCSWAKLYLKEQMARGKAYPTAIRALAFKWQRIMFVCWRDRVPYDETIYRQSLQRRGSHLARKLN

SEQ ID NO: 354172 - protein, 340 aa, unidentified
MKYIGMDAHSKNSYFVVLSRSGKVIGRDKVTTQEDAILEFVGSVTGPKKLAYEEGVMSQWLYILLKDEVDELIVCQPPKSQGAKNDWLDAAEIADLLRINRLKPVFHSDDVLMDLRVLISGYDDLLQEIIRSKNRYKALYRESGIPTKGEDLYEDHEMLVQLDTEQRQLVGSSLYEQIQLLELHKQKYVKQLDQNVQSYKPVKLLRGIPGIGTIRANHVVAVMVTPYRFARKGNLVAYSRLTKHGRMSDGKLYGRKRSLGQPILKDAFRGAALCSLSGDNAFRREYDKQRAAGKNDKEARNKIAKMVAATVLGVWKSGKPYDDNYWEVTQKSNQSCCRNM

SEQ ID NO: 354173 - protein, 371 aa, unidentified
MEHTRFIGLDIHKERISVAVAESGRSGAVEYLGEIANEPGAISKLCDRLRRPGKPLAFCYEAGPCGYGIHRQLTRLGHRCDVVAPSLIPTKAGDRVKTNRRDATMLARLHRAGELTPVWVPDADHEAMRDLIRLRSVVRQIVTRARQHLQGFLLRHGRKHGRGTAWRMAYRRWLSTLAFEHPAQQIALQDYVDAVMDAERRLKRVEEQVFGLLPDWNLRLVVDGLQAMRGIALINAVVLVTEVGDFTRFSNPRQLMAYFGLVPGERSSGETVRRGAITKTGNAHVRRALVEGAWAYRMKARIGRHKVDRIEALPKVVRDIGWKAQVRLCTRYRRLRARGKTANVVNVAIAREMVGFIWSIACTIQSAPRAA

SEQ ID NO: 354174 - protein, 338 aa, unidentified
MQLYCGIDLYAKNSYLAIIDERRQRIFKHNVANDRQLILSFLSPYKAELAGVVVESTFNWYWLVDTLMEDGYMVHLANPCAIQQYAGLKYIDDKHDAFWLAELLSLGILKEGYIYPRQERPVRDLLRKRGHLMKLRTSLLTSLHNTMANACGRKIPSHHVLGKEDRLSSHLSGNESLALMGQVSKASIDALTLQIKTIEAHAEKQCMIEPAYVGLLSLPGVGEILGLTILLETGPISRFPAVGNYVSYCRKAESTWKSAEKVKGKGNIKNGNRYLSWAFAEAAEHARRFDTASRNFYNRKVHERNGAVAHSALANKLARAAYYIMRDQVPYEEAKLFG

SEQ ID NO: 354175 - protein, 387 aa, unidentified
MIYVGIDIAKLNHYASAVSSEGEVLLEPFKFTNDNDGFYTLVSKLNQFEKDKVIIGLESTAHYGNNLLAFLVPKGYHVCLINPIETSTMRKNNIRKTKTDKVDTFIICKTLMMQPHRFITLYDIGLMQLKNLGRFRQKTVKQRTRLKIQLTSYVDQVFPELQYFFKSGIHQKGCYALLKEAPSPESIASMHLTHLTNILKSSSHGHFKKETAVELRVLAQKSVGTSDNSLSIQITQSIEQIELLDRQLELIESEMQDIVKSLDSVIMTIPGIGYTNGGMILGEIGDITRFSNPSKLLAFAGLDPSVYQSGNFEAKHTRMSKRGSKALRFALVNAAHNVVKNNKTFATYYNQKMSEGRTHYAALGHCAGKLVRIIYKMLTDNVEFNLE

SEQ ID NO: 354176 - protein, 410 aa, unidentified
MELLHRRCCGLDVHKATVVACLRLVSDGKVTTEVRTFQTTTADLLRLSEWLAANDCTHVAMEATGVYWKPVWHILDDGEFVLLLANGAHVKNVPGRKTDVNDAMWLAELLAHGLIRASFVPDPQTQEMRNLLRTRKQLVREQSSHVLRVQKTLEDANIKLDSVLSDLMGKSGRAMIEALIAGETNPAKLAGLADRRVKASPEELREALRGRVTKQHRFLLRLHLNQIDALDAAMATVDAQVEANLGPFRTAVEQIMSIPGFKNLGAHVIVSEIGIDMSRFPSDAHLISWAGICPRNDESAGKRRSNRLRKGAPWLKTTLVQCAWAAVKKKNSYLQAQFHRIKARRGPKKAIMAVAASILTAIYHMLKDGTMYQDLGRDHFDRRSADQQKKRLVKRLNDLGYAVEIKPLAA

SEQ ID NO: 354177 - protein, 425 aa, unidentified
MKKTDYLSTLFVGIDIGSRTNVVSAIDFNQDFFIRMKPVPNAKEGAETLESLLVDVLSAHHEFNHVIIGLESTGFYGVHIANYLSASGLLAPFGTEVYCLNPKEVAKYKESFNSLDKNDGIDSFVIADFARVGRISIKPWRGAQYLALQRLTRHRLHIAECIAREKTYVLNNIFLKFSEFAMLKKEDHPFSNKYGATAEAILEQYVTNDDIIGASIEELVELIESKSRGRITDPEETVKILKAAANGSYRLDKVVAEPITLSISSSFNCIRAFEKELKAIEKAIEHTVQGLNPVEYQVLKSIPGIGHVYAAGILAEIGTIKAFTDNGALAKYCGIVWKENQSGNFRAEDTKMSKAGNRYLRYYVIEATGSVINNCPEYKDFYDKKFAETTTHQHKRALALTSRKFLRMLFGLLDKSQLYSLERSR

SEQ ID NO: 354178 - protein, 475 aa, unidentified
MANLGGRAQKGYEMPGADEIASAGKRREQLAGLPIIRRNVAGIDLGSEQHWVCAPTLDRSGREVASFGATTAELIRMAEWLKARQVESVAMESTGVYWIAPHEVLEGQGLQMLLVDTRQLARVPGRDKKSDPTDCEWIQRLHSCGLLRGSFRPEEAVCMLRTLVRDKASLVAERSDWVRRMQKSLDQMNVRVHRAVSDIDGVTGMAILRAIAGGERDAQKLAKLRNRGCSKTEQEIAEQLSGHWRADHVFSLQQALKMYDAVQERIAAYEQEILRKLGEMERNKPHEPTAAPLQNANKARTIKNRGQEAKRQALYRMSGVDMTQIDAIGVETVEVVVSEYGSDLSRFPTEKQFVSHATLAPHVPKSGGKPVRKKKRNSASTRVAAALRMAALSLRHSQTALGAYYRRIAQRRGGDIAVFATARKLASLVYRLLRWGQPYVDEGAAAYENRYRQHRIGRLAATAKELGYQLTPVTA

SEQ ID NO: 354179 - protein, 354 aa, unidentified
MPATSQTAIAVVGIDIGKNSFHIVGLDDRGAIVLRQKWSRGQVEARLANMPACLIGMEACVGAHHLSRKLKALGHDARLMPAKYVRPYSKGQKNDFRDAEAIAEAVQRPTMKFVATKTADQLDLQALHRVRERLVSQRTGIINQIRAFLLERGIAVRQGQRFLRAELPRVLATSPDVLSPRMARVIEDLAGDWRRLDERIGGLSSEIEAIAGQDAGCERLMSVPGIGPIISSAMVAAIGAGDAFTKGRDFAAWLGLVPRQMSTGDRTILGRISKRGNRYLRVLFVQAAWVVLIKPKSWERHGLNLWIEAAKKRLHHNVLAIALANKLARIAWSVLARGRTFEVSKIEAAAARPA

SEQ ID NO: 354180 - protein, 357 aa, unidentified
MAALSIADVPANVTVGVDTHKHSHVALAKDGLGRHLGQLEVGTDLGGYADLLAWAHGFGPVVTFGIEGTSSYGAGLTRFLLAQGQAVIEVLRPVRRDRRFGSKSDPIDADAAAGAVLSGKATAVPKAGDAGVEMVRALKIAKQTAIKARTQAVNAVKGLIVMAPDPIREQLRNLKTPALVRTCSAYRVDGASDPTSAIKLSLRSMCRRYVVLDQEVRSLEKELDALTIRLVPQLRQLFGVGQEVAASLVLAAGNSGDRLRSEASFSMLCGASPIPASSGMVRRHRLNRGGDRQANAALHQIVVVRLRYDEATRAYFSKRKADGKSKKEIFRCLKRYVAREVYRTLVDPREEAVRSVA

SEQ ID NO: 354181 - protein, 463 aa, unidentified
MRTDKKLWRNRKARKELTRRLQSENPGLEVVHPHAAGIDVGNGAHYAAVRPDRDPQPVRRFECFTADLHRLAEWLCSCGVQTVALQSTGVYWIPLYDILEERGFEVYLVNAQHTKNLPGRKSDVQESQWLLKLHTYGLLSNSFHPTSKIRTLRTYWRQRLQHVTGAATCVQRMQKALTQMNIQLANVISDLSGVTGQMIVRAIIDGERDPWKLAELSHPRIQASRAEIAKSLEGNWRQELVFVLQQELEMYDTYQRRMAECDQQLQKHLAAFADIVPPTATGDVPPRKKKKQNKNNPHFHLADELQRITGVDLTRIDGVDVFVAQTVISEVGLDMSRWKTEAHFASWLGLCPDNRISGDKVLARGTRHVLNRAANALRLGASTLLKSQTYLGAQYRRLRSRLGAPKAITAMAHRLARLVYRMLKYGQQYVDKGAEYYERRNRQQQIEFLRKKAAQLGLQVTSP

SEQ ID NO: 354182 - protein, 429 aa, unidentified
MNCTQNKKIEQVKETTMIVGIDVGSEKHYFRAFNWRGIELTRKPVAFSNSMEGFNSFYNTIVELMQKSELEEALVGIEPTGHYWFDLGQFMGEKDIKFVMVNPHHVHKTKELDDNSPSKNDRKDPRVIAGLVRDGRYFYSYMPTGAYAELRNASNRRFVLVEEQTRAKNRLQKWIAVYFPEYKGIYTHIDAKGGMLVLKKAPTPEEIVRLGVEGIIKIWKDAKLRGNGHKKAMLILAAAMRSIGLKAGLTEARMEIQDLIEDYEPQTKRLERVNDLIKGLCQQVRYADKLLEIKGIGITTVAGFIAEVGDITRFDSTKELQKLAGLELVADSSGKHNGKTKISKRGRKRLRYLLFEAAISVVGKNEEFKEIHRYYTTREKNPLKKMQSLIVVACKLIRVFHAILTKGIRYDASKMLKDIRHPGEQLKAA

SEQ ID NO: 354183 - protein, 345 aa, unidentified
MDISTIGLDLAKNVFQIHAINATGEVVVRKTLRRAQMLPFFEKLPPCLVGAEACGTSHHWARELMKLGHTVRLMPPVYVKPYVKRGKNDAADAEAICEAVTRPTMRYVCVKSREQQAALSLHRARRLLIGQRTQLVNLMRSMLAELGVAIPVGLEKALQMARQIVDGDVELDLPAEAVGVVTMLSEQILQLHVQLRKLDLRLARLQRSDDTARRLATIPGIGPVGATAIAASVADPGQFASGRQFAAWLGLTPRQNSSGGKERLGRITKMGDKYLRQLLVIGATSLVRRAKDKPEAVDPRFIALLARKPARVATIAMANKIARIAWAVMARGDVFRPGHVPVLAA

SEQ ID NO: 354184 - protein, 337 aa, unidentified
MAHLSSFHPLRFQGVDVSKATFDVAWWGDLPPQQMTNRAYPRTPAGVARWLTEIPIPVRASMGVVMESTGGYCKELARWIHAACPGLHVAIANPYMVKAYGRSLGTRNKTDRVDARILARFGQERQPGAWVPLSDTQEALRDLTRTRTKLVVTRAQYRNRLLGHVITSPVARQVQEELVAHLSRQVRAVEKAIKKLCDGDARLKADLRLLMSIDGIGLVTAATVLGAVGDLRAFRRRGELCAFLGVSPRRFQSGTSVNGKTHMCRIGGKRVRSVLYMAAVAACRTKGPLGNYYRRLVEGGKPKKSALGALMRKLLVVMRAVLIQGSPYQVPGQAASA

SEQ ID NO: 354185 - protein, 341 aa, unidentified
MHPIYYIGFDIHKRTIAYCVKRFDGVLIQQGAVSAEREALLQWLSGIPGCWIGAMEATMFTGWVYDFLKPHALELKVAHPEMLKAITAAKKKNDRADAEKIADLLRIDLLPECYMAPQEIRELRRILRYRNMIVRTAVRMKNKMSGLLMEVGATYDKRRLHGKSYFNSLLERVEDVPESVKELLKLSRGSLEMFTAIQKKLLKALKENMLIRQRVQRLMSIQGVGEVLALTWVLEIGEVSRFSSSRQAISYCGLCSAQHESAGREHRGPISKKRNKHLQAMLIEAAKLAPRWNDELAFLHEKELARGNCNRATLAVARKLVKYLLAVDRRESDFETLQQAV

SEQ ID NO: 354186 - protein, 406 aa, unidentified
MIFVGDDWAEDHHDVHVMDEAGARLASRRLPEGLAGIRAFHELTAGLAGQAGEVVVGIETDRGLWVDALTGAGYQVYAINPLAVARYRDRHHLSGAKSDAADAKVLADLVRTDRHNHRPIAADSAQAEAVKVLARGHQNLIWARNRHTNALRSALREYYPAALEAFDDLHDRDTLAILGRAPEPAAGAALTLAAVRSALQRGGRRRNVEARARQIHAALHTGQLAAPGPVAAAFAATTRAAIGIIAELNRQIADLETQLAQDFEQHPDAGIYLSLPGLGDVLGARVLGEFGDSPDRYTTAKSRKNYAGTSPLTVASGRKRTVLARHIRNRRLYDAIDQWAFCALRASPGCRAFYDQRRAAGDLHHQALRALGNRLVGILHGCLHHRTLYDEHTAWAHRQQNQQTAA

SEQ ID NO: 354187 - protein, 419 aa, unidentified
MDVHRDFCEVAIVEAGEVRSAGRIETTPATLELFAQSLCASDRVVLEVTGNAWEIARILEPHVGEVLVVHPGDTGIRQARAKTDRLDARALAKLLAAGSLDGLWMPDEQTRALRRRLARRSQLVRARTRAKNECHAALVRRLITKPAVSDLFGLAGREWLREVELPVEERETVDGCLRQIEFLDQEIAEVEQQVARDGLTSPQIRRLMTVPGVNVVVAATFLAAVGDVGRFPDQRQLVGYLGLDPRVRQSGNSPATHGRISKQGSASARHALVEASWSVVRQPGPLRAFYQRIRARRGHQVAVVAAARKLACLFWCMLTRGEDYAYGQPSLTKKKLRRLELQAGAERGKVTPGIWAANKAIRTAERELARQAELAYQRTVADWKAATAATGASATPGRASQQPSKGKQRGKASVPNPAL

SEQ ID NO: 354188 - protein, 484 aa, unidentified
MTKASRPMPLVVNDQARAQELRKSKKRMEKYFHQRYLRLNEMSVVHRHAAGIDLGGKKSHFVAIEIGDDEVEVREFGMTTPQLIEMADYLLANGVTTVSMESTGVYWVPVYDLLEKQGLEVFLVNPAHAKNVPGRRKDDKLDCLWLQKLHKYGLLSASFRPAESIRPLRSFLRHRETLVQQCADHLRRMQKVLDMMNVLVHKAVSDLGGVTGMRIVRAIVAGEYDPAVLATLRDPRCACSEEELLEALTGFYQDHLVKQLASVLRLYDGLFAEIALVDKDIEEELKMLSAQDAEALAAQIAADPHPLPDGKHAPAFNTSAYVVIVTGNDPTGLPGIGPQQSLKLLGELGMDMSRWPTVKHYGSYITLATQINISGGKVLSAKTRPGRHPAAVIFRQAAATVVKQGNSALAAFYRRVAARRGKGKALTALAYKIARMYYYLMKNGRAYVEVGEQAYEEKYQKQQVALLRKRAKQLGFTVAPVVAA

SEQ ID NO: 354189 - protein, 422 aa, unidentified
MKRQTEQEQFAAYIGIDWATQTHYLSLCEADSRTVERSQLDHKPEVLGQWVNELQRRYPGRRIAVALEQSRGALVYALMNYEFLVLYPVNPKALAKFREAFYVSGAKDDPLDSDLLLELVTKHRDRLRAWQPDDELTRTITLLVEYRRELVDTQTGLTNRLSDLLKLYFPQALGWAGELATIQACDFLERWPTLAKVRQATDTELLQFYGAHGCRKAALIEQRLRQIETAQPLTTDGAVITASMAMVQSTIAQLRPLMVSIKEMDKQIAELFATHEDHELFRSFPGAGAVLAPRLLSAMGANRDRFVTAQDVQQLAGIAPVIERSGKTCFVHRRFACSKFLRQSFHEYAAQSIRWAPWARAYYDRQRQRGNGHHAAVRSLAFRWIRIIFRCWQNRVPYSEETYQQALRDRGSKLSALIVAQT

SEQ ID NO: 354190 - protein, 355 aa, unidentified
MEEYIGCDAHKQFSVFVSINERGEYGAAQRVGHERKQMQEYLSSLPAGSKIALEASGSYYWLVDEMEAAGHEPTLADPRIAKKRMEGRNKTDKKDARGLAMLLRNGTLPQVWIPPSQLRDQRELLRLRMYLADLRTALKNRIHGTLLRYNLRSQASDLFGAAGRLQLSQLLEQLPPYTQQSLKEQLVGLDFVLLQIGNCEQGLEAMLEDNVERDLLKTMPGVGRILSAVIALEIGDVKRFASAERLVSYAGLVPSIQESAKRRRMSQCPSDANQYLRWALVEAAHVVVLNQKPWANRHAVRLYQRVKAHTKKHGKAVVAVARHLGEAAYWILSKQEVYREPQQRSDSFVEARVNA

SEQ ID NO: 354191 - protein, 375 aa, unidentified
MSSAATIYLGLDVHKESVTIAVLPSGALAPTRVDKLPNDLAKIRRFCERQASQGTVRACYEASGAGYVIQRAMTAWGVHCDVIAPSLIPIKPGQQRKHDSYDAAQLARLYRAGELTIVRIPTEAEERVRDVVRCRETFQREVLRSRHYILKFLARRGFVYRDGTPWRQAHYEWLRQLARADSPLASEDRQVFGEYLGLLEYKLSRRDALDEQIEALALTPALASAVATLQCFRGIQQQAAMVLATEISDWQRFASPRQLMAYLGLVPREHSSGDRERRGSITKAGNTHCRHVLVQAAWAYRFQPKIGVALKARQRGQSPVVIAHAWKAQHRLHTFYQRLAFRRRPQIAVVAVARELVGFLWAVMRDVTPLATTTA

SEQ ID NO: 354192 - protein, 333 aa, unidentified
MMYVGLDVHKKLCFGTVLDEKGSVVKQAKFGNDFEALGRFMKDLEEAVVVMEAGYCWQPLYESLEEMGHVVKLAHPKEVKALSKKKTDKVDSEILAHLLRTGLLPESYVPPREIRELRDRVRRRAFLVRMRTKVKNRIRAELAKRRIQLGGDPWTRKGRLLLQGLELEAVDQVLPVLDALDRQIMVMSRDLRRMCGENPQARLLTTIPGVGYYLALLIVSEIGDVGRFADSESLCSYAGLVPVVWRSGGTTHHGGITKEGSGWLRWALTQAVYAHLRHETNLTRFYRRLAAKKPSQVAVMATARKMLKVIYWMLRNGEPFHPGPGVVDPVRRG

SEQ ID NO: 354193 - protein, 396 aa, unidentified
MKDINAGNRESENTVEWEKAHEEYPAYVGLDVHKETIVVAVARAGRGAPEIRRKIANRPKAVRKMVTGLTEEFGGEVLEFSYEAGPCGYVLYRQIVEMGQDCQVVAPSLIPKKAGERVKTDRRDAKKLAVTARSGELTAVWVPGHEQEAMRDLTRARDDFKIQEKKAKQQLNGFVLRHGHSWPAGKSRWTQAYYNWLESLEFPHDWQRVVLREYIDAVRTAGRRVADMMAEMERALPQWSLAPVAYSLMALRGVEKITAMGLLAELGDISRFDSPRQLMGYLGLVPSEASSAERRRQGSITKAGNTHARRMLVESAWSYRFQARQTAHMKRKAKHASEEAKKVGWKAQKRLCGRYRSLIESGKNSKVATVAVARELAGFVWDIACREMPKVEQTVR

SEQ ID NO: 354194 - protein, 328 aa, unidentified
MRLYNVGADLSKKTIDFVIHQLKAYLKVDNSITGFRDLVKWFQEHSVDLSDVMIVMEHTGLYSYQLEQFLHQNGISFTKVSALAIKRSLGLVRGKSDKIDARRIARYAFEKHDCLSADQPVSENLTMLQRLHSTRERLVKTRASYITAVNEQREAYQLKQTDIVIAVQLKVIKTFDQQIQKLENEMQAIVQSDKNLNKNYSLLQSIKGVGPVVALATIIKTGNFTRFTKARKFACCCGIVPFEHTSGSSIRGKTKISSLRDKKMKTLLDLAAKSAIQHDKELHEYYMKRLTMGKSKKSTRNIVRNKIVYRMFAVIKRQTPYQQHRMIA

SEQ ID NO: 354195 - protein, 399 aa, unidentified
MLAVGIDISKSKSVAAILNQDGSMHTSPFEFHHTQPELDAFIKYILNSKQSATILMENTGHYHYPVLKAFQEAGLPVCMVNAYQIKKFGDMDLRKAKTDKKDAVRIARYALEKSYSLVPYTSMEQKYEDLKFLARQYNQRMLTLKTNKVFLLNLLDETMPGITNILPLTTRTPETSLSVLFINRFKSYDRIKKMGKSRFLDAFEKIARKSRNRQTKTYGLAIYEAALRNITTRGENEYTLAAQDQCLELVCESQKAADSIILKMQTLAETLPEYAVLRSMAGVGDRLGPLILAEIGDIRRFHSGKALNAYAGNDAPPYQSGTFESHNRHISKRGNAALRKYCFEVMQALKLTQPQDDPVYLFLLKKEQEGKPYNVAKMAGVNKFLRIYYARAMETLKQQ

SEQ ID NO: 354196 - protein, 311 aa, unidentified
MTLTRVTLGIDVSKGRLDVFSAPSLVKAFTNDGRGIGQAVALAMSLGAFVVLEATGGYEDALCLALEAAGVSYHRANPRKAREFARAAGFLAKTDRVDSRMLAAYGTALDLAPSQPRSAPCRALKGMVGRRDQLVELRKIERTRQAEQAEAWMRDSLNAVIEVLSEQIRLVEARIKACIEADAQLRQAEVIVRSAPGIGPVAAGVLLADMPELGCVHRRTIAALAGLAPLACDSGAFKGRRRIWGGRKRVRDALYMAALSASRQPAFKAGYDKLIADGKPPKLALIAVARKLLVALNAAMRTKTPFQPSIA

SEQ ID NO: 354197 - protein, 422 aa, unidentified
MLEQTQDEQEIIARVAALDIGKAELMCCVRVPDPRGGSRRVQEVKSYSTMTRSLQVMADRLMDLGVTRVVMEATSDYWKPPFYLLEAHGFDVWLVNARDVKNLPGRPKTDRLDAVWLCKVAERQMLRPSFIPPVPIRRLRDLTRYRIGLVSDQTREKNRVEKLLEDSQIKLSVVASDIFGVSGRQMLAALIDGQRNPQVLAQMARTRMRTKIPQLEEAFVGHFTDHHRFLLTKMLARIDALDADIADLDTQIEAHLAPFADAVARLDQIPGVGATAAAVIIAEVGLDMTRFPTPAHLSSWARFAPGIKESAGRKKGTGSTGHGDRYLARVLGEAAAGASNTNTFLGERYRRITRRRGKKKAIVAVGRSILVIVWYLLSDPNIDFHDLGSGYYDSRINPERKKHNHIRQLEALGYKVTLEPAA

SEQ ID NO: 354198 - protein, 398 aa, unidentified
MTRVLGIDVSKRSVCACLLTEKPIEPKQFYYKYAFCVFKADASGIKGILDLKPDVALIEPTGTNYSKLWVTALTQNGVSVKFVGHKELRSYRSSHLNLPDKDDNADALALACYAFDYDSPTRYLTIRDATTAQIRELILRLVHLNRVQSPIINRLRQDLAWQFPEVALVKSPRSRRGELPLLWGWLSNIRESKKYDGLYLDSVGLGLTDTVKLHAERLCHLQQEEYQIEDEISALLQASNFIPYRKAFERFGFGMRTQALLLSQIYPLTNFLNENRKPIVEFHNSRNSNKRQKRRLSERRFQKVMGLAPTQESSGDKKKSKVSGGSALCRRAFWQWVFTSIEPKRSRNNEITKKLGAILDKEKTGGRPIRLIRSRISVRGCKMLFNQLVKELNEYNRC

SEQ ID NO: 354199 - protein, 327 aa, unidentified
MSFATLGIDISKDTLDVALYQDDSYRLATFTNEKDGYRRLAKWLKKHKARECRVCIEATGRYGETVAMYLYERDYSVSVVNPARIKAYGASMLKRNKTNREDAKVIAHFCATQNPGVWAPPPPEIQELQALTRRLEALKADRTRELNRKQSGVQSKTVLADIDAHIDFLKNQIAIIEQRIRDLLDQHPDLREQHDLLTSIPGIGDITAARLIAEIPDVNDFQSANQLAAYAGLTPRNHNSGSSVHRRGRLVKTGNKRFRTALFLPALAAMRFNPIVQALVERMQTNGKNRMTIVGAVMRKLVHLAYGVLKHRKPFDPDYLVNVQVSA

SEQ ID NO: 354200 - protein, 423 aa, unidentified
MKLTYAICCGIDVHKRFLVATIVTSKGLEPYYQKKRFSTFNGQILALKAWLLENNCRDVCMESTGKYWVPVFNLLEDSINVTIANPKWVRAVRGNKDDQKDSKWIADLFRMGSVRGSFIPCKAIRILREFTRYRYKLTCCKSSEKNRYQNVFTVCNIALDAVVSDMFGKSATSILDYILAGDVFDPAHCVSLLQRTLKKKADDVVASIEGFQMTDSQKIRARMVKEHYDYLLGHVAKLDAAIEELAKPYESAISLLCTIPGVDRKSAITIISEIGTDMSQFDSSKRLCCWAGLTPSNNQSAGKKKSVHVSRAGVYLKPMLVQVAHAAVKDKNNPYYRIKYEAIVKRRGKKRAIIAIARMILTAAYHMFLTGEVWNPCDLQQVDMPPELREKELQKSLRKAAKLLVAHGVVAQEAVVFREPIAA

SEQ ID NO: 354201 - protein, 389 aa, unidentified
MQFVGIDIASETHVFAVIDADGTVLVKPKPITEDATGHSTLLAALAPPGEALVVMEATGHYWKNLFAVLAAKGYGVALINPLRTHRFQGESLERTKTDAIDAIGLARFGREKRPAVTRLGSQASEDLRELVRHRDRLRQDFDDRVRQLHRLVDLGFPEFRRYVRTLDSMLATAILVEYPTAEAVAKATPRRLAKLRYDGRHAVGAELADQLIAAAKRSVGQHHGTAYRVQVRDVCQDLDLWRRRLAERDGDIARLLDDHEVGSLLTSIDGIGPGTAARLIAELGDPARFDSAAALAAYVGVVPALRHSGKRRPNRAAITAIGNARLRTALWMPTLTAVRRNPWLKAFYDRLRAQGKPPKLALLAAMRKLLVAVYAVAKARKPFVPKLAG

SEQ ID NO: 354202 - protein, 414 aa, unidentified
MKVFCGIDWSERHHDVALVDQDGTLIAKRRIGESVEGFAELLTLLAEAGDSPEEPIPVAIETSRGLLVAALRATGRPIYAINPMAVARYRERHCVSRKKSDHVDAMTLANILRTDAHAHRRLPADSELAQAITVLARAAQDAIWRRTKAIQELRALLREFYPGFLAAFADGTVTNLASPQARAILAIAPTPAAGARLSQARIATALRRAGRQRGITTLAAHLHRTLRIPQLRQPALVENAMGCQVNALLATLATECANADQLTAAATEAFTQHPDHQIITSFPGLADLTGARVLAEIGDDPTRFTDARALKAYAGSAPITRASGRSLSITRRRIKNDRLNAVGFLWAFATLPRPGPPKDHYDRRRAHGDRHAAALRHLFNRMLGQLYHCLHTRQTYDPIKAFGQPTTTTNQATT

SEQ ID NO: 354203 - protein, 346 aa, unidentified
MQFYIERHRHTCGVDMHGRNLYLCVLDPDRRIVLHRRVDCDEKKLLRALAPYRKDLVIGVECMFKWYWLADFCDEHGIPFVLGHALEMRAVHGRKSGNDRLDAERIARLLASGMFPLAYVYPKQMRSTRDVMRRRSFMVNQRSALINHIQVTNLQYNLPELGKISKPDNREGIVARFEVPAVRASVEADLAVIDIFDVVIARLERIIIRAARGHDHHAFALLKSVHGIGDIIGLTLLYEIHEIQRFSSLGGFLSYCRLIKCEKTSNGKKKGTGKSKQGNHHLKWAFSEAAALFLRANPEGQKLHSRLVKKHGKAKALGILAAKLARSVYCMLHRNTPFDMDRFIRA

SEQ ID NO: 354204 - protein, 409 aa, unidentified
MRVIGLDVHRSFAVAAFLEDGQLRSGGRVELTRDAVVAFGEQLRPDDEAVVEATGNTATIVRLLRPFVRRMVIANPLQVRAIAHAKVKTDKIDAGTLAKLHASGFLPEVWMPDEATEALRRLVAQRAQVVSQMTRAKNRIHGVLHANLIPPHRGELFSAAGRLWLEAQPLSQDEKLAIRRHLADLDHRAADLAALDRALAGRALEDDRVRRLMTIAGVHVTVALGLLAAIGDIARFASPGKLVSYLGLNPSVRQSGNGPAFHGRISRQGRAHARGMLVEAAWAAARAPGPLRAFFLRIQARRGKQVAAVATARKLAVLTWHLLARGEDYAWTRPALLEAKLRKVELAAGQPAVKGRQKGRAYAYNSKAVRERERAWLEQTERAYARLVADWRSRPPARRTGDAGGPRSP

SEQ ID NO: 354205 - protein, 290 aa, unidentified
MSDANKNQNEINVGVDTGKTQLDIYIRPLDIFFTVSNDEKGIKEAIKEIKKHHPTRIIIEATGRLEHAFIIACGKAGLPFVVANPIHVRKFAGAIGQVAKTDKLDAQLIAHYGEAIKPKLSHLKPELIQLMSDFLARRQQLIKLQTMEKNRMKIMPKEISSLIKPILTAIKNQLEKVDQRLLKLIESCPEYKEKKDIIQSMPGVGNVMTFSLLSNMPELGYLSNKQAAALVGVAPMNRESGAYKGQRRIRGGRAQIRTVMLMGMMSAMQCNPVFKATAILIMRLRSMSLC

SEQ ID NO: 354206 - protein, 357 aa, unidentified
MKKRLNADKVNVNGKTVNVGIDVHKVSWHVTALVEGVIVESATIKPCYRVLKKLLARFAGGKIRIAYEAGPAGFNLYDELTADEIECIVVPPSLIPVESGNRVKTDKRDSRKLAQYLESNLLKRVYVLSKQERAHRQYVRTRRQLSNHRTDVMRQIKSLLLFHGLPSFDGSRGFWTRPVLRALRSITPDEYVSYSLNKLIDVYEYLTQQVQHMTREVRRLARTETYARRVELLTSIPGVGVLSAMEVLTELQDVSRFATADQIAAFLGLTPSQYSSGQHVRMGKITHAGNHRLRTRMVECSWIAIKKDPGLNKTYEAIKKRRGAKRAIVAVSRKLIIRIRRILLDEVTYRKEYATAA

SEQ ID NO: 354207 - protein, 429 aa, unidentified
MMTTTQFAAYIGLDWEQEAHSVCVLPGAGGVAQQGEVKHDPDGIANWVAELRQRFGGQPVAICLEMSRGGLVYALMQYDFLVLYPINPKQLSDYRAALYPSGAKNDPNDAELLARFLRDHNDKLRAWHPDDAVTRGLRLMTEQRRKWVQDRVALTNELQQRLRESYVLALDFCGDDLWSESFLALLEKFPSQRELQRASPKQLEKWLPKKRRKADDPPADELLRQRIAAVRKAKPLTADRAVLDHARLVVANLVLMIRALNRAITESDQTIAELFAQHPDAPVFESFPGAGKALAPRLAAAYGTDRDKFPEAEDMQQLSGIAPITRASGKTKVVQMRWACPKFLRQTFHEYALASAKYSSWAKAYVAMRKAQGHRYQEIIRGLAFKWQRILTRCWKDRQPYDERRYLQRLREHGSKLIAYLPPEPEPAT

SEQ ID NO: 354208 - protein, 407 aa, unidentified
MMIKLSGSKQLPNIFKGCGSMIYVGIDIAKQKHFAAATTADGEVLIPPFGFSNDAEGFKLLLSKIKSFKKENTLIGLESTAHYAENLICHLFELGYNISVINPIQTSTLRKTNIRKTKTDKVDCLLIIKSMIVNKPRIYSKIDIDSLRLKSLCRFREKIKKAKAKLKIQLVTYVDILFPELQYFFKSGIHTNTCYQLLKEHSSPDDIAALHLTYLANLLQKASHGRFGKEEAFALKGLAKSSVGTDNTAVSIQITQSIAQIELLEQQLADLDRAIESIMLEMDSVILTIPGIGFLNGAMILGEIGNISRFSNPSKLLAYAGLDPTVNQSGKFNAKSTKMSKRGSKLLRYALINAAWNVSLNNKTFNDYFNLKRSQGNNHYAALGHVAHKLVRIIFKMLKDNVAFNLD

SEQ ID NO: 354209 - protein, 356 aa, unidentified
MQTQVTKKIDFSGKNLFIGLDVHKKSWSVTIVVDGMEHRTFTQPPDPLALNNYLQRMFPGGTYYSAYEAGFCGYGIHRELNTLGIKNIVLNAADIPSSQKDKLEKHDPVDSRKIARGLEKGLLRAIYIFDRNQEELRSLNRTRFYLMRDLRRSKNRIKSFLYYYGISIPPEYDNNLWTLKYIGWLKQIQMKTLSGQEALMNLISSYEYHRAQILTLSRQIRVRIKEYDNELYSLLKTIPGIGPLTSSALITELGDINRFPHIDHLSSFMGLIPRVKQSGESSYSGGITFRCNSYLRTLLIESSWQAIRQDPALMQYYHEHLINNKGQRVIIKIARKLLNRIRYVMKNRQPYVTGVA

SEQ ID NO: 354210 - protein, 407 aa, unidentified
MQVVHARCAGLDVHKETVVACIRIAGGAVRQEVRTFESTVEGLLALSAWLSESSVTHVVMESTGVYWKPVWHVLEGDFELVLANASDVRNRPGRKTDVNDAVWLAELLAHGLIRASFVPPTPIQELRDLTRTRKQFVREISQHTLRIQKTLEDANVKITGLVSDVLGVSGRAILEAIIGGETDPARLHERTQGRLKADPGALKRALRGRIRDHHRFLLKLHLRQIQALESAVRDVEARMGQALEPFRVDIELLMTIPGIGLIAASVILAEIGFDMSKFPTPAHLISWTGLCPRSDESAGNRRSTRIRPGAPWLKATLIQAAWAAVRVKNSYLRAQFLRLRSRRGPMKAIVAVAASMLTAAYHILARQQPYADLGPQHFDQRDRAKIAKRLIRRLEDLGLQVDVRPAA

SEQ ID NO: 354211 - protein, 328 aa, unidentified
MCEFTGIDVSKEKFDVGWLRDVKTDKKKTKVFINTAVGHQQAVDWLLKNLKVPAEDIVITLEPTGVYHEALLYFLHDCGFQMLLVNPGKAKKYAESINQLHKTDKLDAITLAYYGHAQHHKLTLWQPESLEIRELKVMIRRLDALEKDLQREQNRQEATRVSLSSDRVAQSLKDMIDTLKAEIQRLQQDIDNHIDRFPELKRNRQLLESIKGIGPVMSRELVYLFASKHFKSARQAAAYLGLIPKLRESGKLKGRTMLSKIGSARLRAKLYMAAVCASTHNPDIKAQKARLLKAGKVKMQALGAAMRKLIQICFGVIKHQCEYQPQLV

SEQ ID NO: 354212 - protein, 338 aa, unidentified
MQRHIGIDLHRNRFTCCVRLENGRKYVTDWKLEDLPRFTKKLRPTDEIAVEVTGNPRLFYEAVAPHVKRVVAVDPNQFKVISHSVKKTDPNDARNLALYLEKDLLPEVRMKDKTQAQLASLTQTRDTLVKLRTALKNKVNNILSAHGANLEKEALSSEKKLQEILAMKFDPMVKRELEVIIEEIRSLNQRIAKLEKAIGEEGSKLEGHKNLTSIKGIGPLSRSILLSVIGDIDDFEDEGKLAAYFGIVPRVSNSNERERSGRITKRGSKLGRTALVQCALIAQRYSPYLKRYYEQVKARRGTGKAIIALARKLLGIIYRTLKNKWVFEDFPNFVLAEG

SEQ ID NO: 354213 - protein, 421 aa, unidentified
MEEVDEPRLLFERVAALDLGKAVLTACVRVPHPDKPGRRWQEVRECSTLTPALLALADWLRCERVQVVAMEATSDYWKPVYYLLEAEGFTCWLLNARHVKHLPGRPKTDRLDAVWLATVVERGMCRPSLVHPQPIRRLRDLTRYRRTLVREQTREKQRLEKLLEDAQIKLSSVISDIFGVSGRQMIEAMIAGQRNPRVLAQLAKGRMRPKIDVLVEALTGHFDDHHAFLAARMLNRIDALAEDIAAVHERIGDLIAPFAPQVAQLDELPGVNLIAARELIAEIGVDMTRFPTAAHLVSWAKFAPLDKKSAGKGKASSTGKGDPFLAATLGEIVAGLARTHTFLGERYRRIAKRRGKKRAIVAVGNSVLTIIWHLLTNPQARFHDLGEHFYHQHVHTKRRQRNLIRHLEALTGRKVILQPAA

SEQ ID NO: 354214 - protein, 374 aa, unidentified
MENTWRRLTSCFEQPTETVLRRPLESTIIGVDTHKHTHAAVALTALGARLGTITVPASRRGYQELEAWAGSFGPVRAYGVEGSGSYGAGLSRFLQASGHAVIEVNRPNRQLRYQHGKSDPLDAEGAARAVLSGQADARAKPGTHAVEMIRHLKVARDTAVKSRTQAMITLKALIVSAPAALREQLEGLAGKMALIRHLAALRPGTLTSPTASAKAALRALAQRWLALDAEIKAHEAHLDALTAACTPILRTAYGMSTGTAAEMLILVGDHPDRIRSEAAFAKLCGACPIPASSGKIIRHRLNRGGNRQANAALYRVVIVRMRSHPPTLAYVRRRMGEGKTKLEIIRCLKRFVAREIFGYLCGAKTLPTAPMTAS

SEQ ID NO: 354215 - protein, 452 aa, unidentified
MLWIGFTLLPLDGLIKAPTTVSLQFVNQLDTARRFIWNEVTSATSPCGSKQRHITFSGGIFMIFIGIDAAKDKHDCFIANSDGEVLCDVFTISNTLDGFNDLLSKIKSFSKDLSKTKVGLEATGHYSYNLLGFLLDTGLPTYVLNPLHTNLYRKSLSLRKTKTDKVDARTIASMLMSCQSLKPYTRALYHNEELKSLTRYRFDKVSERAKLKTSVSRLITILFPELEKLVSVVHCISIYALLSEFPSAKHIANANLTRLTNLLYSASKGHYNRDTAIRLREAARNSIGSVIPAKSLELKHTIKLIGELDDEISEIEAAIKQIVDSLGTTILTIPGIGYATAASILAEVGDFSNFETPDKILAFAGMSPSTYQSGQLSNCYAHMEKRGSKYLRFALYNATKYVCKWDSNFAAYLAKKRSEGKHYNVAISHAAKKLVRLIFALEKSRLPYMPVA

SEQ ID NO: 354216 - protein, 373 aa, unidentified
MKKPTRWVGLDVHAETIAVAVAEEDGTVRSLGTIPNERAAVERMVRKLGNKAPLRVCYEAGPCGYVLYWQLTKLGIACTVVAPTLIPVKAGDRVKTDRRDAEKLARCHRSGDLTAVWVPDAEHEALRDLVRAREAAKKDQLRARHRLGKFLLRHGKRRPQAIAAWGTRHMAWLDTVVFEHAAASDTFVDYLSEVKRAVERIARLERAVDEAVGHAPAQMRDVIAALQSLRGVAKIIAVTVAVEVGQLSRFDRPKELMGYSGLVPSEASSGGKTRRGSITKTGNSHLRRVLVEAAWSYRVRPAMYAKLRARQRGQTETIKAIAWKAQHRLHGRFRKLAARGKPQPQVVTAIARELLGFVWAIGVQVEKKRAAAA

SEQ ID NO: 354217 - protein, 372 aa, unidentified
MEKSSRTIYVGLDVHKDSIAVAYAPEARDADVVALGTIGTRQCDLDKLIRQLQSKGPAQLVFVYEAGPCGYWLYRYLTRKGFACHVVAPSLIPRKPGDRVKTDRRDAITLARLMRSGDLTSIYVPQVQDEAIRDLSRAREDAVEDLKAAKHRLKAFLLRQDIRYEGRATWTAAHLRWLSEVVCPTPAQQIVFQEYLRAVTEQHERLGRLESELHAQVKSWRLYPVVEAIQALRGVELTGAVIVIAELGDLTRFDHPSPLMNYLGLTPSEYTTGQRRRQGGITKAGNTHARRALVEGAWAYRYPAKISRHLQLRLEKLPAEVQAIAWKAQVRLCKRYRQMTARGKHVNEVVVAIAREMAAFAWAIARIVPLAN

SEQ ID NO: 354218 - protein, 433 aa, unidentified
MSKGTYRSRPVKVLDWDRVALESRGRIVVAVDVAKERQYASFMTDRKEVLVTVTWKHPEETPEFLSGCARLRALGVKVEAAMEPTGTYGDAIRAGLLDRGVEVYRVAGKRVNDSRELRDGVPSLHDAKAAQLVGWLHLEGASEPWPLRSEWEREVRAGRDMMAMWQERVQTALGRLEAKLARHWPEATQHLELTSAALHALLAEYGSPAAVAAAGMQAVKLLRKVGRSFLSEDKALALVESARSTQGLPMTPLERKYVRGLAADIVQSAKAQREAEGNLVALTREQIPREASALVGAPTAAMLVASGADPSQYKSAAAFQKAIGLNLREKSSGKEKGRLHISKRGDADVRQSLFMATLRLIKVNAVVRAWYIRKVSRDGGRVSKINAVVAVERKLALALWHVWTEAEAFDASKLFDVSRLAQELRRMGEAQAV

SEQ ID NO: 354219 - protein, 339 aa, unidentified
MTVKIVGLDLAKDVFQVHGISEAGRKIFNKKIKRVKLLAFFETLPRCIVGMEACGSAHHWGRELRKMGHDVRLMPAAYVKPYVKRGKTDAADAEAICEAVQRPTMRFVEIKSEEQQAVLAIHRSRDLIVRQRTQVVNMIRSILREFGHILPTGIEALSSFARSHGTKDQLAMPEIADGILGLMCHHLLGLNARIDGLTQLIGQHAMLDKDARRLMRMPGVGPITASAIVATIGDAHQFRTGRDLAAWLGLTPLNKSSGGKERLGRITKKGDRYIRKLLIIGMTSRALMARNKPEKADIWTAKILAEKPFRLATVAMANKSARIIWAILTKREEYRQPVV

SEQ ID NO: 354220 - protein, 383 aa, unidentified
MTNQVSRFIPRDYDVFAGLDVDKKSMAVIFTNHDGPLRALRMAHSAKPLLNYVRKHFPGQRVAFAYEAGPTGFGLHDELVTEDYTCLVVAPSKVPRASDERVKTNRLDGRKLSENLRGGQLHSIHVPTRAYRDLRHLVQLRDTHVRQLSASKLRIKSLLLYEAIPFPDPQEKWTARAMRELQTLPCSETVRFKLDDLLHTLHFHFQAAAAATKQIRRYCWQDAELQQSIDLLLSLPGIGWIVGSHLVARLGDPQQIKNGKQIAGFLGIVSSEHSTGEKQNRGEITRTGDSRLRNKLIQSAWTAIKKDPELRAFYRRIYQRHPKKVAARKAIVAVARKLTQRIYVVLKEQRPYVMRLDSSIAPLTAEETVGPRERLDGAQNDQL

SEQ ID NO: 354221 - protein, 321 aa, unidentified
MAMPVQPLLVGIDVSKAELLICQDPAAPTAIVDNTPQAIDRWLDSLPDGPVCLAVEATNTFHLALIECAHDRGHTVYVIDGLRLNRYRQSIGGRAKTDATDARLLWRYLARERKDLRPWQPPSAGYRAIQRLLRRRAVLVRARTALEQSLKELPDFQEAAKALRQQFDQLDTALLQQLRNLARDAGWQEEIARCQAIEGVGPLTATALVMAYHRGQFRNADAFVAFIGLDVRVRDSGTMRGRRKLTKQGDPELRRLLHLAAMQACRSTSWTAFYQRYLARGLSKIQVLVILARKISRVAFALLKNQSTYQPNMRLETCPVT

SEQ ID NO: 354222 - protein, 417 aa, unidentified
MFWDKLAEKRSAIKSDMLVVGVDIGKYIHVARARFPDGTFTGPLPFASDYQGFTRFLTHVVEWQHQAVCPDVIIGLESTGVYWESLAYWLADRHYRVVQVNPLHVHRSKELLDNTPTKTDDKDALLIADLVAQGKYLSFVMPRGVFAELRQLASVRARLAVQRTTQINCLHDLVSLVFPEFATLYRDLSTRVARRLLYHFSTPQAVCAHTVAAMARRARKAGGIRLHEDKLALLKERAQTGVGIKEGQATLVMALRDTLEALDALDRRIAGFEAQMASFLSQVEESRYLLSLHGVGTVSAAVILGETGGLSRYGSAEAVLKLAGLNLCEISSGLHKGSRHISRRGRPLLRQTLYFIALHHTQEGTPLYEHYARMVQRGVPKPKALVALSCRLMRIIYALVRDQRCFSNEAPQRTQAA

SEQ ID NO: 354223 - protein, 393 aa, unidentified
MNKIIYIGMDVHSSNFTLCSFEPGYGMTEDKIFGQVQFKEDLIKNTEKYINNLKSQRKDIDIVCGYEAGYLGYVPCRELTKAGINCKILAPSTMAVQKGGKKQKNDFRDALDIARCLASGSYKAVNIPDIEDEDVRDYIRMRDDHQTALKQIKQRLNAFCLRHGFQYDKSKWTLAHIKWIKHLECTLKQKEIINEYLATYEALKSKLEAFDVRIEDFASNERYAEKVKKLVCIKGIETNTAMSFISDVGDFNRFRTAEQFAGYIGLVPGEHSSGDKVCRTGITKSGNTHLRRIAVECCNSYRRGNVGQKSAALKKRQKNVPSEVINYADKASVRCQRKYFRMVNKGKNPNIAVTAVAREFCCFIWGMMTSNYEYSNNDVRELMPANGLIRVNL

SEQ ID NO: 354224 - protein, 412 aa, unidentified
MIYCGIDWAERTHDVALVDDSGRLLAKRHITDDAVGYKILLDLLAEYGDTEENPIPVAIEISRGLLVACLRATGRPIYAINPMAAARYRDRHSVSRKKSDHLDAMVLANILRTDAVAHRELPADSELAQAIAVLARAQQDAVWDRTQAANKLSSHLREYFPGFLAAVGVRREGVCHPIARVLLAAAPTPGQAARLTRAQLRSLLKKAGRKNTVDAEAERLQTALRASQMRQLPLVEEAMGRQTLALLRQLDAACTSADDLADAAMESFEKHPDAEIITGFPGLSALSGARVFAEIGDDRSRFADAKSLKAYAGSVPITRASGKSVAVLARRVKNQRLAGVGYVWAFAAMAHSDGARAHYDRRREAGDRHTAAQRNLFNRMLGCLHHCPTHRVHYSEAVAFPAPSETQHDEAA

SEQ ID NO: 354225 - protein, 410 aa, unidentified
MEIMIACCAGLDVHKDSVEACVRSVEQGHRASQQTRHWGTTTRELLEMAEWLKNEGVTHVAMESTGVYWKPIFNVLEADFQVLLANARMIKHVPGRKTDVADCQWIAQLLQHGLLKGSFIPPLWQRELRDLTRQRAQLTDEASRISNRIQKVLEDANVKLGSVASNVVGVSGRLILEAIIAGQDDPAQLADLARRRLRSKIPQLEQALFGRLTAHHRWMLRLLMDQLQTTEQFIARLDERIAQLARPQQPVLEKLDAIPGVDRRLAEVLIAEIGPDMTPFPSDAHLASWAGLCPGNNESAGKRKSGKTTKGSRWLRQAMVQAAWAASHKKNSYFQAHAHNLMRRRGRKRGLVAVAHSLLLVIYHMLKRGTEYYELGADFLDRLREQYLVRFHLKRLKQLGLSVSVAPTIA

SEQ ID NO: 354226 - protein, 449 aa, unidentified
MSDRSGVSRGDRNRNARLARLREAVPLSNAIAGIDLADSKQMVVVTDHESRVLARRTFRRRAWELGMALDWAAARAAAAGFAGVTVAVEPTGHRWRVVGQLAGERRMPFVCVQPLMSAWARRAEDLTFDKTDDKDAVLIARLAGQLRCYLPEPADAIWGRLRQLGIRRARLVADQVAQVQQMRDLLECAWPAVLDAARQPFKSTTWHAALTVALARADGGDLARVTWLGRRRFDTAVRRQVARWDAVHPWQKIIDAVLAACADPAGVTELRHGALERVQLLLADWRDTRARLADTEQRMVTVLDELGLTSLVTSITGLSAVGAASILAETGDPARFTTGRALVKHAGLAPRQKSSGNYTGRTRTTGQGRPALRLAAWRAVWGALKSNPVYAARFAYLTSREHNPLSTGQAHAAIAAALLRHLHAVITTGQRWDPAIAAGGKPNQTLIAA

SEQ ID NO: 354227 - protein, 428 aa, unidentified
MNCTQNEKLNQVTPHTLIVGVDIAKFKHIARAQDDRGKILGKALTFTNTKEGFEAFFAWLEEMQHKHEKSDVLVGMEPTGHYWLNLAYTLKERLVSFGVVNPLHVKRSKELDDNSPTKNDIKDARVIAQLIKDGRFSYPRLPMDQDAEVKAGITIRNQIVGDLQALQGRIHNWLDKYFPEFLTVFKDWSGKMALATLEHIPLPVQLNQTTPERVAEIWSTYGGVQRPSHKRIQRLQEAAARSVGLTVGLQMAQREIATNIKRYKMLKEELHALEKQLEDLVLTLLGIAEMLTVPGVGMVTVIELYSELGDIKNFENPRQILKYAGLNLRESSSGKHKGQTRITKRGRAKLKALLFRTVMPLVRHNRAFKALHQYYTTRQENPLRKKQSLIVLCGKLVRVLHTVGQKQCPFDEERMIRDIPHLSLALGA

SEQ ID NO: 354228 - protein, 322 aa, unidentified
MHSDCTPTPTVWVGVDIAKEHVDFFVLNRKDNPRGRRPQRAAALAELARELVELGVTHALLEATGGLERLAWAAFEAAGILVTVAPPSRVRHFARAAGVEAKTDQLDAEVAARFGEALSPEPTPLSSPALLRYRELLRQLSYFVKQRAQLRTRRHSVHEALVRKSLDRMIKAFGGEIEKLEKAVGAALAKLPAAAAQAKRLQQAGGVGPKTAWALTAELPELGTLTRGQAAALAGLAPRARDSGSHRGRRTIGGGRGRLRTALYMAARTAVRVDRRLRAFYQRLQAAGKPKQLGLIAVARRLLVMLNAMIRDGSDWRAAPVA

SEQ ID NO: 354229 - protein, 341 aa, unidentified
MSIIVIGIDLAKNIFAVHGVNENGKAELVKPKVSRDQLLPLIANLPPCTIGMEACSGAHHWARLFRQHGHSVKLVAPKFVTPYRMSGRRGKNDAADAAAICETITRPHMRFVPIKEQHQQIILCLHRTRQGFVEERTATYNRLRGLISEFGIVLPQKVTGLRQHLGRHLDDLPGYSKQCINDLLAHADQLDLRIADYDKIIAQAAREDARSRRLMERPGIGPIGASALLASIGNGHDFKNGRQVAAWLGITPGQHSSGGKARLGHITKAGDSYLRSLLVMGARAVLNSLGDKQDYFSCWARSLVERRGYWRAVVAIAAKNARVAWAVLHYGEAFRLNKADA

SEQ ID NO: 354230 - protein, 352 aa, unidentified
MATIEFDELMSIGIDIGKDTFHLVGFDHDGQRVLRKQIKRLALIATFEKLPRCVVGMEACLSAHFVSRTLRKMGFEPRIIPAIYVKPFNKGQKNDYNDAEAIAEAALRPNLKAVSEKTQDQLDLQALHRVRSRLVSRRTATINQIRAFLIEQGITVRKGLRALKNSFERILEERKDEISPRMGSILIGLYGDWMWMDDRIDKVSKEIEEISRTEENCVNVMTIPGIGPMISTAMVAAVGEGEAFDRGRDFAAWVGLVPRQYSTGGRTILGRISKRGSRYLRMLFVQAAKVIMMRPHRWPDFSFGEWLISASERMHRNKAAVALANKLARMAWSILRHKTAFDAPRDEVAIGV

SEQ ID NO: 354231 - protein, 377 aa, unidentified
MTQFPESTSNEPSIHAALELSKNSWLLALQVPGRDNPSHHRIKGGDAEGLMAKLEAARGRVAKVTGRMPKVTLCYEAGYDGFWLARFLERHGIVCLVMDPASLRVSRRARRVKTDRIDVESILHTLIAWCRGERQVCSMVVIPSVEEEDLRRCHRERDRLIRERTAHINRIKGLLFGQGIRGINVKARCKTLKPAALVTGDGRPLPERLGREITREIERLAQLQAQIVEIEGERDKAPTPCVATERKRHDLLRLKGLGPALSATLTREVYYRQFANRRQVASYIGITPSPYDSGDGRRSQGISKAGNRLARVAMVEAAWLWLRHQPDSALTRWFHQRTAGQSKRVRCIMIVALARKLAIALWRYLETGLIPEGAVVK

SEQ ID NO: 354232 - protein, 412 aa, unidentified
MEVLYPRCCGLDVHKKTVVACVLITEAGKAIRKEIRTFPTMSADLLGLADWLRECGCTHVAMESTGVYWRPIYNLLEDDFTLLVVNAQHIKAVPGRKTDVADSEWIADLLRHGLLRASFIPPRPQRELRDLTRYRTSLRYERVAEVNRLQKILEGANIKLASVVSDITGKSGHAILLALVAGTTDAAALAHLAYGTLRGKIPQLERALAGQFSAHQRFLVAHPLAHIDALDQLMDQLSAEITARLAPAAVEVTLLQTLPGVGQRTAEVIVAEIGTDMTRFPSAGHLASWVGLCPGNQESAGKHQSGRTRKGSPWLRSALVEAAQSAGRMKRQPTYLAAQYRRLAARRGAKRAAVAAAHSLVVMIYHMLSRHEPYHDLGGGFFEEREPHERERRLARHLESLGYTVTPPAAVA

SEQ ID NO: 354233 - protein, 343 aa, unidentified
MQAITTIGLDIAKSVFQVHGVDAEGKAMLRRQLKRRYVLAFFQKLPSCLIGIEACASSHYWSRELQALGHSVRLMPPAYVKPYVKRQKNDMADAEAICEAVTRANMRFVPIKTPEQQSGLMLHRTRHLFIRQQTSVINAIRAHLAEFGVTAPVGRKGIEELLRVIADPSDKRVPDVVRACLAALGSQLISLKKQILDFDRMIMAWHRSDQTSKRLNCIPGVGPLLATALVASVADPKVFRSGRNFSAWIGLVPKQHSSGGRARLGSISKKGDRYLRSLFVAGAFAVIRYAKLHGTKYRPWVAALLTRRPTKVAAIALANKLARMAWAMMATGERYNYPASLRV

SEQ ID NO: 354234 - protein, 397 aa, unidentified
MYIVGIDIAKRKHEAAVIDGEGAVIIKPFSFTNNCSGYNRLLAMLAKAKLPLDEVSFAMEATGHYWLALFTRLQKEGFRVQVINPVQTNSIRSFYIRQAKTDPRDALLIAEVIRFGHFSESTLHPENIYELRELCRGRHAIVSMQADVKRKVVALLDQVFPEYETAFTNLFGDTSMAILQTCPTPKELSEMPLEELCHLIEVSSHKRFRMAKARELQELARNSFGFAMAGDVFSTMIRLYAKHLDFLKQQVREMDRKIAEIMETLDTPITTITGIGPTLGAYILSEIGDISRFSSAAKLAAYAGIDPTMRQSGEYNGVRNRMSKRGSPYLRHAIWLAASSAVLHDPALKLYFQKKRDEGKPYMASVGHACRKMVSIIYAVMRDNKAYTPYIPNEISA

SEQ ID NO: 354235 - protein, 340 aa, unidentified
MNTMTLLGIDIGKHSFHLHGQDSKGHQVLRKKTNRGQLLSTLAQLPACTVVMESCGGAHWLARQIGALGHEVKLIAPQYVKPFVKGNKNDFIDAEAICEAASRPAMRFCSIKTAEQQTLSALHRVRESLIGHRTVATNQIHGFLLEFGISLPIGVTALHRVPALLDDPQHPVPVRLKGVVMRLHRQIQQLSDEIKDIESDLKQQLKEDDAGSRLQSIPGIGPITASAVLADVGDASNYRSGRDFAASLGLVPKQYSTGGKTVLQGISKRGDKHIRQLLVQGARALMQHIDKREDALGPWVRELLTRRHANVVACALANKLARIVWAVLAKGGQYAPHPNV

SEQ ID NO: 354236 - protein, 353 aa, unidentified
MKTYYVGMDVHRASIVIVVLNGAGKVVMQSVIETGAERVRGYLKQLRGQVYVTFEEGTQAHWLHEVVRPLVTEVVVCDPRHNKLMQSGNKSDRVDAQRLAELLRLGSLKAVYHGDNGMQCLKELVRSYDCLVSDTTRVMNRLKAIYRGRAIGCAGHNIYRPDRREQWLAKLTERGAKQRASFLYQQLAALKPLRHEAKRMMVKEARRQRAYPWLMSVPQFGSVSVAQLLAIVSTPHRFRSKRQFWTYIGLAVVTRSTADHEVVNGVLRRRQRPVSTRGLNRNHNHVLKRVFKNAATGACHSGPFKAAYDLRVKQGMVPSLARLTVARQLAATTLALWKSGAQFNPERMTQPAA

SEQ ID NO: 354237 - protein, 312 aa, unidentified
MDAMYVGIDVSKDWLDVAVHPSGESFVVSRTGGGIDELIERLKSLSIKLVAVEATGGFETVVAAGLAGARLPVVVVNPAQVRAFAQALGRRAKTDPIDAAVIAHFVEATKPQLRQLPDATSQLLAELVARRRQIVEMIAAESQRARHISVPRLKKGIARLHKALEKELSELDDDISDHVRGSPAWAEKEDLLASVPGIGPTIARTLIAELPELGSLDRRQIAALAGLAPWTRQSGHWRGKSFIGGGRSSVRRVLFMGAMVAARFNPQLKQFRDRLVVAGKPKLVAIIAVARKLLTILNAILRDKTPWQPKNA

SEQ ID NO: 354238 - protein, 338 aa, unidentified
MTSKISILAIDLAKGSFQACAVGPDGVVVFNRAVSRTRLATLLADHPACIVAMEACATSHHWGRFAQSHGHEVRLVPAAYVKPFVKRQKNDRADAEAIAEAAMRPTMRFVAVKSAETQGRAVAFRTHQCMVRQRTQLINALRGHLAEFGLVAPKGPASLKLLENALADESTDLPEAVRHMGSIYSEQIARLTEVIDQLSDELENSSKTDEQLRRLCTIPGIGPVTAGAVAAFAPDLDTFDSGRNFAAWLGLVPRQRSTGGKARLGSVSKMGQTDIRRLLIVGAMSVIRWVVRKGGSSNRWLAALVARKPKMVAAVALANKMARMIWALSTKQENYRMA

SEQ ID NO: 354239 - protein, 359 aa, unidentified
MKGARPWLRDPSSVIAVIGIDIGKNTFHVVGLDGRGTIVRRQKWSRGQVEARLANMPPCLIGMEACVGAHHLSRRLKLLGHDARLMPAKYVRPYSKGQKNDFRDAEAIAEAVQRPTMKFVATKSADQLDLQALHRVRERLVGQRTGLSNQIRAFLLERGVAVRQGLRFLRAELPTILAKRCDVLSARMIRLIEDLAGDWRRLDERVESLSREIDGLARQDAGCERLMSVPGIGPIISSAMVAAIGTGDAFDKGRDFAAWLGLVPRQISTGDRTILGKISKCGNRYLRALFVQAAWVVLIKPKSWERYGLKPWIEAAKRRLHHNVLAIALANKLARIAWSILARGRGFEARSIATAAQPV

SEQ ID NO: 354240 - protein, 463 aa, unidentified
MPKPVSKKASSRRRSRVAKANQCQPILRPHAAGIDVGATELYVAVPIDSDAEPVRTFGTFTEDLHALADWLVGCGVRTVALESTGVYWIPVFQILEERDMEVCLVNAKHVKNVPGRKTDVTDCQWLQYLHSVGLLSASFRPPAQVCALRAICRQRDMLVHLTSCHVQHMQKALTQMNIQLANVISDLTGKTGLAIVDAILQGERDGAKLARLRDHRIKASEKTVAKSLVGDWKQEHLFALRQARASYAHYQSQIAECDAEIQAHLHQFDSKVDVAAHPLPSSAKYIRKQSNEAGFDLRKELYRILGVDLTQVPGIQTTTVSIFLSEVGPCLDRFASAKHFASWLGLCPDNRITGGRVLSASTRDVKSRTATALRMAAQALRQSQSVLGDYFRRMKARLGTPEAITAAAHKLARILYCLVKNRCPYDASIFAAEEELHRQRREKKLRKQAALFGFQLTPIEAVA

SEQ ID NO: 354241 - protein, 347 aa, unidentified
MRFYTQTHKFYCGIDLHASTMYLCIVNHEGEIMAHKNLPTSPEEFLKLIEPYREDIVVGVECVFLWYWLADLCANEGIPFILGHALYMKAIHGGKAKNDKVDSEKIVRLIRGGMFPIAYVYPRKMRADRDLLRRRCFFVRKRAELLAHIQNTNSQYNLEPIGKRLDRKKNREGVGEHFPIPGVRKSVEADIQLLDYYDIVIKDLENYIKRMTKIHNPHAYYLLQSVDGIGPILAMTIIYEIEDIKRFPRVQNFSSYARLVKCARGSANKIYGFGGGKIGNAHLKWAFSEATALLLRGNPRGQQYLARLEKKHGKGKALSIIGARLGRAVYFMLQRGEPFDREKFYAS

SEQ ID NO: 354242 - protein, 316 aa, unidentified
MTEAGGFVGIDVAKAELEVVVRPSGARWTVTNNPAGLAQLQERLQASAPSLIVLEATGGYEVAVVAALATAALPVVVLNARQVRDFARATGRLAKTDAIDAGVLGHFAEVVRPPVRPLPDAMTQSLQAWLMRRRQLVEMLLAEEQRRSRAPRPIQRHIDQHVRWLRAQLGAVEKDLARTLRESPVWREKDNLLRSVPGVGPVLTTTLLGDVPELGQLNRKQIAALIGVAPLNRDSGTYRGRRAVWGGRARVRATLYMATLTAARYNPVIRAFYERLVAAGKPKKVALTACMRKLLTILNAMIARRTAWKPPAAVSA

SEQ ID NO: 354243 - protein, 408 aa, unidentified
MQLPPMHKRAMALDVHQAKISACAIVEHDDGRVEVTMREFGAFKRDRRALAQWALEIRPEVVVMESTGVYWKSPFAALESVGITAWVVNARHVKAVPGRKTDIADAQWLATLARAGLLRASFIPPLLMRQLRLVARQRQKLVGMCSAEKNRLHKVLVDAGMRINVVVSDIHGTSARAMVKALIADKPMHEVLDCKGRLRASREELFEALDTEQFSAVHRFVADEIVQHIEQIEQRIARLDAYLLEGLKAYGPQLNLLQTIPGIDLQGAAMLLVEIGADMSPFGSAERLASWVGICPGNNESAGKRKTGKIRKGNAWVRRLLCEFAQAAARTRCALRAKFEALAIRKGHKKSIVALAHKMLRTVYAMLSTGAHYQDKTVDYEALSVARNAPRWIKMLRKHGFIATPAAA

SEQ ID NO: 354244 - protein, 429 aa, unidentified
MGCAEGRAEMLEVSPDDGVIIERVAALDVGKAEVVCCVRVPGPAGRRLQEVRTWTTMTRSLSGLGDWLHGFGVTRVVMEATSDYWKSPFYLLEAAGFEVWLVNARDVKHLPGRPKTDKLDAVWLCKVAERQMLRPSFVPPEPIRRLRDLTRYRVDLVGERGREKNRVEKLLEDAGIKMSVVASDIFGVSGRAMMAALIAGERDPFMLAGMARTAMRKKIPELRQAFEGRFNEHHAFLLSRMLAHVDRLDADIAAVEDRIEEVIAPFADAAARLDQIPGVGPVAAWVLIAEIGTDMTRFPTAAHLCSWAKFSPGVKESAGRTLGRGSTGHGNRYLARVLGEAAVGTRQTDTFLGERYRRIVRRRGKKKAAVAVGRSILVIVWHLLNDPAAEFVDLGPDHYDQRRGTQRAIRSHIRQLQALGYQVILQPAA

SEQ ID NO: 354245 - protein, 343 aa, unidentified
MEYFAGIDVSLEQSSVCVVDGAGKIVREAKVASEPEALVGFFRGLETGVTRIGLEAGPLSQWLYAGLVAAGYEVVLLETRHVKAALSAMVIKTDRKDARGIAQLLRMGWFRPVHAKSPAAQEVRALLVARKLLQTKLLDVEFSIRGILRGFGLKMGEVSKGRFATRVRELAAGHAMLERITEPMLRAREALRTEYAKLHGEMLAIVKPDPVCRRLMTVPGVGALVAITFKSAVDNPGRFARSRVLGAHFGLTPRKYQSGETDVTGAISRVGDAMVRMALYEAAHIMLSHVTRFSSLKRWALDVARRRGLKRAKVALARKLATVLHRMWVDGTSFRWGKQAASV

SEQ ID NO: 354246 - protein, 344 aa, unidentified
MENYAGIDVSLELSSVCVVDAQGKVLREAKVASEPDALVEFFETLGFAVKQIGLEAGPLSQWLHAGLREAGFETVLLETRHVKAALSAMTVKTDRKDARGIAQLIRMGWFQPVHAKSVGAQEIRALLIARKQLLGRLIDVELSIRGILRGFGLKVGPVTRRNFEARIRELVAGQATLERIAGAMLSARSALKAEYGRLHKAVLATVRDDAVCSRLMTVPGVGPLVAITYKSAIDDPRRIAKSKAAGALFGLTPKKYQSGEKDITGGITLAGDEMVRTVLYEAANVLLSRITRFSKLKRWGMDVAKRRGSKRAKVALARKLAVILHRIWVDGTTYRWTDAGPIAA

SEQ ID NO: 354247 - protein, 408 aa, unidentified
MSKTCGIDWSERHHDVAIVDDQARVVGRGRVSDDAAGFTRLLELLAEHRDGEDGPIEIAIETDKGLFVAGLFAAGFTVFAINPRAVARYRERYGQAGGKSDPGDAGVLANILRTDRHVHRPLPADSELVRAVKTCARQHQEAIWARQQAMNRLRSLLHDYYPQALQAFPNLAHRAAASVLRAVPTPQTAQRLTLNRVVALLKKAGRRNDPGLAETIRTTLRAPALRQPAPIEHALGVAAVGLIDVITAMSDAITALEAELATVFDEHGQAAIITSQPGLGPVLGARVLGELGDDPHRFTDTAGLRSFAGTAPITRASGRSRVVTSRRICNRRLGDACHWWAFAAITKSPGARAHYDHRRAAGDTHNAALRNLANKLLAKLWHCLQTGTLYNEATAWPAPTDTPEQAAA

SEQ ID NO: 354248 - protein, 377 aa, unidentified
MSKIRFVGLDVHAETIAVAVAEVGGEVRSLGIIPNRLESIRKLVGKLGPVQHLKACYEAGPTGYVLYWQLTQLGVACKVIAPTLVPTKAGDRVKTDRRDAEKLARCYRAGELTSVWVPDAAHEALRDLVRAREAAKKDQLRARHRLGKFLLRHGQRPTDAGKAWTKKYLEWIKTHVRFDQPALETTLAHYLHEVEHTAEQILKLEKAIDEAVAQASPEVRSVIEALQSLRGVAQMTAATIVCELGSLSRFESPRQLMGYSGLVSREHSSGNRIRRGAITKTGNAHLRRVLVEAAWAYQHRPNVTGFLLRRQKSLALSDEVKQIAWKAQYRLHKRYQALALHGKSKNQIVTALGRELLGFVWAIAVHTEAQCKLVKAA

SEQ ID NO: 354249 - protein, 400 aa, unidentified
MLSIGIDVSKGKSTVCGMKPGGEIVYTPFEVQHTREGMSELVSLLRSSGEEVRAVLESTGSYHCPVVAALLENGIFVSVVNSLRMKRFCSQSIHKVKTDRIDAMQIALYGLAYWQELQPARLPEDTYRELQLLARQYYQMTSLLIKAKVDFNALCDQVLPGMQELMSDHAGRHKLSDFVLRYCHTTHILEMGETRFRKDYCKWAEKKGYRNCERMAALIFATAQNGIPVLPNAPSTQIVITEAIRVLHTVEASRDAILTQMQALAKTLPEYSLVREMPCIGDTLAPRLIAEIGDVRRFHSKRALIAYAGIDAPPYQSGKFCANNRHISKRGNRYLRKTGYEVMQSYVMHKPANDPIFTFIEKKRGEGKSGKLAMVAGLNKFLRVYYGKVTELYRSLPAIE

SEQ ID NO: 354250 - protein, 337 aa, unidentified
MKYCGIDLHSSNSVVVVSDEVDRVVVQRRVPNELGRILDLLAPYGEELAGVVVESTYNWYWLVDGLQAAGYPVQLANTAAIKCYEGLKHRDDEADAAYLAQLLRLGILPTGYLCPAAERALRDLARKRLQLGRSRTSHILAVENILARHLGARMTSQAIKRLSGSALAELGLADDVVRALGANVAVIQTLNAEIGKLEARLRQDMRSRPEYGLLASAPGIGQTLAPIILLELGTIERFAQVGDFASYARCVDSTHWSNGKKKGEGNVKNGNKYLAWAFIEAANFARRYCPEAKRFYERKKANTNGIVATKALAHKLARACYHMLKTRQPFDVKRCFG

SEQ ID NO: 354251 - protein, 386 aa, unidentified
MKTVAGLDVHKDSVYLCILRENGEKIERVYGVLTPQLDSMRDFMAENEVSEVAMESTSVYWIPIWRVLVDSFELKLVNPYFIRQLPGRKSDVKDAQWIAECVMKELIRGSFIPPPLVQQLRLYDRRIFELNAELVRKYSKIDAILQRCNIRLSNYVSNTDCKSYKNVVKRISEGVTSPQELLMLVHKRIINKHGEDTILAALTGVVSEAEIDMLAQYVAESALLEDNKNKCIEKMREICNREFEEQMKNLQTIPGVSERSALTVLAEIGPDVNAFPSAKHLVSWCGFNPRNDESNKKIKSNKITHGNRFIRIASVQCAWAASRTKDCYFSKFYAFHTQVRKKFKLKVVVAVARKILVCIWHILKFNVSYKDFEPQKSVAKDCTQLA

SEQ ID NO: 354252 - protein, 402 aa, unidentified
MQIIRPNAIRIKRFRELKESLRTERRRLLVGIDIAKAQHVAQVRLAHTRVVDPRLSIPNTGPGFAAFWAHLARRQAETGAPEIVCALEPTGTYHTALAQCLEAHGADVVLVSPAVAHLNRRTQDGTWDKSDPKDAANLCDLLEQGKVLFYALPEGAAGELRPLVRLLRQARTERAACRARWRNTLRPALGPAGEPLPAGVYAALPALLQAWEPAGTSARAGAPLGPGLAAACTDLAARVSAVQQRIAALEAACVQVARALPAFTLLQTIPGVGPTVAALLVAEIGDVAWFSQCSQLRKLAGLDIVRLQSGQWAGTGRISRNGRPLLRWALYQAALGASRTAGGRAAHAARLAKRAGDRHAGLKAMVEGAAAILRTVWGVWRSGVPYDPTRAPGRRGSRSAAA

SEQ ID NO: 354253 - protein, 361 aa, unidentified
MKAYHIGVDMHKRDSQIGVIDGKGRKLETRKLSNDPEALRDYLSAFPKGTPVTLEATTGYEWMCDLLTEMEFQVLLANPRKVRLIAESTIKTDTIDAWTLAQLERVNFLPTAYLPPEEIRATRELLRHRLTLVCFRKGVKNRIHAVLTKRGVLSYPVKDLFGKAGREFLSSLDLPPVYRMEVDSYLALIDQINVFIAQRERDIKKQVTQENPDAQLLMTIPGIASFSALLLVSEIGTISRFATVRKLISYAGLTSTLRESSNISHQGHLKKDSNKYIRWILIEAVTTAIKHDPGLYAFYRKILVRKGKLKARVAVAHKLLIAIYFMLKQQKPYHPKSLYGKSSRVSPYSLSGHRSSGRPLE

SEQ ID NO: 354254 - protein, 337 aa, unidentified
MTIIRIGLDIAKHVFQVHGVDENEVTVLRRQLRRSEMKKFFNKLAPTRIGLEACGASHYWARLLRVLGHEVVLLPPQYIKPYVKRGKDDANDAEAICEAMSRPGMRFVPIKSAESQAELMPLGGRDLLIKQRTAVINTIRGYAAEFGVIATKGPVKVAELLQQAHAEEASVPALALDMLRLLAAQLDALDAKLKLIETWLMALHRENPVSQCLASQPGIGPIGAVSFALRVTDPKSFRSGRHFAAWLGLTPKDNSSGGKRRQGRISRQGNEALRKLVVLGATAVIRFAKPGRASPWLLNLLARKPKKLAAIALANKMARTLWAMMKSGEVYRRPLPV

SEQ ID NO: 354255 - protein, 404 aa, unidentified
MKVTYQTCCGVDVHKSFLVATIVKTTGGIEPSYQKKRFSTFNNSILEFKQWLLDNDCHDVCMESTGKYWVPVFNLLEDDINVVIANPKWVKAVKGNKDDTKDSKWIGDLFRLGLVKGSYIPCKKVRILREYTRYRYKLVSCRSSEKNRYQNALTVCNVALDSVVSDIFGKSSTSIIDYLLEQSGSSINHEEIASKLLRSLKSKEDAVIESVEGYQMTDAQKYRMRLVRAHMDYITAEINDVDKMIENMISSNTDFENAVQFLCTIPGVKRDSAITIISEIGTDMSQFSSSKRLCCWAGLTPGSNESAGKKKSVRITRAGVYLKPALVQCAHAAVKSDKSPYYKKKYESLVKRRGKKRAIIAIARMILTAIYQMLSTGEQWNPSDLYKIDMPVALVEKQKAKAIK

SEQ ID NO: 354256 - protein, 358 aa, unidentified
MNICGIDIHKSFLQIAVIDSNGKIVYQERCRYSLIDIILLIAKLAKMRCREIAMESTGCFWIPLYYEFAGRGFKTVLANPSSTKSFGSKTDMLDAVRIARRHRAGALIKSHVPRDRVKITFRGISRLRRRLKEDRNRVLNRIHRLLTISGVWLDRFVRPNTSRWFRMLEMLASGKSLGEIFGLNIGYEYSCMRDRLDCYEANILGQLLSLARRIDEICSFLSKMAESLAEKLYGEEYSLIQTVPGIGRTLAYMILAEIDDIRRFPSARHFKSYCGLSPSLRESGGKARLGRCRHGNPYLRYAFYQAAVVAIRVDVGLKRFYDRLRARGKHHKVALMAVAGKLAVRTWHILCNNEKYIA

SEQ ID NO: 354257 - protein, 344 aa, unidentified
MTYYAGIDVSLRFVNICVVDDDGELVAETKLPSDVQEIIAYLDELEYSIDIVGLEAGTLAQYLTYGLQSAGFDVVCMEARQVKAALSAMRNKTDKHDARGIAQLLRSGWYSQVHIKSMESHHIRMLLTSRRAVLDKCIDLENEIRGLFKIFGIKLPPKLGHGAFDRTVRAVIEADEKLSHALLPLLDARLVLYKTFRVLDNRTRHLAWGDEVCELLMTAPGVGYITALTFKAGVDDPSRFKRSRTVAAHFGLTPRRLQSGEMDIEGRISKSGDAEVRRSLYVAANSVLTRSSRWSSLKAWGMKLKKNRGHKKAVVAVARKLAVILHRLWIEETQFQWGTEGVRS

SEQ ID NO: 354258 - protein, 409 aa, unidentified
MDVTITRVAGLDVHQASVVATVRMPDGAGGRTMVTATFGTMTPDLVALRDWLQRYQVTHVALESTGVYWKPVYYMLEDGFTLLLINMLALKHVPGRKTDVKDSEWLAQLLECGLLRASFVPPPAIRELRDLTRYRTQQVRDRAQEVNRLCKVLEDAGLKLTTVMSDIMGASGRAMLTALLEGTTDPTLLADLARGRLRQKLPLLQRALAGQFRSHHAFLIRQILTKIDFLEETISQLTDEVDQRLRPFEPILAALDTIPGVDRIGAMTLVAETGADMTRFATAGHLCSWAAVCPGHNESAGKRRSGRTRQGNRYLRGALIQAGLGAMRTKDSALQAMYYRVKRQRGHKKAVVAVAHQILEIAYYLMRDGVTYRELGPDYFTARSKDRAVRRHVKQLEALGFHVTIEKAA

SEQ ID NO: 354259 - protein, 308 aa, unidentified
MPQAVIGCDLSRALIDICELPSGRIGQIANTPDAIAAWLDTLDHDVRVVFEATSGCDGELIAALAMRSHPFSRVNPRQAREFARATGTLAKTDRVDARVLAQMGAALNLPATIPLSPARSHLADFLRRRRQLVDMRKAEKLHRHSAGQPDIAQAIEAMIDLLGQQIAQLDRQIAGFIAQDHALSEQARLLTAVPGIGPTVLATLLGELPELGTLCRRKIASLAGLAPHARESGTWRGARRIWGGRRKVREALYIAALNASRRIPVLTAMRDRMRAKGKAPKTILIAVARQLLVILNAMIRKRQPIALA

SEQ ID NO: 354260 - protein, 402 aa, unidentified
MNAVGIDVSKGKSMVAIMRPFGEIVSTPFEIKHTTSDIHSLVELINSVEGESRIVMEHTGRYYEVLAHQLSEANLFVSTINPKLIKDFDNDSLRKVKSDKADAVKIARYALDKWQNLKQYSVMDELRNQLKTMNRQFGFYMKHKTAMKNNLISILDQTYPGVNTYFDSPARSDGSQKWVDFASTYWHVDCVRKMSLNAFIDHYQNWCKRKKYNFSQSKAEEIYGKAKELVPVLPKDAITKLIIKQAVDQLNSASTTVESLRTLMNETASKLPEYPVVMAMKGVGTSLGPQLMAEIGDVSRFTHKSAITAFAGVDPGVNESGSYEQKSVPTSKRGSSDLRKTLFQVMDVLIKTHPQDDPVYQFLDKKRAQGKPYYVYMTAGANKFLRIYYGRVKEYLSSLPES

SEQ ID NO: 354261 - protein, 369 aa, unidentified
MLTVGLDVHFRKGSLCILDSNGKIAGQRQVHGHWDKVVEELGRLKEPFQICYEASLGYGHLYEQIGKLPKAKKTVVAHPGQLRLIFKSRKKNDRVDSQKLAKLLYLDQVPAVHVPSQEVRSWRALIEWRQKILGRRVMVKNQIRSLLRSCGIVPLKGNRLWTNKGIEWLCLQTFPTVYEALRRDMLVSEFYEHQQRMVQVEEALFKIAAGHPGMAVLQSIPGVGPRTAEAFLAYVDDARRFGHGRDVGAYFGLVPCQDASADKNRLGHITREGPSTVRKLLTEAAWQGTLRSQRIKGHFAKVSGGDKQRRKIALVATARWLSTVMIAMLKSGECWRAELPAAKTAIEAATKQSVQKEPAAIESTAPAGG

SEQ ID NO: 354262 - protein, 327 aa, unidentified
MRQAKSLTEKAKTTVAFDVCKAALDVHIRVDGKAFQVPNTYEGFDQIALVLADYDVSLVLMESTGGYEDAAACNFQSLGYDVAVINPRHGRNFAMAMGKFAKTDRIDAAILADFAAVIDSRSDRARFIKPPTDEERKFLSQMVARRRQVVDLLSTEKQRLSHADDYAKQSINKVVAFIESQLDEINKDVSFYLKKNYSGLSKMLSEIPGIGELSVGLLVGDVPELGQIGNRQLSAVIGVAPFNHDSGKMRGKRCISGGRQNVRNVLFMGVMSATRYNPVIKAFYDRLINKGKPKRVAYIACVHKLLRIINAMVRDGTSFNPDLHAVI

SEQ ID NO: 354263 - protein, 377 aa, unidentified
MSKVRCIGLDVHADTIAVAIAEPSGEVRSVGTIPNRPESIGKLVKKLGPAEQLRVCYEAGPTGYVVYWQLTALGVRCEVVAPTLVPVKAGDRIKTDRRDAEKLARSYRAGDLTPVWVPDAAHEALRDVVRAREAAKKDQLRARHRLGKFLLRHGRRPSTPMTAWTQRYLAWVKQAVHFEQPAQEATLVDYVHEIEHVAGRLERLERAIDEAAATAPLRMRAVIAALQALRGIAQVSAVTIVAELGELSRFARARQLMGYSGLGASEDSSGARTRRGGITKTGNAHIRRIVIEAAWAYRHRPSVGGALRKRQATLNDEVKAIAWKAQHRLHARYHRLVARGKCKQQVITAVGRELLGFIWAIGVTVETEQRTLQSVAA

SEQ ID NO: 354264 - protein, 356 aa, unidentified
MSHEVKYIGMVVHKEAIVIAVLNGSGKLVMETILETKASSILQFLHGLRGELHVTWEEGTWAGWLYDLLQPQVQEVVVCNPRRNALLKEGSKSDKVDARKLADLLRTGMLRPVYHGENGLRTLRELARSYQTIGKDLTRVMNRLKALYRGWGIACAGTQVYAPRYREEWLNKLPQAGVHRRAELLYQQLDGLQALRREVRPELLAESRKHKAAKLLRQIPSIGPIRAARLIALMQTPHRFRSKRQLWTYSGLGIETHDSAQYRYVGGQVQRSKKPQQIRGLNQNHNHEMKEIFKSTATRASCGTGPFHDFYAALLAKGMKPEMARLTLARKIAAITLTLWKKEERFDAERLKTQAA

SEQ ID NO: 354265 - protein, 345 aa, unidentified
MMEAYDGRQVVGMDLHRRRSVLVRMTMDGRKLETARIGNSAAALRRELAKAGKHPLVVLEATYGWYWAADVLEQAGAEVQLAHPLGVKAFSYRRVKNDERDAADLADLARMGRLPQAWIAPPRVRALREVVRYRHKLTGQRTSCKDQVHAVLAKCGIAVTHSDIFGTGGGLWLDQLVLPAPYGAKVASLRALIGVLDGQVAALGAEAAAVLAGDKGYEAVRELPGIGPVLAAVICAEIGDVTRFGKPGQLCSWAGLTPRHHESDTKVIRGHVSKQGSKMLRWALVEAIQHQPASARPQQAREAIIARRGPEARNIAKTAAARVLLAQVFYAMRDGHVRRASGPAA

SEQ ID NO: 354266 - protein, 349 aa, unidentified
MKNTTIAVDVATSVFEVAVSSEPGRVTERHRLSRARFARFLGERQPATMVFEACGSSHFWGRRAQAAGHDVVLVPPHTVRPYVPRNKTDRADAKGLLEAFRNEDVRAVPVKSESQQAITALHRLRSAWLAERTARINTVRGLLREFGVVVPTGSHQLLPHLWSVLEDADSGIPDLIRPGLAEAGAEIKDLERRMKAIENQLESVSRQIPVVERLRTIPGIGLLSATALVAFVGDIARFPSSRHFASYLGLTPRENSSGLRRRLGAISKRGDTYLRMLLIHGARTVIWHAKKLETPDRLRAWALKLERERGHNRAAVATANKLARLAWAIWKTGKDFTKGMEPLSTSAAT

SEQ ID NO: 354267 - protein, 441 aa, unidentified
MDEVSSHVRLDLPTANGKARPLDCSTSSSNPMMEDAMGGGVDIASIVRCEPMELPMQTLNDLSRSLIALEPASTLIAVIEMSLSSWLVAGIVPGIERQPLKKLAVDESALLRLLHRWREEAEKAGCRIERIVVAFEAGRDGFWLARWLNARSIEANVIHAASVAVSREHRRAKTDRLDAELLKRAFLGWLRGERNHCKVVAIPTLKDEDAKRPSRERESLVGEQSRIVNRMKAALIRLGIRGFNPKLKRAAGRLDSLRTPEGEPIPPNTLAELRRDMERRRLISNQIRQIEEARLKHFEQAPNDGPHAMVRLLARVIGVGIETADMLVHEVLSRNMHDRRAIARYAGLTGSPDESGRKRREKGLARSGNGRVRRGMVQLAWRFLTYQKESALAQWYRARTENARGARKPMIVALARKLLIALWRFVRQGVVPDGVVLRPAQ

SEQ ID NO: 354268 - protein, 420 aa, unidentified
MAPLSDQQFTAYVGIDWADTKHDICLQAAGDIRREFDCIPHQVARIDEWAKTLHRRFGGPIAVALELAKGPIVAALQKYDFFTLFPINPSTLAKYREAFKPSRAKDDPTDAELALDLLLRHPERFAPLRPQSAAMRSLVSLVERRRDLVGDQNRLTNRLCDTLKQYYPQALEWFDDRGTVLFCDFLTRWPTFLAARRARSTTLEVFFHAHNCRHANLIEARLESIRAATPLTEDPGIVAPCRLYVLALVEQLRTVLTAIDRFDREIATVAGTLPDYTLFQGLPGAGPQLAPRLLAAFGEQRDRFHGTDELQKYSGIAPVTERSGKKSWVHWRWQCPKFLRQTFVEWAAQTINKSFWAGAYYRQQRAKGSTHQAAVRALAFKWIRILYRCWQTSTPYDETTYLNALSKRGSPLIRNLGLAG

SEQ ID NO: 354269 - protein, 449 aa, unidentified
MSDIPTSSIQPEFVALIGIDWGDKKHAWALQAGDSTKIEKGEIEHTPEAIQQWAAELRRRFPSGRLAVALEQSRGPLVFALSKYEHLTLFPIHPTSAAEYRKIFRPSGAKSDGPDAVLHLDMLARHRDKLRPLNPDTPETRALQLLTEDRRQLVNERTRYSNRLTANLKSYYPQVLQWFDDLYAPVTLDFLDQWPTLEELQKAKPGVWSEFFQEHNCRDAKTQQRLAAIPMAVTATTDFAVVTAGRAGVCAAVRLLRNLNQAIQEYDRQIDQLAKGHPDFAIFQSLPGAGKVMVPRLIAAFGTQRDRYQRAADIQQYSGIAPVTEASGQQLWVHWRWGCPKFLRQTFHEWAAQSIAQCDWAAAYYRVQREDKNKSHHAAVRSLAYKWIRIAFRCWKDRQLYDDSKYELALKTRAKATPEPKQPSAFPLPLRWISCAGFQKLAEKNEENT

SEQ ID NO: 354270 - protein, 405 aa, unidentified
MNAVGIDVSKGKSTVTIRKPGDVVLMSPCDIPHTQSAINDLIKQIKSLEGETKVCMEHTGRYYEPVATWLSDAGIFVSAVNPILIRDFGDDSLRTPKTDKADSKKIARYTLDRWAKLKQYGIMDKTRNQLKTMNRQFGFYMAQKTAMKNNLIALIDQTYPGANDFFDSPARNDGSQKWVDFIHTYWHVDCVRSKSLNAFTEHYQNWCKRKNYNFSAEKAAKIYQISSDLIAVFPKNDITKMLIWQAVALLNTASKTVESLRSKMNELASTLPEYPVVMDMNGVGATLGPQLIAEIGDVSRFTHREALTAFAGVDPGKNDSGKHIQNSVRTSKKGSPYLRKTLFQIMDSLIKRSPVDDPVYAFMDKKRSEGKPYYVYMTAGANKFLRIYYGRVREYLSNLSNNETI

SEQ ID NO: 354271 - protein, 451 aa, unidentified
MSINATYERSSPMKREAYRAVDVKQVMIESLVTDRAGIAVIVGVDVAKSDFLATVRWSDGRFERPWRAKSPDDISDLVGRFQGLADGRSLTIAMESTGTYGDALRQALTDAKLAVHRVSGKAVHDYAEIFDGVPSQHDGKDAAMMAELAAIGKSSPWPYEPPTEFDQELRYWVDRMDVQQRIGMLWLGRLEALLARHCPEATRYLELSSETLLQALIEYGGPAGLAADANAAKRLKRWGGSFLDSKKIDRLVQVSASSAGVRQTAVDRRRMEECARAALSAKHEIQKASRHLEELATSHAIIARQAAVVGWATACVFWAYLGDPAKYHCAEAYRKAMGLNLKERSSGRYQGLLKITKRGPGAVRRWMYFAAMRLVQRSDVVEWYEVKKGQRPKGGKRALVAVMRKLALGLYAVGVGTEVFDAKRLFSPTVRLSRHAAQRAKKNQKEQRQKV

SEQ ID NO: 354272 - protein, 312 aa, unidentified
MTDVFVGIDVSKATLDVMVLPEERYFQVSRDEAGVEQLLATLKPLGVTLIVLEATGGLERPVVMALAAAGLQVVTINPRQAREFARATGTLAKTDAIDAKLLARLGQVLRPQVRPLKDAETQALQALATRRSQLVEMLAMERNRLHSATSRVKPDIQAHIEWLSKRLKDVDDDLQRQIDTTDAFRVKDEIIRSVPGAGRVLSTTLLASLPELGRLNRREIAALVGVAPLNCDSGTMRGKRRVWGGRAAVRTVLYMATISAIRCNPDIRAFHERLRAAGKQPKVAITACMRKLLTVLNVMVKSNSTWQSAMPC

SEQ ID NO: 354273 - protein, 360 aa, unidentified
MLAELIDAVVGVDTHRDTHEVELALPTGTALGTRKISNDNSGFAELLAWIGDHAPGPRVVVSIEGTRSFGVGLARAVAAAGLTVIECEQPNHKARRGKGKSDPIDAHLAVLAALRLDADRLPVPRADGDREALRILLGTRHELTVVTTAQTNRLRALLLGGQDTERDLARATLTDPVLLALVRRREPPQASREQAVRHGEIRRLAHAIRAGRHALAANRAQLQTIVDQMAPGLTERRGIGAVTAAQAIVSFSHPGRCRSDAAFAALSGTSPLQASSGKTVRHRLNRGGDRALNSAIHTIAITRIRCCPTTKNYVARRTAEGKSSREIQRCLKRYIARQLYRALNTSTTLTAQTPAAPAAA

SEQ ID NO: 354274 - protein, 323 aa, unidentified
MNFIGIDISKATFNVAILNNRTLSDAQFENTKKGFTSFVKWIKSINKETSIFCLEATGIYGLALAKFLYKKKQSVLVVNPIKTNAFCKMEMQRNKTDKADAQSIARYCHHLHCKGDIEKNKFTPKSEEFERLQYLVVRLEQLSKIKNQEQNRLGVSLDKAATKSIKAMIYFIDNQRINIGKEIENIIKNNANLDKQVELLISINGIGQRTAWSILANLGDISFFNNAKQVTSYAGLNPRKEDSGTSVHRSRLSKMGNKRLRKSLFMPALVATRYNPLMIDLYSRLLERGKPKKVALCAVMRKLLVLSYGVLKSGKPFDPCYAK

SEQ ID NO: 354275 - protein, 481 aa, unidentified
MVRAQSMAMRNASPPIPPLAHDALYVGIDIGKRRHVAGFVSSTLLSRHQRFEGCPALPFDNSREGFRLLIDRICAYAPMEQCSVLMEKTGHYHKPLVGYLLDMDVTVYVMHVQSRPRGLVKTDKRDALGLANHLYNQLEKGIQVGDSAQLVRQALPPTEAAAALKTMMGHRFELVNEATKRRNQLTAICDQLFPEFTTVFVDPNKPIALAVRAAFPTAHAVATASAESLCHAKGGRGPNRADMAHLQELAARSIGITDGARVRSLAFEQGQLIRELTVIREHIAQIDAEIGQIVAHAREGRILMALPGIGATSAAAILAAIGHIDNFPDAAHLKAYFGWAPKVTQSGMTKDSASLTRAGERTMKQVMYMVALRCIKDDTEFASIYKRLVERKCAYDERTRAYKGKRVVIARIAGQLTRMVYAFLKADADLLARTPAGQQPPEPMLYDRVLHRSHIAGNYHSMTPRPARGDLIKLPKRDVSS

SEQ ID NO: 354276 - protein, 387 aa, unidentified
MSKTAAAPAIQISANIEILMLVFELGEKEWKLGFASGFGQKPIERNIGPRDTKALLEQIEWAKGKLGLADDVRIVSCYEAGRDGFWLHRFLESEGIENLVVDSSSIEVNRKKRRAKTDRLDLAGLLDLLIRHLAGSAKPVWSVLRVPSVEQEDRRHLHRELKLAKQDRTRVSNRMKGLLANNGLTLNLRQDIRAQLAKMRLWDGSLLPRGLRARLERYACDYAYYSERIAELEAERRRILKEESDPTLEKVLQLNTLRGIGVNTAWLYVMEFFGWRDFNNGKEVGSCAGLTPTPKDSGREEREQGIGKDGSRHVRGSSIEVAWGWLRFQPESELSKWYQRRFGSGSKRLRKIGIVALARKLLIALWRFLETGVLPEGAELKADVRIR

SEQ ID NO: 354277 - protein, 347 aa, unidentified
MRFYNGQHRHYCGVDLHTKRMYLCILDHEGNKLLHRNVRAKPHDFLRAIEGFREDLIVGAECMFTWYWLADLCLEEKIKFVLGHALYMKAIHGGKKKDDKLDSEKIARLMRGGTFPLSYVYPREMRATRDLVRRRMFLVRRRSELLAHVQLMNQQYNHDPFEKMLKYAGNRRDVLDRFAESSAQLNVAADLEMVGHYDQLIKQLETNLVREAKLHDPKACSLLRTIPGIGKILSVVLLYEIHTIDRFPSVGDFLSYARLVTPKQTSDGKVTGHGGAKIGNVHLKWAFSEAVLWMLRYSEDAKAFLKRKEKKYGKVRAMSLLARKIGRAVYQMLKRKESFDAVKFFAS

SEQ ID NO: 354278 - protein, 323 aa, unidentified
MSVVVGVDVAKRSFDIATPLPNGKVRTKAKLANNPSGFEQFATWLEQHAEPRAWVVMEATGTYHEALADCLHAKGYRVCILNPAVIAKFAGADLRRVKTDKADAKVIAAYGQQKKDLLRQWKPEPPAQRRLRALVRRLDDLKEMQQMEQNRLDVSQIAVQESIRAVIGHISEEIAKTRKAIEQTIDDDPDLRQRRELITSIDGLGDTTAALILAELGDPLKYESPSAMVAFAGLNPMIHQSGEKIGQSTISRTGAPRLRAGLWMPGTVSIRYNPVVKALAERLSNRRKAYKQIVCAAMRKLLHLVYGVVKSGKPFDPQIALAG

SEQ ID NO: 354279 - protein, 670 aa, unidentified
MPASATAARRLRLGVGIDTARYGHHVTFLGDDLQRVAPDLPVPESRVGYQRLERQLRRLCEKHPDAELHVRIDAAGQYAANLEYFLRSLDLPLPVSVGEPKRNKDYHHAHSPKRQDDQTESWAMARYAVLERPAPSQETPPEFAVLRRIASRLEAQVRQTTRLTNQLHELLSAVFPELANLARDITVQWVLKLLERYPTAPRIAAARFDSLQGIPRLSPEKAQQLQTAARNSVGALRGETCEALVRQLVRELRASLDDESRWKKLLTQAFDALPPGPHRRIATITGIGKVTAAAIVATAVSIERFETPEKFVGFYGVFPQAASSGVDKFGRPNPPGKKSMCARGNDLVRGLLWNCAKSAAMFNPAARTLYQRLTSHSRPDGKLPLRGDVAFGYCMTKLLRLVFAVWKTDRDFNPRHFPWEPQENTCPLDRTERATSDAATSDPTSLEETATPDQTEVGDERESVAADAAASAQEIAKAAGHNEPQGSRDNVVTAATASLSVSLSVRTAADQHLPPSATCGSAAGSPQPFRGPLDFAALRRQVTLRQVLQHLGVLHRFRNSSGSGSQLRGPCPLHQSRSERGRTFSVDLQRNIFRCFNPSCAAQGNVLDLWAAYHGLPLHAAALHLAETFGVLPSRLENGSQTQKQRRGTRNPAVAGSSTNKAGITPAHDP

SEQ ID NO: 354280 - protein, 343 aa, unidentified
MEYYVGLDVSLKQTSICVVNQVGSVVREGVVDSEPETIAAFVRSNAPGAVRIGLETGPTATWLWTELKQLGLPVICIDARHAKAVLKMQINKSDRNDAAGIARIMQTGWFKEVRIKDLDSHSVRALLASRALLVKIKRDLENQIRGLLKNFGLVIGRAKFNVFAVRTEELVESRPELVAAVGPLLEARKAIEQQVGDLDRKVLKLARRDVQVRKFMTAPGVGPITALCFKATIDDPTRFMRSRSVGAYVGLTTRRHASGEVDWSGRISKCGDAMLRMYLFEAAGVLLTRVPKWSGLKAWGAKLTKRNGLRKAKVAVARKLAVILHRMWIDGTEFNWSTKKAAA

SEQ ID NO: 354281 - protein, 370 aa, unidentified
MQKFTNQCIGIDISKASFTACLCKRQHSGQESASDVVEFENNKRGFNQFVKWSRKLTDSSIPLIYAMEATGIYYEGLAYHLSRLNQSVSVILPNKVKYFSKSLNIKTKTDIVDARIIAKMGVERSLDLWQPPEPIFKQLRGLTRLYSDLKKERTTFGNRLDACQSGEDPIAFIVNSNKKIIKEIELQLAKCEKEIKALIYSEEWLATKVEKLLSIKGVGLITISIILAETQGFKLIRNGKQLVSYAGFDVVQRESGTSIKGKTRISKKGNSRIRAALYFPALVSSRFNKDLKNIFERINAGKSSKMVGVTALQRKILLLIYSLWKKDQSFIEDYPGTTRDQAPIAASFFENESPNIKVGRSSDLPTQVLT

SEQ ID NO: 354282 - protein, 444 aa, unidentified
MSVTPEVARPRVCAGLDWAKDDHVVCILDTDGEVLDRFSVAHTAAGLKRLVRRLLAANVCEIGFERGDGPVIEALLTTELTVLVISPNQVKNLRSRYGSAGNKDDRFDAYVLADVVRTDRRRLTPLQRSSPTTRALRASVRARRDLVEHRVGAANQLRAHLQIVLPAVVGLFADLDSAVSLRFIERFTTQAKADWLSPLRLGEWLKKISYSGKTDPNVLHQRLLAAPRGTTGHDADTHAAITQAYVAVLRTLNTQIEALARTISDQFDAHPDHDLFASLPRSGTLRAARLLAEIGDARGRFPTADSLACLAGVAPSTRQSGKVKAVTFRWSADRDLRDALCDFAGDCRRANPRADDLYNRARARGHDHPHAVRILGRAGPTSSGDAGKTRSPTTPIATTPSNASSTKPLRTQPETAQVDTGQLMRTHCPAPAGGTPGRRAARCR

SEQ ID NO: 354283 - protein, 344 aa, unidentified
MDHFAGLDVSVKETSVCIVDDTGKIVREVKVASEPEALLAVLKNPAYHFKRIGLEAGPLSQWLFSALAEAELPVVCVETRHMQAVLKAQINKTDRNDARGIAQMMRVGLYRPVHVKTLRSQKLRMLLTHRKLLQSKAIAIENDLRGTLRNFGLKVGMAGKVKFEARIKELVENLPDLAELVEPMLIVRRALREQIVILHRRLLAIVRDDEVCRRLMTTPGVGPVVALTYRATVDVPARFRKSKAVGAVFGLTCSKYQSGEVDWSGRISRCGDEMMRVMLYEAAQSMMRSKKWSWLKAWAMQIARRRGMKKAIVALARRLAVIMHRIWVDGTEFRWTREQAAAAT

SEQ ID NO: 354284 - protein, 345 aa, unidentified
MQVVYTRCAGLDVHKKTVVACVITPKESGEWHKQIRTFGTMTKDLLNLSDWLTSHDCTHVAMESTGEYWRPVFNILEGNFEVMLVNARHMKAVPGRKTDIKDSQWIAELLQHGLLRPSFIPPVEQRDLRDLTRHRSNFIRERVNLVNRVQKVLEAANIKLASVASDVMGVSGRAMLAAIVEGNSSPEVMANLAKGTMTRKHDLLVQALEGRVRLPSAQHLAAWAGLAPGNYESGGKKLGESTRKGNRVLRTILVQAAHALARTKTYLAAQFRRIAARRGKKRAAVAVAHSILVIVYHLISRQEHYQDLGADYFDKQRPESVKKRLIKRLEKLGYQVTLEPTPVAL

SEQ ID NO: 354285 - protein, 353 aa, unidentified
MKRENAIKQSVGIDCGKIELVCSIGVMNHEFEEEIISNKAFKNTPDGFKKLKEWAKKLSDSSVEIIYVIEATGVYHERVSLYLYNEGCKICVMLPNKVKAFSQTLSVKTVNDKTSAQAIAYMGLEKKLDLWQPPHEVFNKLKQLTREREQLIEERTICKNQLHAEESGAWPNKGSLKRIKQRIWLLDKQVNEVEAEIKEIVCMNQWLQEKLEYVCSIKGVALITAVTIVAETNGFNLIRNKKQLVSYAGLDVISKESGISVKGKSKISRKGNKYLRKALHFPALVAVRHNEQMKALYSRLVSKHGIKMKAAVAVQKKILELVYVLWKKEELFDLEYFKNKGQRTSVATLCELA

SEQ ID NO: 354286 - protein, 479 aa, unidentified
MIYSVGIDLHQGRHRARCLDERAQPCDGFNFQTTPEGLAILEERVFRDGANPIIVLEPAGLPWKMVAVYLRSRHPDCRLVKAKTQKVAALRRYLRGPVKSDRLDALTLAKMPFIDPEKLVEIYLPPAEIHALQRLTRQRKRIESDISGRKIRISAIVDGYLPGVRRTFNDAWALPVRAFLRSRLNPYAVVREGEEALHAYLSKSCPRSRWSRAETHLVFLACQSVAEVCELSRSAGTVDEEFFVDLQDEIARELRLMESEEAESESLARRIMELYRKLHPSDNLTSIPGVGEHTAPVFLSAVGDPARFRSQSAFANWEGVVPGARQSSDVEVKGLRMTKAGPSIMRMGLYQAGDIGRRWDPQLAAVYHREMVYHGKNHRQAMGAVMSHLGARVFAVLKNDRPYELRDTEGNPVSKDDARQLILSKYQVPEEIRRERRRRNPKAINTVQTLRKDREMATHRTNEAAKAPQPVGIKTVSRQ

SEQ ID NO: 354287 - protein, 326 aa, unidentified
MQPNSNAECWVGIDVSKDWIDVAVLVEENRIEQFRGDRSSQALAKMARRLLRHGPEGVVLEATGGLEREVIAALTSAGLRVMRMNPKRVRDFARAHGLLAKTDALDAYALALFGARMRPQLRAFPEAEREQLTAWARRAEQLTAMRAAERTRLRQITDRALRKSVQRVIALLGKELERVEQQVAACIERNEIWKEQDGLLRTAPGVGPKTAQVLLAQLPELGQLNRREIAALAGVAPMAADSGRWRGKRRIRGGRSRVRVALYLASWSAVRKGRLRAFYQRLVRAGKTKQLALIAVARKLLVALNEMMRSQQPWRVSIPPEPPVVN

SEQ ID NO: 354288 - protein, 331 aa, unidentified
MLRVAKTLVTNKEETSRRFYTQQHPFYCGIDLHARTMYLCILDQAGETLLHRNMTATPEALLTAIAPYRDQIVLAAECMFTWYWLADLCAEHGIPFVLGHALSMKAIHGGKAKNDKIDAHTIAVLLRGGMLPQAYVYPAEMRATRDLLRRRMHLARKRGELLAHVHNTNSQYNLPAIGKKIAYKTNRDGVAERCADPAVHKSIEVDLALITSYDALLRDVELTIVTTAKHHDANTLYLLQTVPGIGKILSLVLLYEIHQIDRFPRVQEFASYCRLVKCAKESAGKRSGTSGTKIGNAHLKWAFSEAAVLFLRDNPAGQKFLTRLEKKHSSP

SEQ ID NO: 354289 - protein, 346 aa, unidentified
MKEHSHDDLVSVVGIDLGKNAFHVHCVDASGHVVLKKQVTRKGLVQLMSQLPRCLVGMEACGGSHDWARRLMAMGHDVRLMGAQFVKPYVKSNKNDFADAEAICEAVRRPNMRFVPVKGMEQQDVQSIHRARSLAVSHRTAQANQIRGLLHEYGIVMPQGMATLRGRLPEILADADNGLTPMFRDLLAGLMDEVCRLDGRVAAYDEQVRRLAKASDACQRLMTIPGMGAMTATALVSAVADARAFGNGREMAAWIGLVPRQCSTGGKSKLLGISKRGDVYLRKLLVQGAQAVLRHAEGKPDRQSRWLCDLVARRGRNVATVALANKNMRTAWALLTRHETYRPAMA

SEQ ID NO: 354290 - protein, 437 aa, unidentified
MSKRLQVGFDIHQKHNHVCLMTKDGQMVNPHQRFDNNWSGHQKFVDMLIGVLEEGGFEGVDIAGESSGLLWFYPFYHLTQAKELTPFDPHVYLFNPRTVKHFKKVLAERDKVDPKDAYAVVERLRFGGRMPHELTFDERYLPLQRLTRYRYHLSHTLAREKTYARMVPIYLKASDYTRKPKPFSDLFGATSRHILSEYATTDELAAMPLDDLADELDRIGRHRFSDATDNAQRIKRAAAQSSPLPPCLVEPINVTLDSLLAHIRFLEGELEKLDSLIETTLIDVPGAPYLRSVKGLGLVYTAGLLAEIQNPNRFIRGYKRDKEGNLRPKTKHDAQASLARFFGLWWPRGDSGEFQSEDRRLPKTGNPYGRYYFVEGANSLRRHNAEYTAYYQRKYDQSLKHKHWRATILTARKLVRLVFALLHNEEMYRPPEVRSSS

SEQ ID NO: 354291 - protein, 343 aa, unidentified
MQEPYHYIGLDIHKRTIAFCAKRSDGEIIDAGTFGASRESIAKWAAERTTPWIGGMEATLFTGFVYDVLTPYAVEIQVGHPLQLKAISCAKHKSDKIDAKTLANLLRADLFPACYMASPLVRELRRVLRYRNFLVRQAVAMKNRTTGILMEVGVQYDSKRIHRQGYFYELLDNLEETPNSVRELLRTTRCGIEMFQSAQKKLLAALRKHAHLRERITRLASIGGGGGMTPLTWAPAIDDPPRFSHLQKVQRYCGLCRRPHQTAGKNKTAPPSHPPTPPLQSILIEAAKLAPRYNAQLKQVHAASLERGYNRNRATCAVARKLVAYLMAVDKSGGAYEDRSSAS

SEQ ID NO: 354292 - protein, 379 aa, unidentified
MELARRLSSQAKGQQRRVGVDGPTASSARCWVVQRQHRRPSVTELKLISIDTSKHVFTLHGVGDRGEVVLRRELRRQQLEGLFAKLPRTEVVLEACGGSHHWGRVLKALGHRVRLIPPQYVKPFVKRNKNDRADAEAMCEAAVRPGINFVPVKSAEQQAAAMVLSVRELLVKQHTQLVNAVRGHAAEFGVIAAKGTGHVEPLLARIADDPAVPEPARAMFAELGGRIAALSVRLTALDRELARLHRSNPVSQLLAEIPGVGPISALSFALTVDVSQFRSGRHLAAWLGLTPKQKSTAGKPRLGGISRQGNERLRQLLVLGATAVVRTVKPGSRHASAWLLGLLQRRPRKLAAVALANKMARVVWAMMTSGEAYRPATVA

SEQ ID NO: 354293 - protein, 324 aa, unidentified
MVRESKIASDPEALRDWFHSFAGNIAAVGLEAGPLSQWLHKGLTDVGIPVTLMETRQVKAALKAAPIKTDRRDAAGIAQLLRLGWFRPVHCKSVSSQEMRVLLGARRSVNQAIIDLELSLRGMLRNFGLRLGKTGKVGFENLVRDLIEGNRLLELSLEPMLQARAALRTELARLERMAREIAREDKACRLMMTMPGIGAIVALTVRSAIDDPGRFRSSKDVGPWVGLTPGRYQSGETDVIGGITKAGDVGMRTALYQAASVIMYRSKKPSWIKTWGLQVARRRGMKRAVTAMARRVGVVLHRMWVDGTEFCAAPREGNQGGGIA

SEQ ID NO: 354294 - protein, 387 aa, unidentified
MPQPNDLSRSLVALDQDSTIIAVVEMSQSSWLVAGMLPGIERQPRKKLEPSPERLLALLHRWRDEAIGAGKEITRIALAFEAGRDGFWLARWLRARGVEAHVIHPSSVAVSREHRRAKTDRLDTELLKRGFLGWLRGERGHCTMARIPTIAEEDAKRPNRERECLVRERTRIVNRMKGTLARLGIRNFKPTLRKAAERLATLHTPEGSVLPPNVSAELQRNMARLGFVVSQIKEIEGARQKRLEQEPETEPHAMVRHLARVVGIGVETADMLVNEVLSRPMRDRKAVARYAGLTGSPDESGAKRREQGLAKAGNARVRRGMIQLAWRFLRFQQNSALARWYQARTADHRAATRKTMIVALARKLLIALWRFVTTGETLEGVVLRPAG

SEQ ID NO: 354295 - protein, 398 aa, unidentified
MSRIWAGIDSGKGHHHGLVLDADGKTLLSRRVANDEPELLKLIGDVLDLADGRQVTWAIDMTGGEPALLLALLVNHGQEVLYMPGRLVNRASDGYRGEGKTDARDAYVIADQARMRRDLRPVRPGDEAAVELKLLTGRRADLVEDRTRVVNRLRGTLLSMFPALERALDVTNAGPLKLLTGYQIPAAIRRAGVARLTKWLANRKVRNARALAEAAVDAAERQHTAVPGEKNIAKLVHTLAEEVMALNEQVRGMDKLIEGRFREHELADIVLSVPGIGTTLGAEFLAAVGGSLDGFDSPDTLAAFAGVAPAPRDSGKVSGNLHRPAVYHRRLQRVFYTSALVSVQFDPNSRKFYDRERAEGKKHVQAVLALARRRVNVLWALIRDRRCYQVAPPVTATA

SEQ ID NO: 354296 - protein, 346 aa, unidentified
MEHYVGLDISLKLTAICIVDRTGKIQREGVVPSDPEAIAAFIVSHSSNVARVGLEAGATSTWLWTELNKLGLPVICIDARHAKAVLKMQINKSDRNDAVGIARIMQCGWYKEVRVKDLDSHAVKALLVSRALLVKIKRDLENQIRGLLKNLGLVIGRAKMNVFAARAAELIQDRPELTAAVIPLLKTREVIERQIADLDRKVLRLARNNALVRRFMTVPGVGPITALCYLATIDDATRFKKSRSVGAYAGLTTRRYRSGEIDWTGRISKCGDAMLRTYLYEAANVLLTRIAKWSALKSWGMRIAKRSSLRKAKVAVARKLAVILHRMWVDGTEFNWSSKEVAAHGA

SEQ ID NO: 354297 - protein, 331 aa, unidentified
MLETATGEMVNLTLKHEGNEVREFYSQLPRPVLVGIEATGSMHWFLNLMDELGIECRVGHPATIRAAAPRRQKNDRLDADLILKLVAENRFPAIWLPTKELLDLRALVRHRHQWVRMRTRIQNALQAIALANGLRRGPSLWSYDGQAKIAFLPLLPHRRSALQAMYQKMDEEIEKLTQQVAEQAGQRSGARRLMTHPGVGPVTALATDVFLGDPKRFADGKALASYVGLIPREYSSGGRQRLGGVTKQGSPLLRFLWGEAGAHAVRRNPELKRFYRRKLVQKGLGIRLWIMLRDEIDYQEFCRRGQKQHSGAACAGMPETAYGANRHRAID

SEQ ID NO: 354298 - protein, 319 aa, unidentified
MAQNQSVVVGIDVAKDKVDACIRSFRLRQTFPNTAQGHRKLVTWLRKYAVGKAVMEASGGYEREWRDVLHKEGIEVWIVDPKRVRSFALSAGRLAKNDPIDAEMIAWFAETFRQAPGQVPDAAREELAALTKARKALVDLKTRLQAQDEHAAPKPARKAYARVLKRIGAEIGELETIISAKVKATPAFAARAEIIESVPGLARTTSAALIAGMSELGQVSDAVAAALIGAAPYDDDSGKRRGERHIKGGRRWVRNAIYTLCVGAATQHNPVLKAYYQRLIARGKPPRLAFIACMRKLIVILNTMLARREKWDHSRYAPQ

SEQ ID NO: 354299 - protein, 426 aa, unidentified
MKRTQNAKILQIKNETLVAGIDIGKETHYARAFDYRGIELAKLLKFNNTAQGFEQLEQWMQDICRQQDKTEVIAGFEPTGHYWFTLGDHLKDRGHKLAIVNPFHVKRTKELDDNSPTKNDRKDPKTIAMLVKDGRYREVYIPEDIYQELREAVAERERLQKRLNAIHNRVIRWLDIRFPEFQQVFKKWTGKTALLTLKTFPTPAMVIEAGEDKILATWRTEVKRSVGKKRAQLLVKAAVSSIGRTNGHIASQAGLQNLLAEYELYHAQHERLEQLMWELLLQVPNAVKLLSIKGVGLVTATTFVGEVGDIRRFEDPRQIQKLAGCNLVENSSGKHKGKTTISHRGRRRLRHGLFMAMIAILGKNQEFRELHRRNQTREKNPLNKMQSIIALCGKLIRIFYAILSKGVDYNPEKMMGDIEQSVKAAA

SEQ ID NO: 354300 - protein, 337 aa, unidentified
MELYAGIDLHSNNSVIVVLDTSDRVVYQKRLPNNREAIIGALNACGPIVSVAVESTFNWYWLVDALEDASYDVKLVNVAAVKQYDGLKHSGDFSDARHLAHLMRLGILPTGYIYPREGRALRDLLRKRGQMVRGRTTQILSMQNLLARNLGTQTSGNELKRWQAIDIEELDLLPEQRLAIASNLAVMRCLDAQIKVLEAAILEQARLLPAFQALLSVSGIGKVLALTIALETGDIARFDGPGNFASYARVVDSRRESNGKKKGEGNAKCGNKHLAWAFVEAAHFAVRYDEQIKRWYQKKAAKTLQVVAIKAVAHKLARACYHILKTGEVFDVTRAFS

SEQ ID NO: 354301 - protein, 428 aa, unidentified
MNQRDDTRIKEFRQLKKEIRGSEEYLIVGIDIAKDKHHAFFGTATGKTLFKRLIFENNIEGFGRLCTRTEAIKVQHRLSKVAFGLEPTANYHKPLAEYLIKCGHNVVLVSGIAVNHNRGLLDGRWDKHDSKDSANVADLISQGKCLYYDYPSIPLRDLRNLLSLKRRLRKREHGTRVRIRNHLLAQYFPEFDRYFGKGCSESLPIVKWCLNPSMIADMEYDEFVQLVAPRMKTIGQGKRLRSIWGMAADSIGCELGKALDFEAKLMVEDLQQVKDSIRTVDERIEDICLGFPEYSYLLTIPGFGPDVSSKVLGAIGNPFRFDNGKQVLKLAGYDLSANRSGKSSDSAVPVISKRGKAYLRYALYQAAFVASTSNRHFIIYYTNKLRGREREKGIKTKMKVKLAAKMLIIAWTLMKKKEPFDPEFLNIE

SEQ ID NO: 354302 - protein, 343 aa, unidentified
MQAVTTIGLDIAKSVFQVHGVDANGLVVIRRQLKRRYVLAFFAKLPPCLVGIEACASSHHWSRELQALGHTVRLMPPAYVKPYVKRQKNDMADAEAICEAVTRANMRLVPTKTPEQQSGLMLHRTRHLFIRQQTSVINAIRAHLAEFGIVAPVGRKGIEELLRIIADPSDKRVPDVVRACLAALGSQLLSLKKQILDFDRMILAWHRSDPTSKRLNCIPGVGPLLATALVSSVGDPKVFRSGRNFSAWIGLVPKQHSSGGRARLGSISKQGDRYLRSLFVAGALAVIRYAKLHGTKYRPWVAALLARRPTKVAAIALANKLARMAWAMMARGERYNYPTALKV

SEQ ID NO: 354303 - protein, 380 aa, unidentified
MRFIGLDVHQKYAEGCEIGPNKEKKRFRIANTRQAWEEFAKTLDSNTRIVMEATSNAFWIHDILSGYPGQVVIANPLKTRAIAEARVKTDALDAQILAQLLAADFIPESWIPSKDEYQLRVLLHHRIRLGKIRTMLKNKIHAALIRNGIQSPRSDLFGKSGRKFLESISLPETEQIIVCSSLKLLDAVQKEMAALEADLFARAKENPNVKLLMGIPGISVLSALTILAEIGPISRFSSPKKLACYAGLVPSVHQSGKTRYTGNITKEGRSTLRWILVQCAQRAIQSKGKLQSFYFRLKEKKGHKIAIVATARKMLHIIWAVLTRREEYRDIRRDLLERKMKNLVKQAQAYDVDKKELLRVIDCIEDVSEEETQSLLFETG

SEQ ID NO: 354304 - protein, 355 aa, unidentified
MTSTKYIGMDVHKESISIAVRNDAGKVVMECVIETKASMILQFIEGLRGDLHVTFEEGTAATWLYDLLKSHVTRLVVCNPRRNALLKVGNKDDRIDAGKLSELLRGNQLHPVYHGEHGLRALKELVRSYLTISKDLARVMTRVKALYRSWGIPCSGTQVYSRLYRVVWLSKITEPGVGLRAAFYFQQLDALRELRQEVRRELLAEGKKHTAWKRLCQIPAMGPIRAAVALGILQTPHRFRTKRQLWSLSGFAIETRSSADHRQVNGQLQKVKKRVSIRGLNQNHNHDLKNLFKGAAVLASSKPGPFREFYAGLLAKGMRPEMARLTLARKIATIVLIVWKKGVCFDAQYLKPQTA

SEQ ID NO: 354305 - protein, 392 aa, unidentified
MFYLGIDIAKVNHVASLINEDGSVLVKAIKFTNSNEGLQKLIDSISDYNQSQIYCAMEATGTYWLSLFSALTDKGFNVSVFNPYQIKSFRGAYTNRKQKNDVIDSILIANFLSFNGTKQTSLPNDDLLALKNLTRYRSNLVSNISKVKTQVTGILDKVFPEYSDLFSDTFGEASKQILLNCPTPNEVINFNTKKLANLLKKASHGRHSTDKVREVKSLAKNSFGIKFTGDACSFEIKQLVNQVIFLENQAHELEVKIKDIYSKLDNHLQSIPGIGEVTAPIILAEIGDINNFSTPSKLTAFAGIDPSENQSGNKKSTDEKTSKRGSPYLRHAIYLSAMVASNNDPIMHDYYIKKRAEGKHHYVALAGVERKLLGIIFHVLKENRDYRPSKSS

SEQ ID NO: 354306 - protein, 420 aa, unidentified
MRNAGIHANSLLEVRRMYNAVGIDVSKGKSTVAVLQPGGTVIRKPFDVSHTSQNLNELADYLSSLDGTTKIVMECTGRYHEPMVKALSEAGLFVSIVNPHLIKNFGNNSLRKVKSDPADARKIARYTLDNWTELRQYSGMDNTRTQLKTLNSQFSFFMKQKIAAKANLISLLDNTYPGVNKLFDSPTREDGSEKWVDYAYSFWHADCVRKIGLKAFTERYKSFCKKHHYIFQQDKPEKLFNASKELVAVFPKEKTYKLLIQQSIQQLNLASEHVERLRREMNELASTLPEYSTVMGIYGVGKTYGPQLIAEIGDVSRFTHREALTAFAGVDPGVDESGQHKSKSNRASKVGSARLRKTLFQIMTTLLQNAPEADPVYRFLDKKRSQGKPYYVYMTAGANKFLRIYYGKVKECLRNLEQTE

SEQ ID NO: 354307 - protein, 356 aa, unidentified
MKAYNVDDFAALIGIDWADKKHDICEHPKNTKQYHYTIIKHKPEALHKWAMELKLRYPDQKIAVVCELKKSPLIYALAKYDHLVLFTVNPSAVANYRKAFTPSGAKNDPTDAFIQVEMIKLHIDKLSVIVPESTSMRALAQLVEYRRNVVQDGVDLSNKITATLKNYSPQAREWFKEKDTLIFCDFISKWPSLTAVKKARKQTLLDFFNRHNSHYETVNNARLLSIKEAIPLTEDEGVIAPNQLLVEVLIAQFKVLLIGIEQLDKAIKQLYKKQQDKAIFDSLPGAGPQLAPRLLVAFGHNRERYTDASQMQKYAGIAPVIESSGKKIWTHWRYSCPTFLRQTFVEWAGFSIRYSF

SEQ ID NO: 354308 - protein, 328 aa, unidentified
MWASSPNSKAEIAYLMEYKEINVGIDTSSNQLDIYVRPPGQFFSVNNDRDGIKQAVDKILALKPTRVLIESTGRLEMDFVCAADKRGLPIVVCNPSQIRNFAKSSGRIAKTDKLDAMDIAHFGEAMKPALTVIKPEKLREISDLLAVRSQRLEMSTMQKNRLKRMPKSVHDPIRKILTAIKSELLKIDKQLDKLISSVTEWKEKRDLLLSAKGVGNVLAYTLMSELPELGKLNRKEIAALVGIAPMNRDSGRFQGKRFIRGGRHRVRTVLFVSMMSAIQCHPKLKPMYERMVAAGKPKKVAIVACMRKQLTILNTMVKNNTHWDEKMA

SEQ ID NO: 354309 - protein, 343 aa, unidentified
MRWTVAIGVDTHKDRHVAVACDALGAQLDVQEIEASAAGYLALWQWAQELGLPAFAVEGTGSYGAGLVRFLEAAGAPVYECERPARHERRRGKSDLIDAALAARRLVAGTGLAWPRGGGRREDLRLLLLERRSAVAARTAALNQLQAALVTAPAPLRERLAALAGDQLVAAVARLRARAGEAEPAVLIGVLKRLAGRIGTLQAELAQLEAELEAIVGGLVPELLAECGVGPVCAAQLVVSSGDPARMRSEASFAALAGTSPIDASSGRQQRHRLNRGGDRQLNRALHVIALNRIRYHAETAAYHARLLAAGKTEREARRCVKRQLARYFHRRLCESPKLALTP

SEQ ID NO: 354310 - protein, 364 aa, unidentified
MKKSSKKQQGATVAESKPTQVVGLDLGDRHSHYCVLSSTGEAMEEGRIQTTRASMEKHFASEPRMRIALEAGTHSPWVSRLLKSYGHEVIVANPRKIPTLTKSESKNDRNDAEQLARMAAFDPKLLHPIEHRSPERQQDLNLIHTRSVLVRARTMLINSARGLVKSAGQRLPACSSEVFPEKAPAAVPPALKAACTPLLEQITLMNQSIAAMDKQIDQLDKKYPEITLLRTVPGVGPVVAACYVLTLDSPQAMETNRQAGAYLGLRPRQQKSGDSDPQCKITRMGNTYLRSLLVQSAQHILGRSRPDSELRRWGLKLAASGGKRGKKRAVVAVARKLAVLLLSMWRNHKKFEPFPQSVAQLTTA

SEQ ID NO: 354311 - protein, 328 aa, unidentified
MCTLGIDVSKNKIDLCLLTAGPGGKKKHKVLTNEPAVARKVVDWLNAQKCVPESVTVVLEATGIYHENLAYGLHEAGVSVCMANPCRVREFAHGMDILNKNDAVDAFVLACYGELKSPAVWVPPSPEVRKLRALLRQRDALREDVQRTVNRLEKANSTSTPQEVIRSLERTKSWLNEELARIEKLITDHTDNDPGLKADLDLLKSIKGVKDQVGREILALLKDGTFKSASQVAAYLGLTPVEKTSGSSVRGRPHMSKTGPSGVRAKLYVAALTASRWNKQAKAIYERLVAKGKAKKAALGAVMRKLVHLCFGVLKTRRPWDENYVATA

SEQ ID NO: 354312 - protein, 339 aa, unidentified
MELYAGTDLHSNNNYLGIIDQEGRKRYKRKLPNDPQVILEVLKPYREDLVGIVVESTYNWYWLVDTLMTEGYRVHLANPAAIQQYAGLKHADDQHDAFWLAEMLRLGILPEGYIYPKEERPVRDLLRKRGHLVKLRTSLLLSLQNIISRNCGLKLNTNKMKRLREDAVAPLLVGNEDLAWSGRISKETIDFLTRQIAQIEKVVEGKVALEAPYQYLLTIDGIGKILSLTIMLETGPIERFARAGQYVSYCRKVPTRWTSNQKTKGKGNKKNGNKYLAWAFSEAAELARRYHPPARVYYNKKMAKTNAMVAHSALAHKLARAAYYVMRDQVPFDSTRVFA

SEQ ID NO: 354313 - protein, 383 aa, unidentified
MKAVCGLDVHKDSIFLCILHSDGELFEQVFGVLTFQLEEMRKLLQKHHVFEVCMESTSIYWIPIWRVLSPHFTLRLVNPYFIKQLPGHKSDVKDAQWIAECTMKELVRGSFVPPEIIQQLRQYDRRIFDLNAEIVRKVSKVDGVLQRCNIRLSNYVSNIECKSYRDVVRRLSEGVTNPNELMKLVHGRIVNRHGAETILASLTGVVSQAEIDVLRQLHEEIGIAESHRNECQQRMLEICEKHFPEELERLQKIPGIKERAATSLIAEIGTDMSKFETANHLASWSGLRPRNDESNKKIKSRKITHGNVYLRNTIIQCAWAASRQKDCFFSRFSYHQTIVRRKNKMKVIVAVARKLLVAVWHVLHDKTDYVDFKPDREESANNG

SEQ ID NO: 354314 - protein, 317 aa, unidentified
MNQKEHTTWIGIDVSKRELEIHCYDASLKLPSSIPNTQKGIERMISKLKKCNLPHLVFEASGGYEKLLLVSLQSEGIDCSRITPSLARNFAKAKGLLAKTDAIDAQLLTDYGIKFSPRKTKTLDPILEEIQALIKYRRHLKNERHRERMHLEQMLPKSVERMIKSRMKTLQKQVDKVTDMMLALKVKSPALDEAVKLLTETKGVGEKSALSLLVALPELGKLSDKQAASLAGLAPFNRDSGKFRGQRKIYGGRREVRQALYMAALSGSRYNAVLSEFYQRLLAKGKPKKVALIAVMRKLLSYLNSLMKNNLQQLESN

SEQ ID NO: 354315 - protein, 353 aa, unidentified
MKRDKYIGMDVHQATTVVAVMDANGKVIWEKIIPTQAGPILELLESLSGPLHVTFEETTQADWIYEMVRARVAEVIACDPRRNKLLSEGSKADKVDARRLAELLRVGMLRSVYHGNDGARQLKQLAKGYQTLLSDMQRTMARIKAMYRGRGIQTPGRGVYQAKQREHWLSLLTDLGVRQRTAWLYEQLDQLGPLRREAKRAMVAESGKHRAVALLRTIPQLGPIRSALIVANLDTPHRFRTRRQLWSYSGLAVVTHMSAEYEMKDGRVVRSRKPIATRGLNRNCNRVLKDVFIGAATGGGQREPYRQYLQGLQDRGMRKEMARLTLARKISSIALTIWKKGEAFDPKKLNWAT

SEQ ID NO: 354316 - protein, 362 aa, unidentified
MEKITTHVGVDVHAERIVIAALTGQTREAEVWDIPNDPKVIRRTFQRLTAAAYELRCCYEAGPCGFELHRQLTGMGIICEVVAPSLIPVRAGDRVKTDRRDAAKLARLYRAGELTTITVPSAEQEAVRDLVRARDDVRKDLTAARHRLGKFLIRHGRLYSTGEKWTQRFWVWASKLVFERDSERLTFEHYVSQVQHLVARRAELNREIERIAKTEPYVTAVGKLSCLRGISTLSALALVAEIGDFRRFKSPRQLMAFVGLVPREYSSGGKEKRGGITKTGNGHVRRLLVEAAWSYRHRAAFGERIREALKGQPPSVAEYARKAQLRLHRRYTRLVSRGKKTQVAVTAVARELCAFTWGIMTA

SEQ ID NO: 354317 - protein, 351 aa, unidentified
MVIIGVDYHPSDQYIAFVDTETGEYGERQLNHSDRGAEKFYRELATRGVSVRVGMEATGYSRWFERLLAELGIEVWIGDAAEIKTKRVRKQKTDREDARLLLRLMRENNFPRIWVPSPENRDLRQLLWHRHRLVQMRTRIMNQLQAIAMNEGQRRKKKLWNEQGRAQLEKLPLATWASRRRKDLLELLDRMNATIEELTAAIEREAKKWPEVLRLMTHPGVGPLTALAFVLIIGTPERFKRGKQIGSYVGLIPCEDSSAGHQRLGHITKQGSSLLRFLLGEAAQSAARWDSDWRRRYVHLAMRRQRNIAKVAMARRLAVRMYWMWRNGWEYSEWIKFGSHAGQLGHRHGVN

SEQ ID NO: 354318 - protein, 404 aa, unidentified
MLYLAIDQHRDQLTINLRNEKGDVIQKEQISTKHDDINDFFDKLVRQAGRHRGYMAIVEVCGFNHWLLEKLKEYQCNEIVVIQPDCSSNKKTDKRDANALGELLWNNRKRMQDGERPNGIRRIVPAGQEDADARQLANLRQFLITQRTRLINKIKGILNKHNMQQDAPTKRYWTNKFRKWIETVELPCIDRLEVDAHLELWKTYDKQIITVETEIAKRSENNKEVAKIAAIPGISAMGAITLLSRIGDIKRFKNPDSLANYFGLTPGCHNTAGKQRLGCITKAGSPAARNVLNFAVIHVIRKDPEMKAWHKKIKARRGAKIARVAVMRKLATIIWHMLRWDKPYQFRCEAVQQPKKVKAKSTSKKGFFRHNNKNHLKESNATRKLKKEKTPLKNKGKTLVKTKA

SEQ ID NO: 354319 - protein, 345 aa, unidentified
MTQHKRIGIDTSKNVFTLHGIDDQDRPVLRINLRRAQMNSFFKKLPPTQVAMEACGGAYHWARELAALGHEVRLIPPQYVKPYVKRGKNDRNDAEAICEAAGRPGMHFVPVKTVTQQAQGMLLKVRETMVGLRTLLVNTLRGHAAEFGMIAGKGLRQVGPLLATIEQETAIPPEAKNMFALLGRQIEDLDTRIKEIDAKLAAAHKTNAVSQRLATIPGVGPVTALTLAIEIDPAAFESGRHLAAWAGLTPKEQSTGWKQRMGRISRAGHERLRVLLVSGATSVINAAMKPDSKQMTDWLRALLQRKPRKLVAVALANKMARVAWALMTRGEVYRRSAINTRAVPA

SEQ ID NO: 354320 - protein, 333 aa, unidentified
MEYYVGLDVSLKRTSICVVNQTGSIVQEGVVDSDPEAIASFVRSRAPGTVRIGIETGPTTTWLWTELHRLSLPVICIDARHAKAVLKMQVNKNDRNDAAGIARIMQTGWFKEVRVKDLDSHAVKALLASRALLVKIKRDLENQVRGLLKNLGLVIGRAKFNVFAVRAEGLIENRPELVAAVRPLLAARRAIEQQVEDLDRKVHKLARRDVQVRRFMTVPGVGPITALCFKATIDDPTRFKRSRSVGAYIGLTTRRHASGEIDWSGRISKCGDAMLRMYLFEAAGVLLTRVPKWSRLKAWGAKLTKRNGLRKAKVAVARKLAVILHRMWIDGTE

SEQ ID NO: 354321 - protein, 307 aa, unidentified
MEYTIVGIDVSKASLDVCFLPTREAMTFTNDTRGFEQLYELLQCNPEVKIFMESTGCYHKPLEDFLSMHGCSVLVVNPLRIRSFGKAFGQLAKSDRLDAEIIAQFGQAIGSKETPIPAQTHQKLQSFSRRREQLVRLLSMEKNHAEKAKFCQEDDILECLQAMVKDIEKHLQKIEQQIANLIHSDNVLQRLCNRLMAVAGIGRVTAVTLIAELPELGLIGKRQVAALAGLAPMNNDSGAMRGQRHIKGGRQSVRRVLYMAIVSAIKHNHVIKAYYQRLREAGKPAKWAMTACMRKMLLHLNSIAAAI

SEQ ID NO: 354322 - protein, 350 aa, unidentified
MPQRNVPRPAAVYGIDIGKNIFHVVGLGSDGVPVQKVRFRRDTLLQFFERAAPAIVGMESCAGSQWIARKIQALGHKVRLIPAQFVKPYVKSNKTDIIDAEAIAEAATRPTMRFAALKSEEQADLQALHRVRDQMIGTRTRLINQMRAFCLEYGIALRQGAGLFKLDLPQVLEDQSNDLSLAMRKLLADLFADLRQLEQRIGDITREIEAIASREDVARRLMTIPGIGALGATALLAAIGSGRQFQKARDLAAWLGLVPREYSTGGKQKLLGISKRGNRYVRKLLVHGARSCFRHLDRTKDRLGNWLDGLQARMHPNKAVVALAAKMARIVWVVLTKPGALYERRDPAFT

SEQ ID NO: 354323 - protein, 312 aa, unidentified
MAKLVSKITLGADVSKDKLDICHWETQELVSLSNEGAEIRRWLKALYGPVRIAIESTSDYHLALVDEAQALGYEVYLVNGYQLSHYRESVSVRNKTDPKDAWLLARYLAHEGSLLRLHPPRCRKSQELWSLLKRRAKVVGVRKEMQQSMANVSLSTKAFFTSLKQLLQRFDGRIKLLIRELGWWTDYQHCLSIPGIGPLNAAALVSAYHRGTFASANAFIAFIGFDVRLRDSGKYKGKRKLTKRGEAELRRLLYCATKPAQSYAPFDRYLSNHLERGLSKIAAKVCLARKLARIAFSLIEKQQSFKKLEIAS

SEQ ID NO: 354324 - protein, 331 aa, unidentified
MKNYLNSVGVDISKSFFDAVLFLSGEHEKFTNEKKGFIHFEKWLKKHGSNSNNVLVCFENTGYFSTNLAIYLTEKHYDYVQEHPLQIKRSIGLRRGKSDKADATDIARYAWLNRENLRLSKAPSKTLLTLQQTKTARDLLVKQAVAIKNQLKGLEVVGDRQIYGIACKSLNRVLSTIKKQILKLEGEIREKINQDEELSAKFKLCRSVTGVGLILALEMIIHTQNFTGFSEWRKFAAYSGTVPYPYQSGTSIKGRARIHPSSNQRMKSLLTLAAFAAIRVDPELRQYYKRRVEEGKPKMSVINMIRNKMLARIFSTVQRGTPFVTMSKFAA

SEQ ID NO: 354325 - protein, 422 aa, unidentified
MVLKGVPMALKIVYQICCGIDVHKTFVVACIASTNKQGVTTYKRHRFSTFTQGLKELLQWLLDNHCKDVCMESTGKYWIPIYNVLEKDCNIVLAHPKYVKAIRGKKTDKKDAKWIADLFKHDLVAGSFMPPADIRQLRDLMRYRFKLTCFQSSEKNRLQNCLTVSNIQLGNVVSDTFGKSAQAILDKILENPEDTSFDLEPFVYRSLKKKLPELRDAIDGYITPEQAGKLKVIKAHYESLESRKAELEELILALAAPYQQELAILQTAPGISSGFTAIGIISEIGTNMEAFPSAKHLCSWAGLTPTNNESAGKKKSVRVSKAGCYIKPLLVQCANAVVKSKKHPEIRNRYLRLKKRRGHKKAIIAVARMLLTALYHMLKNGENYNAELYRKSDLPPIDCEITVEQALIIARNQGYRIKSATA

SEQ ID NO: 354326 - protein, 424 aa, unidentified
MKVTYQTCCGVDVHKSFLVATIVKTTGGIEPSYQKKRFSTFNNSILEFKQWLLDNHCHDVCMESTGKYWVPVFNLLEDKINVVIANPKWVKAVKGNKDDTKDSKWIGDLFRLGLVKGSYIPCKKVRILREYTRYRYKLVSCRSSEKNRYQNALTVCNVALDSIVSDIFGKSSTSIIDYLLEQSGTSINHEEIASKLLRSLKSKEDAVIESVEGYQMTDAQKYRMRLVRAHMDYITAEINDVDKMIENMISSNPDFENAIQFLCTIPGVKRDSAITIISETGTDMSQFSSSKRLCCWAGLTPGSNESAGKKKSVRITRAGVYLKPALVQCAHAAVKSDKSPYYKKKYESLVKRRGKKRAIIAIARMILTAIYQMLSTGEQWNPSDLYKIDMPVALVEKQKAKAIKQAKKLLQREGLLPPDEPLAS

SEQ ID NO: 354327 - protein, 354 aa, unidentified
MDIKYIGMDIHKETISIAVMNGEGKLVMESIIETKAITILEFIHGVRGDLHVTFEEGTWAAWLYDLLKPHVTKLVVCDPRKNALMKEGNKSDKIDARKLADLLRGGYLRSVYHGENGLRTLKELARSYLTISKDLTRVMNRVKALYRSWGIAYGGQQVYAPHHRAEWLNKIEEGGVRRRAQFFYQQLDALRALRQAVRRDVLAESRKHEATKLLRQIPSIGPIRAALLIALMQTPHRFRTKRQLWTYSGLAIETRDSAQHRYVAGQLQRSKKPQQLRGLNQNHNHEMKEIFKSAAATASSREGPLHDFYQGLLTKGMRPAMARLTLARKIAAVTLILWKKGAHFDAEQLKPQAA

SEQ ID NO: 354328 - protein, 441 aa, unidentified
MKTLPILNPRAAGIDVGSEKLHVSIAGDAPEVFGTFTSEVYRLRDYLKANDVNTVALEATGVYWLYLYTELEAAGIEVVVVNGRHVRNLPGRKTDLADCQWLATLHAHGLLRGGFVPPAAIRRLQDYQRLRTDHVISASSQVQKMQQALERMNIKFHDVISDLTGVSGLKVVQAILQGERNPEVLLALCDTQIQKKKRQAVIESLRGTWAGEHVFALEQAHRVWEFYQRLLRECDQRIEEILKSLAGPEPSAEAVTPAKKKALTKYAGKNSPQIDQLHQLLVRVCGGRDATALPGIADYLLLQLIAETGPDLKAWPTEKQFVAWLGLSPGSKQSGKRRGNVKRQRNRAGRLFCTGARSLVQSVDKALGGFYRRLAARKGGLVAMKALARKLAGLYYRVLRHGLEYAEQGLQKYNARYEEGQRRLLVKLAAQQGIKLVSTQS

SEQ ID NO: 354329 - protein, 350 aa, unidentified
MKYRQIQAAYYCGADMHARSTYICILDPAGHTLLQGNLPNNFDKFKQTITPFLPHVAVGVESTYNYYWLADGCKEAGIPFYLGHALYMKAISGHKNKNDRLDAQTIANLLRTNYFPEAYPYPKQMRATRDLLRRRHRLVRLRAEAFGHIQLVCHQHEVLDVNTLLVKDRHHRGELISRFEQADTRKNIETDIALIESLDPLIAELEVQIRSQARYHNRRDFNSLMTIPGVGEILAFVILYETHDISRFGSVQEYSSYCRVVKCQRTSAGKAKGDAYLKMGNPYLKWAYGQIILSAQRHSEAIGKYYQRLVSKYGKGRAKSIMGHKFAIAVYYMLKNGQSFDEKRFIQEGG

SEQ ID NO: 354330 - protein, 348 aa, unidentified
MRFYTQQHAYYCGIDLHARSMYLCILNAAGEIVVHRNMPSAPEPFVEAIAPYRDDIVVGVECIFCWYWLADLCAVEHIPFVLGHALYMKAIHGGKAKNNKIDAYKIAGLLRGGMFPLAYVYPAAMRSTRDLLRRRMYLMRQRADLLAHVQNTNSQYNLPEIGKKIASKSNRAGVAERFADAAVQTTVAVDLALIDYLDKTLNELELTLARSAKQHDANAFYRLRSVPGIGKTLALVILYEIHDIGRFPRVQDFVSYCRLVKCAKESAGKKYGYTGKKIGNAFLKWAFSEAAVLFLRANPEAQRHLNRLQRKHGKAKALSILAHRLARAVYHMLRRGTAFDQARFLATA

SEQ ID NO: 354331 - protein, 330 aa, unidentified
MYLGIDTHKRYSQVAVVDGDGNLQDEIRLPNDRLSELAEQYAGSEAAIEASGNYRPIYEMLDEHLDVTLVNPSKNRIIADATVKTDRVDAKRLAQMLRADMLAESYVPPDEIRVLRDLVRTRKSLVEERTAEKNRVRAVLTRTDNTYDSELFGPTGREFLAELSLSDVDRAIIEAHLSIIDEYDQQIERLEEKIERRVLESPAAQRLLTIPGVGQYTAAVIVAEVGEIERFDEDKQLVSYAGLDPVVHQSGDKEIRGSISKEGSAPLRWALVQCASIAVRCDEYLGNFYTRLKQRKNHQIAIVATARKMLVSIFHMLTRKEPYDPPGVSA

SEQ ID NO: 354332 - protein, 320 aa, unidentified
MMAQNDLVVVGIDVAKDKVDACIRRFTLRQTFPNTAQGHRKLVAWLRKYQVGKAVMEASGGYEREWRNVLHNAGIEVRIVDPRRVRSFAQSAGRLAKNDPIDAEMIAWFAETFSQAPGQIPDAAREELAALAKARKALVDVKIRLQAQDEHAAPEPARKAYARVLKSLAAEIDKLEAAISAKVKATPEFAERAEIIESVPGLAQATSAVLIAGMPELGQVSDEVAAALIGVAPYDDDSGKRRGERYIKGGRRWVRNAIYMPCLGAATQYNPVLKAFYQRLLAKGKEPKVALVACMRKLIIILNTMLARRQKWNPGRHAMA

SEQ ID NO: 354333 - protein, 416 aa, unidentified
MNAVGIDVSSRKSTVAVLRPLGEVVCLPFDVTHDIAGLASLVEKLKALDGETRVVMEHTGRYYEAVEKALHEAGLFVCAVNPLLIKEYGANSLRRVKTDKADAVKIARYALDNWADLRDFTPMDAIRYDLKTLNRQFQLASKQRTASANNLIALLEQSFPGIRKCFDSPVRSDGTQKWVDFAHSFWHVDCVRKQPFAAFCERYRKWCKRHAYFFKLSNAEEVYALAKRAVVLTPKSKVVKVLVQEAANQLSSISRSVEVYRAEMDRLAAMLPEYPVVMAMYGVGKSYGPQLMAEIGDVRRFERKQALVAFAGIDPMPNQSGDKNVRSNKSSKRGSPYLRKTLFNVIRTYLQCAPQDEPVFQFLNRKQAEGKPFYVYMLAAANKFLRRYYAKLRDYFASLNPLQPVAPIPTILKATL

SEQ ID NO: 354334 - protein, 466 aa, unidentified
MGQGSGVSRGDRNRNARLARLRALVPSTNAIVGIDLADTKQMVVVTDHDSKVLARKTFRCRAWSLGTALDWAAQQAVAKGFTGVTVACEPTGHRWRVLGQLAADRGMPFVCVQPMVTSWSRRTEDLTFDKTDEKDAVLIARLTAQLRCYIPEPVDETWGRLRYLGARREQLVVERVSQVQQIRALLECVWPAALDTARQPFRSRTWITALSVICERDSGDLQQTRRRGLAHFEQAVRREITRRGGQKPSLRIVRHLFTALTDQTGVLAHRRGALERVQFLLRDWQHTEHQLADTEARMINILDELQLTELVTSITGLSAIGAAAILAETGDLTRFATARAVVKHAGLAPREKLSGTFTGRTKLTGQGRPSLRLAAWRAVWGAQRNNPVYAARYQHLTSRQDNKLTLPKPKPQSQRPSCATCTPSSPPASDGIPTSPPTEPEQPQQPPSPPNQGGRKQAVGASPTRH

SEQ ID NO: 354335 - protein, 405 aa, unidentified
MARVFVGHDWAEAHHDVFVEDGVGRRLGGGRLPEGIDGVARFHAMVAEHVEDPAEVVVATETERGLFVGSLVAAGYVVLAVNPLSVSRYRQRHSTSGAKSDPGDARVLAELARTDHQNHRPIAGDTELVESIKVLTRAHQSLIWTRQRQLNQLRSTLREFYPGALEAFAELASNDALAVLAVAPTPSLGRQLSISKIASALRRGGRQRRIDERATEVQSALRAKQLTAPDLVSEAMGSVVNALVAVAAELTAQIAGLEAELADRFDEHPAAKVIRSLPGLGMILGARVLAEFGDDPNRYADTKSRKNYAGTSPITRASGKTHIVLARHARNKRLADACYLWAFTALKASPGARAFYDTRRSGGDTHNRALRALANRLVGILHGCLRHDAPYDEHTAWAHRTPNAA

SEQ ID NO: 354336 - protein, 343 aa, unidentified
MSEISTIGLDLAKNVFQVHGVDRSGAVVLRRQLRRGAVEKFFAQLSPCTVGVEACGTAHHWARVIGRYGHHVRLMPPAYVKPYLKRNKNDGRDAEAICEAVSRPTMRFVVVKSIEQQATLAVHTTRALLVRQRTMIANSLRAALGELGIVAAPGFEGLRQLMTRLEAPNEEVPEIMRGALLLLAKHWQALDADERVIERQITKAARADGEARRLMQVPCVGPIIASTVLAKVPDARVFRSGRNFAAWIGLTGRDHGTGGKHRPGRISKQGDRMLRALLITGASAYLRQQRMRGVSDPWLRDLLARRPYKVVMVALAAKTARIIWAMLAKGEPYRGRASALAAA

SEQ ID NO: 354337 - protein, 407 aa, unidentified
MKRYYVGVDWADEFHQVWVSDAEGNKVAEMRVEQSPKGMGEFGRWLHERQAEQIELWAAIEKPQGRIVDFLLDHGVVVYPVNPKALDRVRDRFRMSQSKSDSFDAYVLAEFLRTDHVHLRASEPDSEQAQELKMLTRDHHRLGRHKTRLLNQIEVTLKEYYPRPLKVFSDLEAKIALDFLTQYPTPRSLSELTRRKWNRFAKREHHLGEAHCKELWEKLSQPQLAIPEHVVRAKAQLLLVLVAQLKALAQVESYSEEVERFFASMPAANLVKTLPGGKSGTTVPMLWAELGDAKSRWESFRHLQAEAGAVPVTKASGKSRVVQFRFACNKLLRYASYWFSFNSLNRCEWANKYYRDQRAKGHRHPQALRALAAKWLKIIFIMWRDDKPYDENYHLANIARQTMRQAA

SEQ ID NO: 354338 - protein, 385 aa, unidentified
MARLRGENYMENMLKTVDKNTALYVGVDVHRFEHTAVVANRFEEELGLLSFPNTLSGIESFRLWLLAIDNPQKPRIIGIEGSNGNGKLLTSIISSDYQEIYEVNPVYTKQRRDHGTTGDKSDAVDARLVIEVLTRKLDKLPKVTLQDQSEDIAILDQLTTFHNDLIRQQTRLKNQLHRLFSEDNPDYQSGRGSSFSLKALKSWKSYLGKQTNSTSSIMTPSGTRRMITKDKIKQFEQLRLLLKKADGHIHNLLGNNNLLTLPGAGIITTAKIISKTKGIKRFNLDGFIKYAGIAPIEKQSGKTKKHKQNKSGNRQLNNALYTIALTQLRCCPKAKAYFEKKIKEGKTKKHAIRCLMKRVACIVYGMLRTGEKYFLGSQTKCTSKV

SEQ ID NO: 354339 - protein, 344 aa, unidentified
MDHFAGLDVSVKETSVCILDDAGKILKEVKVASEPQALLKVLGNPAYRFKRIGLEAGPLSQWLFSALADAELPVICVETRHMQAVLKAQINKTDRNDARGIARMMRVGMYRPVHVKTLRSQKLRMLLTHRKLLQSKAIAIENDLRGTLRNFGLKVGMVGTVRFEARIQELVETIPDLAVLVEPMLVVRRALREQIVILHRRLLAIVRDDEVCRRLTTIPGVGPVVALTYRATVDVPARFRKSKSVGAVFGLTSSRYQSGEIDWSGRISRCGDEMMRTMLYEAAQSMLHSKKWSWLKAWAMQIARRRGMKRAIVALARRLAVIMHRIWIDGTEFRWTREPAMAAA

SEQ ID NO: 354340 - protein, 450 aa, unidentified
MMREAQEVEDEEHEQILERVCAIDVAKASGKVCTRVPHPSRPGARRTRVWDVDATTNAVLELGAHLAGEGIEKVTLESTSDYWRIWFYLLEAAGLDVQLVNARDVKNAPGRPKTDKLDAVWQAKLTERGMLRPSFVPPAEIRQLRDYTRLRMDLTRERTRYWQRLEKLLEDSLIKVSAVASSLDTLSVRDMLEALIAGERDPKALAGLARGRMKAKHAALIEALTGKFDDHHAELARMLLDQVDALNVQIAKLTTRIGELIAAIPAARGVDADGSTGPSTGTGPGATVLPAAARLDEITGIGPDGAQAIIAEIGLDMSRFPTAGHLVSWAKLSPRTIQSGATSRSGRTGKGNPYLKGVLGEAAAAAARTGTFLGERYRRIVKRRGKLKALVAVARSMLVIIWHLLTDPAARYHDLGSGYHTSRTDKGKKVRNHIRQLEALGYTVALTEAA

SEQ ID NO: 354341 - protein, 438 aa, unidentified
MRKKKSKATKKVHFQGLALIHPNAAGIDVGSKEHLVAVPADRDPQPVRTFQAFTPDLHELAAWLKRCGIETVALESTGIYWISLYEVLEQYGFEVRVVNARHVKHVPGRSKTDVLDCQWIQKLHSFGLLNGSFRPEAQIRKLRTYMRLRDNLVVEGSQAINHMQKALFEMNVQLSNVISDITGESGLRIIEAILTGERDPEQLASLCSIRIKASRQTVAKSLHGNWDEALLFCLKTALETYRFSQNKIQACDKCIENQLAAFEIRRALPNATHNLRTQLHQVCGVDLTKIPGIKEQSAQIIISEVGLDMSPWNTEKQFSSFLGLCPNNLITGGKILRRATRKVYNRAADTLRLCAQSLTHSKSALGAKYRRLRARLGAPKAIVAMAHHLARLVYRMLRYGENYVEKGIEHYEHKFRLQRIKWLQKEAMSLNLQVVAVQ

SEQ ID NO: 354342 - protein, 468 aa, unidentified
MKRKSRGAKCQKVSPFDGELKLIEADAAAIDVGSRSHWVAVNPQRDPDPVREFGAFTMDLMRLADWLAQCEVKSVVMEATGVYWVGLYDLLESRGFKVEVVDAHTVRHLPGRSKSDVKDCQWLRRLYSYGLLRGSFRPPEQIRQLRNYLRSCTKIVEAAAQQQLRMQKALTLMNIQLHHVISDISGLTGLSIVRAIVGGERDPKQLAKLRDPRIRASKETVEKSLQGHWQEELLFDLKMALASYDHFQGQIAAYQEQMRRALQEVPSKVDVLEKPLPAARPKVFHKRPGLSREDQLDLRVELYRISGVDLTRIDGIGLQTAQTVFFEIGTDVNPWPNEEAFSSWLGLSPNHRISGGKVLKRGSRKVVNPLSIALRLAARTLRNSQSALGANFRRLIAKIGMPKAITAMARKLAVLIYRMLKYGTQYVDKGMEHYEAKYRATKLQYLRSQAAKLGMSLVANAPALTAAR

SEQ ID NO: 354343 - protein, 400 aa, unidentified
MISVGIDVSKGKSTVCVLKPYGEIVCRPFEMQHVEKDLEDFHNLLQKLEGEIRIVMEATGIYHLPVLTFLHDKGYFVSVVNPFAMKKYAKDNSLRGAKTDKLDSIMIANYGIEKWFKLQRYEGDKEIYAELKLLGRRYRYYMELHVKALQELTHILDYVMPGIKKMFNSWNEANGKDKLSDFVERFWHFDLITSMSLEKFTEEYLVWAKEKKYHRSRSKAEAVYELASSGIPTLSSSTPSTKMLVQEAVSVLRTVDSSLSLILTRMKELAKSLPEYSTVREMGGVGDVLAVKLIAEIGDVRRLHNAKALIAWAGIDPPPYESGQFVGSKRKITKRGSSTLRKVGYEVMRVLKSHPAPKDDAVYNYILKKESEGKSKKHAKIAGLNKFLRIYYARVSEVYQ

SEQ ID NO: 354344 - protein, 331 aa, unidentified
MEEVKRFVGIDVAKVALDVFIGSAGGAFSVANDEVGIQELLRQMKPADFVIVEATGGLETPVASALAAAGIAVAIVNPRQVRDFARATGKLAKTDRLDAEVLARFGEAIRPEARPLADEQAQALEALVTRRRQLVEMLTAEKNRRARAPKVLHRSIDEHIRWLEKRLSEFDDELGELIRTTPLWRERDELLRSVPGVGKVLSSTLLAQLPELGMLSRKQIAALAGLAPFNRDSGNMRGSRCIWGGRAHVRRVLYMATVAGVRSNPTIRTFYLRLRTNGKHAKPALTACMRKLLVILNAMLHNKTHWQTPAPTFLTSSLSPLLGAVSEHGCC

SEQ ID NO: 354345 - protein, 427 aa, unidentified
MLIIEAESENKSRSEPMQVIHERCAALDVHKKTVVTTMMLTQADGSVQEYTRTFLTMTADLLALDDWLDSHEIKVIAMESTGVFWRPVFNVLEEGRQVILVNAQHMKAVPGRKTDVKDSQWLADLLRHGLLKASFIPPKPVRELRDLMRYRKTIVQERADEVNRLQKVLETANIKLASVATDVLGKSGRSMLDAMLGGQDDAEVLAELARGRLRAKLADLRKALDGRVQPHHRVLLTRILAHIDFLEESLAQLQAEMEQYLHPFEEAMQLAQSMVGIDETAAASILAEIGTDMTRFASDKHLASWAGVCPGNKQSGGKRLSGKTTKGNPYLRAILFEVAWAIAHTKDNYWSAFYHRMARRHGKKKAIMALAHKVLVILYHILRTKKPYTDLGADYFDQRDRERIERHHIHRLEQLGYTVTLAPKEAA

SEQ ID NO: 354346 - protein, 393 aa, unidentified
MFYLGIDVGKFTHSLCLIDEAGHHDIWQINNDKSGFESLRKKINSLNLLIESRLLVGMEATGHYFLNIYDFLLHLGLSTEQIALLNPLQVKSFRNTNLRGAKSDNVDAEQIAVLLQFGNFDRCNVSTDHIMNLRELTRLKSDLTANLGNLKRKMIAVVDRIFPEFAKIFANKFGLTVVTLLTDYQTPEEFAALSLEELTALIKGLSKRGVNRDKIQRLHEAARNSIGISFGREGFKIELSILLTQLKSIEEQIDFLEGKIAEMVNELNSPLFTIPGIGKTTGAAILAEIGDINHFASAVKLIAFAGLDPKLKSSGTYQGRTPISKRGSKYLRSALWYSAMVLCRVDEKFHKQYQDRKKLGKSHRYAVTAAANKLTKIVYHVLKNKCVYDPNLA

SEQ ID NO: 354347 - protein, 358 aa, unidentified
MQRNEISFKGQKIFIGIDVHAKSWKVAIAPEIGAVKGHSQKPSAKELFEFLKKNYPDGEYKAVYESGFSGFSTYYALTEVGIDCIVIHAADVPTTQYEEVMKTDRIDAAKLARSLKAGQLKGNYVPEKQFIDDRSVVRIRRTIQKQLSGYKSRVKHLLHCHGVEMPERFSKIQTHWSRAFITWLMNDVKLMSDTRMSLDLLIRQVEVLRGTLLEATRQLRKMSQTERYKRRYDLLRTIPGIGPIVSMCILTEVCDVKRFHNENEFAAYLGLVPTSHSSGEKTVHGEKTFRGNKQLGPMVVEAAWVAIGWDAGLGAQYFQYKKRMEPQEAIVRIARKLSNIIFSVLKNEKEYVPYNTGN

SEQ ID NO: 354348 - protein, 390 aa, unidentified
MQPTQVQDVTRDEEVLAVSLELASKSWKVGLDDGKRRAPAVHGVEHATPQGRLEEAIAVIEKVKKKWGLASGVRVVVVFEAGQDGFWIQRALSERGYEALVVDAASIPVERRARRAKTDRLDAIRLVLALRAWLRGERDRMKVVRVPPVEAEGQRHLVRDRGTLQKEIGQHRDRMRKLLRTVGCWESIEGDLTGRLERGEVQGYGGSALPAALQERLVRECARLRLVEEQLAQLEKALPEQLPPAVRQRMVQLMQLKAIGQVGAQRLLLELFWRQFANRREVGACVGLVPQPYDSGESRVDQGISKAGNRRVRALLIEMAWMWLRWQPQSELAQWFAQRTRGTGSNKRSKRMAIVAVARRLVILLWRYLKDGVLPKGVQLKPVKVTLKAA

SEQ ID NO: 354349 - protein, 386 aa, unidentified
MRHMEQVETAQTGATVFVAMELSKMAWLLAVQGSPSGRASSHRLDGGDVDGLLALLRRLAAREQGASGEKEQVVLGYEAGYDGFWLHRRLAAEGIACWVMDPGSLQVDRRARRAKTDRLDAVMLLRALTAWCRGDRAACRMVQVPSAEREDARRTHRERQRLIAERVQHVNRIKRLLATQCIHDHQPLRRGRRERLGALRTGDGRVLPPCLRREIEREFLRLELVREQIVAVEAERDTAVAAPATDDADVAKVALLAKLGGIGTELATVLVREALYRPFANRKEVASYAGLTPSPFASGDRHRDQGISKAGYPLLRKSMVELAWLWLRYQPGTALAQWFTKRVGEICGRIRKISAVALARKLLVALWRYVTTGLVPEDARLKPAAA

SEQ ID NO: 354350 - protein, 344 aa, unidentified
MYFIGVDHHKQVSVMTVLDEDGRELKNGRVPPFRRYVEEFLRPYRPFVAVLEAGWASYVMADLLRELGGEVKMANPVEVKAIAHARIKTDKRDSRTLAQLLRAGLIPEVFQREAWNRRAQRVMRLRAHWVRKQTELRNKIRALLGQQGEEIRLEVERQERSLFTQKGLEILKTLPLEDEDKMILDDLVRGHREVAAHIKQSDGLVEALYGQIKEASRIDTVPGFATTLSVLVAVEIADIRRFDSPAQLHAYAGVVPSTHASGERQFHGHITKQGSAWLRWAVLEAVYPSIKKDLGLRILYQRLARRKGPNVAKVAVARRLLTIIYRILTEGRDYLPGLGKQSAA

SEQ ID NO: 354351 - protein, 356 aa, unidentified
MNKRSKLNFSGQPIYIGLDVHKKSWSVSIFSEQGEYKTFSQTPKVETLVQYLQHHFPGAQYRSVYEAGYCGFWVHDQLGEQGIQNIVANPADIPTQDKERRNKRDRVDCRKLARGLRSGDIKGIYTPPRWKLEDRSLIRTRLSMGRKQGRCKNQIKSILLFYGVEIPEQREIGHWSRRFIRWIEGIQMERTSGNIALKIHLEELCHLRQIIAKLNRAIVALARTDQYRSWISLLKTIPGISTLGAMILLAELYEITRFRSIDELCSYVGLIPDTHGSGEKEHVGGITQRHHSYLRWLLIEASWVAVRKDPVLLESFQEYCKRMRKNKAIIKIARKLLNRIRYVLKNQAEYVAGVLE

SEQ ID NO: 354352 - protein, 371 aa, unidentified
MNSIVYVGMDVHKEQYTLCCYSYDTDKVEYKQTIPSDYKLVLKYMEQVRSRYEGEASFVCGYEAGCLGYSLYQQLKDHAVDCKILAPSTMAVTNTHHVKTDKRDAANIARCLAFHTYSEVYVPDNDDNDVKEYIRMRDDQKLYLKKVKQQILAFILRQGKRFEGGKTYWTIAHLKWLKTLELSDLQREALDEYLLTYEYLTEKISRFDERIEELASVERYEEKVKHMSCLLGIKTHTALSMIVEVGDFERFEKAPKFASFLGLVPSEDSSDTRVNRYSITKAGNSHLRRLLVEAAQSYTRENVGHKSVALKQRQKGNPPEVIAYADKANERLRRRFYKMTLNKGVNRNVAATAIARELACFIRGMMTEHVS

SEQ ID NO: 354353 - protein, 342 aa, unidentified
MSVIIGVDPHKATHTAVAIDRTGAELARARVRATRKQVPQLLRWAEPLGERTWAVESAGGLGYLLSQQLVASGETVLDVPSTLAARIRVLGSGRSDKNDPNDALSVAIAALRTPALREVVVADHSEVLRLLAKRNIDIGNHRTRVVCRLHNLLMELAPGGIAKELNASDAIAFLERIETANPAGAARRDQATELLADVQRLDEQLKASHRRIRTAVAASETSLTELFGVGPIIACYLIGFTGDIGRFASRDAYAAYNGTAPVERSSGGRVVHRVSQRGNRRLNHALHLAAICQIRQPHSDGRAYFERKLAEGKTKKDAIRSLKRHISNAVYRQLLIDTDAHR

SEQ ID NO: 354354 - protein, 360 aa, unidentified
MEVGQTVADHGVVGGVDTHKDLHVAAVVDELDRVLESRCFATTRHGYKQMLTWMRSFGQLRRIGVEATGTYGAGLLRYMQNAGVEVLEVTTPDTHDRRKRGKNDDLDAQNAAHAAFAGRRTVTPKSRDGMVESLRVLKACRKTAVAARRVALQMIHNTIVCAPDDLRETLRKMTRMQLIRTLAAWRPDLTDYRSVVSAYRITLKSLGRRYLELHDEIADLDTMIVAIVDELAPALVARNSIGHGSAAQLLVTAGDNAERLQSEASFAALCGASPVPASSGKTTRHRLNRGGDRAANSALHIIAIGRLRTDPRTKAYIAKRVAEGHSKLEAIRCLKRYIAREVFSLISQRKREINQGRNAA

SEQ ID NO: 354355 - protein, 376 aa, unidentified
MTKIIRIGVDTSKSVFVLHGVDAAERVVLRKRLRRRQVLELFAQLEPTKVGLEACGAAHYWARELQGLGHEVVLLPPQYVKPYVKRNKNDAADAEAICEAMSRPTMRFVPVKTAEQQAALMLVGTRDALVRRRTQLTNAIRGYAAEFGLIAAKGLDKIEPLLARIAAHAPLPGLAQELFAAHAKEYVRLQAQIREIEAKLRAWHKHNELSRRLAEVPGIGPIGATLAVMKVPNPKAFRCGRDFSAWIGLTPKDHSTAGKTRLGVITRAGDEALRSALVAGATAVIQHVRQGKGHPSPWLIELVRRKPAKLAAVALANKNARIAWKLMVSTERYNPAHSRTVAASGGRGPALRGGSAPRPPLAPHDKSREITATTRA

SEQ ID NO: 354356 - protein, 347 aa, unidentified
MIIIGCDFHTRMEQIAMVDTETGEVLEKKLDHESGEAKRFYEGLKEPALVGIESTGYTIWFAEMLAGLGHELVVGEAGKIRAKETRRQKHDRRDAEHILNLLVRGDFPQIWLPSASERDVRVLLEHRHQLVQLRTRAKNGVQAMALSYGVRRRSRLWSAAGQEELQKIPLREGMARRREDLVRLVAQLGQWVKQLDQRIEEEVARREDAQRLMTHPGVGPLTALGTVLVLGPVERFPDAKHVTSYVGLIPQEDSSGGRQRFGHLTKQGNRLLRFLLVEAAQIASRYDPGLRRTYRRLAFRKGLASAKVAVARKLAIRLYIMLRDGIDYQEFCRRGSHAGMLVNEPLV

SEQ ID NO: 354357 - protein, 367 aa, unidentified
MKKGSTPAAKQSSNFSRQKLTIGLDLGDRSSWYCVLDEAGNVVGEQRVSTTAKAMREGFSRIARSRIALETGTHSPWVSRLLSELGHEVIVAHARNVRRIGESRRKDDRLDAQTLARLVRIDPQLLCPVKHRSAKAQADLTVIRARAGLVRARTALVNTARGLAKSYGERLRSCNVRNMNPEKAEQLSPELQTALEPLLAGIETLSEQIREYNQRIEALAQQSYPEMALLTQIKGVGTLIALTFLLTLEDAHGFGKSRDVGCYLGLQPGRRNSGQSEPQMHISKQGDPYLRTLLVQGAQHILGPFGADCDLRRWGLKLAERGGRNGKKRAIIATARKLAILLHHLWVTGEIYEPFYNRNCLATAAVA

SEQ ID NO: 354358 - protein, 393 aa, unidentified
MQQPLSDPGQPPRKETQTFRTMTADLLALADWLSELECTHVAMESTGVYWRPIYNLLEGLFELLLVNAQHIKTVPGRKTDVKDAAWIAELLRHGLLRGSFVPSRPQRQLRELTRYRTTLVQERARTINRLQNVLEDANIKLASVVTDIRGVSARAMLEALIAGERDVQVLSELARGRMRSKRAELEEALRGCFAPHHSFLLTEHLSHIDYLDEAIERVSATVEQSLAADQDAVALLDTIPGVGQHTAEILIAEIGTDMNRFPSAKHLASWAGMCPGNRESGGKRLSGKTRKGSRWLRQALVEVAHVASKTKGTYLAAQYQRLASRRGKKRALVALGHTVLVIAYHILKQRQPYRDLGAMYFDKLEQHRVEKRLVHRLECLGYQVILQPSAVTG

SEQ ID NO: 354359 - protein, 343 aa, unidentified
MSTSCLGIDVAQATLECCLLRETRRFRRQVPNTPEGFTALAAWIGQHDATGVPVCLEATGGYEEAVATVFAEQGATVYVANPYRIKRWGESALLRTKTDRVDAQAIAEFGRTAQKLHPWQPLPPAFRALRDLERYRRDLCATRQAYQNRRSAPGCGPTVAEDCAQLLAALDAQLATVDAQIGTLLTETPDLQQTYILLRSIIGIGHVTAVLLLGEIGDARQFQEGGQLVAHAGVSVRHADSGTSVHAHPRLSKRGNAALRAGLYFPAMTAMRHLPHLRAFAQRLAARGCAPKEIICAVMRKLLELIFAVLRDRRPYDPQYRHPRAQQAAIPTPTSLPHVAEGS

SEQ ID NO: 354360 - protein, 343 aa, unidentified
MKEVTTIGLDIAKNVFQVHGIDGAGEVRIARRLRRSQMIPFFEKLPPCLVGIEACPTSHHWSRELTRLGHEVRLMPANYVKAYVKRNKNDAHDAAAICEAVTRPTMRFVETKTREQQAALMLHRTRQLFIRQRTMLSNAIRGHMAELGVVAPVGRKGLASLMEIIADPADTRLPSVARACLEALAGQYMQVHSEIAVVERRIHAWHRSSEMSRRLGEVPGIGPIIATALVATVSDPSAFKSGREMAAWIGLVPKQNSTGGKERLGSISKQGNRYLRWLLVVGALAVIRYGQKHGFKNRPWLARLMERRPTKVAAVALANKIARIAWVVMARGERYHEPALPAA

SEQ ID NO: 354361 - protein, 336 aa, unidentified
MYSGIDLHSNNSVVAIIDDGDRVVAQKRLPNEIAKIVGFLARWQGEMAGVVVESTYNWYWLVDGLQDAGFHVHLANTAAIKQYEGLKHSGDETDAQHLAHLLRLGILPTGTILPKEQRAVRDLARKRMQLVQSCTTHVLAVENIMARQLGGRMTSNQIKRLTHDTIDSLPLAADVGLAIKANVAVIATLQSQIEVLEKRLRERVKPRPQYGLLTSVPGIGQTLATVILLETGPIDRFADVGNFASYARCVDSAHTSNRKKKGEGNVKNGNRYLAWAFVEAANFARRFCPEAKRFHERKKARTNNIVATKALAHKLARACYHILKEGKPFDVTRCFA

SEQ ID NO: 354362 - protein, 348 aa, unidentified
MKIIGCDFHPSYQQIALVNTETGELWEGRLEHESGEARRFYQGLRGPVRVGLEAVGNSQWFEQMLAELGQELWIGDAAQIRSLVVRRQKTDRRDAWHLLELLRDGRFPRLWVPSAQMRDLRQLLRHRQKLVEMRTQVKNQLQHLALNQGVRRKRRLWSATGRLLLESLPLQGWTARRRNDLLAMLDRLETQVEEMDRAVRAEAEQRPEVRLLMTHPGVGPVVGLAYVLTLGPVGRFPRGKHVASYLGLIPSEHSSGGRQKLGSISKQGNTMMRTLLVEAAQTAARFDPELRRDYQRLAAKKHKALAKVMVARKLAVRMYWMLREQKAYTPPRPVARMQGSPGHSVVAG

SEQ ID NO: 354363 - protein, 337 aa, unidentified
MKYSGIDLHSNNSVVTVTDERDRVVAEKRLPNDLSKIVAFLLPWRDELAGVVVESTYNWYWLVDGLQEAGFEVKLANTGAIKKYDGLKHSGDEADARQLAHLLRLGILPTGTILPPEHRATRDLARKRMQLVRSRTSHILAIENILARERAVKITSNQIKRLTAVDVDQMGLSADVALAVQSNLAVVTTLGAQIELLEKRLQEKLGERPEYALLTSVPGIGRILAAIILLETGPIERFDAVGNYASYARCVDSQRLSNGKKKGEGNAKNGNKYLVWAFVEAANFALRFNAEAKRFYERKKARTNNVVATKALAHKLARACFHILKERAPFDTRRCFA

SEQ ID NO: 354364 - protein, 307 aa, unidentified
MNGIGIDVSKAMLDVAVHRGPFARFHNTPAGHRRLLSWLARREAGQIVLEASGGYEQRVLDALFDAGHQVVRADARRCHAFAAATGVSAKTDRLDAANLACMAATLELRPYQPMEPWRRKLREFVRARQQLVDLTMSAENQLEHVTETTLRRALQANINQMKKNCLRLEKHIAEQVRQQPQLEAMRAFKGVGATLQAVIASYLPELGTLDGKAIAKLVGVAPIAHDSGSMRGMRRICGGRIEVRNVLYMACLSAIQHEPRIREFYRSLRARGKPGKVAVVAAMRKMLVILNARARDTLAGVAQAIPT

SEQ ID NO: 354365 - protein, 327 aa, unidentified
MFCLGIDVSKNKLDLCLFPGNGKKKTKSIKNQVGVERDICDWLQKQKCPPEQVMVVMEATSVYHENVAYGLHGNTPVTVCIGNPQRVREFARGMGIRTKNDAVDAGVLARYGELKQPDAWVPPPPEVRKLKDLLRLRDAIVEDVQRATNRLEKANSTQTAGEVTDSLERTKKSHEKELKRINALIDDHMDKNDGLKDDLKLLESIKGIGGVVGTTMLSVLRTCQFRNAGQVAAWLGVVPVEKTSGSSVRGLARMSKTGPADVRAKLYMAAIVAARWNRPVRALYERLMAKGKPAKVALGAVMRKLVHLCFGVLKTREPWNENYVATA

SEQ ID NO: 354366 - protein, 455 aa, unidentified
MRKSAKKLSKKKGTTSPLQVIHPKAAGIDLGAKEHWVCVPKEVVESNIRCFGCSTPELVALADWLNECGVTTIAMESTGVEWIPLFQILSARGLSVFLVNAKSVKTVPGRKSDVLDCQWLQQLHSYGLLSASFVPEGEIAVLRSYLRQRENLIRSGTTHVQRMQKALTQMNLQLHKVISDITGVTGLNIIRAIIGGERNPQLLAQLADKRIKSSPQQIQDALTGNYREEMVFILAQELSLYEFYQQQIVDIDHQIEQCLTQFPSASNEPAPASKKSKRRRSNYPSFDLHSHLYRITGVDFTTIDGLDVMTVQTILSEVGLDPSKFKSVKHFTSWLGLCPGCRITGGKRKSSQTRQVVNRAATAFRLAAQALTRSNSALGAFYRKIRARAGSPKAITATAHKIARLFYTLWSKKESYVDPGADYYEQQYRERVVKNLRKKARSLGFELVEQPSPAI

SEQ ID NO: 354367 - protein, 395 aa, unidentified
MIDVSKASSEVAILVNGEKVHGYTMSNDALGFARLLGDLRTVHKPEIIFEATGVYSRRLQAFLDEHGYAYTRLNPLEAKKQLDSLRVRKTDQIDAEKLAQSQFVLNRKPTYVQEEVYQNLRALSRFYQNLTEDIVRAKNRLHKVLQVTFPELENILSTPSGEQYWNLVTAFPCKDFVLDLSKDELSESIRQSTSKRISDKRVAYLAEKLIALANQSYCAVKKTSPILEEVRYYGKELLRLSEQRQTVLDQMVELAQPLPEYDILLSIPGIAETTATSIIGELGDIRRFQSANQINAFIGIDLRHYESGNFLAKEHITKRGNPYARKILFKCIHNIASASHTNPCHIADFYEKRKRQSQTTSTKPHTIASIHRLIRTMYYLITHNKLYDYRSTQNQ

SEQ ID NO: 354368 - protein, 404 aa, unidentified
MKGPIVSIDVSKGKSDYQAFKNLNVKYTGSRSIKHTKEGFDEIVNLVQEMEKKLEAEVCVVYEATGVYHRVLKKVLEDNNIKQFIINPLLSAKTRKNDSLRCPKTDKLDPKSIAKTYYSHSLHNSHKQETIYHELRELSRYYEDILVHIRKDKVAFRAQLDVVFPGYDTLYDDLYGPVALAVIEKYPHPEMLQKKKINTVSKVIQSKTCHRQAVSDTMADKATEYSKTIYSGCDKDDIEVLILQRFIKKLKEDMAEAERTIGEMVKLAQELPDFSIIKAIPGIGDNLAARIIAELGDMARFKKKNELVAFAGLNPGISESGQNDGDHMHITKKGNKRLRCLLYLAVTCSIRLKRDDNSIKDFYIKKKQQSNPMCSKAAKTACASKLVRIIYSMCKTGELYQYNK

SEQ ID NO: 354369 - protein, 380 aa, unidentified
MEYCTTIGADVSDRTTKICVMTKADGGERRIVVETTCATTEAGFEEAFSKFDRSWPVVFETGTHCRWMDRLFRKMGFRTIIGNPGKIPSITKSNTKNDRNDARELARLALADPAMLHPVFLRGETFQQMLRFHHARNMLISQRTQTINQIRGFAKSMGHRIERTSTERFHELGKAEWPEELEECAWPLMGSLKTINLKIKAYDKLIARLAERPEFKAMVERVRAVYGVGIIGSTVFIAAIGGRPDRFGHARDVGAYLGMTPKQDKSGDDDKQLHITHAGTEIVRTALVECAGIVMMSNAKDTDLKLKGPRSAMRGGKIARRKAKVAVARGLAVAMLALLKDPEREYVPLSEEGRRGFERYRAEMEYLAMGKAAKREKKVA

SEQ ID NO: 354370 - protein, 428 aa, unidentified
MTNRQPIPTDALLVAIDIAKVRNEVLIEAPNHKRRRRLSVLNTRAEHDRLIETLRAYGKPVICAFEATGNYHRPIAWRLIEAGFDVRLVSSMALARTREALHNGWDKNDPRDAQVILHMLRIGATQRYHDPLRAGINDVQELSKTHEAIAKAKTEIQHRILTHYLPLYFPETERFRGNSRSDWFFAFLDAFPTPASIMALSKEAFIEAAWDVVGRKVSKERLLADIYETARTSIGLPLPIDAPAIRMFRMVIAEARSLIRQRNEIEDMADAMLRDSTDYKALRKVPGIGPVIALTILAEGGDLRRFRHHRQFLKFCGLDLSTQQSGQHRGQTRLSKFGNARLRRTLWIAGQVAIRQRENGFRHKFERYIAKDRDNPDLRRKALTAITAKMARVVHAIIKSGSDYRPFVEGRVPGGRISFCGAVRAPKG

SEQ ID NO: 354371 - protein, 462 aa, unidentified
MKPFYMGIDVSKGYADFVIINPKKKPVTQGFQLDDTFDGHKALYNIVARFVSNHPDSRLFAGMESTGGYENNWYNSLVAFQGSLNILTARLNPLGVKHNSQAGLKKNTTDKISAQNVAEYLVAHPEKVNYQQQDQLAGLRKQWGFIQMLTKQRTQFINQFKGLLYSSNPELLRYCQTETPAWILKVAVTYPSAARLKRAKAKTITKIPYVTLKKAQQIVSDAQRSVASATDTTTEQLIVATAQQVIHLNKTIDAQTRRMIEACAMPEVELLKTFAGISNKSAIGLMIEIQTVERFANAKKLASFFGVHPVYKKSGDGVGGIKMSKQGRKAPRHILYMSTLAAIKCNPLIKQTYEKHQKNGKHNMAAMGVCMHKILRIIYGMLKHQKAFEPQIDIANQHRSVNGRNAAPRKNEARRFQAYDNKAPVSRRQTIKRLERDRSHSVLDTKSGITVPIPVGDSIAKM

SEQ ID NO: 354372 - protein, 458 aa, unidentified
MKNRKPKSKTAKKKKRRSLSVVNPNAAGIDVGSRSHYVAIPAHCGDDTVREFGCLTPELHEMAKWLKQNGVETVAMESTGVYWIPVAQILEQYDIEVNLVDGRAAKNVPGRKSDVQDCQWIQELHSFGLLRAAFRPTDEMVVLRSYWRHRAELVTEASEQIHHMQKSLELMNLQLHKVLSDITGISGMKIIRAIVSGERNTSVLAQMRHKSVKSSEQTIIDALTGDWRQEHLFTLKQALESYDFHQSQMAACDQQIEQYMQQFSSQGDMDKLEGRNMGARRKNQVHFDLRSELYRITGVDLTTIDSIQALTAQTVISECGYDMSRFPTEGHFASWLGLCPNHEITGGKVRRRGTRKVYNRAAHALRVAAQSLHHSKTALGAYYRRMKGRVGPSKANTATAHKLAKLIYRMLKFGMDYVDTGQEAYEQQYQERLLNSIRKRAKQMGYEVVALQSGEVVS

SEQ ID NO: 354373 - protein, 312 aa, unidentified
MTDITIGADISKDHIDLHQLPDGQRLRVTNDRKGFAPILKWIGEATVARIVYEPTGAYHKAFERFMLAHGIALSKVNPRLARRFAEATGGLAKTDRIDAEMLARYGLLLNPRLLRRNADVLNDLKELHAARLALIKDRTATMNRQKNLTQSLLKRHNSARLKQIEVQLAQVDQTIMARIAADESLKTRFDIIVSIPGLSTITAFALLIEMPELGELEDRAAAALSGLAPRDRQSGRWTGHAFIAGGRAIVRKALYMPAVVATRFNPDLKAKYEQLIKAGKPPKVAITAIMRKLVVLVNTLLRQNRKWKPKPA

SEQ ID NO: 354374 - protein, 427 aa, unidentified
MTHTDQQQPEFAGFVAIDWADEKHAGAICSANGKVTIFELEQSAEAIDRWASALRDRFDGRPIAICLEQSKGALIYALMKYEFFTLYPINPKQLKRFRESLAPSGAKDDPSDARFLLELLTKHRDRLHAWHPDNADTRLIGQLAEDRRTLVGQRTRLTNALKSRLKQYFPLALEVLGELDTELAAAFLLRWSSLEALKQEEPERVAEFYRMMHCNHPKLIQERLERIAQSVPLVTDPAITASGQMLVVSLASQLQALINPLKQYNLKLAELMEQHPDAPIFKSFPGAGDALAPRILAAFGSDRERLSRPDEMQRLSGIAPVTVQSGKSLHVHRRWACNKFLRQTFHEFALHSLAKCAWAKAYYDMMCKERGLKHQAAVRALAFKWIRILYRCWKTSTLYSEAHYFQSLYKRQSPLLKYMGSQSPQQT

SEQ ID NO: 354375 - protein, 351 aa, unidentified
MPQDVSAAAVFLGVDAHSEHCTFCAIDQQGKIIMRKTIPTNTKQLRDAVRELPEHTWAMIEASSVSIFVHEALASVLDRVIICETRENRLISKSQDKSDDMDAWRLARLLRLGEFKDVYIPERSQQEIRELVRAYQNAVGDVVRAKNRIYNKYSRYGIQITDSAYGEGRHDVLKQLNRPGLKTVFDAMYTVLDAAEKAKDDLDHALRARLSHRKEYKLLKTIPGVGPVCAAIMVAIIVDPDRFPHKHRLWSYAGVGAIEDSTGKIVRVKRQKYYNRLLKYAAMMAAQNAIKGDNRFARLYKAIVEKLEDPKKPKRAPGIAKKVVARAILSTAWGMWRTGTAYRENALAKSA

SEQ ID NO: 354376 - protein, 426 aa, unidentified
MTPDEKIAYARSFTAHVGVDTGKVSHAVVVSGPDGRRSKPFTVKIGRADFDEADAQIRRLAPPDTPREKVLVGLEFAGQYGYTFAHDLARRGYPIVNVLPTVTKRMKEVEDNSPLKTDGKDATLIARLVAEGKFVRFPFLDPTYAALRHLAVNRHRLGVEGVRYKNRLQSLLDLGWPEFLPVFKENLMAKTPMALLARWPLPEDLLGAPLRTVMRVAREASRNHIDRDRIRALLASARETVGVRTGADERRREMLQVLDRLALVREQIAEVELWLAAAIASCPPARALATVPEVGTVCAATIVSELGMPDDYEHPRQVLKLAGMNLVEKSSGLHKGRKRQSKRGRPLLRRQLYLLAGRWCQRRGIYRAYYEALVARNGGHKTKAVCAVARKLVPMLLAVMQSGEPFDRARWEAARLLPRVKAVEEQ

SEQ ID NO: 354377 - protein, 430 aa, unidentified
MEIVYPRSCGVDVHKSFIVAVICISESVKPKYIKKRFSTFNNQLIQFRDWLIENNCQNVCMESTGKYYIPVYNALEGHISNVVVANPKWVKAIKGEKDDNKDAKWIADLFKFGIVRSSYIPEKDIRVLREFTRYQYKLVNMRSSEKNRFQNALTTGNCKLDLVFSDVFGKSASAIVDTILSNDPYTSEDILSKVHARCKASNEDILSAVEGIQLNQFQKARIQIVQKHMEYLDSLLDEIQHHIDLMVANYEEYIQILCTIPGINRKSAITIISEIGTDMSQWSSHRKLAAWAGLAPGCNESAGKKKSVKISKAGVYLKPCLVQVAHAAVKDKECEYYADKFKKISKRRGKKRAIIAIARKILIAVYHLLKTGEVFNPTDMADIETTKKQRIEYIKNNLRNAFNQLSRTGLSEAEILQLVRKESTNSPQIE

SEQ ID NO: 354378 - protein, 390 aa, unidentified
MKKDSIAKLQVTKSQIRRMAAKQRVTVGLDLGDRSSRYCILNEAGGKASEDQLATTTVGLDSLFAKMASCRIALEVGTHSPWVSRHLAAMGHEVIVANPRKVRLITQSVKKNDRMDAEQLARLARVDPQLLAPIRHRGPEAQGDLAVIRARAELVEARTALINAARGLAKPMGDRLKSCDADYVKETLADGLKEATQRAIRPLLKSVEEMTKQIGVYDKKIQEIEKGYPETKVLRQVHGVGTLIALTFILTLEDAERFEHSRDVGPYLGLTRKQRDSGESQPELGISKAGDELMRRLLVQAAHCILRDGAPDSDLKAWGMTKVQAGAKTGSGKKGSKRRKKKAAVAVARKLAVLLHKLWVTGEVYDPQYNRKAVEAARGKGKGKGKAAAA

SEQ ID NO: 354379 - protein, 403 aa, unidentified
MNSVGIDISKGRSTIAVMRPFGEVVISPFEVRHTDSELSELARQLKSLNGETRVVMETTGNYHAPVAKLLHDAGLYVSVINAKLVHGYGNNDLRRVKTDRKDAVKLANYGLDRWLTLPRYVPEEDTRLLLKNCYRQYRQYSKVQTVLKNNLISLLDTVFPNVNRLFSSPIRGDGSEKWVDFVAEFWHCRCVSEKSQKAFTNKYQRWCRKHGYNFSEAKAHTIHAEACGHIDVIPKSETTKLLVEQAVAQLRATSAALAALKHEMQALASMLPEYPAVMDMFGVGPTLGPQLMAEIGDVRRFYSKKALVAYAGLDAPPNDSGDVTGRHKSMSKVGASSLRRTLFLVMSVYLQNAPLDEPVYQFMDKKRAEGKPYRVYMMASANKFLRIYYATVKAYLESLEHTA

SEQ ID NO: 354380 - protein, 338 aa, unidentified
MITQSHFIGIDVSKLTLDVYVKSTDQHLTADNNEAGFAFILTFVKEQQIDISDALFCFENTGMYSKPLAHFMQNNRYTFLEAHPLDVKQSLGAVRGKNDKIDAMRLAMYAYRKREELKPTKALSPHCERLQLLASLRRKLVTERGGLVARRGEMTQVLKLCRQDVLIAVQDALIAELNKQIKILDKEIQLVIKSSQELLNSYTLLLSIVGVGPVVATALLIYTGNFTKFNTAREFAAYCGLIPYDHQSGTSVRRNKKTSRLANQEMKSLLDRGATSVIAHDEDMKAYYERRVKAGKAERSVINAVRCKIVDPVFTVIKEQRPSIRKASDYQIFKNKAA

SEQ ID NO: 354381 - protein, 353 aa, unidentified
MRRPKEKLIAGLDLHSNNVMIGIINQDGKRVTHRKLECDLKQVTAFLEPLKPQLQSMAVESTFNWYWLVDGLRERGYPIDLANPAKIQQYNGIKHVDDKDDAFHLADLQRLNILPKAHVYDPGLRPVRDLLRRRAGLVHQRTALLLSFKSLYARTNGETLDLSDAKKMEPKEAPKLYEHPANQLIAQVQAEHIQALAKSVSRIEKAVLGCTREIPMYEKLLTIPGIGRILGMTITMEVGDIKRFKTDGDFASYCRMVDARRLSNGKCKADNNQKCGNKYLSWAFVEAANFARRYCEHCRRWYDRKAAKTSKVLATKALGCKLAKAAWHVMAKQSDYDEKRMFPELATKVMKTQ

SEQ ID NO: 354382 - protein, 407 aa, unidentified
MEVLYRTCAGMDVHKDSIVVCVRSMKGSKIEREIQTFGTTTSELIKLGDWLESRSCTHAVIEATGVYWRPVWHLLAERLELILANAHEVRNVPGRKSDMNDATWLADLLAHGLVRASFVPPEPIADLRDLTRTRKQLAREIVEHTQRIQKVLETCNIKLASVATDILGKSGRAMLEAIVDGEDDPNKLAELSRGTLRAKRGLLVEALRGRVRAHHRLLISTHLRMIDSLRDVIQAIEKQIEDVLRPFAEAVALLQTIPGVGPTAAQTIIAEVGDDMTRFPTAGHLRSWAGLCPRMDESAGKRRSTRLRKGNVWLKTMLVQCAWAAIRKEGYLRALFLRIRGRQGAKKAIIAVAAAILTAIHGILRDLEPYRDLGAEHFNRHDRQRVASRLARRIRSLGYEIELRPAA

SEQ ID NO: 354383 - protein, 343 aa, unidentified
MHAITIGLDLAKSVFQVHGEDAKGKIVFQKKLRRAQLEAFFSKQPRCAVGMEACGSAHYWGRTLRALGHEVRLIPAAYVKPFVRRNKTDARDAAAICAAMGRADMRYVAIKSVEQQAMRAVERGRELLVKQRTQLSNCFRGLLAEMGIIAAQGRLGFAELRELVRAGDARAPGPLKTTLEALGRQIDSLAKDIDGLEAQIMAAAKENPDMRRLCAIPGIGGVTAHAIVAAIGDGKRFDSARDFAAWAGLTPRERSSGGKTTKLGISRQGERRLRSLLALGASTIMRGARANTGRATEWQRGILARRPVKVAVLAQAAKTARIAWAVLTSGEAYRRPQAQAKAA

SEQ ID NO: 354384 - protein, 387 aa, unidentified
MKKAYIGTDAHKEQNVIALAFAGREDPELYGKAPADLDGFERVLRRVLAKYGLEKADVAICYEAGPTGFVLCRRLRSLGFECEVVAPSKIPKAAGDRVKTDRRDARKLARMFRAGDLVFVNVPDVADEVIRDVCRGRTDAAEVRGRARQQLGALLLRNGYRYGDKTNWTEAHMRYLRELVLPDPAQKFVLEEYLQRVDASVAQVERIEAQMARLLPAWQRRKFVEALQGFRGFQLVAAMTLGSELGDLLRFDHPRRLMAYIGLVPGENTTGERRRQGPITKCGNSHVRWMLVEAAHHYHYPPKVSKELSKRQEGLSREVRAVSWRAQERLHRRFWRLLKRGVHRNKVVIAIARELTAFVWELAQVLERERAAADPRQPARPAARKAS

SEQ ID NO: 354385 - protein, 324 aa, unidentified
MEPSITQNVGVDISKDFLDVAFYPPGKAERFANTPKGHRALIKRLAPLEVARVVFEATGAYHRLFERTLAEAGLPMAKVNPRRARQFCEAAGKLAKTDRCDAAMLARMGAMLELALRPVVSKTRDEMKQLLVARDALVKHRAATLNRRQTAGLPMIKTQLAATLRQNEKQTKAIDKKLRELRRADPELQLMFEILISIPGVGEITANVLIIEMPEFGQLDQGEAASLVGVAPVANDSGKSSGARSIRGGRARVRAALYMAAVSASQHHPELSIKYNAMIKAGKLPKVALTAIIRKLAILANALLRDKRKWTLSPPQRGGKTLSA

SEQ ID NO: 354386 - protein, 347 aa, unidentified
MVHAGLDLSRKRLDVHLMAEDGARLRGFAVSPDTDGLRGLVRQVSDSYPELVRAAIESMNGARFIHDQLELLGWEVEIADAQKVKGLAPLACKTDRIDAWVLAELSRRDLVPAIYLPDPGVRAERERARWRLHLVRHRTMLKNRIHQTLITFGHACPVSDLFGSRGRVLLASLKLPEPWQGNLAVALQLIDDLDRQIDACERELRQLGADHPYIPLLCTVPGIAWVLAYTIASEIGDINRFTSPVKLNGYTGLCPKVRQSGSRDERGPLSRNGPKYLRWALIEAAHHAARTSFYRRRYETTSRRLGRQRGSKVAMVDIARKLTEAIWYMLTRNQPFAPAGATCVPAA

SEQ ID NO: 354387 - protein, 330 aa, unidentified
MESWNVILGVDVSKLTLDICWAEGNLHIKIDNCSAGFCVLKKWCKTHEIDLQKTLVVMEYTGGYEYRFIQFCESSSISYCRVPGLEIKNSGGMIRGKSDQADAFRIGTYGEEKIKKLIPSKPLDSDILILRQLLSFRKRLVRERAGFESTIKERKHMYSIKKSDTVMHIAQAKVKADNKYISQVEQQIKEIIKANEPMWLNYRIITSIKGIGPVNAWMTIAYTENFTSFTDPRKYAVFVGVIPFEHTSGTSIKRRSQVSHLAHKGLKSELNQAAKAAMTHDPEIGAYAERKLKAKPYPLVLNNVKFKLILRMFSLVKRGERYVENYKRAA

SEQ ID NO: 354388 - protein, 429 aa, unidentified
MEKLHEHAAGIDIGSRKIYVGLEGKEVVSFETFTSDFIKASDYLKGNNIKTVAMEATGVYWIVLYDILILAGFDVWLVDGRQTKQVPGRKTDVKDCQWIQQLHSYGLLNRCFVAEGVLKELRSYQRMREDHIRSSAMHIQHMQKALIEMNIRLPEVLSQTNGKSGMAIIKAILAGERNANKLLSLCDIRLQKNKSGEILKALEGFYSSQGLFALKQAYQSCLFYQQQITECDNEISKIFIELNNEDTFDNSLKRKPIRHHSPNVKHLGNHMIHLFEGKDATKLSGITDYSWFQLYTEIGADLTRWESEKHFTSWLGLSPGQNNSGKKKKNVRKGHPKAGQIFRQIAQSLLNSKYIALGAFGRRIRGRKGPGIAIKATARKLAVQYWRLMVKGLDFVEKGVQKYEQILLLQKQNSLKRLAKELKIELVMQ

SEQ ID NO: 354389 - protein, 345 aa, unidentified
MTNIVKQVVGIDVAQKELVVSLGRIDQLIQKEVYACKTFANKPSGFAALLEWIKKHTDSSITVRYVMEATGVYHEQLAYYLTEQGFEVSIVLPNKISNYLKTLETKTITDKTVSQGICQYGLERTLEMWQRPKKIFRTLKQLTRERDQLIAERTMKKKQIHAEQAEAHPSEYSISRMNERINLINRQEKEIRSEMAENIKSDTGLIKQIANITSIPGVGKLTAVTVLAETNGFDLIRNKKQLVSYSGLDIKEKESGTSVKGKPKISKKGNRYLRKAMHLPALSAIRNEDRYKAVFVRLVSKHGIKMKATVAVQRKLLELIYIIWKTNQPYSKEHLQKASDNTNAA

SEQ ID NO: 354390 - protein, 349 aa, unidentified
MKKVVRQVVGLDVSKDNIYVCYKVLHSDDHEAIKGTKCFDNNSSGFKGLAKWASARNKTLDVSLLYVMEATGVYHEELAYFLYESDCQMLVSLGKKVKHFAKGEGIKTKNDKVDAKILASYGLSKRFKEKDFWRPLSPSFKGIHDICREHSSITNARSAAKNQLHALHNAHEIYAEVIAMKKAQIAFFTQQIEITEKMLYQLVEEDTDLAERIGHIQTTKGLGVMTIIKVVAETNGFLLFKNIRQLVSYAGLDVVENESGKHKGTTKISKQGNARIRAALYNAAMSATQYNTDLKVFYERVNEGRIIKKQGIVAVMRKLLILIYTLWNKKEDYIENYAKKTSKTEVVGV

SEQ ID NO: 354391 - protein, 440 aa, unidentified
MKEKKTKAFPIIYPNAAGIDISSKEHYVAVNPESTEKPIRAFGAFTEDLHALVVFLKECKVDTVAMEATGIYWVSLFLVLEDAGFDVVLVTAKHVKNVRGKKTDVSDADWIRQLHSCGLLSASFQPDKFTRKLRAYMRHRKNLIEMSATHIRMMHKALEQMNIKIQHVIADITGKSGQEIVKSIIAGERNAEILASCCDSRIRAHKKEGIIKSLTGVWKEEHVFELEQSYSIYQFYHAKLKECDAKIEEHLREKSGVDTFVEPQKKEKSNKNNLNFNGKEMLYELTGTDLAEIFGITETNAIEIISEVGLDMSKWPTVKHFTSWLNLAPNNKISGGKVLSSRIPKKKNHAGQIFRMAAFAIQRSKNWLAMFYNRIKAKNGAPKAIVATARKIAAIFYKMVKERVKFNPIPIEKYMDGFKENQIKKLKRQAKNLGLQIVEM

SEQ ID NO: 354392 - protein, 339 aa, unidentified
MARTVAIGVDTHKQAHVAVALDSLGAELDHCVVETTRAGYKRLLGWASGLGQPAFAVEGCGSYGAGLARFLAEAGELVYECERPRRGDRRRGKNDLIDAALAARRLLSREGLSAPRGDGQVREQLRLLLAERRGAVSARTAAVNQLHAMIVTAPDPLRQRLAAIPKRRLAKTAAALHSSPDGVCDVLRRIGRRAEGLSREITEIDRTLAMLVTQTAPQLLAECGVGAVCAAQLLVSSGDSKRMSSEAAFAALAGTSPVDASSGKQQRHRLNRGGDRQLNCALHVITLQRVRHHAQTTAYYQRLLNAGKTAREAKRCIKRALARHFYHQLRQLPQTPLTT

SEQ ID NO: 354393 - protein, 400 aa, unidentified
MISVGIDVSKGKSTVCILKPYGEIVSKPFNITHTHKDLSELSSMLFRLNDEVKIVMEATGIYHLPVLTYLQEKGFFVSVINPYLMKSYRNESLRKAKTDKIDSRIIANYGIDHWFKMKEFQTSGEIYEELKLLGQQYRHYMKLHLLSLAELTHLLDLTMPGIKNLLASWNETNRKDKRSDFVERFWHYDVITSMSEQEFTEEYILWAKEKKYVPSQEKAKVIYTLAQESIPTLPSETSSIKILVTEAVRVLKEVDATLGLILSRMQEIAKTLPEYSVVREMGGVGNTLAPKLIAEIGDVRRFRNGKALVAFAGIDPPPYESGQFVGCNRKISKRGSASLRKVGYETMRSLKMRSRPEDPVYRYVVKKESEGKSKKSAKIAGLNKFLRIYYARVTELYKNI

SEQ ID NO: 354394 - protein, 340 aa, unidentified
MLYIGLDVHKEFCQACVIDESGRALSNERFSSTSEELDRFLDRFQDAKFVLESTGIWEFIYEGIEKRGFEAVLAHPLRVRAIAEARVKTDKVDAETLAQLLRADLIPKSWIPPKDIRDLRQLVRQRAYLVRQASRFKNRIHAEILRRGVRRPENLKTPFAQRSIRWMRSLDIPTVTSCLNCLENIQAQVEEMNIQLLEEYNRRPDAQLISTVPGIGFYGALLILAEIDDVSRFRHPEKLCAYAGLVPTVSQSASSVKYGSISKDGSAYLRWILTESVHVHTRYEPGSQLSRFHARLAKRRGRRVATVATSRKLLRIIYWMLVRHEPFHSHGFNPVKRVHC

SEQ ID NO: 354395 - protein, 364 aa, unidentified
MFTERTSVGLDVHARSVAAAAIDGVTGELFQTKLTPSYEHIRSWLGDLPGPVAVAYEAGPTGFGLYRSLTEAGIRCEVAAPSKLQKPAGDRVKTDAKDAVHLARLLRLDEITPVAIPTVDQEAARDLVRAREDCRSDLMRARHRLSKLLLRHGIVYYGGDAWTGKHDQWLRTEALGGLTSTATRLTFDADYETVLATKARRDRLDAAIEAMAADSEFTPGVRRLGCLRGIGTLTGFALAVEIGDWRRFTGNSIGSFVGLIPAEYSSGSSRTLGPITKTGNGHARRLLVEAAWHHRPRYRIGKTMRDRWDLAPAAARARGDEGNRRLHQRWVKFIERRKRSTVADVAIARELAGWCWSLAVLDDS

SEQ ID NO: 354396 - protein, 339 aa, unidentified
MELYAGLDLHSRNTYIGIMDKAFNRVFKKRVPNHLEQILQTLDPFRDQIKGFVVESTYNWYWLVDGLMDAGYSSAHLANPSAIKQYEGLKHSDDQHDAFFLAQLLILGILPQGYIYPKKGRPVRDLARKRMFLVQHKTAHILSLQSLIARCCAMKVRANDMRHLTVKELEEWLKEEYLVLSAQANLDSINFLKQKVKQLEKAIIQKVKLNKEFKYLLTVPGIGNILAMTIMLEVGDIKRFPKVGNFTSYCRCVPSRRLSDGKSKGSGNRKNGNRYLSWAFTEAVHLGRRHNERFRRYYNRKVAQANTSLATKALGNKLARICYYIMRDQVPFREELFCH

SEQ ID NO: 354397 - protein, 393 aa, unidentified
MTKTIMIGCDLHDRTMLLRYAVDGGTPRQKLFSNTPQGRAKMIEFLLEFAKEQGAQRIVFAYEASGQGYGLCDLLDDHGIECHVLSPTSLPKTPKSSKQKTDAKDAQMLLEQLRGFVLAGNPLPVVWTPPKRLRDDRELVRSRTDAADACTRVKLQILSMLKRRGIEKPPKYNVGWSKWFVKWLRDVASGLDAAVAPVLESLVDRFELYRDEMTKLDKHIRVLASQDRYASAHAELRKIPGVGLLTAMTFLTEMGDLTRFENRRQVAAYLGLCPASYESGETSDRKGRITRQGPSRLRRMLCQAAWSSLGRDESARTAYERIKGGKPQRNKKALVALMRRLGIKMWHRALSMGVSEELWGRGGPAAMRTSTRAQQRGAVPFDSPSSRPLASTG

SEQ ID NO: 354398 - protein, 411 aa, unidentified
MQVIYERCCGLDVHKRTITACVLKWLGGDWKKEIRQFGTMTHDLLALSDWLVREGCTHVAMESTGVYWKPVYNILEGQFELLVVNAQHLKAVPGRKTDVRDAEWIAELLAHGLLRGSFVPPVRVRELRELTRYRTSLVCDCARTINRLQKVLEGANLKLASVVSDIRGVSARLMLEALVAGERDTSQLANLAKGRLKEKHAQLVEALSCRLQPHQSFLIAEHLAQIDYLEGAIERLSRQIEEKLRPFEQEMAWLDTIPGVNRRTAEVLWAETGGDMARFASARHLASWAGMCPGNNESAGKRRTGRTRKGSPWLRHCLIEAAHGAAYTKNRYLSSQYHRLAARRGKKKAQVAVGHSILVIAYHLLTRKQPYSDLGANYFDERDRQAVTKRCLNRLQKLGFKVTLENVQMAA

SEQ ID NO: 354399 - protein, 342 aa, unidentified
MTIAVLGIDLGKNSCSLVGLDAAGRVVLRRRMRREAVIAFGAKLPGCVVAMEACCGAHHMGRILDEQGHTVRLMSPEYVRPYVKAQKNDDRDAEAIAEAATRPTMRFVALKSEAQLDVQTLHRVRDQLVGERTALTNQIRSVLLERGHVVAQGRAKLTACLAALLDTDAGASLTPRMRTLVAEVRERWQDLDRRIAALDAEFAEQARINEDARRLTTIPGIGALNATALVAAIGDVATFARGRDLAAWLGLVPRQVTTGGKPRLVGITKRGSKYLRKTLVQGARAALPSLRQSDTHLGQWLRGLLARSHVNTAVVALAAKMARIVWALLRHGRVYEPAAVAA

SEQ ID NO: 354400 - protein, 408 aa, unidentified
MEILYPRCAGLDVHKDMVMARVRCVSEPRVDETRSFATTTSALVELQEWLTSHGVSHVAMEATGVYWKPVWHLLEEHLQLVLANAQHIRNVPGRKTDVNDAAWIADLLAHGLIRSSFVPPAPIQEMRDLTRTRKQLVREISQHSLRIQKTLEDANLKLGSVLSNVLGSSGRAILTALIDGQSDPQRLADLAQGAARKKRAALIEALHGRITMHHRRLLKLHLDLIAALEHALEEVDADVGKLLAPIRQCACLLTTIPGVSDLTAQVVLAEIGADMARFPTPGHLLSWATMCPRNDESAGKRRSTRTRKGSPWLKTALVTAAWAAVRVKNSYLQAQFLRLRSRRGAKKAILAVAASMLTAIWHILKNGVEYRDLGADHFTRRDRSKAILRLVRRLNDLGCDVQITPQAA

SEQ ID NO: 354401 - protein, 338 aa, unidentified
MRLYAGIDLHANSNYLGIVDEENKIVFKRKLTNDLREILAALEPFREQTEGVVVESTFNWYWLVDGLMDHGYRVHLANPAAIQQYEGLKHVDDQRDALWLANLLRLGILPEGYIYPKQERPVRDLLRKRLQLVRHRTSHILSIQNIVSRTLGVRMRGNDVKRLDEQWVRDLFKEEHLFLAVNTSVGVMRYLGERIKHIEAVVKSRVKLRKEFEGLLTLPGVGDILALTIMLEVGDIGRFAEVGNYSSYCRCVRSTRISAGKTKGEGNRKNGNKYLSWAYVEAANFAIRNYPVVQRYYQRKAAKTNGVVAIKAISHKLARASYYIMRDQVVYDANKLFH

SEQ ID NO: 354402 - protein, 415 aa, unidentified
MDVLIERCAGLDVHRDTVVATVRRPGPGGVRRSETRTFTTMTGQLETLADWLAAQQVTLVGMESTGIYWKPVYCVLEDHFPVWVINAEHLRNVPGRKTDVADSMWIAQLIEHGLVSPSFVPPRHVRLLRDLTRHGRRLTEERTRTIQRLEKVLQDAGIKLTSVASTILGKTGRAILAALLVGEEDPVVLAELAKGRLRPKIPALQEALTHRFRLEHHGVLTAQMLAHIDFLEASIAETHQRVQVLLRPVADRVELVMTIPGVGRRVAEVLIAEVGLDMTVFPTAAHLASWAGICPGNNSSGGKRRPGRTRHGSMWLRIALTEAAQVAARGKGTYLAAHHAQIRGRRGTQKAIGATRHDILIAYYHIARDQIPYQDLGPDWNNRRRSTEQQTRRLVRQLERLGVNVTIESTTESTT

SEQ ID NO: 354403 - protein, 411 aa, unidentified
MPHVTSIGLDVHARSVAAAAFNPFTGEVVHRDFGTDAAEIAEWALGFEEPRACYESGPTGFRMARELRALGLDCVVAAVSRMQRPAADARRKNDRRDAEFIARMLATHNIVEVPLPDAAAEAARDLDRALDDATADYLRARQRLNMFLIRIGRVWDERNADGTRKKAWTRAHWRWISETRLEGPQRDVLEHYVTAARCAESDKRQLERKVVALAGTDRWRPAVEALSCIKGIDTLTAFRLAAEAGSFSRFRSAPAFASWCGLTPSERLSGETERRGGITKAGNRLVRTALIESAWHYSVCTPRPKAPAPGADVPAAMRSRADECTARLCRRRARARLLGLGNRLPGRGDPRLTPPADKPPAGRARVSTHRRRAFTSPFLGSPRAVPVNKTGFGRARRTENRNAVGRADMPG

SEQ ID NO: 354404 - protein, 375 aa, unidentified
MKEKVRFLGMDVHAETIAVALAEPDGEVRSLGTIANRGESIRKLVKKLGPIGQLKACYEAGPTGYVLYWQLAELGVACEVIAPTLVPMKAGDRVKTDRRDAERLARSFRSGDLTAVWVPDAGSEALRDLVRAREAAKQDQLRARHRLAKFLLRSGQRPRPGVKAWTELYMGWVRQLRFAQVAQESTRLDYLHEVEHMAERVKRLEQAVAEAVKLASPGIQEVVKDLQALRGIAQISAVTIAAELGNISRFAGARQLMAYSGTVPAEDSSGKRTRRGSITKTGNAHLRRIVVEAAWSYRLRPGVGPALRKRQEGVPEQIKEIAWKAQIRLHKRYSRLAAAGKDQRKIVTAVGRELLGFIWAVGVKAEAAGKLRMAA

SEQ ID NO: 354405 - protein, 325 aa, unidentified
MNSPQPQAQAAAAALDVGVDVASAHLDAAVHGRGGVHRLANTDAAIGRWLRTLPPGSRLALESTGRYHERLARLAHAAGMVVYVLDPRAVRQYARGLGQRGKTDRLDAQMLAHLIEREHGRLRPWQPPSPEHELLKDLLRQRAMLARHVASLRQGLREAAAASVDFAPMFKAMQDTLRALDKQIAKAACALPQGRSALGWIMSVPGVGLLTGATLLRVFQRLAHRSSDAVVAFLGMDLRPQDSGKRTGVRRLSKRGDAYARKLLFTAAMAAARYDPQWRKLYEHELAKGLPTTAAYVAIGRKILRVAFSVFKNQATYDPARLPAA

SEQ ID NO: 354406 - protein, 345 aa, unidentified
MKHIGMDAHSTTTTLTVLNSRGREIAHTRIPTRDAALVDFFESIPGQKRVALEESPVADWVTRVIQPHVSEVIRCLPQHNRLISESEKKCDREDSRSLANLLFLNRLKPVHHPAEIYRDLREGVRSYWKASSELTRARNRLKAFFAFNGIQCQDEQVYLVRSRKEYGEKLAKRGGNSDLLKLLYLQLDRMVESKAMHLRLLRELGKPVRESIQLLQTIPAIGEIGAHTLAAYLENGWRIPNKRKLWQYCGIGLRQHQSDGTGYQAASLNGNRLLKNTLMTAASCIIAMGHDRNALCRLLRRDEATGVPIARSRRNLARKTAVIAQHVLRYEEEYDDAKVIAVVST

SEQ ID NO: 354407 - protein, 347 aa, unidentified
MRFYTQQHGYYCGIDLHARTMYVCIISQDGTVLVEQNIRARPAPFLELITPYRENLVVAVECIFTWYWLADLCDKEGISFVLGHALYMKAIHGGKAKNDRIDAGKIAVLLRGGMIPQAYVYPSPMRSTRDLLRRRLHLVRHRGRLLAHIQNTNHPCNHDDFRKKLTYKANRIGVAEQFEDPSIRKSVEVDLELIAQYDEIIRDLELFIVRMAKQHDADMFHRLRSITGVGKILALTILYEVHDITRFETVQQFASYSRLVKCSRESAGKRMGTGGAKIGNVHLKWAFSEAAVLYLRKNPQGQKYLARLTRKHGKGKALSILAHKLGRATYFVMTRSRNFDEKKFLAA

SEQ ID NO: 354408 - protein, 428 aa, unidentified
MKYNTQNAKIASITEKTLIVGIDIGSETHFARAFDWRNYEYTKKPFEFSNNKEGFQAFESWMEELSAKHGKTAVIPGMEPTGHYWFALGKFLQDNGMRPVHVNPHHVKKSKELDDNNPNKNDRKDPKTIAGLVNEGRFSYPYIPIGVYAEIRNLSNLRFQAQEELTRAKNRLARWFSIYFPEYKDVYRDIKAVSGRMVLQMAPLPEDIRKLGVEGVNRIWRDAKLRGAGMKRAKTLVTAAEHSVGSKESPEAARIELKILLHDIDEYASRVEELLCLLDAKLREIPYIDKLLEIKGIGKITVSGFIAEVGDIRRFDDPKQLQKLAGYAIVANESGKYKGESRISYRGRKRLRYVLFEAALSLVARNPEFRKIYEYYRTRENNPLKKMQSLVAVACKVIRVFYVMLTKGVDYDPEKMMRDIRRPDLQAA

SEQ ID NO: 354409 - protein, 404 aa, unidentified
MRVIGLDVSRTVGEIAYLEDGQLREGGRVVLRHDALERFAQGLRPSDEIVLEATGNTSAIVTALKPHVAKVVIANPLQVRLIAEARVKTDKIDAAILAQLYASGFLPQVWMPDSYTLALRRQVARRSQIVRHRTRLKNQIHAVLAAHLIPQCPAADLFGRKGRTWLAEQPLPMDERLAIEQRLRELDRLGEDLDAIDKLLCESVLHDEQLKRLLTITGVNCIVAIGLLAAVGDISRFASPEKLVSYFGLNPRVRQSGLQPAQHGHISKVGRAHARAMLVEAAWASANAPGPLRAFFLRIRGRRGQQIAAVATARKLAVITWHVLAGHEDYEWARPALAAKKRRELELRAGLPVRKGHRGSAAEYSIKEVRDRERATAEMAERAYTRFVSSWKPNRPPSSMREAP

SEQ ID NO: 354410 - protein, 271 aa, unidentified
MEYYVGLDVSLKQTSICVVNQTGSIVQEGVVDSDPEAIASFVRSKAPGTVRIGIETGPTTTWLWTELHRLGLPVICIDARHAKAVLKMQINKSDRNDAAGIARIMQTGWFKEVRVKDLDSHAVKALLASRALLVKIKRDLENQIRGLLKNLGLVIGRAKFNVFAVRAEELIEDRPELVAAVRPLLDARKAIERQVGDLDRKVHKLARHDLQVRRFMTVPGVGPITALCFKATIDDPTRFRRSRSVGAYVGLTTRRHASGEIDWSGRISKVR

SEQ ID NO: 354411 - protein, 416 aa, unidentified
MNAVGIDVSSRKSTVAVLRPLGEVVCLPFDVTHDIAGLASLVEKLKALDGETRVVMEHTGRYYEAVEKALHEAGFFVCAVNPLLIKEYGANSLRRVKTDKADAVKIARYALDNWADLRDFTPMDAIRYDLKTLNRQFQLASKQRTASANNLIALLEQSFPGIRKCFDSPVRSDGTQKWVDFAHSFWHVDCVRKQPFAAFCERYRKWCKRHAYLFKLSNAEKVYALAKSAVVLTPKSKVVKVLVQEAANQLSSISRSVEVYRAEMDRLAAMLPEYPVVMAMYGVGKSYGPQLMAEIGDVRRFERKQALVAFAGIDPMPNQSGDKNVRSNKSSKRGSPYLRKTLFNVIRTYLQCAPQDEPVFQFLNRKRAEGKPFYVYMLAAANKFLRRYYAKLRDYFASLDTLQPVAPIPTILKAAL

SEQ ID NO: 354412 - protein, 354 aa, unidentified
MTSIHDQPAQTFASLGIDIGKDVFHIVGFDTSGKVVLRKKFKRLALEAEVAKLPPSVVGLEACLSAHFVSRTLRRLGHSPRIIPAIYVKPFAKGQKNDYNDAEAIAEAALRPNLRVVQEKTQDQLDLQALHRVRARLVSRRTATINQIRAFLIEHGIAVRTGANALRRSLFAILEKRADELSPRMRDLIVGLYEDWLWLDERIETLTGDIEQISLQEANCKQLMSVPGIGPMISTAMVAAIGTGEAFERGRDFGAWLGLVPRQYSTGGKPILGRISKRGSSYLRTLFIQAAHVILMRPQNWERFSFGPWLKAAQPRLHRNKLATALANKLARIAWSVLRHNTAFDAHRHEVVAI

SEQ ID NO: 354413 - protein, 291 aa, unidentified
MNTIHIANNRSTERNVGIDVGKDVLDIAILELDTHWQIANDDAAIQELVKQLRRYKLTRVVVEATGGYERRVAEACAARELPLLIVQPMKVRQFARAEGLMAKTDKIDAQLIARFGKILGLEPRPFPDEKVRKVRDLLARKRQLNEQRTRELNRLHKAQKFLQASHRRSIKLVEKEMAWVDKHVASIVATVDEWKETYTIITSVPGIGDGVAYTLLGELPELGHLTHKQISALTGLAPFNRDSGTMRGRRRIRGGRAPIRTMLYMAMLCGIRKRPVIPPCQQPPNCAGAIH

SEQ ID NO: 354414 - protein, 374 aa, unidentified
MTMMHHRQIRYIGLDVHKASISVAIAEESGTPTSYGKVDNDPSAIRKLMTRLGGPEVELRVAYEAGPTGYALHRQLAKMSIDCIVVAPSLIPKQPGNRVKTDRRDALKLARLLRSGDLTPVWVPDEAHEALRSLVRARADAKADQLRAKHRLSKFLLRQGCWPPIGVRNWTQRYFAWLHHLEFEHLPDRVVFADYLAEVTAASERIKRLEAALHQCAQNSSQVAVIRALQGFRGIGFLSAVTLVAEAGDLRRFRTAPQFMAYAGLVPSESSSGGKQQRGSITKTGNSLLRHVLGEAAHHARHVPRVSAALKQRQRELPRELVDLAWRAQHRLHARYRHLSMRIGALKALTAIARELAGFIWAAGHLLQEVPAAA

SEQ ID NO: 354415 - protein, 347 aa, unidentified
MRKIAYLSMDVHARNTVMGDMNGNGKFLGNRPFTTGENNIIDALKAVKAKRKYLVMEAGPLANWVAQTASPYVTEVFISDSRENALIYKSSIKKDKIDTKKMCRLLRLNEFKEVYRPENDQRAIFKAAVQHYHDLSDQLTAIKQKTKAMFRQWGVIDVFTKSLYSKSGRDKFLIKVNQRPIYLQLKRLYALMDLTAAMKQSAQKSMKSLGRNYPEIKEFMKMPGIGTVGAHTYDAYIQTPDRFEKTSRMWRYCKLGVTDRSSDGKPLGYKRLDRSGIGELKALSHRAFMVAMKSDNEVKRFYLQSLQRTHNHTHARLNTQRKILAVMLAIWKKGQPYRAELFLDPSI

SEQ ID NO: 354416 - protein, 422 aa, unidentified
MISAVLERCAGIDVGKKWIAVCVLTGPANGEAQVERRKYQTTNHNLEQMCEWLVECGCTHVAMESTGEYWRPIYNVLEEATEIEIILANSQQVKGLRGHKTDPKDAHWLAHLLRHGMIRPSYIPPLPIRQLRDLTRRRKQLIRNGAQERNRIQKILEDANIKLGNVLSDVFGLSGQLMLDKLLEGDATPAEIAELAQRSAKKKIPQIRASLEGHRMNALHRRLIDMSLNHMAFLEEQIGTLDGAILQHIRAHGLEKPYQLLQTIPGVKEEAAASLLAEFGPDMQVFGSAKKISSWAGVAPGNNESAGKKKRAPALRGNPWARSTLTESAWSASRKKESEFQRAYQRWKPKLGHKRAIVAVAHSLAETVFEVLSTGQPYAGPGASPMPDSQAAHLIRHHTRRIKTLSKRLHPQPQRPQPQPAM

SEQ ID NO: 354417 - protein, 421 aa, unidentified
MDNRWYHVNLSDWRSLIMFNAVGIDVSKGKSTVSVLQPGGTVVKKPFNVVHSSSSLNELSRFILHLDGQTRVVMECTGRYHEPILHALHDAGIFVSAVNPHLIKNFGSNSIRKVKSDPADSRKIARYALDNWASLRQYSDMDTTRTQLKTLNSQMDFFTKQKVAARTNLISLMDMTYPGVNSLFSSPARDDGSEKWLDYAESFWHVDCVRKIGLKAFTKRYQAFCKRNGYNFQPGKPEELYLASKELVAVYPKDKVYKDLIMTGIEQLKSTTQHVEHIRHEMDALASTLPEYETVLSMRGVGKTLGPQLMAEIGDITNYTHREALTAFAGVDPGVNESGSFRSKSNPASKCGSSRLRKTLFLIMTSLLQTSLADDRVYQFLDRKRSEGKPYLVYMTAGANKFLRIYYGKVKACIAAQSKSE

SEQ ID NO: 354418 - protein, 402 aa, unidentified
MNAVGIDVSKGKSMVAIMRPFGEIVSAPFEIKHTASDINSLVELINSVEGESRIVMEHTGRYYEVLAHQLSKANLFVSAINPKLIKDFDNDSLRKVKSDKADAIKIARYALDKWQNLKQYNVMDELRNQLKTMNRQFGFYMKHKTAMKNNLIGILDQTYPGVNTYFDSPARSDGSQKWVDFASTYWHVDCVRKMSLNAFTCHYQNWCKRKKYNFSQSKAEEIYGKAKELVPVLPKDDLTKLIIRQAVDQLNSASTTVESLRTLMNETASKLPEYPIVMDMKGVGPSLGPQLMAEIGDVSRFTHKGAITAFAGVDPGVNESGIYEQKSVPTSKRGSSELRKTLFQVMDALIKTKPQDDPVYRFLDKKRAQGKPYYVYMTAGANKFLRIYYGRVKEYLATLPES

SEQ ID NO: 354419 - protein, 412 aa, unidentified
MNAVGIDVSKGKSMVSVIRPFGELVAKPFEVRHTSSELSELAKQLKSLEGETRVVLEHTGRYYEPVAQLLHDAGVFVSAVSPLLIKEYGNNSLRKVKTDRADAIKIARYGLDNWTELREHTPMDTIRHQLKSMNRQYGLYTKNKTALKNNLIALLDQTWPGVNALFGSPVREDGSQKWVDFAASFWHVDCVRGMGQAAFVERYRKWCQRHGYNFSADKAAQIHTEAKELLAMLPKNPLSKVMVQEAIAQLNAVSKTVEVFRAEMNRLAQELPEYDVVMSLYGTGPSLGPQLMAEIGDVRRFAHKGSLTAFAGVDPGANQSGAYEAKSTRSSKRGSPELRKTLFVLMTVLLQKAPPDDPVFQFLDKKRAEGKPYHVYMTAGCNKFLRIYYGRVKEFMNTLHEPVDMDSTGLSR

SEQ ID NO: 354420 - protein, 423 aa, unidentified
MNHSTLCVGADVHLDEIVLCAVGKAESHEVCERFRVTNNLPGAQTAATAIAAIADSLGYSRIEIGWEATGMLWIPFHRYLSDCAQLQPFERELVCFNPQLVTKFKDGLVLRRPKNDKRDASTVAARLRIGEWPLSYVPGDFWQGLRRLTRYRFHLSRNLSREKMRFQSYAFLKCSDWKRVKTFSDVFGATSIALLTEFTTTELRQMSHDQLVDLIRRRGRGRFEDPTGTARKVRDVLHTSYPIDPLMDEMVTAALAAAWDHIRFIKRSMKRIDRQIARYIDPIPNPIITVRGLGAVITAGLLAEIVDIQRFPEHKHLAQYAGLTWERRSTGNFVSQNTRLTKVGNKHLRYYFGLGANTLRQFNLEYKAFYWRKFNEVSKYQHKRALVLTARKLVRLVHALLTKNVPYVRPQALAGIEEVGSLQ

SEQ ID NO: 354421 - protein, 457 aa, unidentified
MGHARARKIPAQLVEDEDYQLRYERVAGIDVAKAKADVCTRLPPVREGGRRASRVEEVPATARDILALAGRLTADGVQLVIMESTSDYWRIWFYLLESAGLNVQLVNSRHARQLAGRPKTDQKDAQWIARLAEMGLLRPSFVPPPEIRALRDLTRTRLQLVKDRTREWQRLEKLLEGALVKLSSVVHSLARTKTARSILEAIAGGERDPKALAALAHGGVKGGSAAVEQALEGMLPGEHHLMLIRVHLDHITLLDRLVAAVEDEAAAALDAVPAARGVSADGIPAADPGPGAAVLPAAERLAEIPGVSLKLAMAVIAETGLDMTRFPTADHLVSWAGLAPVARQSGPRQRKPQKGQGDAYLKGYCTQAANGAANTSTFLGERLRRLSRRLGGNKAKCAVGRSILVIIWHLLADPSARFTDLGPRWHDDHAGRDRKIRTHLSQLKALGLDVTVNPAAA

SEQ ID NO: 354422 - protein, 364 aa, unidentified
MKEYIGVDLGKRKAVVVKKDRVGNVTGKATLAVTEAALEKYFSKQDPRSKVVVEATGNWMYLYETIEKHVPEVVLAHPLKTRAIAEARIKTDTIDATTLAELLRLDGIAKAYIPPQEVRDTRELLRYRASVVSLRMGLKNKVHAVLTKNGIECSFSNVVGKKSRQWLKTLSVRDCYRRELDGYIRLAELSTALIQEITTKIKEVVSVTPQAQLLMTVPGISYYSALLILSEIGQIERFPSAKHLCSYAGLVPSVYSSGRKSFHGRITKQGSRWLRWICVEISIHAANGDARFQSLYRRILRRRGLATAKVAVGRKILTVIYAMLKNNEPFRRRRPRQLILAKAWSKKSKESSGHPPGVMIQASA

SEQ ID NO: 354423 - protein, 366 aa, unidentified
MQKISTVQVLGNEILKEQKLTIGVDLGDRWSFYCVLDEAGKIILEQKVATTAEAMKQTFRKMPRSLIALETGTHSPWASRLLTELGHEVLVAHAQKVELITKSNRKDDRHDARTLARLARMDPELLGPVRHRSARAQIHLTVIRARAELVSARTALVNAARGLVKSYGQRLPKCGTYQVNEKLAEGVSAELRDVLAPLLREVESLNEHIKEYDERMEKIAQEVYPEVFLLKQVKGVGTQIALTYILTIEDPYRFEKSREVGCFLGLKPGRRNSGKSEPQKKISKEGDRYLRTMMVQGAHYILGPFGEDSDLRRWGLKLAERGGKNAKKRAIVAVARKLAVLLHRLWVGGEVYEPLRNSQKAMRAVA

SEQ ID NO: 354424 - protein, 338 aa, unidentified
MSKITTIGLDLAKHVFHVVCCDGRGKLVSKRMLKRRQVLTFFAALPPCRIGMEACAGAHYWARQLQARGHEVILIPAQYVKAYVRGNKNDYNDALAISEAVSCPQMRCVGVKTPEQQDLQALHRLRERCVQMRTGLCNQIRGLVGEYGLVCPKGVAVLRRQIPVWLEDGENGLSELFRRLLSQSYAQLQSLDAHIAFYTEELERQGRQNTVCQRLQTIPGFGPIAASVFYSQVGNGQAYRRGRDAAAAIGLVPRQHSSGAKQTLLGISKRGDRYLRSVLVHGARAVVARAGTKPDRLSQWINRIRAERGFNKAAVALANKMARIGWAVVANNTVYRAA

SEQ ID NO: 354425 - protein, 415 aa, unidentified
MKVVFPTCCGVDVHKTFVVATIITTPADSLQPHYQKKRFSTFNSDLNRFADWLLEHNCLDVCMESTGKYWVPVFNILEKRGIRVVIANPKWVKAVKGNKDDTKDSKWIGDLFRIGLVKSSFIPDLNTRILREFLRYRYKLISMKSSEKNRFQNAFTVCNVALDSVVSDMFGKSATAITDYLTSDESFDPEHCVSLLQRSLKKKAEQVLESIEGYSISDEQKARIKIIREHYDFIEKLIAKVDTCVNEMVAKYEGEINLLCTIPGIDRNSAITIISEIGTDMNQFGSSKRLCCWAGLTPGNNESAGKKKSVRISRAGVYLKPALVQVAHAAVKDNKHPYYKLKYERIAKRRGKKRAIIAIARMILTAIYSILCTGEVWNPVDLFKIDMPEHLKEQQLSKAIKQAIRFLEKQGLSVA

SEQ ID NO: 354426 - protein, 461 aa, unidentified
MTLNDDVLIAVDPHKASNTAAVLDPVTKTVIEAARFANTVGGYAELIAFAARWAQRRWAVEGCHGAGRSLAQRLVADGELVLDVPAKLAARVRVYSRGHGRKTDKDDAVSVGLAALDGTGVTLVACDDATVSLRLLCDRREELTAQRTQAACRLHRLLAELTPGGMRRELSANKAQALLARIRPAGDVATVRVHIARDHLADIRALDARIKYLGGQIAALVTASGTGLTGLFGIGPVIAGRLLAEVGDVARFATKDTFASYNGTAPIDASSGEQVRHRLSRAGNRRINHALHMMAVTQIRYPATPGRLYYERKRREGKTPKEALRCLSGGCLTRSTISSSPTGGAQSERADHLRPRRRRGLHPPHQRPAHTRPHHPPGPYTARHHRVHRAGLERRPPRRHRDPRRQHPPPPRPPRPGRNRQLKRQPLDREEPIWSVFGIGGTRSAGVTRCRCGAIQPVQHA

SEQ ID NO: 354427 - protein, 385 aa, unidentified
MDKSSTLFVGLDVHKDSIDVAVADAPRDGDVRHVGTIGGDLASLDKALRRLISRGQPLHIVYEAGPCGFVIWRHLTRQGLHCEVVAPSSIPRAPGQRIKTDRRDALLLARMARAGELAVVRVPDEVDEAVRDLVRAREDAVREQRNGRHRLKALLLRNGTPYAGRSSWTAAHLRWLADIKLAHTAQQIAFQEYLHMITEATARIGRLEQALRDTLAGWHLAPVVQALQALRGVQLIAAMTLVAELQDFGRFESARQLMAYVGLVPGEHSSGPKRRQGSITKAGNSAVRRMLVEVAWHYREGPRVSPIIAKRHDGLPSEVTDIAWKAQTRLNAKFKRLLARKVMKTKAVVAVARELAGFVWAIGREVQSSGWRGTASSTTDTPAAH

SEQ ID NO: 354428 - protein, 335 aa, unidentified
MKHYAGLDLSMETTQVCIVDENGQKLVSEKVESTPEALAAMLERYRPLERTVIETGRMSPAICLGLRELGVPVVCIDARQAHQSLKAMKANKTDPHDAAGLAQLARTGFYKEVHVKSPTAHGVRSVITARSHLVEARVRLDNTIRGLCATFGYRPGAGQGKAFLERIMRAAHIPGLGDAIASLLSVRAELVEQIKEMDRRLRIIASQSQACEILMTIPGVGVQTSAAFAAAVDEAGRFRQSRNAGAYFGLVPRRHQSGELDWTGRITKQGDGTVRKLLYEAANSILTRSRETFALKTWATKIAKRRGLKKARVALARRLAVIMHAMLRDGTLFQA

SEQ ID NO: 354429 - protein, 350 aa, unidentified
MDEITRIFIDTSKSVFQLHGVNAAEEVVVRRQLPRARMVEFFSRLPPTKIGLEACGGSHHWARVLGALGHEVKLIAPQYVKPYVKRGKNDAADAAAGCEAMSRPVMRFVPVKSAEQQAALMLAGVRESIVRERTQLTNMIRGYASEFGIVAPKGLCKIEALLKRIAEDQSLPVMARELFAGLCAQYAEVQARYQVVDAKLLAWHRGNPVSVVLAEIPGVGPIGASLLVMKTPDPGAFQSGRQFAAWLGLTPKDHSSAGKARPGGITRAGDEALRSVLVLGATAIIRMVRLGRGKNASAWLVALLKRKPPKLVAVALANKIARIAWRMMSTGEAYDTKRLTLASATLPTGA

SEQ ID NO: 354430 - protein, 400 aa, unidentified
MKVSGLDVHKDSIFCAIYDGKKMGKVKEYPTFTHSIREMGEHLRKEGVQKIAMESTGIYWIPVWNILENMGFILTLVNPYIIKQMPGRKSDVKDAQWIATLLHKGLLRGSLIPNKRIRELRSYSRKYVRLQSQINRVLQEMERILEMSNIRITSLVSNNNSVSVKNIIEQIIQGNSLPEELARYVHGRIVKAKGKLVQLSLDGCIQEHHRFLLELTYQQYQLYQKQLLLVESKMEEICNTYYQKEMELLESIPGIKKQAAMQIIAETGADMTAFENSGKLTGWAGLRPKNDESAGKMKSTSVTKGNKYLRRIMVQCAWAASRTKGSFYKSKFEQLCIRKSRKKALIAIARKLLTVIWHVLSEKKGYNENFLPAYNPEKIKHKIFYHQRELHKLQALGFSL

SEQ ID NO: 354431 - protein, 456 aa, unidentified
MSVIGVPEQVEDEEHEQRLERVAAIDVAKASGKVCTRLPHEVKAGKRVTLVWDVPATTNAICELAAHLVEQRIERVVLESTSDYWRPFFYVLEAAGLCVWLVNASDVKQVSGRPKTDKLDAVWLAKLNERGMLRPSFVPPADIRRLRDYTRLRLDLTRERTRHKQRMEKLLEDALIKLSTVATDIFGKSGRDMIEALIAGKNDPKQLAGLARGRMRVKHAALAQALDGRFDAHHADLARILLDQVDGLDIQIQRLTTTIDELIAAMPAAAAGDYQAPTDTNTSGGGDGSERRTTLSAIARLDEVPGIAEHTAQVIIAELGLNMAQFPTAGHLVSWAKLSPRTIQSGPRTRGGKTGKGNPYLKGVLGEAATAAAKTNTFLGERYRRLVKRRGKLKALVAVARSILVIVWHLLSDPTARFRDLGPDFHTRRVNTDRKIRSLVHQLEALGHTVTLQPAA

SEQ ID NO: 354432 - protein, 432 aa, unidentified
MKNAKTVACVGLDCHRKFSIASARDGSMGVVWRRRLEHADRNGLRKELSQWPTGTPVILEATFGWGWMSDELREARLDPHLSSGRKVAAWREARGMAKSNKRDADLLGELWGQQPRWWEVWCAPPEVRDLRELLRHRMGLVRIQTALKNQVHATLHRHGVVQPFSDLFGCHGRQWLSSLLEDPAAPLRESGRGTLHQQLGLLDEVRRRLAEATRQFRSRVNRQASAKRLMTLPGVSTILAYTILAEVGRIERFPGGRQLSRYSLMAPLSDDSGEERPGQAIGRHVGKVGRLTLKWAWIEAAHGAVRRSGRMKALFDRYTDNGQHDRNRGYIAVGHQLCLIAYVLWKKQRDYQEIPPPRPGWEKRRQREEDREKRRAQQIEQCDTIQQEKPGEARMNQYKDDVSRPGTGQPQTAMAADTDDRQQAGGIRQTAA

SEQ ID NO: 354433 - protein, 402 aa, unidentified
MNCVGIDVSKGKSMIAVMRPFGEVVVSPFEVRHTASELSKLAGLLKSLDGETRVVMESTGNYHAPVAWLLHDAGLYVSVVNAMLVHDYGNNSLRRGKTDKKDAVKLANYGLDHWLTLPRYVPEEDTRLMLKTCYRQYQQYSKVQTMLKNNLISLLDTTFPDANRLFTSPPRTDGSEKWVDFVAAFWHCECVCGLSEKAFAAKYQKWCRKHGYHFSEDKALDIYASACGHFGVMPKTDTAKLLVEQAIFQLRATSAALAALKQEMQSLAASLPEYPVVMEMFGVGPTLGPQLMAEIGDVRRFHSKKALVAFAGIDAPPYQSGQMDVRSRSISKRGSAALRRTLFLVMGVYLQSAPMGEPVYQFMDKKRSEGKPYRVYMMASANKFLRIYYASVTAYLNTQTQA

SEQ ID NO: 354434 - protein, 374 aa, unidentified
METIYIGVDFHARQQTICYLKTETGELVTCELKHQDKAAVRAFYAQFRGQVIVGLEASGYSPWFERLLEELGCEVWLGHATEIRRRARWRQKNDRRDAELILDLLLHDEFPRLHRPAVQSREVLRMLRYRQKLIKIRTMSKNSLQALALQSGLAKGSRLFTQAGQQELSAAVMSPVMHWQREHWLQLMEPLNQQLLETMVWFKAQSKDDVCIKRLRTHPGIGLLTSLCLVHTLQPVSRFRNTRKVAAYAGFDPVERSSAERKCFLGISKAGSRVLRFLLVEAAHTAIRKDEDLKRFYQRLAERRGRPKAKVAAARKLLIRAYIMMRDEIDYAEFRRRAVAARLARRSQGPNVPEVLIGQPASADHRDEPTSESQ

SEQ ID NO: 354435 - protein, 346 aa, unidentified
MEHYAGIDVSLERSSVCIVDTQGKIVKEAKVASEPEALVDFFGSLHFAVKRIGLEAGPLSQWLHAGLRRAGFETVLLETRHVKAALSAMTVKTDRKDARGLAQLIRMGWFRPVHAKSMGSQEVRALLVARKQLLGRLIDVELSIRGILRGFGLKVGAVTRKGFEARIRELATGQATLERIAGAMLSARATLRAEYEKLHKAVLAIVREDAVCRRLMTVPGVGPLVAVTYKSAMDDPSRITKSKAAGALFGLTPKKYQSGEKDVTGGIPRTGDEMVRTALYEAANVLLSRITRFSKLKRWGMDVAKRRGSKRAKVALARKIAVILHRMWVDGTTYRWTAAEQIAAQA

SEQ ID NO: 354436 - protein, 349 aa, unidentified
MSQSHNSAVAVIGIDIGKNSFHVVGLDDRGAIVLRQKWSRGQIEARLANLSPCLIGMEACVGAHHLSRKLKALGHDARLMPAKYVRPYSKGQKNDFRDAEAIAEAVQRPTMKFVATKTADQLDLQALHRVRERLVSQRTGIINQIRAFLLERGVAVRQGLRFLRAELPRILAAPPDVLSPRMVRLIKDLAEDWRRLDERIDRLSNEIAALAQQDAGCERLMSVPGIGPIISSATVAAIGTGDAFSKGRDFAAWLGLVPKQISTGDRTILGKISKRGNRYLRVLFVQAAWVVLIKPMSWDRHGLKHWIEAAKKRLHRNVLAIALANKLARIAWGVLAGGHTFEASKLQIA

SEQ ID NO: 354437 - protein, 354 aa, unidentified
MSPLISRIATVGIDIGKNSFHVVGQDERGAIMLRQKWSRGQVEARLANLPPCLVGMEACTGAHHLSRKLQALGHDARLMPAKYVRPYSKGQKNDFRDAEAIAEAVQRPTMKFVATKTTEQLDLQALHRVRERLVCQRTGIINQIRAFLLERSIAVRQGLRFLQAELPTILGTRSDALSPRMLRLIEDLAGDWRRLDARIEAISGEIEELARKDQACERLMTVPGIGPIISSAMVAAIGTGDAFAKGRDFGAWLGLVPKQISTGDRTILGGISKRGNRYLRALFVPAAWVVLVKLGKKWERYGLRSWIEAAKKRLHHNVLAIALANKLARIAWAVLYQGRAFEYVKTDATASRSA

SEQ ID NO: 354438 - protein, 336 aa, unidentified
MVSVATYAGLDYHQHSVQVCVLDEEGRLLGNRSVENDAAVVAQAASRYGRPRRVAVEACCGAADLADELAATHGLLVQLAHPGYVNRLKQSPDKTDWGDARLLADLTRINYLPRVWLAPEAIRQLRRLMRHRTQLVRRRKDVKLRLRGLLRENRLKCDQANAWTKAWLAWLATAPLGETDRWLAEDHLEEIAWLTQRLKAVQAQIVQRVKDDPVVQRLMTLEGVGLVTAATMRAEIGDFSRFDTGKQLARFCGVTPRNASSGQRQADSGLVKAGSPELRRVLVELAHRLMRRPGDRWGRLGHDLVRRGKPKNVAIAAVANRWVRQLHHRLREQPTA

SEQ ID NO: 354439 - protein, 320 aa, unidentified
MHIASIGIDLGKTTFHLVALGEHSKVLVRRKFSRAQLLAYTANLPCSLIGLEACAGAHFMGAALRAPGQEVGLIPAQFVKPYRKSNKNDFIDGEAIAEAVTKQNLRFVPIKTQEQLDVQALHRVRDRLVQRRTALINEIRGFLLERGITFPAQPIHLRKNLATVMEDAEQNLSPRLRWLLDRLWQEWKQTEIDIQTITDEIERISIEDERCQRLRQIPGLGPLVSTATVAAIGNGAAFHRGRDFAAWVGVVPRQYSTGGKQRLLGISKRGNIYLRRMLIHGARAVLFRIQYDTAGLGQWVHRLSQRAPRHKVIVAIANTN

SEQ ID NO: 354440 - protein, 450 aa, unidentified
MSTLNSAEEKKPSYAAHIGLDWADQKHFWTMLTADGKCTRGDLKQTPEAIEIWGAELAQRFGGRPIALALEQVRGALVAILSKYAHVHLFPVHPTKLAHYRLSVCPSGAKGDPSDADLILDYLVKHPERLCCLEPDTVETRSLQFLVEERRKLVNQHTCQVQILIHWLKQIFPQMLEWFDNMSTPLVGDLLKRWPQLPNLQKTSAKTLRRFFDQHNCRSEERIQQRLEEIDQAVPATNDAALLRTGNLCIRISVQLLASLRAGIAEFDSQIEAIYLTHPDRFITASLPGAGPALEPRLLAALGTNRERFESASNMACCFGIAPVTESSGKSRWVHWRWACSKFVRQTLHEWANCSIRTCGWAREHYDKQRLKGKGHHASVRSVAFKWIRILFRCWRDRVPYSEQRYLEALRTHGAAPSTPAAIVVESTSALPGTRWESCGDFAKLAKVSS

SEQ ID NO: 354441 - protein, 333 aa, unidentified
MRLYCGIDLHSNNAYLVIRGQDGGVVFRRRLPTDLGAILAALEPYRSELVGVAVESTFNWYWLVDGLVESGYRVHLANPAAMRQYSGLKHADDRSDAAWLAEMLRLGVLPEGYIYPREQRGLRDLMRRRTRLVQQRTALLLTLQNLVQRNTGQRRKGADLRAWDEDLPDRNVTLALSATQRVAMCLDQEIHGLELEVRRQLRPDPLYDLLQTVPGAGPILVPTIRLETGDIARFPSAGHYVSYCRNVGSRHTTNDKLKGQGNTKNGNRYLAWAWLEAAHFAIRYHAPIRSYYQRKQARSHRLVALKAVAHKLSRAGYYVMRDRVPFEMEKAFG

SEQ ID NO: 354442 - protein, 347 aa, unidentified
MTDNKEAITIAVLNGAGKLVMESIVETKASSLLDFLHGLRGELHVTLEEGTWAAWLYDVLKPHVREVVVCNPRRNALLKEGSKNDKVDARKLAELLRTGMLRAVYHGENGLRTLRELARSYEVVSKDLRRVMNRVKALYRGWGIPCTGMQVYSRRHREAWLNKILEPGVCRRAELFYQQLDGLQALRRTVRGELLAESRKHQAVKVLRQIPFIGQLRAAQLVALMQTPHRFRSKRQLWTYSGLAVVTHDSAEYRYVDGQLQRSKKPQQVRGLNQNHNHAMKEIFKGAALSAALREGPFKIFYEGLLARGMKPELARVTLARKIAAITLTLWKKGECFDAGYVKPQAA

SEQ ID NO: 354443 - protein, 366 aa, unidentified
MLRPAMQTPAQKAHLENPMNSLHYIGFDVHKKSISFCVKTAAGEIVEEGVIPAERGALRQWASARPQPWRGAMEATLFSGWIYDTLKPYAEQLEMAHPAKMKAISAGKKKSDTLDARTIADLLRCNLLPACYVAPPRIRELRRLLRYRTLVVSEGVRMKNKMAGLLMETGALYVKEKLHRKKYFASLLEELEEVPESVIDLLRLSRGALEMFESTQKRLVRELLADPELAQRVERLMTIPAVGEITALTWALEVGDPQRFPSCSDAMSYCGLTAALKSSAGKQQRGPISKQRNHWLQTTLIEAAKPAPRWNPQLAALHARELERGHRNRATLAVARKLVVYLLAVDKSGQAFQLRVPSEGPTQKAA

SEQ ID NO: 354444 - protein, 347 aa, unidentified
MEMEVEDAHYRVYVGVDVAAETFTAAWLVPGGKPTTPFTSEQTPAGFAALRHRLQGTGSPLSATLVVLEATGNYWVALAVALHEAGCRVAVINPRQAHHFAKAQLRRAKTDALDARDLAQLAATLRPAPWSPPPAVYHEVRQRLVARDGLLAMRTQARNQRHALLQWPVVVAAVRQHLDELITDLDRRIAALEAEIGTVLKESVWAESLACLRSAPGIGLVTASWLLVGTLNFALCDGPESLTAYAGLAPVPRESGRSVRSRPSIGHDGNGRLRTAFYMATLSAARYNPAISAFYQRLRAAGKPPKVARCAAARKLLHQAWALGSKLQRFDPDHKQQQHEVLPELAA

SEQ ID NO: 354445 - protein, 343 aa, unidentified
MPCYVGLDASKRLTSVCVLRSNGETVREGDIPTSPKAIVGFLRGDRLRFARVGIEAGSVGSWLGPALIRAGLPVTQIETRRAHSILKERANKTDRSDARGIADLMRTATFTPVHMKSSESQHVRALVTARKLVKAKVLDLQNGIRGLLHGFGLPFDAGRARSFEARARDAARRLAIAQDVVLPLLTALAQLRSILTSYDKTIRVVATASPVCSLLMTAPGVGPITALLFYSSIDDPSRFRRSRNVGPHFGLVPRTQQSGESERRGRISKRGDAEARASLYCAGLTALRTSTRPSWLKTWGLEVAARRGRKRAAVAVARRLAVVLHKMWITGTPFRWEQGGAPA

SEQ ID NO: 354446 - protein, 311 aa, unidentified
MPSPLIFGVDVAKATLQIACAQSPTELPLANRRSSISAWLAQLPRGSRIAMEATGRYHLLLAELAYAAGMVVYVLNPCDLRHYARAVGLRGKTDRVDARLIARYLLREQAELHPYVPPTPVQREIDQLLRRRATLVNTKTCLRLSLRGMASYAADLRSMLEQLEALIAKFDQRLRQLATHQAEPQRRVESVLGIGPLLGVALTNTFERVPLQDGDAAVAFVGFDPRAKDSGQFKGRRRLSKRGPAELRRLLFNGARSASKTKLWRPLYQRYRARGLSATEATVILARKLLRTAFAIYRQGTTFDPERFAHA

SEQ ID NO: 354447 - protein, 400 aa, unidentified
MMTPDNIDVWVGLDVGKSAHHAHALDRDGDTLYDKPVRQDEKAIRSMLEHLSRRDRVLLVVDQPNTIGSLPLTVARDMGIAVAYLPGTAMRRTAQLLPGDAKTDRRDAHVIAWAALKLPETLRDAGSDDETLAALRMLAGHDEDLAHESTRHVNRLRSLLLQTHPAFERVLKGERATRDATLALLERYGGPAGMERAGIEDVKDWAGSNGLRAGRIIDDMFKAIGEQTVTVPGTGMAETIIPSIARDIKAIKDRRREVGRQVEKLLEDHPLLTVPASMPGIGVRTASSILLGIGGDIANFKSAAHLAAYAGIAPVTGQSGTSIKGERPARGSNKRLKNALWQSSFVASTKHPPSIAYYKRKREQGKHHNAAIICLARRRCDVIYSMLKNGALYQGPALAA

SEQ ID NO: 354448 - protein, 340 aa, unidentified
MIKVIGLDIAKNVFQVHGIDEAGRPVLRRKLRRADVLRLFSHLEPALVGIEACHTAHYWAREITALGHEVRLMPPQFVKPYVKSQKNDAADAEAICEAVQRPTMRFVPVKSVDQQAVLLLHRTRDLLIRQRSSLISAIRAHFAEFGVIVGQRMRNIDRLLGLLADKGTTLPELARRMLAVLADQLRDVAARVMVVEAELLAWHRANDVSRRLATIPGVGPITASAIVATVGDAAQFKSGRQFAAWLGLVPQQRSSGGKERLGRISKRGDGYIRRLMIHGARAVVGWRKRRPLSRDPWLGGLLARRPMNVATVAFANKSARVAWALMVRGKIYDTALARAA

SEQ ID NO: 354449 - protein, 408 aa, unidentified
MDSAFQFFAGIDWGSDKHRVCLTSRDGQIMAERWIEHRGDSLEELAAWLRQHTSDSPSLLAAAIEIPRGAIVETLLEHGFTVFSINPKQLDRFRDRYSPAGAKDDRRDAFVLADALRTDMHCFRAVKLDEPAMIRLRELSRLDDELAQEQNRAVNRLREQFHRFFPQLLQLCESADESWLWALFELAPLPARAAKLSEAKIARLLQQHRIRRITAAEVRAVLKTKPLTLAPGAAEAAAEHALLLLPRLRLLHQQRTDLGRRINAMLDELATPAEDPHEHRDAAILLSLPGLGRKIAATMLSEASQAIADRDYHALRCYSGAAPITRQSGKTKIVLMRRGINERLRNALYHWARVSVVFDPQSKKRYAAMRACGHSHGRALRGMADRWLKTLISMLTTRTLYDAQRRAA

SEQ ID NO: 354450 - protein, 452 aa, unidentified
MAKKSKRRCDTLPVLHPDAAGIDVGASELYVAVSADRDPQPVRSFPTFTRDLHAPADWLVQCGIRPVAMESTSVYWIPVYQILEARGLEVYLVNAQHVKNVPGRKTDVSDCQWLQYFHSVGLLRASFRPPGFICAMRSLWRHRASLIQMAAEHVLHMQKALDQMNLQIHCVLNDITGVSGLRILDAILTGERAPLTLARLCHGGVKSSEDVIAKSLEGDYRPEHLFALRQSLAAFRFYQQLVLEADREIQLQLAELTTAATAQPTTPARTKANAHYARHYEPRTFDLRGELCRIFGVDLANLPGISALTAQTILCEIGTDVSRFRNASAFASWLGLCPEKKISSGKVLFTKSRRVRSRVATALRMGAQSLHHAQEYLGEFFRRITRKLGRPQAITATAHKLARIVFHLLSTKEAYTESVFHKTEEETIRRAQYRLRGQAAQLGFQIIPAENG

SEQ ID NO: 354451 - protein, 382 aa, unidentified
MDNNKSVSTAGDEPASAEQGSKGVLKLGLDMHYRQVTVATQQEHGPIKAVGKLSHEGFWAWVEKKHKEGWQIYSCYEAGASGYWLHRDLVALGVKNEVVAPKATGQDRRQKTDRRDSAELLDCLDQYLRGKKTALNPVAVPSPELEQNRALVRFHRQLMADRGRYESRGKGLLCAQGIELRGKWWSSEAWKELQTHPRCKDWIEQQLRSWRGKLFALNAQQAQVRQRIEALAPDELPKGLGAYSAVALECEMKGMAHFDNARAVSSYTGLCPGIHSSDGRGKEGSINRCGNAAVRWNLVESMWRFAVWQPNYEPARQLRLALVKSKRAKKRLVVKAARQLAVDLWRLQTGRVTAQELGLVMQITSRKPGRRPRTGVQKERPH

SEQ ID NO: 354452 - protein, 345 aa, unidentified
MNKISVIGLDLAKDVFQVHGVDADGEVVVCKSLKRAQLRQFFAKLQPCLIGMEACGGAHYWARELTRLGHTVRMMAPAFVKPYLKSNKNDRNDAAAICEAVQRPSMRFVQPKQPEQQAVLHLHHGRRLLVRQRVALSNHLRGVLSEYGIVLPQGVKVIARQLPALLEDADNTLPMLARHLLAELKAEHDQLMERIDRIEQHLKAWHAGNAVSQRLAGIPGIDVLTATALAATVGEAQDFKNGRQLAAYLGLVPRQASSGGKERLLGISKRGDGYLRGLLIHGARAVIHHIRRRVKIGQPGGNAWVEQLLRRCHVNEAAVALANKMARMAWVLMARNETYGLARPV

SEQ ID NO: 354453 - protein, 410 aa, unidentified
MALKIVYPICCGIDVHKSFVVAVIAHTNDEGITEYIRHRFSTFTNNLKELAQWLEYHSCFDVCMESTGKYWIPVYNILEASCNICLAHPKYVKAIRGKKTDKKDAQWIADLYKHDLVSGSFIPPLKIRQLRDLFRYQMKLTQLQTSEKNRYQNVLTWSNLQIASVVSDVFGKSAQSMITSILDNPEEPLDIQVHMKKNMKATVEELTLATDCDITHEQADKLRVIKSHFDAITFCKNNLDELIRELGQEYEKQQKLVQTVPGFKNPETALRVLSEIGVDMNQFPTVGNLCSWAGVVPANNESAGKKFSTRVSKGGQYLKPLLVQVANAVVRSEKTPEIRNKYLQLKKRRGHKKAIMAICHRLLVAIYHILKNNEPYNPELYSKVEYIPPDKTITIQEASRYAQSHGFKVI

SEQ ID NO: 354454 - protein, 389 aa, unidentified
MLHDHLSDGPAAIRTQFGAIFVSLELSRSNWLVTSLSPGKGEKMSKHSITAGDVAGLLKLFADLKRKAMARTGQSYPIITIQEAGLDGFWLHRALQQEGIESHVVDPASIATPRRRRRAKTDRLDGETLLRALLAYKRGEPRVCAMVVAPSPEEEDRRRLCRERRTLIDERIAHVNRIKGLLFAQGISGYAPLRRDRRARLEALRTGDGRALPSYLKTQISRELDRLDLLLDQIKAVEAEQDALLAAAGKGAGEQAAPDPVTMLLALKGMGANFTAVLWSEAFYRQFSNRRQLAAYAGLAPTPWRSGSIEQEQGVSKAGNPRLRSTMIQLAWLWLRHQGQSALARWFKAHSQRGRKTAIVALARKLLVALWKYVTAGVVIEGAVMKSAA

SEQ ID NO: 354455 - protein, 347 aa, unidentified
MIPVASDVHKGRCWFAMIPKDGKLQMLEPIECTREAWLKRLGELPPEAEIALEVSTSGYFVMSVLEEAGWRERSHWVHTAGVDSLRKQKSDRLDTRRLVKKLAVHEIEPLPEAWFPPAPVRELRLLARQRCGIARLRAQTKNRVSSLLEMHGLRLRGSAFSEAGRAWIRSQQLSAGARQSFERMFRLYDYLSAERESSEAELAAAAVGFPEVARLGTIPGIGHILAAIIWSEIGDLKRFDSPEALVNYTGLAPSLHQSGEVSIQGAITHQGPVWLRWALVTAANAVVRSRSPLGRRYWRLRRRGKLPNVAKTAVAVSIARCVYGVLKHGGVYQEERWGRRTGNELEQ

SEQ ID NO: 354456 - protein, 416 aa, unidentified
MKSFVGIDVSSEKLDICFLTDDDQLSILTENSVANDIEGAPLTRELILEFNENYHFDQIVIGMESTSMYSFHPSMFFHEDTELKKLNTLVTIENPFRVKQFSRMFDEDKIDRNDAFRIADFLRIQRFTTSPIKEEKDMALQRLTRTRYQLIKQLTRTKQHFLENLTYKCNTLAREMRDESTSLFSATVITLMTEDFTLDELAALPLEAFCDLLQEKGKGRFKDPEKITKSIQRAITMSYRLGRLAQESINVVLSVLVRETHALEKSIKDLDKAIEQLVVVIPEYQCLTSVPGIGKVYAAGLIAEIGQIERFEDQTKLAKYAGLCWKVKQSGNYQSQNKPLTKQGNRYFRYYLVEAANSVKNYLPEYKAFYQSKCKEVPKHKHKRALVLTARKFTRLVDTLLRNHQLYTPPRSVIDK

SEQ ID NO: 354457 - protein, 412 aa, unidentified
MDGVYKVAGIDVHKKMLAVVIANVAELGEYRFERRKFGTGDLESKALGDWLTAEGVAEVVMESTAQYWKPVWQMLEGSFKLQLAQAQSNRAPKGRKSDFADAERLVRRLVAGELILSFIPDPEQRLWRMMTRSRYQLARDRARLRNQLEGFLEDCRIKLSSHLSNVLGVSGRKMLRALADGETHPATIAALANGGVRASQHALADSLAAASRLDVPRRQMLNLFLERLDLLSAQMDALAKMAAASLSEHRDAVKRLSNVPGLGADSAQQIIAEVGPKVATFPSPERLASWVGCCPGREESDEISKSDASPKGNATMRRLLSQSANAAIKAKGSVFEETYRRLAPRIGHGKAVWAVAHKLCRIVWKVLHDGVDYRELGQQPDPKSTERRVSKLMRQLCALGYQVQIQPTTIAA

SEQ ID NO: 354458 - protein, 344 aa, unidentified
MEPMYYIGLDVHKRKISYCVKDRSGQLHSEGWLPATRLDLDRWMKTLPQPWSAAMEATMFTGWIYDHLKPYAAQLKVAHPLMLRAIAAAKKKNDRIDAGKICDCLRCDFLPECYMAPTAIRERRRTLRYRNLLVRQMVQMKIKISSLLMEAGVSYNKQQLHKAGYFRELLASNPDIDDSLRSLLRQCRETVVRLGKTEGTLIRSLQQDRLLAERVQRLMSIPAIGPITALTWALEIGEVQRFSSIKKAVSYCGLCGAEKSSGNMVQRTPLSKQRNKHLQTTLIEAAKMAPRYSPTLAMLYDREKLRGNANRATLAVARKLVAYLLAVDRGQTHFLVVDRETCAA

SEQ ID NO: 354459 - protein, 361 aa, unidentified
MIVERTHVGLDVHAHAVVAAAIDSETGELTRRRLTSDPQELVAWLRTLPGPVAAAYEAGPTGFALARALRAAGVRCEVLAPSKLQRPVGERVKTDARDALHLAKLLRLDEFVTVTVPSEAQEAARDLVRAREDARRDLMSAKHRLGKLLLRKGIVYPGKTAWTSAYTGWLRRQRFELPGLQAAFDAGFDAVMAVLERRERLDEAILAMAADSEFTGVTRRLGCLRGISTLSGFALAVEIGDWTRLDGRRIGSYLGLVPSENSSGQSRSQGALTRTGNAHARRLLIEAAWHHRSQYSPSAPALRARWELASREAKERGHEGNRRLHRRWKAFQARGKRNVIANAAIARELAGWCWSLAVMDA

SEQ ID NO: 354460 - protein, 357 aa, unidentified
MIHVGIDLHHRNSYVRAMDDHGNLFPGRRVYHDRIEELWQYLKDLGDQPKRVVFEATANSRWMYRILKSDPTIEPVAVTPHKVRIIAETVAKTDQIDAGVLAMLSRLDTLPRAFLPDEELEDLREMTRYRACLVHLRSRAKNHVNGVLVRRGLVRPYQDIFGVMGRRWLEEISLPSVMRLQVDHWLSLIDRFQEKITEAEEKLYKELARQDRWSEDVALLTTMPGVGRLTALTILAELGDYRRFRRRSAVSCFAGLVPTSKRSDKSSRYGKISKRGPKALRSILVEVSLTSARKVPRYGALYEGVKTRKGSNKGKAAVARQMLEDCWTMLRKREPFRYMPVVRGGQPVQAESLARVG

SEQ ID NO: 354461 - protein, 325 aa, unidentified
MDKFSNYYGIDISKDVFDVMDSEGRHFLCPNNTAGFKKFIKQIDTSGCFVMEATGVYHAQLADYLYSKNIFVSVVNPLVIKRFIQMNLRRIKTDKADAEMICKYAQQHEVKAYVPSPVYVKESRIICENIDLLLKSRTMFKNRLHAMKHKAAKHRAVLIKPLEKIISDLTNQIVKLETELKKLIQENEPDLFTRLQTIPGIGKSTAMFMIVLSDGFKKFESAKQFTCFVGLSPVEKRSGSSVRGRSGISKQGNGKLRNLLFMCSFNACKSNKACRDLYERILGKGKCKKLALIAVANKLIKQSFAIAKSGLVYDPEFRSIKPQLN

SEQ ID NO: 354462 - protein, 419 aa, unidentified
MVHTDTMHVIHARAAGLDVHKMQITTAVRLARPGAEAEVFTRTFSALPSGLEELVAWLLEHRVSAAVIESTGIYWEAPYRALEQTGLQVLLVHPQHVKQIKGRKTDIADAVWLARICQFGLCSNSLILPQRFRALRKVSRLRRQVVRERARMRNRAHKILDAAGVRVGGVLSDLFGMNGLRILEGLVEATPAEAILASLSHHVRARMETLCDALSAELDEHSRFMLHDQLHAFHAVTARIAHYDRIIEDGLAEFSAKIDLLMTIPGIDRHSACAILVELGPDMGAFASARHCAAWAGVCPGNNKSAGKRRRGRARHGNPTLREVLIECAHGAARTNHCQFLGYHKALMVRRGYKRATVATAHKLLRVIYCVLSSNVPYRDPETDYEALMVKRNAPRWIKMLKKYRIDPATGETIQPATA

SEQ ID NO: 354463 - protein, 415 aa, unidentified
MALKIVYKICCGIDVHKTFVVACIASTNDKGITSYESHRFSTYTSGLKTLLQWLLDRNCKDVCMESTGKYWIPVYNILESDCSIVLAHPKYVKAIRGKKTDKKDAKWIADLFKHDLVAGSFMPPADIRQLRDLMRYRFKLTCFKSSEKNRLQNCLTVSNIQLGNVVSDTFGKSAQAILDKILENPADTSFDLEPLVFKSLKKKLPELRDAIDGYITPEQAGKLKVIKAHYENLEARKAELEELILALAAPYQQELAILQTAPGISSDFTAIGIISEIGTNMEAFPSAKHLCSWAGLTPTNNESAGKKKSVRVSKAGCYIKPLLVQCANAVVKSTKHPEMRNRYLRLKKRRGHKKAIIAIARMLLTALYHMLKNGENYNAELYQKSDLLPVDREITVEQALMIARNQGYKIKSATA

SEQ ID NO: 354464 - protein, 413 aa, unidentified
MDVMHPRCAGIDCSKKDAKVCIRIQGYDRQATSAAVTTWGATTSQILRLREHLVAANVTCVVIESTSDYWKPFYYLLDDGLDVVLVNAASVRNLPGRKTDVSDAAWLADLGAHGLVKSSFVPPAPIRALRDLTRTRTVITRERTREVQRLEKLLEDAGIKLSAVASDITGVSGRAMLEALIAGQRDPAVLAELAQRRMRSKIPALTEALTGRFDDHHAFMARLFLDRIDAHTADIGRLDERIGEAMEPFRPARDLLMSIPGFSRIVAEVFIAETGGDMSVFPTAGHLASWAGVSPGSNESAGRVKSTKTRPGNRYLKGVLGITALSAARSKDTYFAAKYKRIVTRRGPMRAIVAIEHAMIIAAHNMLTNGDFYRDPGADYYTSHQPARTKARAINQLESLGDRVTLQPLTKSA

SEQ ID NO: 354465 - protein, 319 aa, unidentified
MNLVPVGVDIAKHKFDVAVLLPNQKYKTKKFSNTPAGCREFLNWLTRFGDCHVCMEATGCYSTELATLLADNGCCVSLENPARIHAFGNTELTRNKTDKSDAALIARYCALHQPAPWYPAPLSERQLTALVRHLRNLEEMRQMEVNRLEAAEDVIVPSLNEHVAMLDDLIEETRKKISQHIDDNPDLKRDRELLKSIPGVGDMLSVNLLAFAGNLRRFSDSKALVAYAGLNPRRCESGMWKGKSRLSKVGHAELRSVLYMPAVVAGRCNEVVKRLMERLAARGKTGKERVCAGMRKLLQLAYGVVKSGREFNAEIPLAG

SEQ ID NO: 354466 - protein, 311 aa, unidentified
MNIGIDVSKDHLDIAWLPAIRPAMQVPNNTQGHQELCALFANQQPQRILMEATGGYERALLAALLEARLPVIVINPRQVRDFAKATNRLAKTDNIDAAVLACFAEVVKPDIRPLPDTKALELQDLVARYRQLVELRTAEMNRHQQAVNVRVKKSIDVIITTINQQLKELDAQLDELIRSTPAWRAKVDLLKTMKGVGDQTARMLVAQLPELGRLSRQQIARLVGLAPINRDSGKKRGKRSIGGGRSCVRSMLYMPALSAVRANPKLRRFYKHLLEMGKPKKLALIAAMRKFLITLNAMMRDQKAWQAPISA

SEQ ID NO: 354467 - protein, 404 aa, unidentified
MNNVAGVDVSKGKSMVSVLRPFGVVVAKPFSVGHTGSELKELANYLKSLDGETRVVMEHTGRYYEPVARFLHEEGIFVSAVNPKLVKDYGNNTLRKVKTDKADARKIARYGLDNWTELRQHTPMDTIRMQLKTLNRQQGLYSKTKTMMKNNLIALLDQTYPGVNNLFDSPVREDGSQKWVDFATAFWHVDCVRNMSLVAFTERYQKWCKRHGYNFSQSRVVEIHARAQDLIAMLPKDALTKTVVRQAIDALNAVSASLERLKAEMRTLAAQLPEYPVVMAMRGVGDSLGPQLMAEIGDVTRFTHRNSITAFAGVDPGADQSGTHEAKSTRASKSGPPELRKALFLVMDCLLKTMPQDDPVYCFMDKKRAEGKPYLVYMTAGANKFLRIYYGRVKEYLASLEDTD

SEQ ID NO: 354468 - protein, 421 aa, unidentified
MTVYLERGYNCKEYQWFYKQYQNIYSKEIFMIYAGIDVAKDKHDCFITNSDGELLFKSFTIPNNREGFETLFQKIQSVSDDLTKVKVGLEATGHYSYNLLGFLLDKGLPTYVINPLHTNLYRKSLSLRKTKTDKVDAHTIASMIMSDVNLKSYSDTSYHNEELKSLTRYRFDKVKARAKLKSSVSRLVCILFPELEKLVPTLHMVSVYSLLSEFPSAHAIASAHLTRLTNLLSESSRGRYGKDTAICFRDAARSSIGSHIPAKSLELKHTIRLILELTSEIDEIEAEIKTIMDEINSPILTIPGISYKMGAMIIAEIGDFSRFDSPDKILAYAGMSPSIYQSGQLDNCYAHMEKRGSRYLRYALYNATKYVCHWDESFGTYLAKKRAEGKHYNVALSHATKKLVRTIYAMEKSGQAYTNAA

SEQ ID NO: 354469 - protein, 365 aa, unidentified
MYYVGLDVHFKRSSVCILDCDGKLVKRLEVKGAWARLFEEVDRSVPRPFAVCYEASCGYGYLHDQLAKRADRVSVAHPGQLRLIFRAKKKNDRVDCTKLAKLLYLDEVPQVHVPGLDVRAWRGLINYRRRLVGRRAAAKTQIRALLRGLGIAVTVKGLWTTKGIEWLAGQAMTSADGLRRDVMLDELAQAEAKVIKVERELNRIAKGHAGVALLMTIPGVGPRTAEAFVAHVDDVKRFGRVGQVGSYFGLVPCQDASADRNRLGHITKDGPAGARWLLAEAAWQGRRRSPTIGAYFERVMRDDPDRKKVALVATAHYLVRVMTAMLRSGEAWREDPQCVARARAKEKERGNEKAEEAADPAKEAQ

SEQ ID NO: 354470 - protein, 355 aa, unidentified
MTDNRQKIIIGVDTHKDFHHVAVISALGESLTDRKFDATPDGYATLIAWVTGQGDVLRAGVEGTGSYGAGLTARLRTAGITVIDVLAPDKQERRLRGKTDQIDAYSAARAVLARRATTVPKIRDGEVEAMRILRTTRRMVVKQRTEIMNQLHSLLVSAPEQLRAKLAGLKPKDLAKTCARLRELAGDDVVTAATKDAARSLGRRFLELTVEADRLEDRIRVLVTAYAPELLAVYGVGPDVAATLLTVAGENVDRIGTESALAHLAGTAPIPASSGKTNRHRLNRGGNRQGNAAFHRIVLVRMKRHPETRAYVEKTLARGKTKRDTMRLLKRYLAREIFPILIAIQQRQGTTQMAA

SEQ ID NO: 354471 - protein, 326 aa, unidentified
MFFIGIDVSKAKLDCSLLLDVASSKRRAKSVANSKAGISELLVWCVKQQVATHELHAILEGTGVYHEQAALALADAGATVSIVNPAQVKDFGRSLGVRTKTDGVDSLVLARFGAMLSPRPWTPPTQEARVLQALLSRREAIAQDLQRERNRLEKADATDTPALIRQSIVESIAFLEQQLTKLQQDIDEHINKYPGLKADRDLLISIPAVGPQVGNHLLAIMHNHQFQSAEQLAAYLGLVPVERQSGTSVRGRPRLSKAGPARVRAILYMAAIVGTQHNPHIKALYQRLQDRGKTKMSALGAAMRKLVHLCFGVLKTRQPYQANYAI

SEQ ID NO: 354472 - protein, 343 aa, unidentified
MNEVITIGLDLAKNVFQVHGVDGLGEVAIRRQLRRSQMIPFFEKLPPCLIGVEACPTSHYWSRELQELGHEVRIMPAGYVKPYVKRNKNDAADAEAICEAVTRPTMRFVAVKTAEQQSLMMLHRTRSLLVRQRTMLVNAIRSHLAEFGIVAPVGLRGVQRLVSIVSDPTDERLPSLARICLTSLIATLTTVEWEASCNKRRILAWHRSSEASRRLETIPGIGPVIATALVASVSDPLIFKSGRELAAWIGLVPKQNSTGGKERMGRISKQGDKYLRWLLVAGAMSVIRHGRKTNFEKNPWLADLVHRKPTKVVAVALANKIARTAWAVLVTGETYRQPAPSEA

SEQ ID NO: 354473 - protein, 362 aa, unidentified
MAQHGRLKKPRRRRIAGGVDTHGDTHHAAVVLLNGARVADAEFPATARRYAQLLSWLRSFGRLWAVGVEGTGSYGAGLTRHLAEQGVRVVEVDRPDRRQRRTKGKSDPLDAYAAADAMLSGRACATPKLGTGIVEAIRALHTTRAGAVKARTAAMNELRSLLVTAPAEVRDRLRGLAPVALVRACARLRPTGDTADPQVAVRAALRALARRHQALTGEIADLDAQLRPLVERACPELIAIKGVGYETAAQLLVTAGDNPDRIGSEAAFAALCGVAPIPASSGKTRRHRLSRGGDRQANRALHMVACTRLATCSRTRAYRNRRAREQLSPKDILRCLKRYLAREVYKALTRQNVADPQLPAAA

SEQ ID NO: 354474 - protein, 411 aa, unidentified
MEVLFTHCAGLDVHKKTVVACVLVPDPSGGVRKVTRTFATTLAGLEDLARWLLSYRVTHVVMESTGVYWKPVYNVLAPQCEVWLVNAQHVKQVPGRKTDVGDAEWLAQLMRLGLLSRSFIPDVEQRDLRDLTRYRTRLTEERSAAANRLHKILEDANLKLTSVVSDIQGVSAQAMLQALLGGETDAAVLADLAVGRLRAKLPALEAALTGRVREHHRFMLGELLDHLAHLGQSIETVNARIRELTAPHEAIIVRLMQIPGVKRYTAEVILAEVGPNVTPWPTAKHLASWACLCPGNDVSANKRRSGKTRHGQKWLRAALVEAAWAASRSKDTYLAAQFQRLRARRGDKRAAVAVAHSILTIVYQLLADPQATFQELGGDYFVKKNPEQERRRAIKRLAALGYEVTLTPISG

SEQ ID NO: 354475 - protein, 343 aa, unidentified
MKHYIGLDIAMKRTFICVLDEQGKIVHEGSEKTDPQLLADYFSKIGLQEIVVGFESGSLSHYLVTGFRVRAIDAICMDARLLSPILAIKINKTDKNDARGIADALRSNMYTRVHCKPQESVEKAILLTSRRALINQQTQLKNTVRGLLKSYGIRLGSVGAKFFSSTVMKHLENHEEIVRFSIRALLSAFDHLVKEIEKVDQKMLKIVNEDKEVQQLMSIPGVGPVTALTYKIEIFDPTRFKDSKSVGAYLGMTPKEYSSGDVRRQGKISKCGSNELRSLLVEAGVVILTRSKKWSKLKAWGLKIMRKKGLKKAALAVGRKLAVIMHRMMIENKEFVYGEPKVA

SEQ ID NO: 354476 - protein, 388 aa, unidentified
MQIITDRPQAPTAIRTDLGAIFVSLELSRSTWLITSLSPGGGEKMSKHTVSSGDVAGLWTRFSQLKDKVQVRTGQVVPIIVIQEAGLDGFWIHRLLQDEGVESHVVDPASIATSRRRRRAKTDKIDGEALVRALLAYKRGEARVCAMVRAPTPQEEDRRRICRERKTLTAERVEHVNRIKGLLFAQGISDYEPLLRKRRERLEELRTGDGRLLPEHLKAQIVRELDRLELTLQQIKSVETERDAMLSPSDEGTPAPGAMLKNLKGIRPEFAGVLWSEGLFRSFSNRRQVAAYAGLAPTPWRSGSVAHEQGVSKAGNPRLRTTMIQLAWLWVRHQSRSILTLWFHQRVQLNGGRVRKVLIVALARKLLIAFWKYVTAGVVLEGAETTAA

SEQ ID NO: 354477 - protein, 429 aa, unidentified
MDNVTERLDLFKQVRASVRGSEKYLLVGVDVAKNNHHAFFGTPNGRTLQKNLVFDNSITGFESLRSLARDLRNQHGLGEVVYGLEPTASYHKPLAEYLIRQEEHVVYVSNVAVAKNRALLDGRWDKNDKKDAANVADLVGQGRCLYYDVPDENLRALRSLIGFRIRMKKEEHALRMRLRNNVFAQYFPELDKLYIRAGQPDDMVLSIAQHCLDPKEIAGMEFEAFLKLITTRKIRIEQEKRLRELWMIAPLSAGCRVHDAAKWEAQSLVTQLKAVRETVKDTEQRMALAAQRFPEYECLLSIPGFGPIVSAMVLAAIGNPARFENRKQVLRLAGLDLSASRSGKNSDSATPVISKQGKAALRYALVQAASVASALTPDIRTYYSNLLKGRELERGIKLKMKVKLAAKLLVVAWTLMKRKEHFKASCFSG

SEQ ID NO: 354478 - protein, 315 aa, unidentified
MQTPVDIGADISKDYVMVSCATGSLPSIGLTNRRASLLAWLKRLPAGSRIGMEATGTYHELLATLAHRLGLVVYVLNAKHVHHYAQATAQRGKTDRVDAELIARYVAKEHSHLHLWHPASPAQRQLQRLIRRRGKLTRARAALRSTLQGVPSLRTDVRVLLKHFDALIAKLDTQARALVKASVEREQAFQRLDAIPSVGSAVGIALLAALERWSLPRADSFVAFIGLDPRPDDSGKRSGRRRLSKDGDPELRRLLYTAAMSASRTPVWAPLYQRALARGLSRIQALVILARHIARTAWSVYTHKTQFDPARVHSS

SEQ ID NO: 354479 - protein, 433 aa, unidentified
MLKLNYMSTLFVGIDVSSKTNAVYAMDFEENKYISSSFGNNQPGADQLVNMIAECMQKHKNLDTVLIVLESTSVYSVHISNFLSASEVLMPYRPYVFCVNPKATSNYRKSYIGMEKTDPTDAYLIADFGRVGRTKKLEPWRGGQFISLKRLTRHRMHLSECITREKTYMVSNLYLKFSELQLLEGDDKPFGSLYGATSSAVLTEFLSPQEIIDMPEEELLTFLAGKSRNRISDLSKTSELLRKAARDSYRLDKCMYEPLSISLASSFNCIHAYQKEIKLIEQAIEKCINGMNPNALLILQSIPGIGPIWASGILSEIGDITVFHSSDALAKYAGLYWPKGDSGDFTSEDNKMSKAGNPYLRYYLGEAANSVRKHIPEYADFYARKYAEVTKHQHKRALALTSRKLVRLVFGLLVKNQLYTGEKLDTEYNIESN

SEQ ID NO: 354480 - protein, 426 aa, unidentified
MRSIALDVHQSFCEVAICEQGEVRSAGRVKSERAALERFAESLDPTDQVVMEATGPAMEIARIIEPHVARVVVANAQDVRAISHARVKSDRFDARTLARLLDAGMLETVWVPDEGTQELRRRVARRAALVRQRTRAKNEVHAVLARCLLGRSPVSDLFGKGGRAWLARQDLPAAELETVAGCLRQIDFLGEEIEAIDARLCEWVSASPEARRLMTIPGIGVGAAAALMAAIGDVSRFSSPRKLVAYLGLDAKVRQSGESAAQHGQISKRGNAQARSVLVEAAWIAVRSPGPLRAFSERLRARKHSGVAAVAVARKIACLCWQLLSKEEDYAFGRPSLVRAKLRRAELSAGAAKLPQRHGGRRISATQKEREAERELVERAEVAYRRLVDDWRSTGPKGAGATDGRASSRPSTGQAARRATAQRPAL

SEQ ID NO: 354481 - protein, 357 aa, unidentified
MSNKATKLDFRGQVFHIGIDVHKRNWRVTVLNNGLELKTFSMNPSPEGLSSYLQSNYPGGEYYTAYEAGFCGYWIHRKLESLGIKNLVVNPADIPVNFKETVRKTDTIDSRRLARALYSNLAHGNYIPSLEQQGFRSLCRLRKQLVKDQARVKNRIKSFLDFSGIKVLSQNEISHWSGLFLNYLSNLDLGNEHSNETLSRMLGQLMSLRNQIADLVKRLKTIVRQDEAILRVMNNLMTIPGVGFSCAIVLYSELMDINRFSSVDKLCSYVGLVPDLRSSGESEYTLGISKLQLQFLRAMLIECSWIAIRKDPAFTAAFNTLSMRMKKQEAIIRIAKKLLTRIMYVWRNNEPYICSIV

SEQ ID NO: 354482 - protein, 321 aa, unidentified
MKDNEPQKTFIGVDVAEKHLDVHVLPEDKDFRVTNDNKGHDELIKRIHLLKPSIIAMEGTGGLEKMIAVSLAQAKLPVAVVNPRQVRDFAKALGILAKTDRIDAKVIAQFAKAVKLEPRFIPDHTHLEMNELVIRRQQLIKMRNGENNRCSRTYSNKVRNSHQLIIKAIEKQLADIDTQIDQLVKSSPIWRAADNLLQSFKGIGPTVARTLIFGLPELGHLNRREIASLVGIAPFNDDSGKHQGKRYIRGGRSNIRKSLYMAAISAIRWNPAIKSFYERLIDNDKKKKVAITACMRKIIITLNVMMKNKTYWKPDYSPVSS

SEQ ID NO: 354483 - protein, 367 aa, unidentified
MEETTTYVGLDVHKETISVALAEGGKRGDVRAFGQIVNTPTALARMLAKLSQSGRTLKFCYEAGPCGYGIQRQLSAAGHHCVVVAPSLIPRKPGDRIKTDRRDANNLARLHRAGELSAVWIPDPAHEAMRDLVRARLAAVRSLRQARQQLSGFLLRHGCHYGRPAWTQMHRRWLAGLRFAQPAHHIVLEDHIATVEAATDRRDRLTKQIEMMLSDWSLAPVVHALQSLRGMALVTAATMIAELGDISRFANPRQLMAYLGLVPSEHSSGGTRRQGGITKAGNGTARRMLIEAAWSYRFPARVSREQLLRQEQLPKTIRDTAWKAQERLCGRYRKLTRAGKPATTVTTAIARELSGFVWAIACQVSPR

SEQ ID NO: 354484 - protein, 319 aa, unidentified
METTEVSFKQVVSRGCGLDVHKKVVVATIDGEGIKKQTREFDTVTSSLKELRDWLLEDRVTHVAMESTGVFWKPVYNILEPAGLTVWIVNAAHVKYVPGHKTDKKDSAWLCKLLLAGLLKPSYIPAKEQRELRDLTRYRTKLVQSNASNKNRIIRILEDANIKLSGVLSSTSGVVGTKLIDKICEGKQITMQEIDQVYHKKLGASKDEIFEACQGFVTAHHVYMLQLIRKEIDNTLRTIESLDLRIKEVLSPYDNALGLLKKVPGISVKSAENLVAEIGLDMNVFPTEKHLASWAGMAPGNNESAGKKKADGQPRETSK

SEQ ID NO: 354485 - protein, 428 aa, unidentified
MKKRVYKATKVKKLNLEKLKNEVEGKDIVLSVDVAKEAFMAVVMGKDKETIITISWQHPVESQLFFDTILKELPWRSLEVAMEPSGTYGDFLRTYFQEQGIRVYRVSPKRCHDAAEVFDGVPSTHDAKASAIIGWLHLEGSSEIWPMQTNGQRELGAAIQSMDLHDATFYRYINKLEGLTMRYWPELTQHLKLQSATLLELLIKYGSPENVAQDIEQAKRLMIKTGGSMLKGTKIEKVLESAKISLGVKCIEAEREVLQELCCEIRRLQKLCRQAKLKIEELTKNIDCVREMTPVLGKVTAAILYMTIGDVKEYDNAGSIVKTLGLNLKERSSGKHKGLLRITKRGSGSARMYLYMAVLRLIRKESIIKAWYLKKVSRDGGIKKKALVAIMRKLASALWHVGQGAKFDASKLFDVNRLDVCSVSAGVR

SEQ ID NO: 354486 - protein, 358 aa, unidentified
MNRNTGMNVGQIIGTMNGLQVMGLDIAKHVFQLHTVDMGTGEIVNMQLKRARVLAHFVNKPACLIAIEACGGAHHWARELQALGHTVRLLHAKAVRPFVSGNKTDATDARAIWLAVQQPGVKFVGIKSTAQQATLTLHRQRELLMKMRTMQVNALRGLLYEFGATFAKGHKALFAEVEQAFVDLSAQLPQMVVDSLREQISRIKALSQDMASIEKRLALQLKVDQDMCRVAQIPGVGLLTATAAIATMGQASTFKSGREFCAWLGLVPRQTGTGGKVRLGPISKRGDTYLRTLLIHGARSVLSRSKEPGPWLEGIKSRRPANVVIVAQAAKTARTIWAVTAKQQDYQRGHQSLRPQAA

SEQ ID NO: 354487 - protein, 390 aa, unidentified
MLRKNIVQTLDAATSWKVFGLDLAKHDLAVVAIPADGSEVQYVKRYSYADFLEFTAQIPSATMVFEPGNGANHFALRLQAQGHTPKTVSGASVKSWITLHMSGQKTDLNDAYALARLSEDPDLKTVRIKSVDQNRLQSLQAMRKQLVEQRTKTIVSIKGIFQCWGILFKKDSRSLKKFKEAADNNKELLGEEVVEAMILQIDSIADLDKDIKHVEELLKKVTMQDPRAQPMLDIPCVGLQTVSRLCAIMGDIKDFETPRSFVAFIGQVPKNMISGNKTTTPSGYEQVGQGKVNRRGDKMARSLIIQCASSMYMNFHKDNFPECALKDWIQKQKDAHKPYGKIMVSLAAKLLRIIYAVLKHGEAFSYEKTGISRSALAALKAAQPAEVGNA

SEQ ID NO: 354488 - protein, 359 aa, unidentified
MSTITIGMDLAKSVFSECEMDGAGHVLKRQDLRREPFALWLTQLPAGTIVAMEACSGAHHWARRCLAYGLQPRIMAAQFVKPFRKSVRSKNDRNDAEAVATAARQGNMRFVPVKSIDQQVRLSWHRVREGYKVESLAIGNRLRGLLAEFGVIVAPSDLALRRLLADLDAQLGLPAELKELLRDVADHWTSLRLRLDMCDARIEAHARADERCVRLRAIIGIGPITADAAVATVGNTREFKHGREMAAWLGLVPTQYSSGGHVRLGEVSCRGDAYLRTLLIQGARSSLQRAKAVVTEKATPEQLWIRTLDGRMPFGKVLVAIANKHARQIWAMLAHDVDYDPHACLKHPLHRHIDTMRTA

SEQ ID NO: 354489 - protein, 429 aa, unidentified
MKIIYPRVCGIDVHKKFIVAVICISESVEPIYLKKRFSTFHNDLIRFREWLIQNDCQNVCMESTGKYYIPVYNVLESHISNIVVANPKWVRAVKGEKDDDKDAKWIADLFKFGIVRSSFIPQKDFRILRELTRYRYKLVNMRSSEKNRFQNALTSGNCKLDMVFTDVFGKSASNIIDLILSDNPYTDEDILSKVHKKCKASPDMILDSVNGTNLTPAQKARIELVNDHIKQLSSNIQKLDKLIDLMIEPYEDYISFLCQIPGVSRNSAIIILSEIGIDMNQFTTSRRITSWAGLTPSSNQSAGKKKSVRISRAGVYLKTCLVEVAHAAVKDKNHSYYANKFNKISKRRGKKRAYIAIARKILVAAYHMLLTGEIWNPADLSEVETPVEQRLKYVKNNLKSDIKQLLDIGLTVEELTLMIQQNANIIATQ

SEQ ID NO: 354490 - protein, 367 aa, unidentified
MKKGSTAATKQSRNISQQKLTIGLDLGDRNSWYCVVDEAGQIQLEQRVRTTAKALREVFGAMPRSRIALEIGTHSPWISRLLSELGHEVIVANARKVRLIGESRKKDDRLDAQTLARLARIDPQLLYPVKHRSVQAQADLMMIRARAGLVRVSTGRVNTARGLSKSYGERLRGCNVRNMNPEKAEGLSPELQAALEPLLAAIESVSERIAEYNERIEKLAQESYPQVALLKQVKGVGTLIALTFVLTLEDPRLFRKSRDVGGYLGLQPGRRKSGQTEPQLHISKEGDPYLRTLLVQGAQHILGPFGVDCDLRRWGLKLAERGGRNGKKRAIVATARKLAVLLHHLWVSGEVYEPLHNSCRVAVTAAA

SEQ ID NO: 354491 - protein, 344 aa, unidentified
MITIGIDPHKASHTAVALDPEGRVLGELRAPATRTTTERLLHWAERWPERIWAVEGASGLGHLLAQQLTACDQAVLDVPATLAARARLLDRGHGRKTDAIDAASVARVAQSQPDLRRVRAEDHTAVLRLLSDRRDELNQERRRVINRLHRLLRDLRPGGAPTELSTSAAARLLSGVRPETAVDLERKAMARALVADLRRIDRALVENRARCAGAVAASGTTLTAIFGISEVLAAKILGHTGDVGRFASADCFASYSGTAPIEVSSGEVTRHRLSRNGNRSLNTAFHLAARVQTMHPGLGRDHYERKIAEHKSSREALRSLKRQLAKVVYRRLVADQAHRLALTA

SEQ ID NO: 354492 - protein, 340 aa, unidentified
MVHVGVDLDKRSSQIAVLSEDGEIVQHRLANDAARLEKFFADLPPHTPIAIEASGTWWWLVDLLEELGHQPVLSNPKQTKAIAAARLKNDRVDAERLALLLRGDLLPRVWIPPTALREARELIRHRIQLVWLRGVIRNRLQAMLARRNLQPTSGKSWLTQRGQRELQRLPLGETPSRIREDCGALLPTLDAQIRRLDADLVTRWGADPRVRRLTTIPGIGPFIAIVLVLELGDIERFASAKRVASYVGLTPRVRGSAGRVRAGHITKEGNRLLRWVLVLAATQAIRRPGPLRAWFHAVKKRRGKKVARVALARRLAEIVFHVWKQECDYFTVVRHGVVRG

SEQ ID NO: 354493 - protein, 431 aa, unidentified
MNYNQNKKIAQITSDTLIVGIDIAKFKHVARAQDFRGLEFGSPCYFENTKEGLQHFIDWITKLMRIQEMNHVIVGMESTGHYWLNLAHILKEYEIKFVAVNPLHVKKCKELDDNSPTKNDVKDAKVIAQLVKDGRFAEPVIPQGVYAELRVAKKVRDLLTVDQQIVQGQMHNWIDRYFPEFLTVFKNWEGKAALQLLKLNVLPHELVEFSDQELLTHLRKAVTCSVGLKKIQAIKQAASMSIGIRQGADMAKLELQTLIDKYELIKSKFEELDTKIDQLIDQIPGVQQMLAIKGIGRDTVAGFFAEVGDLNAYAHPRQIIKLAGLSLKENTSGKHKGQTRITKRGRKKLRALLFRVCMILVAKNSAFKTLHAYYTQRSNNPLKKMQSIIALCNKLIRILFAIGKKQFEFQEDRMLKDIPHMEGYQKVKAVA

SEQ ID NO: 354494 - protein, 337 aa, unidentified
MNKYIGIDVAKATLQIYIPTSDSDVEIKNSPDGLKKLYSKLKKQYKNELKDIIFVYESTGAYSTILEQFCQEKEIVCFKVGAYQSASFSKVIKNRSKTDKIDARMLAQMHILAKKKDIKVPKRDEKAHQIRSYIKYYQSLVKEHIRQSNYLEAATYNFEDKFILKQVKKKIASIEKEKAMIIDKVLEIIQTNPTFHQAYKNITSIKGIAEKSGIILLYLFLKYPNASRQQITALCGLDPVQRSSGTSVQHKERISKQGLSLVRAILYMPTLNTIVYNPAMKLIYDRLVERGKPKMLAQMAVMRKVILLAHSLYKNNQQYDECRYLNFTQIKEVAMLE

SEQ ID NO: 354495 - protein, 336 aa, unidentified
MTEITRIAIDTSKSVFTLHGTDADGRAVLRRNLRRQDMVPFFARRPPMEVVLEACGGSHHWGRVLAGLGHTVRLIPPQYVKPFVKRGKNDRNDAEAISEAAARPEMREVAVKSARQQANAMLLSVRELLVRQRTQLVNALRGHAAEFGHVGRLGRQGVAKLLADVAEDADLPTPAKDALALLGAEIGRLDARLAEVDARLVAQHKQTPTSQMLAEVPGIGPIGALSLVLRVDFSQFKSGRHFASWLGLTPREHSTGGKTRLGGISRAGDERLRQLLVLGATAVIRQAKPGRASAWLIALLARRPRKLAAVALANKMARIVWAMMTRGEAYRQPATA

SEQ ID NO: 354496 - protein, 412 aa, unidentified
MKVIVDRCAFLDVHRDTVMACARTPDGVGGRREEVAEFGTTTSQLLLLADWLVERQVTLVGMEATGVYWKPVHWVLEDAVGEVWVINARHMRNVPGRKTDVADAQWGAQLIEHGLVRPSFVPPRPTREQRDLTRYRKSVIEERGRETQRLHKVLEDAGVKLSSVASSVLTKSGREMIDALIVGQRDPAVLAEMAKGRMRSKIPELRDALAGRFNEHHALLCKAMLARVDQADATIDKLTARIEQLQDPHEAAVALLVGIPGVSYRTAQVILAEIGTDMSRFPTAGHLASWAGMCPGNNESAGKHRSGRTRHGDKWLRIALVEAGQAAGRSKNTYLGAHYHRIRGRRGPGRAAVAVGHSILVIAWHLLSTGEIYTDLGGDYFDKRRSSPAHQRRLVTQLEAMGHKVTLEPAAA

SEQ ID NO: 354497 - protein, 353 aa, unidentified
MSQSNESRSSRIIALDVGDRRTELARREGGVIVHEELRTTPEALRARFADEAPCTVVFEAGSQSAWIAWLLADLGHRPLVVHARRLKVITASYRKTDRTDAEWLLCLAEAGADLLGSVQVRSRAQQADLALLRTREQLTSMRSSAILSVRSQAKLFGAALPSGGPAAFPRRARAGLPPDVLAACEPLLVQIEQITDALGRIERTIESLAERRYPETACLRQVPSIGPLTALTAVLTLQSSDRFTRSREVGPVVGLVPKQRASGSSDPELRITKLGDRELRRLLVLAAHRIVRQSAPDSDLKRFGERLMARGGKNAKKRAIVAVARKLAVLLVALWKSGEVYQPLRQAELAAAA

SEQ ID NO: 354498 - protein, 343 aa, unidentified
MQIAVLGIDLGKNSCSLVGLDGQGTIVKRRRMRPASVIGFTKGLPPCIIAMEACCGAHHLGRLLEAQGHEVRLMSPEYVRPYVKAQKNDDRDAEAIAEAATRPTMRFVELKSEEQLDTQTLHRARDRLVGERTALINQLRAILLERGTVIAQGRRNLERELDAMLCEEEGLAVSQRLLMLIKDMREEWRVLDRRIAAFDDEFAARAKNDETARRLATIPGIGVLNATALAAAIGEGETFARGRDLAAWLGLVPRQITTGGKPRLASITKRGNCYLRKLLIHGARAVLPSLSKSETPLGRWLRALLGRVHKNAAVVALANKLARIVWAVLRRKETFNSSATALA

SEQ ID NO: 354499 - protein, 398 aa, unidentified
MFVGWDWASTTHDVTVIDHAGRIVDRWAPEHTETGLDQTLARLASHGPPEQLPVAIERPSGLVVERLLAAGHPVIPIHPNAFHVTRPRWGAAGAKSDPGDSYKLADYLRTDGHRLRRLRPLDAATRQLQALARVRDDHVAAKTAASNQLGALLEAHWPGAKQVFSRLGSQIALAFLNAYPTPESAARLGEARLAAFCRRHSYRGGRSPAELLQRLRAAPTAPVGLAPEVLNELVGAQVRLLRTLLGTIADLDRALGAGLLGHAKTELLAPLPRIGEVNLAQVVAEVGPILDRAGDVEHASAECGATPVTRASGKTKAVAFRWAANTKARQALTTFASNSRHSSPWAAALYADARRRGKHHPHAVRILARAWLRVIWACWHTNTVYDPAKHGAEKRLAA

SEQ ID NO: 354500 - protein, 355 aa, unidentified
MSQEKYIGMDVHQATISVAVLDSSGKLVMECILETKAATILEFVQGLRGTLSVTLEEGTAAAWLHDLLKPHVSHLVVCDPRKNALLRDGNKSDRVDARKLAELLRGGQLKPVYHGDHGLRSWKELGRSYLTLTQDVSRVMTRIKALYRSWAIPCSGATVYAPRHRAEWLAKISEPGVRRRAERFYQQLDLLQPVREEARRDLLSESRKHPAVKLLRQIPSIGPIRAAMLVALLQTPHRFRSKRQLWAYSGFAVKTHDSGEYRYVRGKLQRNRERITVRGLNDNHNHDLKHLFKSAAISASNRPGPLRDFYVTLVEKGMRPTMARLTLARKMAAITLTIWKKGVEFDAKQLHRQAA

SEQ ID NO: 354501 - protein, 430 aa, unidentified
MLAKNEGGLYMEHEKIEYAAWVGIDWGSENHAICLQVEGSERLESYTLEQKADVLHAWFMHLLVRFSGRKIAVAIEQSKGAVVNFLLGLDFVHIFRIHPKSLKNYRDALYPSGAKDDPIDAELIVQFTRLHQKKILPWIPDSEDCRLLMRLVEYRRKTVNKRVRLTNELTQLLKEYFPQALDLAGALDHGMACNFLLKWPTLQKLQRCKPEVVRQFYREQGCRHSEVIEKRIEQIHKTYPLTTDKAILESSILMVQTILPQLRLLIEAIARFDERIAEVYRKQPDAEIFSSFPGAGKALAPRLQAAMGSKRDRFRSSQEVAEYSGIAPVTERSGKSQWIHRRFACSRFVKQSFHEFAGESIVHCVWAKAFYESKKASGMEHHAALRSLAYKWIRIIFKCWQDQVPYDEDKYLKSLRSKHPSWLELMPKEV

SEQ ID NO: 354502 - protein, 346 aa, unidentified
MKIIGCDFHPSFQQIAVFDTETGEITEHKLVNGNGEAERFYRSLPVGSLIGIEACGNSHWFIDLLGRLGHQVWVGDAAKIRASYVRKQKTDRRDAAHILTLLLEKRFPKLWTPSRQERDQRQLLIHRHKLVQIRTRIKNSLQHLALNQGVQKKQKLWSKEGQKILIHLPLEGWTAVRREDCRELLAHLDERIAKLDKAAELAAEAHPQASLLLQQKGVGPITALAFALTIGDVSRFPHSNQVASYLGLIPSEHTSSSKRRLGSITKQGNSFVRMLLVEAAQSVTRLDPQFRKRYVHLCRNKPKAVAKVAAARKLAVRLYWVLRTDQNSQKAVPIESSPRVPLVGES

SEQ ID NO: 354503 - protein, 321 aa, unidentified
MNKDKEIYGIDISKSVFDVYCVATGHIQLNNDVSGFKQLLKSLPKTALVVMEATGYYHYRLAQFLHKNGVLVSVVNPLSVKRFIQMKLAKVKTDKSDAKAICEYGQLNAVPLYTALTDVQAECLQLFRLLDNYLKKRTQTKNKKHGEDTLGIPSKYVYQSLKRDLKHLNKEIAGIEARLLELVKQDQQHQLTLLKSIPGMGIKTALFLIVVTDGFRKFENAGQLCSYVGITPTIRESGSSVRGRSRISKVGNKKLRNLLFLCAFSACKHNKACRELYERIVNKGKSKKLALIAVSNKLLKQAFAIAKSGLPYDENFVSKLA

SEQ ID NO: 354504 - protein, 459 aa, unidentified
MSRRNAKVSLKPCKSRVNLTITHPNAAGIDIGSASHFVSVPPDRDDSSVREFPSFTVDLNAIADWLKACRVDIVAMESTGVYWIPLFELLESRGFTVLLVNARHVKNVSGRKSDVLDCQWLQQLMTYGLLSGAFRPAEQVCVLRALWRQRAMLLRGQGRHVQHMQKALTQMNVQLANVISDVVGETGQKILRAIVSGERDGHVLGAMKNARIRASIAEIAKSLEGNWRAEHLFALKQALAAFDFAGVQLTECDSEIELQLQRLQAHEGEPVKGKQRGRARNAPKFDLRTQLFKMCGVDLTRIDGIDVTTALAVISETGADMSRFATAAHFTSWLGLCPGTKITGGKVMSGKTKRCANHAAQALRLAASALRTSQSALGAYFRRMCSRMDKPKAVTAAAHKLARLIYTMLTKGTEYTDQGQDYYEERYRQRVIHHLAKRAEKLGLQLNPRDLASCHGAVL

SEQ ID NO: 354505 - protein, 349 aa, unidentified
MNKKITKQSVGIDVAQKELVVCLGRMYEDWTPELYGHKSFPNTEKGYLALIMWVKKLTDHDIPNRFVMEATGVYHESLAYFLYEKGYNQSIVLPNKISNYARSLDTKTVTDKTASEAIAMFGLERKLDNWKRPQRIFKRLKQLTRERDQVIQARTVAKNQLHAEHAEAEPHQKSITRIKQQIAVFNKQEKEIKEEIAELISEDAEVKNTIDLICTIPGIGSLTAAVVLAETNGFELIRNKGQLASYAGLDIKEKQSGTSVKGKPRISKKGNKYLRKAMHLPALAAIRHSERFKSVFVRLVSKHGIKMKAVVAVQRKLLEMIYTIYKSNTAFDKNYLQREDCNIIVEQGT

SEQ ID NO: 354506 - protein, 371 aa, unidentified
METNTYVGLDIHRKSIVATALDAQGETLGEAKLGPTAAELTDFLRGLPGTKHVVMEPCTIWEPLYESLEEEGVETRLTNPLRTRLIADATIKTDRVDSQALATLLRLDAIPQIYVPDAETRALRHLVRERYFYRRKAAAVINRAYAQLIRRGVEYPDRALRTVAGRKRIRTLGLPDVNRAIDTIEYFREKTKELDREVHDAYLRLPEAQWLKTIPGVGELAAVTLVAFLCPIDRFPTIGRLSSYVGLAPSTHQSGEFCYQGKLKWDSNELLQWLLIELSWTHRYRAPRGAVAKLGTRVSRRRGKGKGTVAAAHKLLKIIYAILKEKRAYRPHAPERPAAMQEVQNPTRVAAMQLVRGTALGSDAANRLNAQ

SEQ ID NO: 354507 - protein, 402 aa, unidentified
MNPVVGLDISKEESHGQAFLARGKPFRGTFHFEHTRDGLANLHQVLKDVETASRLRPLLILEATGHYQSPVVQFLEEHHYIYIVINPLISNRLRKSHLRKVKTDAVDAYLLGELYYKEEFEPFKKRGVQLLNLRYLTRQYESLSKMCVQTKLQFQAVLDQVFPAYKGVFEAMYSRISLRFLSKFPTSYSVLQTDEITLKAKMKELLSSKRGRSEGWINQRVQRLLDAAKQNPFQQTMYASHLINLKVLITLILQYQEHLAELEQNIDALAEEIEEHELIQSIPGIGHKIAATILSEIGEVDRFDHPKKLVAFAGIDPSVFASGKFTATRNRITKRGSRQLRYALVMAVQCGLIRSRNMRLKAFYDRKRAEGKPHKVALIACANKLIHWLYAILKNKKEFRPI

SEQ ID NO: 354508 - protein, 347 aa, unidentified
MRFYTKQHPFYCGIDLHARTMYVCILDQAGETRLHCNMPATPEALLKAIAPYRDQIVLAAECMFTWYWLADLCAEHGIPFVLGHALSMKAIHGGKAKNDKIDAHKIAVLLRGGMLPQAYVYPAEMRATRDLLRRRMHLARKRGELLAHVQNTNSQYNLPAIGKNIAYKTNRDGVAERFADPAVHKSIEVDLALITYYDALLRDVELTIVKTAKHHDANTLYLLQTVPGIGKILSLVLLYDIHQIDRFPRVQDFASYCRLVQCAKESAGKRSGTSGTKIGNAHLKWAFSEAAVLFLRDNPAGQKFLTRLEKKHSKGKALTILAHKLARAVYYMLQHKTAFDMPKFLNS

SEQ ID NO: 354509 - protein, 358 aa, unidentified
MARFSLTDLREFLSVDIAARYWIGIDVHKRTYHIALLRNEDDIFHWTVPANNDCTVEQLLSLGIKIESVCYESGPTGFSLARQLQNAGIPVIVAAPSKVLRSVTMGAKTDRLDCIKLARLVSKGLVKSIAIPTPEAEIERALLRRRHKIVDDIRRRRQRIKAMSLFHGFNLPDEVDRWRSGCIEALKSMDLPEVLKWTLDSHVRELEFLERELSILAAQLKSISRNQEHRKITEALESVPGVGEVVATTFLLEVFNPERFKRKEEIAGYLGLAPMVRQSGEKTPQGHLVPVGQTRLRSLLIEAAWIWLSRDENARNLYNKIYSRTMIPQKAITALARKLSIILWRLSIEQRAYRPLLS

SEQ ID NO: 354510 - protein, 370 aa, unidentified
MSVRRILAKTIDTDLEYEAIGIDLAKNCVSAALLTTDGEVVCIDRLDYSELEKSAQALSSTTFAMEPCTEMNYLVQKLEAWGHRCLVIGGKNVQNYVENHFSGQKTDLNDAQALAFLAQDTQLRTIKAKDVEQQKYASLTTLREQYIKQYRQTIVSLKGICQAWGLNISKGISGKAQLKDLIENHAAFPEELRESLVDMVTHAQTTQKVLNKITKTLEVLAKNDKVCQLIQTIPGLGTICSCRLRATIGDIKRFKNPKDFPPYYGLVPRSIATGHNEKKGKITHRGDRTMRSLMVQGAGCVIRLATCGKLKSKQLTKWILKKQKEKMPWGKLVCAVAAKLLRIVRAILISSKPYNPKIAGVAKCSLPKGS

SEQ ID NO: 354511 - protein, 345 aa, unidentified
MEYFAGLDVSLEETAICIVDEMGEVVREAKVASEPEAIAEYLQDGELAFGRVGLEACPLSQWLYDGLAAAGLPVVCIEVRHLKAALSAMTNKTDRNDARGIAQVMRTGWFRAVHVKSTESHELKTLLTSRKLLLNKMLDVENQLRGSLKVFGLKIGKVTRRQFEAQVLDLVEDRPTLLAIVRPLLRVRAVIREEYNSLHRMVLHAARQDAVCHRLMTVPGVGAVVALTYRAAVDVPARFTKSKALGAHFGLVPRKHQSGELDRTGRLSKVGDEMVRTALYEAASVMLSRVVRFSALKAWALRVANRRGVKKAKVALARKLAVILHRIWIDGTTFRWGSDPASAQA

SEQ ID NO: 354512 - protein, 339 aa, unidentified
MKNTKYYIGLDVHKERTSYCVRDKIGNILTEAEAASLYSELETRLKPYLAASIIGLEASTSYYTLYQNFLKNSYCIKVANTIQLRQLIAKNDKLDAQRLSEMLRLGTFPCSYIPDEKIQHLRNLIQMRHALMQEKVRCNNRIQAFLDRNGIVMPPCKAFSKKWKHALMQYMGSGTISTELRYEYNHYVYLEKTNEQADQEVIGYTKTYWNQEYQLLRSITGFGVLLPCYIIAFVHPIERFLSNRKLRRYAGVIPVAKESGGTSTKGRIPKTTSKALLRWALVQAANTIGKTNTRLGRYYRRKKKQKKNTGIAKIAVASTLVDIIYKVLTTKKPYISADC

SEQ ID NO: 354513 - protein, 347 aa, unidentified
MRFYAQQHLYYCGVDLHARSLYVCILDQAGDVQVHQNLRADPQAFLQLVAPYRQNLVVAVECMFAWYWLADLCAREGIPFVLGHALYMKAIHGGKAKNDRIDAHKIAVLLRGGMIPMAYVYPARMRATRDLLRRRMHLMRKRAELLAHIQNTASQYNLPAFEKRIAYESNRAGLPDHFDHPVVRKSIGVDLALIEHYDRLLKELELYILRTARQHDPNALYRLRTVPGIGKILSLVLLYEIHDIRRFPTVQDFASYARLVKCTKESAGKRTGTSGTKIGNAHLKWAFSEAAVLFLRQNPTAQAWLKRTASKHGKPKALSILAHRLGRIVYYLLLRDEAFDMQRFMAA

SEQ ID NO: 354514 - protein, 317 aa, unidentified
MAKHSMVCAGIDTGKHKLDVALDQGPEQLQVDNSPDGHTSLAAWLRQRRVRRIGIEASGGYEQAAVAALRRDGFSVILFQPAQVRAYAKFILRLAKNDKIDAALIAACTAATKTVREPPDPRLAALAGHLTMIEQITEDIARLKTRCESCRDERIRQCWKEQITRLRALARSEFKQLLAAIREHRDLAERLDLMASIEGVGLKTAVDVLIRMPEIGSLSREEAAALAGLAPYDDDSGTRTGERHISGGRQRLRTSLYAAALPAAFMWNPQLMALYRRLIAKGKSHKKALVACARKLLIFLNTVVARGTPWTSNTAQI

SEQ ID NO: 354515 - protein, 339 aa, unidentified
MVYVGVDLHRRVSQVSAIDEKGEVVLTRRIKTEPLEFLRVFGELEPGPMSVAFEATFGWGWFAELLKDAGVAAHMAHPRDTKAIANARVKNDAVDARTLAHLLRTELLPEAWMAPVDVREARRLVRMRGALVRIRSRLKNQVHAVLADQGVLFPMSDVFGALGREELARLQLPPLVQHRLEAHVRLIADITNEVNIADHEIRGLFKNDSRRKRLQAIPGIGLLTAATVLAEVGDFARFPSADHLCSWAGLTPKERSSADNVRRGRITKQGSRWLRWALVEAAVTAERNPDLRALYARIAARGGRNGKSIARVAVARRLLTLCFYAVRDEHGCRAFPVAS

SEQ ID NO: 354516 - protein, 367 aa, unidentified
MEQITRAVVRGEAVRVGVDLAKRVIQVHAVDAAGHVLVSRALARDKFIAWCAQLPAGCIVAMETSSSAHHWARKLMALGLDARIIAAQLVSPYRKQGASGKNDANDAAAICEAASRPQMHFVPVKSIEQQSMLCVHRLREGLKADRTACINRLRGLLAEFGLVFAQSPAVLEAVLSDVLEDAGNEMSTLARLVLQRAQAQWREIDVHIAWCDERIAVHQRDNDAVKKAATLLGIGPVTASAVVATVGEFKQFTSGAQFGAWIGLVPRQHSSGGKNNLGGITKRGDTYLRSLLIQGSKSAVMTAHKRSDPISQWVAALRDRAGWQKAVVALANKNARILWAVMTKGDAFDARHISIKPGAVMAAAASA

SEQ ID NO: 354517 - protein, 387 aa, unidentified
MNVGADKSELTAIRTDLGAIFVSLELSRSSWLITSLSPGGGEKMSKHSVPGGDFAGLMERFAQLQEKARLRTGQSFRIIVIQEAGLDGFWIHRALQNEGIESHVVDAASIATSRRRRRAKTDKIDGETLVRALLAYKRGEPRVCAMVKAPTPGEEDRRHLCRERKALTAERVRHVNRIKGFLFSQGVSGYQPLRRDRRQRLEELQTGDGRPFPQHLKALVNRELDRLELLLKQIKTVEAARDALLAVEQTVKPAPAAMLLDIRGIGPEFAAILWSEGLFRHFENRRQIAAYAGLAPTPWQSGAVDREQGVSKAGNPRLRTTLIQLAWLWLRNQPRSALSLWFHDRVSRNGGRLRKTTIVALARKLLVALWKYVTAGVVIEGVTMKVA

SEQ ID NO: 354518 - protein, 457 aa, unidentified
MSTFRIKKKRKKFKATDLPAELKHVNLNAAGIDVGSDRHMVAVPVGRDEVSVREFGAFTTDLEELADWLKKCRVTTVSMESTGVYWIPLFEILERRGFEVKLVDARKSKNVSGRKSDVLDCQWLQTLHTYGLLTGAFRPADEICVLRGYVRQKEMLVQSSSMHIQHMQKALQQMNLLLHNVVADITGVTGMTILKAIIAGERDPKVLASHRDPRCRNSVKTIAKSLVGNYREEHIFALTQAVDLYEFYQTKINDCEEAIARLLSTQAQQRDDEPPESQKNIPPQRRIRAGIDLRSRLFKLTGVDLFSIPGLGADTLLTILAEVGFDMTPWKTEKHFASWLALCSGTNISGGRVLVRKSKRSANRAAQAFRLAASSLARSATALGAFYRRIRARIGAPQAVTATAHKIAITFYSLLKNRTTTYVEIGEQVYNQKFKERRVKAMQKQALALGYQLIPAA

SEQ ID NO: 354519 - protein, 416 aa, unidentified
MGNNITKERIKINEKTIIATIDIGKYVNTGYFRCPDGRESKPFKFYNNGEGFKKYWEDMERFKRQNNMEEIIVGFESTGAYAQPIIEFLRKREVKLVQVNPMHTKRVKELCDNSPNKTDKKDPRVIADIIQLGHFLTVIVPEGVRADLRRLTHARERSVARQTALFNQLQELVFVIFPEFLNIVRDVRTKTAKYLLSYYPTPESILQCGFEQLLRIIKRVSKGRISKQYVEALYDASKESVGIKEGRESILFEIKHILSLIEREKYYIFEIESKMREYLKQVPESKYILSIKGIGIVTVCGLIGEIGDFRQFKTAYEIEKLAGLNLYEISSGKHRGEKHISKRGRTLLRKILFYASMNLVREGRIYHSWYQNTIKGGMPKIKALIAVSRKLIRLIFGLVVNQSEYNPEYHRIKKTA

SEQ ID NO: 354520 - protein, 346 aa, unidentified
MMIIGCDFHPSWQQIAWLDSETGETAEQKLVHASGEAKAFYQQLASPALIGMEATGNSQWFIELIEDLGHEIWIGDAAQIRASYVRKQKTDKRDAAHILKLVVEGRFPRLWTPDREQRDLRQLVLHRHKLVEIRSRVKNELQHLSLNKGMQRKAKLWSQAGQKLLRELPLQPWAACRREDLLGLLRMLNEQVGKLDEAVQLAADEHPQARLLMTQPGVGPNTALAYVLTIGDISRFPRGKQVASYLGLIPREESSGGRQKLGAITKQGNRLLRSLLVEAAQIAVRLDPGMKKQYVHRCHQKPKGVAKVAAARRLAVRLYWMLRTEKPYPEIVRIESSPRVPLVGAS

SEQ ID NO: 354521 - protein, 368 aa, unidentified
MDEVSGFIGLDVHKETVSVAVAEAGRNGEIRHLGNFRNTPDAIGKLARRLGRLHGAVEFVYEAGSCGYAIQRQLTGLGFVCRICAPSMTPRRPGERIKNDRRDSIALARLLRAGELTYVWVPDLLHEAIRDLVRARHAASKDVRRARIRIQAFLLRNDLRFVGKAWSHRHRMWLCNRGFAHPAQQIAFQTYLNALEYDERRKLELEAQIKEAIELSPWSRLVRALQALKGVGPIVAATIVTEVGDFSRFTHPRQLVAYFGLAPGEHSSGSSVRPRGITKAGNATARSILCEAAWNYRTTPKVGQWMKQHRPEVPQEIIDIAWKAQLRLHKTYKRLTSRGKRTVVATAAVARELLCFMWSIGRALPANA

SEQ ID NO: 354522 - protein, 407 aa, unidentified
MNLNVGIDVSKLKLDYCGMDSNKQVCFQGEVTNTPKGAGHIRDEILKRSQQADQIIIGMEATSVYNFHPTLFFEQDDRLNQLNVTVVTLNPKVTHRYSKLFDDDKTDTVDAFHIADFLRIGRYQVPVTRDEKHIALQRLTRERYHLVHQINDCKNHFLNNLYYKVNTIDTVLPTSVFGSTMLSILSDEKYSLDDLVQIPLSALTDELNHLSHGRFGDAKSVAKALKKAIRSSYRLSKTVADSVDQVLAMYANQLRMLNQQLKLLNKSISDLCSVISGADSLQSIPGIGPVYAAGLLAEIGQIDRFPNDASLAGYAGLSWKRSQSGNHERQLTPRTKSGNQYLRYYLVEAANSVRRYDPTYARYYQKKFREVPKYQHRRACVLTARKLVRLIINLLTEHKLYTPPKLV

SEQ ID NO: 354523 - protein, 417 aa, unidentified
MKVVHQICCGVDVHKSFIVATIIKTEGLMPQYTKKRFSTFNNDILRFKQWLLENDCRDVCMESTGKYWMPVYNLLEDEINVVVASPKWVKAVKGNKDDTKDSKWIGDLFRLGLVPGSFIPPKPIRVLREYTRYRYKLVSCKSSEKNRFQNSMTVCNVALDSVVSDMFGVSASKITDYLIESDDFDPERVKSLLHGRMKPKADAIIESIQGYQLSKAQKYRMSVINSHLGFVEKSIEKLDAMLNTLVEPYESHVALLCTVPGISRQSAITIISEIGVDMSAFSNSKKFCCWAGLTPGNNESAGKKKSVRITRAGVYLKPALVQVAHAAVKAKDSLYYKNKYERISKRRGKKRAIIAIARMILTAIYNMFSTGEVWNPTDLFKVDMPCALQERQKKKAIRNAFILLQREGLLDGSQIPA

SEQ ID NO: 354524 - protein, 317 aa, unidentified
MSKPSMNCAGIDTGKRQLDVALDGRSDRLKVGNDAEGHAVLTAWLRRHRVKRVGIEASGGYEQAVVCHLRRSGFVVVVFQPGQVRAYGNFRLKRAKNDKIDADLIAACTAAVRKIHPPPDPRLAALAEHQTMIDQIVDEMARLKNYVESSRDPRSQQFWKAEIKRFRGVFRQELKQLVAAIRQHRDLAERLDLILSIDGIAVRTAVAILVRMPEIGQVSRQQAAALAGLAPYDDDSGERHGSRHIAGGRKRLRGNVYAASLAASMRWNTELIELYQRLIARGKEHKVALTACARKLLVFANAVVARGTPWVSHAAAH

SEQ ID NO: 354525 - protein, 520 aa, unidentified
MISAESDVRRHCFSSFQPASSETARIARSLAHMAHSADTEFSSPVEAPARKAGWVHAHCARLRSPYAAQDKPFASGFTNPHRNGGDIMLKINYMSTLFVGIDVSSKTNAVYAMDFEENKYISSSFGNNQPGADKLVNMIAECMHKHKNLNTILIVLESTSVYSVHISNFLSTSEVLMPYKPYVFCVNPKATSNYRKSYIGMEKTDPTDAYLIADFGRVGRTKKLEPWRGGQFISLKRLTRHRMHLSECITREKTYMVSNLYLKFSELQLLEGDDKPFGSLYGATSSSVLTEFLSPQEIIDMPEEELLAFLAGKSRNRISDLSKTSELLRKAARDSYRLDKCMYEPLNVSLASSFNCIHAYQKEIKLIEQAIEKCINGMNPNALIILQSIPGIGPVWASGILSEIGDITAFHSSDALAKYAGLYWPKGDSGDFTSEDNKMSKAGSPYLRYYLGEAANSVRKHIPEYADFYARKYAEVTKHQHKRALALTSRKFVRLVFGLLAKNQLYTGEKLDAEYNIKSN

SEQ ID NO: 354526 - protein, 343 aa, unidentified
MQVVTTIGLDIAKSVFQVHGVDAAGQVLIRRQLKRRAVLAFFQKLPACLVGIEACASSHYWSRELQALGHSVRLMPPAYVKPYVKRQKNDMADAEAICEAVARANMRFVPTKTPEQQSCLMLHRTRHLFIRQQTAVINSIRAHLAEFGIVAPVGRKGVTELLHIVADPSDKRVPEVARVCLAALGNQLLSLKEQIVEFDRMIMVWHRSNETSKRLHYIPGVGPMLATALVASVADPRTFRSGRNFSAWIGLVPKQHSSGGKDRLGSISKQGDRYLRSLFVAGALAVIRYAKIHGTKHRPWLTALLARRPTKVAAIALANKLARMAWAMMAKGERYRQPVALAA

SEQ ID NO: 354527 - protein, 338 aa, unidentified
MSMTTLGIDIAKNVFHVHGRDAAGRPVFQKRFSRAALIEFMANLPSCRVGMEVCGGANYWSRTLQALGHEVRLISPQFVKPYVKGNKNDFNDAEAICEAVLRPTMRFVTPKTVAQQDLQNVHRVRRRLIGARTALVNQIRGLLAEYGVVVPKQVSPLRRALPRLIEDLTNDLTPLARTTFTVLYEELRAVDARVTAVDRELKAHCAQDERCQRLTAIEGIGPLTATAIIAAVADPRVFKNGRHLAAWLGLVPRQCSSGGKPRLLGISKRGDRYVRTLLIHGARAVVVRAGTKQDARSRWIAEKRRQRGTNRACVAVANKNARIIWALLVQGTCYRTAA

SEQ ID NO: 354528 - protein, 468 aa, unidentified
MKNYYLGIDVSKGYSDFVLLNEKKQTVLESFQLDDTFEGHNKLFKILSEFFTQQPDTKIFAAVESTGGYENNWYHLLHKYQGQLNLSVARLNPYGVNYNSKADLKRIKTDAISAKSIAEYLICHPEKVSYQTEDYFASLRRQWTFIKMLTKQRVQLLNQLESLLYVANTEILYHCRNKVNLWTLKLLKQYPTAKHLAKARVSTISKIPYLTEALAKELINKAKQSVASETDETMAEIITATVNQILSLRKTICLQVKKLQSSCNLPEVGLLKSFPGIADYSAVGLLIEIGSVERFSSVKKLACFFGVHPVFSESGDKISGYRMSKRGRKEPRQILFNVARFAIVHNPLIKEIYIDHLKKGMSKMAAIGAIMHKILRIVYGILKNNTPFNPEIDRANRLRNLSKKKEGSLVVNKMLEPIDCKAPVSRRQLKKRKEQEKSQNLKPLNAEQIVSVFAGSYARSFPFASTQT

SEQ ID NO: 354529 - protein, 356 aa, unidentified
MIAMKYYTSTTEFNCGIDLHARQMYVCVMDRTGKKLVHTNIRNNDFEYFLKLVAPYRHDLTVCAECMFGWYWLADACQAANIHFVLAHALYLKAIHGGKNKNDRIDSEKICHLLRTNLIPPGYVYPAAKRPLRALLRQRLLYVWNRSELLSRIQSHQLAHNRPTTRQTLYNREPWEKHLLASEPDPVRQLALQNDLALIGHYDNQLASLEKELLQLTKQTAGRDFTLLKTTPGIGDYLGLTILHEIGDIARFPSVKDFLSYCRLVKGTVASAGKIKGLRGAKLGNAYLRWAFGEAAIIAKRDALLGPLAQRLETRLGNKFKANTVLAIKLARAVYFMLKTKTVFDPERLVAALSNN

SEQ ID NO: 354530 - protein, 392 aa, unidentified
MKKDSIAQGSLNKPRHRRASKGRMTEITGPAISGIPEQIVGIDLGDETSRYAVLDREGAVKSERSVATKRKARSEVFGKMGRSRIAVEVGTHSAWVSRLLASLGHEVIVANARRVRLISHSSQKNDKMDAQLLARLARVEPALLYPVQHRGEQAQQHLAMIRARAALVEGRTALVNTARGLTKTFGERLGKCDADQMGVGKLAGLPAAVQAALEPLLGVVEQMTEKIQGYDKQLAEIARKEYPETALLEQVSGVGVLIALTFVLTLDDPSRFEHSREVGPYLGLRPKQHDSGESQPQLGISKEGDVYLRKLLVQGAHCIVSRRGPDTDLKRWGLKLAGQAEQTAKKRQGNKNAKKRALVAVARKLAVLLHHLWVTGEVYEPLRNSQAAKAVA

SEQ ID NO: 354531 - protein, 375 aa, unidentified
MSNHSEAFVAFDTSKLRNAVAIADSGRTGEIRFLGEIENSATGTAKLARKLAGKYERLTFCYEAGPTGYELYRQIKSLGQECIVVAPSLIPRKPGDRVKTNRRDAVSLAKLLRAGELTAVWVPDRHHEAMRDLTRARDTAVDDLRSKRQQISAFLLRQGLHYCAGKKTWSQTHLNWLASQKFEYPEHRLVFEEMMMAMRQAQERLERLEQAIRAAVPDWSLADLVTALMAMRGIDLIAAATFLAEIGDLSRFQSPCELMAYLGLVPSEDSTGDCVKRGPITKAGNRRARRMLVECAWSYQHPPRVGKDKQEKVAAAPRAVREIAWKAQARLNRRYRALIRRCKLKTVAITAVAREFAGFIWAVAREATAARAAAK

SEQ ID NO: 354532 - protein, 341 aa, unidentified
MSEVSTIGLDIAKQVFQAHGADTSGHVMFRKRLTRARLIEFFRSQPRCLVALEACGGAHHWGREIAKLGHTVRLIPPAYVKPFVKRQKNDAADAEAICEAAQRPNMRFVAVKDEEQQASGVVFRARDVLVRQRTQCINALRGHLTEYGWVVPKGATHVPTLIDQIEDPNCQLPESARTIFKVLISNLKSLDENIAVLDVEIGRRSKEDPVARRLMTIPGVGPIAATAIVALAPAAETFKSGRDFAAWLGLTPLQKSTGGKQRLGATSKMGERTIRRLLIIGGSAVVRQACMRGAPAGSWLARMLERKPRMLVTVALANKTARIAWAVLAKGEVYRAPVPAA

SEQ ID NO: 354533 - protein, 339 aa, unidentified
MAILFVGIDLAKNVFAVHGVDGHGKAVLIRPSVQRSKLHELVASLPVCTIGMEACSGAHHWARLFKQHGHTVRLMAPKFVSPYRMSGVRGKNDAADAAAICEAVQRPNMHFVPVKSEDEQARLCVHRVRQGFVEQRTATINRLRGLLSEFGIVLPQKAAIVRREAAAHLEDLPGWANTAVGDLLSEVHRLDERIAEYDQHVSHMAANDERSRRLMQLQGVGCTTASALVSTIGDAHDFKNGRQLAAWLGLVPAQYSSGGKARLGSITKAGDRYLRTLLVLGAKSVLAAAKSKDDRLSRWALALQVRRGYWRAIVAIAAKNARMAWAVLAKGESFRPIQI

SEQ ID NO: 354534 - protein, 352 aa, unidentified
MEMIALDCHKHYSVACVQSPEGRRLAECRIEHRRGNIRAFLRPYSEGCPVAVETIGNWYWIVDEIEQAGKVPRLVHARKAKLMLGSINKTDKLDVRGLNRLQQTGTLPTVWIPPALLRDQRELPRTRMVFATSRTRLKNRLHSVLDKYGLQDQFIGISDLFAEGVREHLKQVVQQLPPQASYTSELLLEQLDTVQGVIEALEQRIAELFKPTEELKRLDSLPGVGLILGVLLLLEIGDIQRFRSPEHLASYAGTVPRVHSSGGKTYYGRTRPDVNHYLKWAYTEAANAVAVHRESLSNRHVGQLYSRIRDRRGHASAVGAVARHLAEATYWMLMKKQSYRERGVCEVSPQGL

SEQ ID NO: 354535 - protein, 322 aa, unidentified
MSESVLGIDIAKQKFDAALLVDGKTKHKTCKNSVEGFGTLVLWLEKQGIQKVHACMEATGTYGEDLAIYLHEAGHIVSIVNPARIKGFAQSELIRTKTDKIDAALIARFCLAMKPDSWIPPSPEIRFLRALVRRVDSLIDMRSQEKNRLSTAHESVTPFIKEHIAYLDQEIEKIRRQIADLIGQNPHLKRRKELLDSIPGIGKATILHILAELDDLEKFNHVRQMVAFIGLAPKETLSGSSIKGKPRLCKIGHARLRKTLYMPALVSIQCNPVMIALYNRLKEKGKNGKVIVCAIMRKLVHVISGVLKSGKKYDPNYKPASA

SEQ ID NO: 354536 - protein, 477 aa, unidentified
MLDADSQYDQTRLLSPLPHEALYVGIDVGKKRHVAGFLSRTLLQRHQRFEGCPALPFEQSREGFHLLVDRMRSYTSLEACYVLLEHTGHYHKLLEQYLQEMDIAVYVVHVQKRPTGMLKTDKRDALNLANTLYSQLELGVQVAEKLSLVRRALPPTKAALQLKGLIRHRYELIQESTQRKNKLTALCDEIFPEFTVILKDPNSPTALAIRESFPSPHVLATTSLAALQAVRGSARSLSDGKLMELQRLASQSIGIKDINRQRGLMLEQSLLIKELRLIQQHLEQLEAEICQIVEQSREGQILMSIPGIGPLSAATLIATIGNIANFPRACELKSYLGWAPTREQTGTSFDRSALTSGGARSTKQTLYLIVWHAIKQKGGEFALLYERLVPLKCIYNDATRRYTGKGKVIGRIAGQMVSLIYGLLMTDYEVTSHLAPGTKPPAPMLYDPEVHKRHRNGQYRALKPRKQKQLLIEQPNA

SEQ ID NO: 354537 - protein, 363 aa, unidentified
MNILAIDLGKFNSMCCFYDTKTQEYRFQTIATTRPYLTAVFTHHKIDLVVMEACGPSGWISDLCQECGLKTLVCSTNEAAWLWKNVKRKTDKDDALKLARLAMLQQLTSVHVPKHQVREHRSLIKYRKKLVGRINGIKNAIRGLFVCHGIEIAKGPIAWRTGRHEIDSYRKPLAECSMKELWQGQLDAELTQLDSLGEQISVMEQRLKTIAQKDERIQRVQTIPGVGLRTAEAIVTTLDDVNRFKNARQVSSYIGLVPRQFQSGETDRNGRITKRGSRLLRTLLLECAWISIRHNSWAKTTYERIHGGQKTRKKKAAIALARKIAVVSWAMLKNETDWDPEKAGIDLSSEAPSTSTKQAAAIA

SEQ ID NO: 354538 - protein, 460 aa, unidentified
MDGFLGIDVSKGYADFVLLDREFNPRERVLQFDDTHQGHSSFKQWLKSVLITHGFTHIYAGVESTGGFENNWYAMLVDMGRELPLRVTRLNPAAVRKAGDACLPRQHNDATSAAQIAGYLIRYPDQVSYKQADTTYASFRSFHNHIELLTRQNAQTINQLKQLLYSCLPELQRFCKKKIPLWVLELLMKYPTATKLSRARATTVARIRSVTLTKAHQLIARAGQSVSSREDELMAYTVAHMAREIRHMQANIKKLKGVLEQRCRGKEIDLLTSIKGVGSYSAACIMIQIEDIARFSSPQRLASYFGVHPVLKQSGDKQSVARMSKQGRSQIRKTLYMCASTAVMHDPHMKAIYHRHRRKGKNHKQAIGVIMHKLLRVIWGILTSQTPYDAQVDKANQQKQPTDSEISEHNHLASKRRLQDFDTYAPISRLAHKQRKAYQLSQVSEAEHVRDLADTPIGQT

SEQ ID NO: 354539 - protein, 288 aa, unidentified
MKHLFIGVDVHKKSWSVTLQEGQVVLKRFSMEAKADSLIHYIAKHYKGYLVECCYEACCCGYHIHRDLTKAGWNVLVVNPGDIPRINKQSTNKCDKIDSRYLCHHLACGHLRGISVPEEKQEQFRSLFRRRNDLVKSLRKIKCHIKAMLLYYGVNLPEHYDNINWSKAMIAWIQKLKWLYPTAARTMKSRLDEYHFLHAEYLQICNDLRKYARTCYKKDYYLLRSIPGVGPFIAIAILSEIGDIRRFKGIDRLSSYVGLVPSLHSSGEKSYSRGITYRSKNLPEKLSN

SEQ ID NO: 354540 - protein, 342 aa, unidentified
MAIKQIGIDIGKTSFHLIGLDADDAIVLRKQLTRTQLIRFFERHAGEQLSLAFEACSGAHWLAHQLMALGHEVRLLTPESVRPFAKAQKNDWNDALAIAEAAQRPGRHAVEVKSQEQLDIQALHRVRRRLVTARSAIVNQLRGLLRERGLVIGTGRLRFERFLRERLLTGEIELSPVCRVLFTTLIQEYHTTDARLAEIDSELEAFARSHPTCGALLAIPGIGIIVATALFSAVADVSDFKSGRDLAAFLGLVPRQRSTGGRTVLLGISKRDNGYVRTLMIHGMRSAFYNRKKRDNRMTRFMERLAERGLHSNKIVVASANKAARIAWAVLAKNQPYQPLAT

SEQ ID NO: 354541 - protein, 344 aa, unidentified
MDHFAGLDVSVKETSICIVNDTGRIVREVKVASEPEALLKVLGNPTYHFERIGLEAGPLSQWLFSALAEAELPVVCVETRHMQAVLKAQINKTDRNDARGIAQMIRAGLYRPVHVKTLRSQKLRMLLTHRKLLQSKAIAIENDLRGTLRNFGLKVGMVGQLKFEARIQALVENLPDLAELVEPLLIVRRALREQIVILHRRLLAIVRDDEVCRRLMTTPGVGPVVALTYRATVDVPARFRKSKSVGAVFGLTCSRYQSGEIDWSGRISRCGDEMMRVMLYEAAQSMLRSKKWSWLKAWAMQIARRRGMKKAIVALARRLAVIMHRIWSDGTEFRWTKENAPAAV

SEQ ID NO: 354542 - protein, 369 aa, unidentified
MKKNNTDEQSSKKGRKALKGPITIGLDLGDKTSRYCLLDGKGEVVQERSIVTTKKGMAQAFGAMPRCRIAIEVGTHSPWVSRLLKGLGFEVIVANARQVKLISQSSRKDDRMDAQMLARLARVDPQLLRPIRHRGEKAQEDLMKIRVRAALLDARTSLINAARGLTKAVGDRLPACDADSMGTEQMAGLPTGLQQTLKPLLEQVQGLTEKVKACDKELEQIARTEYPETKLLQQVSGVGTLIALTFVLTVEDRERFQKSRDVGCYVGLRPKRSESGESQPQLGISKEGDIYLRKLLVQGAHCILSRRGPDTDLKRWGLKLAERGGKNAKKRAIVAVARKLAVRLHRLWVTGEVYEPLRNSQVLPAKKAA

SEQ ID NO: 354543 - protein, 412 aa, unidentified
MRVFCGIDWAEKHHDVALVDEAGQLLAKARITDDAVGYRKLLDLLAEHGDNTEAEPIPVAIETSRGLLVASLRTSARQVFAINPLAASRYRDRHGVSRKKSDPGDALVLANILRTDMPMHRPLPADSELAQAVAVLARAQQDAVWNRQQIANQLRSLLREYYPAALNAFVTGRKRGLAHPEARAVLAIAPTPTIAAKLTKPQIRTALKRGGRQRYTEAETKRLQEIFRAEYTHQPPLVEEAMGKQMLALLRQLDAAAEGADDLAEAVEVSFQQHPDAEIITSFPGLGALLGARVLAEIGDDRSRFADARALKAYAGSAPITRASGKKRYVGRRFVKNDRLTHAGYLWAFAAITVSPGANTHYRRRRERGDWHAAAQRNLFNRMLGMLYHCLQHQMPFDEQRAFAPLLRPAAA

SEQ ID NO: 354544 - protein, 451 aa, unidentified
MDIVHTHCAGLDVHKKTVVAAIIVPDGEGGLWKDVRTFDSMTSDLLALSDWLMACGVTHVAMESTGEYWKPVFNILENNFEVLLVNAQHIKAVPGRKTDVKDSEWIAELLRHGLLKASFVPPLGQRELRDLTRSRSTFVRTRATLVNRVHKVLEGANIKLGSVASDVMGVSGRAMLAAIVEGRSSPTEMAELARGRMCEKRDLLAKALEGCVQAHHRFVLTELLAQIDSLDETIERFNEQIEVYCRPFEEAVVLLDTIPGVGRETAEIIVSEIGTDMSRFPTADHLASWAGVAPGNNESAGKRRSGKTTQGNKVLGAGLNQAAHAAAGTKDTYLSAQYRRLAARRGKKKAIVALEHTILVIAYHLIQTKEPYRELGGNYFDNRRPEATAKRLDMPMEKVVLTLQDHGNTSAASVPMALDVAVRDGRVKRGDLLLLEAFGGGLTWGSALVRF

SEQ ID NO: 354545 - protein, 417 aa, unidentified
MDIVHVRCAGLDVHKRDVVACRICLDDSGRSVQQTRRFSTMTQALLELSDWLQEAGVTHIAMESTGEYWRPVYNILEPVFGQDALLVVNAKHIKNVPGRKTDVKDAAWIAELLQHGLLRASFVPPIQQRDVRDLTRHRTNFVRERATLVNRVQKLLEGANIKLACVASDVMGKSGRAMLEAIVDGTLDPATLALFAKGRLREKHDQLEQALCGRVRPHHQVILSELLCQIDSLDESIVRLSAAIEEALRPFDPSGELVDLLDTIPGVAQTTAQVILSEVGADLSRFPSAGHLCAWAGVAPGNNESAGKRLSGKTRHGNRALCSALVQAAHAACHTKDTYLASQYHRLVGRRGKNRALVAVAHSILVIAYHIIQRRTGYQELGANYFDQRKPEATAKRLIGRLVKLGYTITPPQTCPA

SEQ ID NO: 354546 - protein, 362 aa, unidentified
MVRVPGIGIRRTAMEYYAGIDVSLELSSVCVVDAKGKIVKEAKVASDPEALVLFFKGLGFIVERIGIEAGPLSQWLHAGLTKAHFETVLLETRHVKAALSAMTVKTDRKDARGIAQLIRMGWFRPVHCKSAGSQEVRALLVARKLLLGKLLDVEFSIRGILRGFGLKMGVVTHNGFETRVRELCAGQAMLEQIARSMLAARCSLQTEYTKLHKAMLSIVRGDAICRRLMTTPGVGPVVAITFKTAVDDPTRIAKSKAVGALFGLTPKKYQSGETDITGGITRVGDESVRAALYEAANVLLSRVTRFSALKRWGMDVAKRRGMKRAKVALARKLGVILHRMWIDGTSFRWTKVAGGDEQLARA

SEQ ID NO: 354547 - protein, 335 aa, unidentified
MKLTAICIVDRTGKIEREGVVSSDPEAIAIFIKSHAPHVVRVGLETEATATWLWTELNKLGLPVICIDARHAKAALKMQINKSDRNDAVGIARIMQCGWYKEVHVKDLDSHAVKALLVSRALLVKIKRDLENQIRGLLKNLGLVIGRAKMNVFAVRAAELTEHRPELAAAVVPLLSARAAIEQQIADLDRKVMRLARKNAQARRFMTAPGVGPITALCFLATIDDPTRFKRSRSVGAYLGLTTRRYASGEIDWTGRISKCGDKMLRSYLYEAANVMLTRVARWSALKAWGIRVAKRTGLRKAKVAVARKLAVVLHRMWIDGTEFKWSKEAANQPA

SEQ ID NO: 354548 - protein, 414 aa, unidentified
MSNPLLVGVDVHRKTNAVCVMNGQGQELIPRFTMDNNRPGTEAFAQQMAQLMLDGDFDVLQVAAEATGWYWFHFFQTLSQDPFLNQGPLKLYPLNPRLTANFKKTFVDLDHTDHIDSFVVGDRLRLGRDLPAPFHYEEIYLPLRFLTRYRYHVVHNLAREKAYCLAILYLKVSEYTHKDRKPFSNVFGAASRAVLQEFASIEEIAAIPFHELVEFIDLKGKRRFPNPAENARKLQQVARNSYTLPDALQHPINLVLDLSLKHITFLERQEKRLNTAIAQHMEAIPHTLDTIPGFGPVFSGGIISEIAGIERFDYNQAKVAKFAGLKWRKHQSADFEADETRLTRTGNRYLRYYFCEAAQSVRLRDAEYKAYYERKFHEVRKHQHKRAIVLTARKLVRLVTRLLTTNQPYRPRRR

SEQ ID NO: 354549 - protein, 320 aa, unidentified
MTEAQSYVGIDVSKGYVDVAARPTGQQWRVSNTEEELGQLVGRLRGLSPALVVVEATGGYEVPITAALGTAGIPMAVVNPRQVRDFARATGKLAKTDKLDAQILALFAERVRPAPHPLPDPQAQELHALLARRRQMVAMLVTEQNRLGTALPNVGPGIQEHIAWLEERLKGINDGMAKLLRESPLWREREDLLRGVPGIGPTVAATLLAELPELGTLGRRQVAALVGVAPLNRDSGTLRGRRTVWGGRATVRAALYMAALVATRFNPVLRPFYQRLLAAGKAKKVALTACMRKLLTILNAMLKHRAPWQPLAFQAASPCS

SEQ ID NO: 354550 - protein, 337 aa, unidentified
MMYSGIDLHSNNSVVAVIDDADRVVAQKRLPNDVTKVVGFLVRWQDELAGVVVESTYNWYWLVDGLQDAGFHVHLANTAAIKQYEGLKHSGDETDAQHLAHLLRLGILPTGTILPREHRAVRDLARKRMQLVHSCTTHVLAVENIMARQLGGRMTSNQIKRLTDDAVDSLPLAADVGLAIKANVAVIATLQSQIEVLEKRLQERVKPQPQYGLLTSVPGIGQTLATVILLETGPIDRFADVGNFASYARCVDSVHTSNRKKKGEGNVKNGNKYLAWAFVEAANFARRFCPEAKRFHERKKARTNNIVATKALAHKLARACYHILKEGKPFDVTRCFA

SEQ ID NO: 354551 - protein, 377 aa, unidentified
MKNVRFVGLDVHAETIAVAVAEASGEVRSLGMIPNRAESIGRLVRKLGKPEQLRVCYEAGPTGYVLYWQLSELGVKCEVVAPTLVPVKTGDRVKTDRRDAAKLARSYRSGDLTPVWVPDAAHEALRDLVRARWAAKRDQLRARHRLSKFLLRHGRRAPDSISAWTERYLQWVKTQVSFVHHAQELTLSDYLHEVEHAAARVARLEHSIDAAIETLPVKMRAVIEALQSMRGIAQISAVSIVAEVGELSRFAHPRQLMGYSGVVCREHSSGPRIHRGSISKSGNAHLRRIVVEAAWAYRHRPAIGKTLAARQQRSSAAVVELAWNAQQRLHRRYARLMARGKNKQQTVTAVGRELLGFIWAIGVHVEQELSAPVRRAA

SEQ ID NO: 354552 - protein, 433 aa, unidentified
MKGGDTMNNALTTTLFIGIDVSSRTNYVFALDFFGKKLLSFQVNNNLPGSEQIVSNICSCLKENNLTHLTIAMESTSFYSWHLANTLAIHEALVWFKPKVHCMNPRVIAGYKKSFIDMDKTDPKDAFVIADFARVGKITTAPWSGAQYIALQRLTRCRLHLMENISREKSYILSNIFLKFSELAVLDKKESPFSNTFGSTSLAVLTEFMSIEELANAKLEDLVTFLVEKSKNRFSNPEATAKLLQKAARDSYRLDKALYDPLNVAIAASLNCIKALEKEVKGLDKAIEKSIKGIDNHQFQCLISIPGIGPVFAAGIISELGDITKFNNQGCVAKYAGLTWRKKQSGNFTADNTFLTKTGNKYLRYYLLEAAASVVRNNDEYHDYYQKKSDEALIHKHKRALALTGRKLVRLIFALLRNNQLYTFNEVVEKATI

SEQ ID NO: 354553 - protein, 321 aa, unidentified
MNYLGIDIAKAKVDCCLKLAGRYLHRTFANNTDGFAKLVEWVGKHGNDPVHACLEATGIYGEAVAVYLHDAGHIVSIINPLVIKKYIEMKLIAVKTDKQDARNIADFCCEQRPKAYTFPSESERILKNLTRHLQYLTDMQTAQINRAKVAHTVAKHYIDEMLQHIQKQMAEVEAEIARHIQRDESLRHKAKLLQSIRGIGKRTVPHLLTLFVSRKFKNAKQVVSYIGLNPILKQSGKQKTRYCAVSKQGDKHIRTSLYMPAVVCFRLPEFKAYIQRLENAGKKKMQIVCALMRKLITYCFAVLSKDKAFELHGTLTLSSIG

SEQ ID NO: 354554 - protein, 383 aa, unidentified
MKSVCGLDVHKDSVYLCILSEFGELIEKVFGVLTFQLEEMRDLMLHHHVVEVSMESTSVYWIPIWRVLSPHFKLNLSNPYFIKQLPGRKSDVKDAQWIAECTMKELIRGSFVPPETIQQLRQYDRRIFDLNEEIVRKLSKLDAVLQRCNIRLSNYVSNVDSKSYKAVVRAISQGITDPEELVKLIHGRIIKHHGMDVITASLKGVVSLAEIDMISQLRDELDMAEAHKEKCQARMLEICEREFPEELKRLQTIPGIKERAATSLIAEIGTDMNKFETANHLASWSGLKPRNDESNKKIKSRSITHGNVYLRKTIIECAWAASRTKDCFFSRFSFHQTQVRKKNKMKVLVAVARKMLVAVWHVLHDNTNYIDFTTDRKTSRTKG

SEQ ID NO: 354555 - protein, 349 aa, unidentified
MNYYAGLDVSLEETAICVVDGAGLIVKEVRAASEPEALIAALKAIDVPLERIGLEACSLTAWLHDGLRDAGLPAICIETRQANAAMKTMPNKTDRNDARALAQIMRTGWFRAVHVKSRQSRLWRSLLVARRTLLNERRAIENVVRAVLREAGFKLGRPSCAAFAGRVRELAGDDPTVRSIVEPLLAVLATMLEQLARLTKQALAITRREEVCRRLMSVPGVGPITALAFRATIDRPERFRRSRDVGAHLGLTPTRYQSGETDIVGRISRCGDELARTALYEAAHSLLVRSRKWSALRAWGMKIGKARGMARARVAVARKLAVILHRMWSDRTAFRFGREPAATAVLAVA

SEQ ID NO: 354556 - protein, 353 aa, unidentified
MEQQKIIKQCVGIDCGKVELVCSLVVMQSDYSEKIVSTASFKNTPEGFKKLEKWTAKHSDKTVAPSFVLEATGVYHEKIALHLHDKGDKVSVILPNKAKAFTQTLSVKTVNDKTSSQSLAYLGLEKKLDAWQPPQPVYGELKQLTREREQLISERTQCKNQLHAEESGAWPNNGSIKRIRQRIKLLDKQMQEIEKEIEAMVKANEPLKKKMKYVCSIKGIGLISAVSIVAETNGFHLIRNKKQLVSYAGLDVVEKQSGISVQGRTKISRKGNKYIRKALFFPGLVAMRHTAPMKALYKRLVSKHGIKMKAAVAVQKKMLELVYVLWKKEEMFDEQYLKNKGQQPEAATLCELV

SEQ ID NO: 354557 - protein, 345 aa, unidentified
MQPMYYIGLDVHKQKISYCVKDGSGKIYAEGWIPATRFDLDRWMKTLPQPWSAALEATMFSGWIYDHLKPHATELKVAHPLMLRAIAVAKKKNDRIDANKICDCLRCDFLPECYMAPTAIRERRRTLRYRNLLVRQMVQMKIKTSTLLMEAGVSYNKQKLHQAGYFRELLASNPDIHEGLRPLLRLCRETIVRLSKTENALVSSLQQDPLLLQRVERLMSIPAVGPITALTWALEVGEVQRFPSIKKAISYCGLCGDEQRSANSVQRTPISKQRNKHLQTVLIEAAKMAPRYSPTLALLYDREKQKGNANRATLAVARKLVAYLVAVDRGQTHFLVLDQETRTAA

SEQ ID NO: 354558 - protein, 414 aa, unidentified
MRVYHNVCCGIDVHKKSVTACLMWGPADREPQYEIRRFGTMTRDLQRLAEWLEQAGCEVATMESTGSYWKPVWNVLEGRRMKLILANAKHVRALPGEKTDRKDGKRLAELTRHGQIRPSFVPPQAILELRDLTRYRSKLLAAGGDERRRIQKVLETANIKLGSVLSDVFGVSGQRMLQALVDQDAVDTQKVAQLAHWSLKPKMDALQQALEGKLTPHHRFLIELSLNHMRAVEAQVLRLDEEIQRRLKAYQEEYALLQTIPGIKEAGAARILSEIGADMSAFADGDHLSSWGGVCPGNNESAGKKFQSKIRKGNQHLLSALTECSWAATHKKDCHYRRKYYRLKARRGSQRAIVAVSHAMLKCIFIVLSQRRAYEEPKPASLTDPQKRRKVSSLCRQLRELGYQVELKSKELNG

SEQ ID NO: 354559 - protein, 406 aa, unidentified
MISVGIDVSKGKSTVCAIKPYGEVLMTTRDFKHTKDDLDSLVKQLSRFKEEIHIIMEATGNYHLPVYQYLKSKNYQISIINPLEMKRYRCQGIRNPKTDKIDSMIIAQYGIDYWYRFKPNDDMDKKRQELRLLGKQYTSYMRIRTIRCQDLCHILDRTMPGVYGLLDDFNRNNGQDKLCDFAEKYYHSDNITKYSEKVFTERYSSWLKKKGYRPNEKEARQLYSIAKNAIPTLDSKLPSTKLLVQEAVNVLREVDSSLYDILNQLKDLSKEMPEYETVLSMKGIGTTLAPRFIAEIGDPRRFHSAKALIAYAGIDAPPYQSGQFTGTKRHISKRGSSNLRKLGFELMDSVNKHKSSYTGDPVCEYFMKKRNEGKPYRVAMIATFNKFLRIYHSRVSEVLNEYDNSH

SEQ ID NO: 354560 - protein, 364 aa, unidentified
MEKGITFVGLDAHKVAINVCVLLPGGAAPLVWECPNEKAAVRRMVRKVQHQGPGEVRMCYEAGPCGYALQRWIRDCGAVCVVVAPSLIPRKPGDRIKTDRRDARKLGELFRAGLLTEVHPPTEEDEAVRDLCRAREDAHEDMIRARHRVSKLVLRRGWRWQEGRRAWSQGHRLWLRSLRLEHREDQVVLDDYLLALEQVEVRLKALDDQIEQVSHEERFAPVVGRLRAFRGIDTLTAMTLIAELHDFMRFESARGLMAFLGLVPSEHSSGGKEQRGQITKAGNGHVRRLLIEAAWHYRHRPSVVSLKKRREGVPTEVIALADKAMTRLHRRFNRFLERGKARPKVVVAIARELTGFVWAAMRTR

SEQ ID NO: 354561 - protein, 352 aa, unidentified
MRTSQKTAGIITTIGIDLGKNTFHLIGFDQRGAIILQQKVSRGQLERRLANIPRCLIGMEACSGSHHIGRQLQAAGHDVRLIPAQYVKPFLKGHKNDYRDAEAIAEAVQRPTMHFVAIKTPEQMDLLALHRVRSRLVSQRTGVINQIRGFLIERGIIVRQGVVPLRKALPEILSSQTGPLSPRMIGVIADLTQDWRRLDERIGGVSAEIEALAEQDDGCQRLMTVPGVGPIISSAVVAAIGNGAGFKQGRDFGAWLGLVPKQESTGDRTILGKISKHGNKYLRTLFVQAAHVVLVRRPRAAMRGLWPWIEQASKRLHRNMLAIALANKLARIAWAVLARGRAYQPRTAADAA

SEQ ID NO: 354562 - protein, 355 aa, unidentified
MNSEKYIGLDVHQATISVAVLDSAGKLVMESILGTKASTILEFFAGLRGTLSVTFEEGTWAAWLYDLLKPHVAKLVVCNPRKNALLKDGNKSDRIDAHKLAELLYLNKLSSVYHGETGVRMLRELARSYLTIVKDLTRVMCRLKAVYRSWAIPCAGRDVYYTRHRAQWLGKIKEAGVRCRAERLYQQLDMLQYLRQQARRELLAESRKHAITVKLRQIPSLGPIRAALAVALIQTPHRFRTKRQLWAYSGLALETRTSAEYCYVKGGLRRSKKQISIRGLNKDHNHDLKGLFKGAATRASVLPGPFQDFYQRSLAKGIKPTLARLTLARKIAAITLTLWKKGENFDADKLKSQAA

SEQ ID NO: 354563 - protein, 350 aa, unidentified
MQNFYFIGIDVSKSKLDICVMPKSKVLKEEVVSNHPQAIAYAIVSIKEELSMDNDSFIICAEHTGQYTYTLMCASKSVGYKLWLENPSQIKYCSGVTRGKNDKVDARRIAEYAMRFIDKARPYERPSEELARLKQLESERSLYLTDKAKYKAQLTDQKDYMEPEIFKRKSKRLKDMIKALEKTLKAINDEMSKVIASSATLARQMQLLQSAEGVGPVVAMNMIIATEAFTRFDNPRQFCCYVGVAPFTYTSGSSQHSRNRVSQRAVKYIKCLLHMSAVAITHKKTGELKNYFERKVAEGKNKMTVLNAMRAKLVARMFAVIKKIKFINLFFRFRLAKIIRIPYISTIRDW

SEQ ID NO: 354564 - protein, 419 aa, unidentified
MDENERRFFSGVDWATEKHDVWVSDDRGEMLGKKTFAHSGTGLVEMQDFILSVTKSTPDKVLVAIEVPYGPVVESLIERGFRVHSINPKQLDRFRDRFSPAGAKDDSRDANVLGDSLRTDPQCFRPLAPLDPVVIELREWSRMAEELTAERTALANRLRQQLWRYYPQMLELTGDIAANWFLELWAMMPTPDKAKRTREDTVSRLLRRHRIRRFDAGEVLAILRKPPLTVAAGTTEAATGHIKLLAKRLELVNRQIADAEHQLDQLTDRLAGTEDGEPGQNQEQRDATILRSLPGVGRMVVATLLTEAPEPIQRGEYQALRCLTGVAPVTKKSGKRKIVVRRLAVNERLANALFHWARVAIQYDPISRAKYDALRQRGHGHARALRSVGDRLLGVACAMLKSRTVFDPQRARQEAIHAA

SEQ ID NO: 354565 - protein, 344 aa, unidentified
MTYYAALDVSLRSVSVCIIDDEGNYQFEAKVTSDVEDIVRCLEAFGGEIEMVGFEAGMLTQYLSYGLKAAGLNAVCIEARHAQKTLSAMRNKTDKKDARGIAQLLRTGWYVPVHVKSMASHQVRVVLSSRRTVLKKCVDLENELRGLLRIFGDKLPSKVSHSSFDAVVRPLVEKDPALSRALVPLLDTRAMLYQTYLQLDAQVKAIVRKDAVCRRLMTAPGVGAITALTFKAGVDDPTRFKSSRLVAAHFGLTPRRQQSGEMDYAGHISRAGDADVRSALYVAAHALITRNSEWSSLKAWGVKLMKTKGHRKATIAVARKLAVILRRMWIDDTDFRWQSEERAA

SEQ ID NO: 354566 - protein, 351 aa, unidentified
MYTLGIDLHKKSSVWVLIDDKRTELWKEHVLCHPEYISIAVKKIPVSPKEIQVAIEPVAGWRWVSKQLEEVGMKVHVAHPRKMRLIAESTKKNDEEDSKTLANLLHSGFFPEAHRSSEEIYQLRLLLRERTFIVRQQTSVKNQLHGIATTQGLHFIKSGNPLHKKGREGIMTSDNFVLKQLHLLIESLKERITPFEEKLKEELKKYPTAKILMSIPGVGMITALTVISEVDNFTRFKTGEKLSSFAGLVPRQRSSGETVRYGSITHAGSAPLRTVLVETAMRVREGNAPELFAFVKRLTPICGAKKARVALARKLLVIMWKLVTSNTIYNPKLLFSSCATKVSDLDTGSDV

SEQ ID NO: 354567 - protein, 378 aa, unidentified
MKCLKKALARRANGMDPAFGLSWVGKPSLAEQEAYMEVIRIGVDLAKYVFHLHGVDDHGKVVLRKTLRRQGVAPFFANLPRCLVGMEASNGAHYWAKTLSELGHDVRLISPQFVTPYVKSNKNDRNDAEAICEAVGRPNMRFVPVKSAEQLSIQAIHRVRSRLVGDRVRLVNQIRGLLGEHGVVIAQAIGNLRRELPRIIDEQANGLTSIIRALIGELREELNDLDKRIGIYDRKIAELYRASEACQRLGKVEGIGPITATALVAAAGDGKSFKNGREFAAWIGLVPRQRSSGGRSRLLGISKRGDRYLRKLLIHGARAALGRIQRKQDPRSLWLLKMRERHHANIVAVALANKNARIVWSLLAHDTAYDQRLTVSSA

SEQ ID NO: 354568 - protein, 403 aa, unidentified
MVKYHIGVDVGKDRHYVCIRDLSEDTYCKTFSVTNDHDGFIRLIAVLDKLSSERSHFLIGVEACSYALNLNYFLMAMGFTLVEVNPFRVGQFRKAQGKKAKTDKIDARTIAAILSLGDHKPLSIPDPVLDNLKELTRFRVDLVNEKSTMIIHLREALSVLFPEYEKVFRQLDSAGSLALLAVYPGPEHMIGAGEEAVGKALSLASPRRMSRGMARRIIEAAKRTVGVVQKQPSLGIKISVLAKRIASLQSTIRDLDRQITTLFNRLPCKPLGFPVGRAPSLATIISEIGDIQRYPTLKKFLSHLGWCPQSFQTGNYRLEHPKMSHAGNKYVRRLIWMLSIFAVQRIPRYREYFQRRVSEGKAKMHILVAVGRKLLSALYAILKKGIPYDPNWEENSRLALARR

SEQ ID NO: 354569 - protein, 460 aa, unidentified
MNPKRLKSKNGGKMPMVHPNAAAIDVGATMHMAAVRADRAPEPVRSFGTFTADLHRLVYWFTECGVETVVMESTSVYWIPIFELLDARGFTVFLVNARDAKHVPGRKTDVSDAQWLQRLHSFGLLRASFRPKGQIAELRAYVRQRERLLEYAASHIQHMQKALTEMNLQLHHVVADITGATGLRIIRAILAGERDPEALACLRHYSCHSSAETIAKALTGSYRAEHLFALEQALALYDAYHEKASACDVRIEAVLKELSIHRGHGHGSAPRASRRRNRTDQANALAFDVREALFALLGKDITTIDGLGPYLSLKLIAECGDDLSSWPSAKHFTSWLGLAPSNKVSGGKMLSSRTRRSGGRAAALLRLAAVTVGRTDTALGAFYRRLSARIGKAKAVTATARKIAVLFYNAVRYGMDYVDPGASSYETRYRTRVVNNLHRRAKAFGFVLQPLEPKAGAAVS

SEQ ID NO: 354570 - protein, 473 aa, unidentified
MANLGGRVPKGRTEMQNSPQKDPGNGRQIEGLPVVRRDVAGVDLGSERHWVCAPAADGAGREIADFGATTPELIRMGKWLQERKVESVAMESTGVYWIAPHEVLEAAGFEILLVDTRQLARVPGRDNKADPTDCEWIQRLHSCGLLRGSFRPREDVCMLRTLVRDKANLVAESGDWVRRMQKSLDQMNVRVHRAVSDVDGVTGMAILRAIVDGQRDARELAKLRDPRCRKSEEEIAEQLSGHWREDHLFSLRQALKMYDAIQQRIADYDREILRKLAVMQPEEFRERPAPKVKNPQKAKAIKKRGEEPMRKALYRMSGVDLTSIDAIGVETVQVVLSEYGPDLSRFPTENEFVSHVTLAPRRPTSGGKPIRRKKRNTASTRVAAALRMAALSLRHSATALGAYYRKIARRIGGDVAVFATARKLATLIYRLLRWGQQYVDEGAEAYERRYQEARITALKAKARELGYELIANA

SEQ ID NO: 354571 - protein, 438 aa, unidentified
MSNKVIFNLDELFISVGIDVGADFSWMSIALPNQQFVGKPYKILHNSIDSLTTAVSKIKEAEELYSLESRIFLESTGIYHYPLFCYLRDKGFNCSVINPIITKNSTNINIRKVHNDRFDSKKAALVGLKPDLKVSLMPSDLALNCRNLCREYYDLMDNRSAYVNKLQGELRMAFPQYLGIFSKVTINTSLTLLETYTSPSAFLKADKQEIIDIIKSTARFGLTYAQNKYNAIIQAATDANQFGYITDSNIKRIRLYISFIRKYDEEINSILESLHELVDANEDSDFVKQIHLIETFKGAGFLSAVSIMGEIGDFSAFSKPKQLFAYFGLDPAVKQSGKFEGTKVQMSKRGSAIARRVIHTLTLQSISISRNREAKNPVLREYYLKKCDSKPKLVAMGAVSHKVCNMIFAILRDNKPFKIIAPQEHIKQYNSAKCDIAA

SEQ ID NO: 354572 - protein, 343 aa, unidentified
MRGITTIGLDIAKSVFQVHGIDAEGNVIIRRQLKRRYVLAFFQKLPACVVGLEACASSHHWSRELQALGHTARLMPPAYVKPYVKRQKNDATDAEAICEAVRRPTMRFVETKTLEQQSCLVLHRTRHLFIRQQTSVINAIRAHLAEFGIVAPVGRRGVEELLDVIGEASDKRLPEVARACLATLGNQLRMLKAQILNFDRMITAWHRSNETSKRLDELPGVGPALATALVASVADPKAFRSGRDFSAWVGLVPKQSSSGGKQKLGSISKQGDRYLRSLFTAGALAVIRYAKIHGTKHRPWLTALLARRPTKVAAIALANKIARMAWAMMARGERYREPVALAA

SEQ ID NO: 354573 - protein, 351 aa, unidentified
MKTSATAVPTTIGLDIAKNFFQVHGVDAAGQVVLRRKLSRGDVLPFFKGQPKVLVGIEACGTGHYWAREITALGHEVKLLPPTYVKPYVKRGKTDAADAEAICEAVTRPNMHFVPIKTPEQQAAMMMHRSRELLVGQRTAVVNALRGHLAELGIVATKGIRRVADLLAELVGADDTRMPPLAKASLNCLAAQLEAVELQIDRLEVLILEWHKGNEASRRLAKIPGVGPITASAVVATIGDASNFASARHLSAAWGLTPKQNSSGGKAKQGGISKAGNAYLRRLLFTGAIAVIRSKRAQEAESWLGRLPERRPAKVAAIAIANKTTRVIWAMLRSGEAYRAPKTAAAVPVAA

SEQ ID NO: 354574 - protein, 417 aa, unidentified
MDPLLPVVLPCCCGIDVHKKSLTACLLTAGASGEVVQEVQTFTTLTAGLHALLAWLQQRGCRHVAVESTGVYWKPVFNVLQPAGLEVVLVNAAHVKNVPGRKTDVKDAEWLATLLRVGLLRGSLVPQPEQRDLRDLTRYRTQVIRQRAQECNRIQKLLEDANIKLASVASNILGASGRDMLRALSEGNDSPGLLANMARGRLRDKLPELRAALDGVLRPTQRWLLGEQLRKVTELDEAISRLDAQSAQLCLPFVQSLALLDQIPGINERLAQVIVAEIGLDMSRFAEPARLAAWAGVCPGNHETAGKRQSGKTRKGNRWLRPALVQASWAAARAKGTSLQATFGRLKGRRGVKRASLAVAHRLLRIVHRVLRTGQPYQEEGPEYYRAPDQERLKEKLLARLRRLGVRVSVTSEEGAA

SEQ ID NO: 354575 - protein, 347 aa, unidentified
MKFMTPVTGFYCGVDLHARTMYLCVIDRQGKILMHRKIGTDPEYFLRLIQPWGKDITVAVESTFNWYWLADICASEDIPFALAHALYLKAIHGSKVKNDRIDCEKIARIALGGNLPLAYAYPRQHRAVRDLMRRRIHFVRERAELMGHIQCLNMQENNLPLGASLKVKAGRAAAPDNFIQEDVRFTAEANLAMIAHYDSVIPIMEKRILERASNGHQRELAILDTFPGIGEVTALTIIYEMDTVDRFKSRQDFCSYARLVKPLHESGGHKSPGHGAKIGNPHLKWAFSEAAVHAAQHNESIRTLYEKLVRRHSKGRAKSILAHKIGRAVFHMLKNGTAFDEKKFLSN

SEQ ID NO: 354576 - protein, 344 aa, unidentified
MNEVTTIGLDLAKNVFQIHGVDASGESVIRRQLRRRYVLSFLKKQPPCLVGIEACATSHHWAREIGALGHTVRLMPPRYVKPYVKRNKNDAADAEAICEAVTRPTMRFVAVKSVEQQSVLMLHRTRELLVRQRTMLVNAMRAHMAEFGIVARVGLPQVKVLLAVIADPDDARLPPLARICLEGLAEQFMSLHEEIYAAEMRIHAWHRSNEVSQRLETIPGIGPITATALAATITDPSVFKSGRELAAWIGLVPRQNSTGGKERMGRISKQGDQYLRWLLVAGAMTIIRHAKRRGTTNLPWVADLIARKPTKVAAVALANKTARVAWAVLRNGGTYQKPKVVPAV

SEQ ID NO: 354577 - protein, 254 aa, unidentified
MSDVPCFVGIDVAKAQLDIALRPSGERWAVPNDTSGVTTLVDQLQALQPTLIVLEATGGLERMVTSALATSGLPVVVVNPRQARDVARATGPLAKTDALDARALAHFAEVIRPTPRPLPDAQTQELRALLGRRQQLIIMRTAEQNRLAGTSERLAQDITAHIAWRNTRIATLDDDLETLLRASPLWRANDDLLQSAPGIGPVCARTFLLELPELGTLTRQQIAALVGVAPLNCDSGTLRGRRSIWGGRAPVRTV

SEQ ID NO: 354578 - protein, 429 aa, unidentified
MNYNTQNAKIASITEKTLIVGIDVGSETHYARAFNWRNYEYSKKPFAFSNDEAGFSSFKDWMDDIAEKHGMKVVIPGMEPTGHYWLNLGAYLQEQGMKPVHVNPHHVKKSKELDDNNPSKNDRKDPKTIAGLVNEGRFSYPYIPTGIYAEIRNLSNLRIQTQEEITRIKNRIARWFSIYFPEIKDVYRNPDAVSGLMVIKQAPLPCDIKELGVDGVNKIWRDARLKGAGIKRATTLVTAAEHSIGNTEAPRSARKEIRNLLNDYEIYKNRMDELMEEIKETLSEIPYIDKLMEINGIGIKTVSCVIAEVGDIGRFDNPKQVQKLAGYAIVADSSGKHNGESRISHRGRKRLRYALYEAAISVIGKNKEFKEIHSYYRTREKNPLKKMRSVIAVACKLIRIFYTILTKGVDYDGQRMLADIVRPEMQLAA

SEQ ID NO: 354579 - protein, 442 aa, unidentified
MSCTDLGHPVPTTTRPEDSTVFAALELSRKSWLVATSSPGEERISKRVVAAGDGPGLLALLAKLRETAERRLGRAVRVVVIQEAGLDGFWVHRLLVDNAMDSHVVDAASLAVDRRKRRRKTDAIDVEGLLRALMAWTRGERRVCSMVRPPSPEDEDRRRLCREREALVTERIRHTNRIKGLLAGQGILDVDPLRPKHRERLEELRTGDGRPLPPCLLAEIRRQLGRLDAVVRDLATVEAERNGLVGLRSADRPVQSTTRGDEPAVEPEAVTVPVAQETGPAVAPEGAAPSAASEAAPAMASAVSVTAPAEPATLLMKLKGIGPEFAAVLWLEALFRSFGNRRQIAAYAGLAPVPWQSGGIERDQGIAKAGNPRLRKTMIQLAWLWIRHQPGSAISQWFTKRVGTARGRVRRIAIVAVARKLLVALWRYVTEGVVPEGAVLKA

SEQ ID NO: 354580 - protein, 295 aa, unidentified
MIIGCDLHTRYQQIAMLDTETGELVERRLEHESGEARTFYAALVGRVRVGIEATGHTHWFEAMLAELGHELWMGDAAKIRAAVVRKQKTDARDAAHLLELLCSERFPKIWRPSWAERDLRQLVWHRQKLVWMRGAVKNQMHALAMGEGVCRKKKLFTAKGRQELEALALGPWASYRRQELLRLFDELQASVARLDQAVEQAAKSQALTARLMTHPGVGPVTSLAFVLIIGPVERFAGSRKVVSYLGLNPQEHSSGGKQRLGSISKQGNPMMRSLLVEAGPPRRVSIRSCGGYIND

SEQ ID NO: 354581 - protein, 436 aa, unidentified
MFTLHGVDAAGRAVLRRNLRRGELLRFFERLPPVEVALEACGGSHHWGRALAALGHRVRLIPPQYVKPFVKRSKNDRNDAEAIGVAAAQPSIGSVPIKSVEQQAAAMLLSVRELLVRQRTQLVNAMRGHAAELGVVAALGEKGLRELQTEIVAADEAAVPAAAKQAIALLGREVERIEGRLRAIEAELMQQHKANPLSRRLAAIPGIGPIGALNLALRVDQTQFASARHFAAWLGLVPRECSTAGRQRLGGISRAGDERLRQLLVLGATAVIQHGNPRVTPAGERPTGAAGHLPVAAQLAQPQAAQAGGRGSGQQDGPHCMGHDDEREDLPASAGGLTVRLPREQGSREKMLIGRSEDPHNPCRVAASRVSYPFGSGSRNPSGPAAAGRDTQAGHTTATAPHRKFFFPTPLHQGGRPHTPYPLTRPVDLVDREPPR

SEQ ID NO: 354582 - protein, 346 aa, unidentified
MTIVEATRIVTGGIDTHGEVHVAAVLDEVGGLLGTESFRADPEGYSALLAWFEAFGVLTKVGVEGTGSYGAGIARFLARSGVHVVEVDRQNRQARRQAGKSDPLDAVEAARAAQSGRAHGTAKSRDGSVEAIRVLVVAKRSARGARIKALTQMRQLTFSAPDQLQSRLKGLPIAQFVAAAQGLRPTRSPDAVTAATKASLSSLAHRVADLEDEIADLDAMITPLLQETAPELLGVYGVGIDTAAALLVAAGDNPERLHSEAAWAHLCGVSPLEASSGKVTRHRLNRGGDRQANRALWHIVITRLASDPRTQAYMERRVKDGRSKREAIRMLKRYVAREVYRSLPRV

SEQ ID NO: 354583 - protein, 301 aa, unidentified
MSEITRGFITRVGVDLAKRVIQVHAVDHAGRVVVAKALQGDAFMAWCGQLPPGCMIAMEACSGAHHWARKLIALGFDARLIAAHFVTPYRMQGSGGKNDANDAAAVCEAASRPSMRFVSVKTPQQQAMLSVHRLREGYKEERTACINRIRGLPAEFGVVIAQRPEALRQALADVLEDATNELPALVRMALQRAHLHWIELDCHIAWCDERIDVHVRTDEQAKAAAQLCGIGPVTASALVASVGDFKQFKSGNQFGAWLGLVPRQNSSGGKSSLGQITKRGDDYLRTLLILGAKSAVSLSGG

SEQ ID NO: 354584 - protein, 391 aa, unidentified
MQVAADRAEAPAAIQTDLRAIFVSLELSRSTWLITSLSPGGGEKMSKHSVQAGDIAGLLRRFAQLKEKARARTGRDFPIIVIQEAGLDGFWIHRVLQSEGIESHVVDAASILTSRRRRRAKTDRVDGETLVRTLMAFKRGEPRVCSMARAPTPQEEDRRRVCRERRTLVGERVTHVNRIKGLLFAQGVFGYEPLRKGRRERLENLQTGDGRPLPVHLKAQIIRELDRLEILLEQVKAVEAERDGLLKPASDEAASPAAMLARLKGIGPETAAVLWSEGLFRQFDNRRQVAAYAGLAPTPWQSGSIDHEQGVSKAGNPRLRTTMVELAWLWLKNQPTSALSLWFHERVRLGGRMRKTIIVALARKLLIALWRYTTAGVVIEGAVMKAVPATI

SEQ ID NO: 354585 - protein, 413 aa, unidentified
MSKHTYRSKKVNEIDWDQLRGKWAGQSLVFAVDVAKEMQYALLTNQGQTESVLLRWNHLEESAALIGELVRFGTPVAVVMESSGTYGDSLRYQCRQAGFEVYLASAKRVHDAQEVYDGVPSLHDPKSAFLIAKLHLEGLTKPWPELDDKEKEMNALRREYEMHQGQYERCQNRLEAGLSRHWPEVLQLLPLDSVALEQALKCYGSPAQIAAHGEEAADEMRRTGGHFLAEEKIRAVIASAKATLGEPCNGAECRYLAALAGELEHSRMHMRKAQRALESMVEADGKLSEMAQTVGYLTTAILLSLHLDPRHFANPRAFQKALGLNLKEKSSGQHKGQLKLTKRGSSMARKFLYFAALRLIRNDPVVARWYEGKKDPKAKLKAVIAFVRKLALALWHVARGEKFDASRLLSVKA

SEQ ID NO: 354586 - protein, 320 aa, unidentified
MMAQNDLVVVGIDVAKDKVDACIRAVALRQMFPNTAQGHRKLVAWLRKHQVSKAVMEASGGYEREWRKVLHNAGIEVRIVDPKRVRSFALSAGRLAKNDAIDAEMIAWFAETFSEAPGQAHDAEHEELVALVKARIALVDLKIRLQSQNEHVVPGPVQKADARLLKTLAAEIAKLEAAISAKIKTTPEFTERAEIIESVPGLAETASATLIAGMPELGQVSDEVAAALIGAAPYDDDSGKRRGERHIRGGRRWVRNAIYMPCLGAATQNNPVLKAFYQRLIAKGKEPKVALTACMRKLIIILNTMIARRQKWDPTRYAVA

SEQ ID NO: 354587 - protein, 364 aa, unidentified
MKAPVHRSTKSNQMHDEEVDEVLYAGVDAHRTATHVTIVNDTGKVLTRRRISSSSDELRRLFASYQEPFKAVVEATYNWGPVYDWLDEIADDVVLAHPAKVRAIAEARIKNDRIDSETLAQLLRADLIPAAYAPSKETRAIKRVLRQRMFFVRVQTMVKNRIHALLAQHAIVLPDVTDLYGKAGFAWLRQLPLPEPDGQLLRDDLSFLATLGERIAATDRLIAELAKGDVIITWLASLPGIGPFFSVLLRYEVDDMTRFRSAKKFARYTGLIPSTYASNTRIYHGPLTKQGNKWLRWAFIEAVAPALRTSSSLRHYYDRIKARRGAHDARVCTARKLAELAWTVWTERRCFEERRARPLEKVAS

SEQ ID NO: 354588 - protein, 343 aa, unidentified
MQITTIGLDIAKHVFQLHALNTEGEVMLRRRLRRGEVIPFFSALPPCVVGMEACSTAHHWARDLMALGHDVRLMPPTYVKPYVKRGKNDAADAEAICEAVQRPTMRFVPVKSAEQQSVLMLHRSRDLLIRQRTMLANAIRAQCAEFGIIAAQGIAKLHELLGLIVDPAEQRIPPLARDCLVVLARQLHDLQRHIGEIDRAIHAWHRANKTSRRLETIPGIGPITASALAATVTDPSIFRSGRHLAAWLGLVPRQNSSGGKHRLGGISKQGDRYIRRLLISGATAVLRHCKPNRSASAAWATALLQRRPAKLVAVALANKTARIVWAVLARGETYRPALQPSAA

SEQ ID NO: 354589 - protein, 356 aa, unidentified
MNKSSRLDFTGQPIYIGLDVHKKSWSVSIFSNYGEYKTFSQPPEVDKLVHYLSHSFPGALYYAVYEAGFCGFWIHDQLREKGIQCLVVNPADIPTKNKERRSKRDRIDCRKLARSLRNREIEGIYVPCRSKLEDRTLIRTRQSMVRKQTRCKNQIKAILFFYGVVIPEEREMSHWSRRFIQWIEQIRMERASGDIALKAHLEELNHLRQLIASLNRAILRLARTEEYRPAVNLLKSVPGISTLTAMILLSELGEVTRFPSLDELSCYVGLIPDTQGSGEKEYVGGMTQRRHSQLRWLLIEASWVAVRKDPALLMAFQEYCKRMRKTKAIVKIARKVLNRIRYVLKNQAEYVPCVIQ

SEQ ID NO: 354590 - protein, 440 aa, unidentified
MAVRKREDEVFPNAAGIDVGASSHWVAVPPHLAEDSVREFGAMTDDLNALADWLLACGVDTVALESTGVYWIALYDVLEQRGLKVWLVDARQMKYVPGRKSDVQDCQWLQKLMSLGLLRAAWRPDGEVCVVRAIARQREVLIAEQASWVQRMQKALVQMNIQLTEVLTDVMGATGQAIIRAIVAGERDPKVLVRYRNTRVKAGAQEVIKALTGNWRDEHLFVLAQALAMYDDIGRHLLECETKLQALLVERSQAAVDLGKAPRQGTKSRVEFDVRKALANWAGVDLTRIDGLGVTVVMKLLTEIGPDVSRFANVKHFCSWLGLCPGNKISGGKVLSSRTKRSAKRARQALKMAAMALWHSSSALGAFYRRLCGRMDKPRANTATAHKLARMVYFMLTRGEAYVDKGQQHYEEQQRQRSIAALKRRATALGFQINPMTANA

SEQ ID NO: 354591 - protein, 375 aa, unidentified
MSEIITHVGFDVHKRAIQVAMLPPNGRDVVEWQEPNERDAIRRLARRLLRESRGDLTCCYEAGPTGYALQRQLGALGVHCLVIAPSLTPVKPGSRIKTDRRDARKLAELLRADLLTEVRPPTETEEALRDLCRCREDVQQDLTRARHRMSKFLLRRHCLFTGTKRAWGTRHMAWLHTLSFDDRASQATFDAYLIAIDELEQRLEHIDATLAELATQEPYKEPVAWLRCFRGIDTVTAISLVAELHDFRRFGSPRALMGYLGLVPSENSSGESRRRGSITCTGNNHVRRLLVEAAWHNRHRPAVSLPLKRRREGQPQRVIAIADRAQNRLHRRYTRLIARGKPSTKAVVAIARELTGFVWFVLHPNGLKAQIQPHS

SEQ ID NO: 354592 - protein, 354 aa, unidentified
MDVSKDSIAVAVLSPDRDTAEVDKIFHDTDSVRRLVKRLGKPKGIWACYEAGPTGYDLQRLLTSMGVRCDVVAPSLIPKGSGDRVKTDRRDARRLAGLHRAGELTPIAVPTPAQEGVRDLCRTRGDMVQDLTRARNRLSGLLLRHSVVWRGGSPWTDRHRRWLATLSFDDPAIATTYSDYLATVKLRDTALEAVEADLVPWCTTDPFGDQVPRLAAYRGVTRIGALCLAAEVFDWRRFPRARPFMSFTGLVPGENSTGLTQRRGSITRAGNAHLRGQLCEAAWAYQHSPNVGAGIRERQQGVPPETVSRSWAAQVRLSRRFRQLAAHKNVRSVVAAAIARELAGFLWAEMVVQA

SEQ ID NO: 354593 - protein, 315 aa, unidentified
MGQTVSQVVGIDISKDHLDIHLHPGGAKQRVTNDQAGHTRLLAWLKKVSVERIVFEATGPYHRLVERRLATAGLPFAKVNPRQARRFAEATGRLAKTDRVDAAMLAHFGAVLEPADQLVKSDVLVVLTELVAARRGLVKDRTATANRSKIHRIPLLKRQAAQRLLQIERQIDAIDRHCRELIDSDQSLKQRLAILLSIPGIGEATAATMLADMPELGQLEPKQAASLAGLAPVTRESGKWRGKSFIRGGRAQLRQALYMPALVALRFNPPLKTKYQSLIDAGKPAKVAITAIMRKLVILANALLRDGRTWTPHIA

SEQ ID NO: 354594 - protein, 431 aa, unidentified
MPVNITQLRQQLQAGAPWLLVGIDVAKAGHLAAFGTPRGLLPDRLRFPNTRAGFTQFATRCSALRERTGSTGILVGVEPTGSFGLPLLRFCSQQGYTLVWIPTLAAARNRETWDASGDKADPKDARNLVDLLRQGKLQALWLRDDAAATLQRLVRLHAELVATQARVKVQLRNNLLAVCWPEFEASCRDVTAPLALAVLRRLPFPAWAAAVPADEFVRRLGETLGRARTPRGTAQLTRLHATAASSIGDATGLAGLHVELQWRLRLLECTRAMAAEVQAHLAAVLQADPRAGLLQTIPGVGPTVAATLLATLGEIRRFQAAAQVERLAGLDLKGWQSGAWTGPKRISHRGDRRLRTALFQAALAAIRTASPLRAWYQRRVAAHPGDRGAKLKALVALAAKLGRIAFRVLRDGRPYDPRGEVSEQQRYRRVA

SEQ ID NO: 354595 - protein, 356 aa, unidentified
MDSTMYVGMDVHKDTISIAVMNSAGKVVMESILETKAVTILQFIQGLRGSLLVTFEEGTWAAWLYDLLKPYVTKVTVCNPRKNALLKSGTKSDRMDAQTLAELLRNGSLSAVYHGENGLRTLKELSRSYLTISKDLTRVMNRLKALYHSWGIACAGTQVYAPRHRLEWLNKITEVGVRGRAEFTYQQLDGLQALRQGVRRDLLAESRKHHATKLLRQIPGIGPIRAALLVALLQTPDRFRTKRQLWAHSGLAIETHGSGEYRYLEGQLRRSKKPVALRGLNRNHHHHDLKWIFKSAAVKAISPAGPLHEFYESLLAKGMKSSMARLTLARKIAAITLIVWKKGVHFDAEHLKPQAA

SEQ ID NO: 354596 - protein, 329 aa, unidentified
MQHYIGVDLHKSSFHACAVDEHGARAWEDRFPRSEQGIEAFLERCPQLAAVAVEASGPTWSFADRVVQSVERLVVVDPARTKLKAGYAAKTDRLDARRLADALRRESVVGIYYPPPALRDLRELCRYRVSLARMRAAVKQRVHALLLRQGVTFPPVTDLFGRRGRIWLSALNLPGWAGESLGGSLCIFDRLTEELARVEAAVRAHALKDPIVTQLRRLPGIGLVLGSVIRAEVGVIERFPDGAHLASYAGLVPRVESSGRRVRYGALTKRGSAWLRWALTEAATHGFRRQDGVGRWARRLAVQKGMLKARPAVARALCTDIWRVWPRAV

SEQ ID NO: 354597 - protein, 331 aa, unidentified
MFPVGIDVSKSTLDLCILYDGIKGRIKTRNIRNDRSAVENIRRWLRLQHCGPEDVHVVMEATGVYHERLATDLHDAGFFVSLANPHRSREFARGMGIMTKTDTVDAYMLACYALLKNPHRWVPPSPEIRHLSSLLRRRDVLLGDALREENRLEKYQSTDTPADIISSCLRMAQLLREEITSIEQKIKTHIRACPDLERDYLLLTSIKSVGPQLGMHMLVVLRSHNFESAEQAAAFLGVVPVEKRSGTSVRSRPRMSKIGPAHLRAKLYMSALCGKIHNKRMRNIYDELCLRGKPKMVAIGALMRKLVHWCYGVLKTKTAFCDDSFIAALHT

SEQ ID NO: 354598 - protein, 350 aa, unidentified
MKLRNAPRPATAFGVDIGKNLFHVVGLDAGGTPIQKATFRRDTLLQFFERAGPTLVGMEACPGSQWLARKIAAMGHTVRIIPAQFVKPFVKSNKNDIIDAAAIAEAVTRPTMRFVEMRSPEHVDLQAVHRVRDRMISQRTCLINQMRAFCLEYGIAIHQGAGKFKADLPRILADGTNDLTSAMRRILASTFDELRQLELRIAEINREIEAIAALSDTARRLMTIPGIGPLAATALLAAAGSARQFRKARDMAAWLGLVPREYSTGGKTKLLGISKRGNRYLRRMIIHGARSCVTHLDRSRYRLGAWLDGLQARMHTNKVTVALAAKIARIVWVVMTKPGATYERRDPAFS

SEQ ID NO: 354599 - protein, 400 aa, unidentified
MLSIGIDVSKGKSTVCGMKPGGEIVYAPFEVQHTREGMSELVSLLRSSGEEVRAVLESTGSYHCPVVAALLENGIFVSVVNSLRMKRFCSQSIRKVKTDRIDAMQIALYGLAYWQELQPARLPEDTYRELQLLARQYYQMTSILIKAKVDFNAICDQVLPGMQELMNDHAGRHKLSEFVLRYRHTTHILEMGETRFRKDYCKWAEKKGYRNCERMAAHIFATAQNGIPVLPNAPSTQIVITEAIRVLHTVEASRDAILTQMQALAKTLPEYSLVREMPCIGDTLAPRLIAEIGDVRRFHSKRALIAYAGIDAPPYQSGKFCANNRHISKRGNRYLRKTGYEVMQSYVMHKPANDPIFTFIEKKRSEGKCGKLAMVAGLNKFLRIYYGKVTELYRSLPAIE

SEQ ID NO: 354600 - protein, 452 aa, unidentified
MAQQKNPTIETVNAGAAAVDIGSREHMAAVNPDVTDAPIRAFGTFTRDLHDLAVWFKSHGVTSIAMESTGVYWIPAYEILEQHGFEVVLVNARYAKNVPGRKTDVSDSSWLRQLHSYGLLRGSFRPTAEIATLRAYLRQRERLVEYAAAHIQHMQKALMEMNLQLHHVVSDITGVTGMRIIRAIVAGERDLDVLASHRDVRCRASTETIKAALNGNDRAEHIFALTQSLELYDFYQSKMLECDRHLEATLAMLGADTEHDPSQLSRPRTKTKQVSTPSFDVRAALFGVLGVDLTQIHGMGPSLSLKLVGECGTDLRAWPSAKHFTSWLCLAPGNKISGGKVLSSRTRRSSSRAAALLRLAAVTIGRSDTALGAFYRRLAARAGKAKAVTATARKIAVLFYNTLRHGMTYQDPGASHYEERYRNRVLDNLKRRAKSFGYDLQELPQEADMAVS

SEQ ID NO: 354601 - protein, 320 aa, unidentified
MMAQNEVIVVGIDVAKDKVDACIRSLSLRQTCPSTAQGHRKLMAWLRKHKVTKAVMEASGGYERAWAKVLREAGIEVRIVDPRRVRSFAQSAGRLAKNDAIDAEMIAWFAETFSEAPSQVHDAAREELQTLVKARLGLIDYRMRLVSQSEHAAPGLVQKAHAHILKSLASEIAKLEAAISAKIKSTPDFAERAEIIESVPGFAQTSSANLVAGMPELGQVSDEIAAALIGVAPYDDDSGKRRGERHIKGGRRWVRNAIYMPCVGAATQNNPVLKAYYQRLIAKGKEPKVAIIACMRKLIIILNTMIARRQKWDPSRYALS

SEQ ID NO: 354602 - protein, 320 aa, unidentified
MLSFCGIDVSKDRLDVMVLPDEYSSSVPNDPAGWAILVEQLRGFSIAAIGIEASGGYERGAVRSLQAAGMPVRQVNPFKLRQFAKASGVLAKNDPLDARMIASFVGIMPTRPAQRTTPAAEQLVEMLAVRRQLSAEKTAAENASRLLEDLMLQRLSRRRIARLAADIELLDKRLVEIVATDATLAHRYRLLTSMPGVGPVLACTLIALLPELGGMSRKQVAALVGVAPYAFESGTLKGRRCIWGGRANVRQVLYMAAMSASNWNPALKLFHDRLKGAGKLPKVVIVAVMRKMITTLNAMVRDDIAWADRLSGRHSVTTAR

SEQ ID NO: 354603 - protein, 396 aa, unidentified
MPLSVPLQVAITDEKGKVLEEFKVSLTKEGFKFLLHKLDSTDSVLIEATTNAFTIYDIISEKVKQVAVSNPKKTKVIAEARVKTDKRDARILATLLRLEAYYPVWVPPKDIREKRKIASLYYQLQKITTSLKNRIVSILQTNLIKPKVKDIFSKEGMEWLRGLELGREERIEMDICLETLKKVEEEKEEVEEEIKRQAIEDEDVLRLMQIPGINLLSGFIIKAEIGEIGRFLNPGKLASYAGLVPSIHQSNQKAYTGRITKEGRRLLRWILIQCGNVGSRKNVQFKGFYQRIRRKKGHNVAVVAVGRKMLVVIWYILNGYIYEYIEGSRYAKKILDCSWSIGKEINPKGARETLKEAFGIIGYRDLIDELDGISLNKIKKDKMVMYKLDKIRGVKG

SEQ ID NO: 354604 - protein, 342 aa, unidentified
MDHFAGLDVSVKETSICIVNDTGRIVREVKVASEPEALLKVLGNPTYHFKRIGLEAGPLSQWLFSALAEAELPVVCVETRHMQAVLKAQINKTDRNDARGIAQMIRAGLYRPVHVKTLRSQKLRMLLTHRKLLQSKAIAIENDLRGTLRNFGLKVGMVGQLKFEARIQELVENFPDLAVLVEPLLIVRRALREQIVILHRRLLAIVRDDEVCRRLMTTPGVGPVVALTYRATVDVPARFRKSKSVGAVFGLTCSKYQSGEIDWSGRISRCGDEMMRVMLYEAAQSMLRSKRWSWLKAWAMQIARRRGMKKAIVALARRLAVIMHRIWVDGTEFRWTKETAAA

SEQ ID NO: 354605 - protein, 357 aa, unidentified
MSRCIPTDAQAITLGVDTHKDVHVAVALDGIGRHRGTLSVPANLAGYKRLVDWAEEFGPLKHAGVEGTGSFGAGLTRFLKGRGIKVSEVIRPKRRDQYRAGKSDPIDAEAARAVLAGTATGQPKSADGEVEMIRTLRITRRSAVKARVGAANQLQNLLITAPEGLKSELCGLSTTRLVAIASRFRPGPNPSDVEAATKFALRSVARRYQRLSEEISELDEQLDRLVTEAAPELVAVEGVGTDTAASLLIAAGDNPERLENEAAFAHLCGAAPIPASSGKHVRHRLNRHGNRDANRALYVIAVCRMNRDERTRSYVAKRTAEGKSKKEIIRCLKRYIAREIYRVLSSISLHKPSISVP

SEQ ID NO: 354606 - protein, 362 aa, unidentified
MEYFTGLDVSVDETAICVVGDDGKVAFETAVETDPAAIAEALRPYADRMRRVGHEAGSLSPWLHTELLAEGVPAVCLETRHVRAALSAQRNKTDANDALGIAHIMRTGWFRQAHVKTDACYRIRLLLVQRRNLKRKFLDLENAIRHSLKVFGIRLGKVGRGAMEKAVREAVAGDALTAGLMDCMLRARAALWAEYLTLHKLVVQIAMRDELCRRFMAIPGVGPVTALSFSSAIDDPQRFRRSRNVAAYFGLTSKRWQSGTSIDVHGRISKAGDPDVRRALYEAASAMLTRFKGRDMIKTWGLKLAKTKCHAKARIAVARKLAIVMHAMWRDGTFYVGDPDASAQDIDASNAAKLQRLSLANS

SEQ ID NO: 354607 - protein, 411 aa, unidentified
MQVIYERCCGLDVHKRMITACLLKWLGGDWQKEIRQFGTMTKDLLALSDWLVREGCTHVAMESTGVYWKPVYNILEGQFELLVVNAQHLKAVPGRKTDVRDAEWIAELLAHGLLRGSFVPPPSVRELRELTRYRTSLVRDRARTINRLQKVLEGANIKLASVVSDIDGVSARLMLEALVAGQRDTEQLASLAKGRLKEKRAQLVEALSGRLQPHQSFLIAEHLAQIDYLEGAIERLSREIEERLRPFEQEIGWLDTIPGVNRRTAEVLWAETGGDMSRFASARHLASWAGMCPGNNESAGKRRTGRTRKGSPWLRHCLVEAAHGAAHTKNKYLSSQYHRLAARRGKKKAQVAVGHSILVIAYHLLTRKQAYADLGANYFDERDRQAVTKRCLNRLQRLGYKVSLEKLSMAA

SEQ ID NO: 354608 - protein, 421 aa, unidentified
MKKRTYRRIAVKEVDVAALAAEVGSGRVVFAIDVAKVDMVAAIVAGDGRVVRTVCWKNPTENGLVLALLGGLRGAGLSVEAVMESSGTYGDVLRHQLLGYGVPVYRLSGKRVHDAAEVYDGVPSLHDAKSAAIIAKLHMDGVSTPWGPLSEEKRELKAAIATMDLYREQHQRLIHSLESSLARYWPELTEHLELSSATLVALLARVGGPHDVACALEQSRGLLHGMSHGLMSQQTIESVLRSATNSVGVRLLTQERVALMTLAAEAHRSLKEFKKAKLAVERLSTSGAAERLAPTTGKATAAVLIADVGDPRDYPSTRAYLKGYGLNLKEKSSGKQKGQLSITKRGPGRARQYLWLAVFRWLQKDAVARAWYAEKIKRDGGRRARAVIALMRKFAQALFHVARGVPLDSSKLFDVSRLRLT

SEQ ID NO: 354609 - protein, 525 aa, unidentified
MAAIFQRADSPKNILIVALDFAKDKHLCLICNGTGDHLLKPFPLHNDRAGLEHLLERIQTTCKRHAIDPKNVILGGEDNPAYAENFLHSLHQHKSQPLVVRVNAWKAKRQRENLQASTDLLDLTGIAKTLINRDAYLVFDDEGPNASEYAHYDALRAQSRTRDALVKARTAISNRIHNEIKLLFPGFLDTASSNPLTPFGKASLALMQRADFHAGAFARKRADSLAKVLAKLRVRDPGKVAEALIARAREALPPRPASVHSRQQCLTQLVSAYGELSALVDALEKHSAQDLACTPAAVLTSICGFGIVTASAIAGEQGHVDHHGPLRRMASYAGIVPGREQTGGPDKPGITTKVKPRSNRRLKKHLVFATFQMGHRLGPPEFIDAYKKLKSAGQHADFIMARRLLHMSKAMMRNRFIYLPPELRDNLCSKPEQLLEYLQETWPKLVGKWRDARALDQAFSPEAPLGFFRKCIKNLYRIELPIDGNPPHMIGNLDADTATNQNSSSKDNELTVKTENTGKELATMN

SEQ ID NO: 354610 - protein, 355 aa, unidentified
MSQEKYVGMDIHQATISVAVTDSRGKLIMESILETKAATILEFLQGLHGSLSVTFEEGTSAAWLHDLLKPHVTCLVVCDPRKNALLKDGSKSDRIDARKLAELLRGNQLTSVYHGEHGMRTIKELGRSYLTITTDLTRVMSRIKALYRSWAIPCSGTSVYAPRHRTEWLDKIPEPGVRLRAERFYQQLDLLQPVRQQARRDLLAESRKHHAVNLLRQIPSIGPIRAALLVAQLQTPHRFRTKRQLWAYSGFALETHDSGEYRYVRGKLQRNRERMTVRGLSNNHNPEVKNLFKGAAISASTHPGPLYDFYVALLEKGMRPTMARLTLARKIASITLTIWKKGVNFDATQLRRQEA

SEQ ID NO: 354611 - protein, 344 aa, unidentified
MEISTIGLDLAKNVFQIHCVDAKGKAVIRKALRRSQMLPFFEKLQPCLVGIEACGTSHYWARELLKFGHEVRLMPPAYVKPYVKRGKTDAADAEAICEAVTRPTMRFVPVRSEDQQAVLSMHRTRDLFVKQRTQLINMMRGLLAEFGIDIPQGVNRALEKARAIVDGEAPDVPIDAVRIVQRLSQQALDIHAQVREIERDLIEWQRQSDVATRLMTIPGIGPIGATALAASVNDPSEFRSGRQFAAWLGLTPLQKSSGGKERLGHISKMGDRYLRKLLVVGMTAVVRNAKRKPEAVDPNVLALLARKPARVVTVALANKTARIVWAIMARGEVYRERHVPALAA

SEQ ID NO: 354612 - protein, 405 aa, unidentified
MDCKAFSVFVGIDVSKDKFNVCAISNPNSIIFEHVFEMSKQGFSSFVDNLSSFSKNSIILAMESTGCYHLNLLSFLSLNNFSCIVFNPLTIKDSPSISLRKTKTDIIDARSIARTLFYLQQELPSSPFLNTEFRDVVRERESLISRISKIKNNIEKLLNLLFPELERFTNIYNDSILNLLSSFPSAKAIQNAPIDSLRAFFSKSAGRKLKLTLVSLKELAINSIAQYWPMKEKILIQNIKELKFLQQQLKEYDEILNQYCQCSSINVDIELLTSIKGIGQNSAMHFLAEVGNISRFSSYKKLIAYCGFDPSIYQSGKRKIESHISKRGNAHLRRIVWLMSVSVVIHNEYFRDYFERKRSHGLPYKKAMIAVSHKLLRTMYAMLKKQEKFNVDYALSSSKQNLNFT

SEQ ID NO: 354613 - protein, 411 aa, unidentified
MHNRQNYLYVGVDLHKEHHTAVIINCWQEKLGEIQFDNKPSAFSKFLLEVETYVSDGLSVVFGLEDVGGYGRALAKYLVDHEQVVKEVNPALSFLERKSQVMIHKNDSWDAECVARILVNKFNQLPDAKPNDLLWSIQQLVSRRNALVKAQSALKNQLHIQLNHHYPSYKKFFSELDGKTALAFWQQYPSPSCLEGVSIKKLTAFLLDVSNNTCSVKKASDILKLVKEDGQTMKEYQEMRNFLVRSIVREIEFKKKEMKYIERELKQLVNLLDYQLETMPGIELVTASALIAEIGDVRRFPNANKLARFAGIAPVYFGSGGKGKTHKSEQGNRALHALFYNLAVQQVQVAKRSKTPRNPVFHAYYQKKLKEGKTKGQALVCIMRRLVNIIYGMMKYKTAYELPVVEGKEVV

SEQ ID NO: 354614 - protein, 355 aa, unidentified
MSQEKYIGMDVHQAAISVAVMDAQGKLIMECLLETKAATIVEFIQGLQGTLSLTFEEGTSAAWLHDLLKPHVNRLVVCDPRKAALLKEGNKSDRIDARKLAELLRTNQLKPVYHEEHGIRALKELWRSYLTITKDVTRGMNRIKALYRSWGIPCGGTSVYAPRHRADWLAKLVEPGVRVRAEHLYQQLDGLQPLRLEARSELLRESHKHPAVKLLRQIPSIGPIRAALLVALLQTPHRFRTKRQLWAYSGFAVETHDSGEYRNVRGKLQRNRERITVRGLNDNHNKDLKSLFKSAAISASTRPGPLHDFYVARVEKGMRPTMARLTLARKIATITLTMWKKGVVFDPQTLPRQAA

SEQ ID NO: 354615 - protein, 361 aa, unidentified
MADTTSLVTGGVDTHKDFHVCVAVDELGRVLGTEQFPTTLRGYRSLLRWLGGFGQLGAVGVEGTGSWGAGLARFLTDAGVEVIEVNRPNRQARRKRGKSDPADAEAAARAVLAGEAVGTPKAATGTVESIRLLRVARRSAMKARTQAANQVHSVIDTAPEELRAKLIGLKERERITKAARMRSNNTSTPLGAAKLALASLARRWLLLTEEITQLDTHLAVLVESAAPSLLDIKGVGVATAATLLAATGDNPTRLRSDRSFAALCGSSPVDASSGRQLRHRLNRGGDRQANCALYLIVLNRLSWDQRSKDYVARRTAEGKTKKEVIRCLKRYVAREVYQAIMRDMADQVAPITTLKAFQRAA

SEQ ID NO: 354616 - protein, 417 aa, unidentified
MEPNRFRHYIGIDWATEAHRICLLDHNGQLCAKVSIAHSGAGLDQLLEWLASHGVEPAFAAVAIETPRGALVETLVERHYAVFAINPKQLAHFRDRYTSAGAKDDDRDAWVAASALRTDEAAFQQVTIDAPELIQLRELYRTADELREEVQRLTSRLREQLIRYYPQMLALYPAPDQPVIWDLLELASLPATAHHLTLPQVAAVLQKRRIRRFTPGQVLEQLRATPLTLANGAAAAASEHALVLVAQLRVMYELRKQTLQRLASALKKVRQATTESGAPSDAAIIASLPGAGILTTAALLSESSRAVAQREAPALRAYAGVAPVTRQSGKTLQVSMRYACNNRLRNALYHFAMGSLRDPVARRHYDRLREEGHTHARALRGVADRWITVLMAMLRSGTLYDATRRKAWQAADPGATA

SEQ ID NO: 354617 - protein, 384 aa, unidentified
MRNDQAYTGSDDGLVLAVSLELAAAKWKVALHDGRREKPAVHTVAQPQAAARLQAVLDLIEVHKEKWSLPTDVRIAVSYEAGQEAFWICRALNSRHIDCYVVDPASIPVERHQRRAKTDRLDVIKLVINLRAWLRGERDRMHVVHAPSPHDEASRQLMRERGQLQKEILQHQDRMRKLLATLGCWDPVDHRAFADRLERDEVRCHDGTPLPRELRERLLRECERLALVEQQLAALEKTRQMDVPAPARQRCDALARLQGIGEVGAARLALELFWREFNNRREVGACVGLVPQPYDSGESQVDQGISKQGNRRVRALLIEIAWNWLRYQPNSVLTQWFNQRTQGTGPNRRARRIAIVAVARRLTIALWRYLRDGEIPKGAQLKST

SEQ ID NO: 354618 - protein, 405 aa, unidentified
MDVIYRRCAGLDVHKETVVACVRIVGEGPPTQHVQTFATTTSGLLALADWLSSYDVQTVAMEATGVYWKPVWHVLEGHFELVLANASHVKNVPGRKTDVNDAMWLADLLAHGLIRASFVPPVPVQELRALTRTRKQFVRERAAHVQRIEKVLEDANLKLSVVLTDIMGKSGRAVLQAIIDGHTDPAHLLRCVSTRVKASRAELLAALRGRISAHHRFMLKLHLGHVDALDQAIATIEKEVGLGLKPFRDSAQHLSTMPGVSAVSASVIVAEIGVDMSRFKTPGHLVSWAGMCPRNDESAGKRRSTRHSANWLKTTLVQCAWAAVRVKGSYLQAQFHRIRARRGAKKAIIAVAASMLVAAWHMLRNRTDWNDLGAAHFDRADRKKTVNRLLKRLRQLGFNAELAPA

SEQ ID NO: 354619 - protein, 343 aa, unidentified
MPHYVGLDVSQKTTAICVVDEQGRRLWRGVCVTDPGAISARVLKHAGVDVKVGVETGSMTPWLVHGLRSAGLHVECLDARRVKAALQMRLNKTDENDAEGLAQVMRTGWYRPVHVKSLDAHRARALLGARAQLVGMTTRLSNMIRGVLKTFGLLPGAGRGLRFDRRVEALLEGAPEIGLIVRPLLATWRQLREQIAVFDKAVQRQVKADPICRLLMTVPGIGALSSLVYVSTVEDPSRFTRSRAVGAHLGLTPRRYQSGETDRSGHISRCGDSLARTLMYEAAIVILHRVKQSLPLKDWAAAIEQRSGPGKARVALARKLSVILHSVWRSGEPFRWAPQTIAA

SEQ ID NO: 354620 - protein, 331 aa, unidentified
MYVGVDYHKRYTVATQMDEQGVILSQIRLKNDPDSLRTFASSLPQGSKIALEATEGWYYFYEMLESYCPEIYLAHPLKTRAIAEARIKTDKIDSTILAHLLRANLLPTSYIPPREIRDVREILRYRASLVSLRTSIKNKVHAILSKNGVVMTYSDVFGKKALCSLDLLPLRVCYRQELQGYLQCIDTLKHLIAEVSETIKGLAEENPQARLLITIPGISFYSSLLIISEIGDIGRFPSAKKLCSYAGLVPRVHSSGGKTRYGSITKQGSKWLRWILVELSYHFIQGSPRLKCLYARIAKSHGRNTARVAVAREMLKIMYVMLRDNRVFVIK

SEQ ID NO: 354621 - protein, 430 aa, unidentified
MTKLHSTSRDAVLVAIDMSKHRQEVLLERPEGGRRRRMTVMATKADYDRLADDLAAIGRPVIVGFEATGNYHRTLAHRLLSAGFELRLISSVALARTREALHNGWDKNDSKDAQVILHMLRIGATQRYIDPLAAGINDLQEMSKTHEAISKAKTQTWHRILTHYLPLYFPEIERFAGNSRSDWFLALIERFPTPGSITSIGREAFTEQAWPLIGRKVSKARVVNDIYETACSSIALPIDEHSAAVTMFRMVIAQARTLIRQRNEIERIAHDALATNRDYQLLRMIPGIGPINALTILAEAGDLRRFSHHRQFLKFCGLDLATCQSGMFRGRTKLSKYGNARLRRTFWMATQVAIRQPNNSFRDKLSRYVAGHADDPDRRRKAMTALTAKMARVAHAVIKTGTEYRPFVERADTRWKDPSLWSHEGAAATL

SEQ ID NO: 354622 - protein, 341 aa, unidentified
MNIITVGIDLAKNVFAVHGVDDNGKPALVKPKVPRADLLPLIANLPPCLIGMEACSGAHHWARLFRQHGHTVKLMAPKFVAPYRMTGKRGKNDAADAAAICEAVTRPNMLFVPIKEEHQQIILCLHRTRQGFVEERIASYNRLRGLIAEFGIVLPQKVTCLRREIGAHLEDLPGYANRCVADLLTHADRLDERIAEYDRAIAQAARDDERSKRLMKLPGIGPTTASALLASIGGGHDFNSGRQVAAWIGLVPGQYSSGGKARLGRITKAGDNYLRSLLVMGARAVLNSLGDKQDRFSRWARALQERRGYWRTVIAIAAKNARLAWAVLKYGEDFKMEAGKV

SEQ ID NO: 354623 - protein, 342 aa, unidentified
MDQITRIGVDTSKSVFVLHGVNAAEQTVLRRKLRRSQLLEFFAKLAPAKVGLEACAGAHHWARELSTLGHEALLLPPQYVKPYVKRNKNDAADAEAICEAMSRPTMRFVGVKTAEQQAALMLAGTRDGLIRRRTQLSNTIRGYAAEFGLVAAKGLNKIDLLLARIAAEESLPPLAKELFADYGRQFAALREEISKIDARLMAWHRQNEQSRRLAEAPTIGPIGAALLTMKVTDPGAFGSGRNFAAWIGLTPKDHSTAGRMRLGVITRAGDEALRSVLVAGATAVIQQVQKGRGHPSPWLIELLKRKPPKLAAVALANKMARVAWKLMVSGKRYDLHASGRCA

SEQ ID NO: 354624 - protein, 374 aa, unidentified
MSKGTRYLGLDVHAETITAAIAEGRRNVRSLGQIPNCLESLKKLIDKVGGRERLKVCYEAGPTGYTLYWQLTKMGVECEVVAPSLIPKKAGERIKTDRRDAEKLAQCLQSGTLTPVWVPDAQHEALRDLVRARAAAKKDESRAKHRLVKYLLRYGLRHPQRCRAWTHPWWRWVQALEFEFETQQVTLSDCIAEVLRLAERVARLDLAIDRAVESAPREKKAVIEALQALRGVAKLTAVTIVTEVGTFQRFRKPTELMGYTGLVPSEYSSGSREAKGRITRTGNAHLRHVLGETAWHARHRPWLNVRLKKVLPTLPPDVSEIAWKAQERLHRKFMKLTFHRKPAGKVATAVARELVGFVWAIGHLVETRSLPNAA

SEQ ID NO: 354625 - protein, 354 aa, unidentified
MKGTAVTIVEDKPVITGGVDTHADLHVAAALDPIGGLLGVRQFPATAAGYADLLEWLGGFGDVGLVGVEGTGSYGAGLARHLAAAGVAVVEVDRADRQDRHRQGKSDPLDAVSAARAAQSGRASGVPKGRDGAVEAIRALMVAKRSARHERTQAINQARALIVTGPDELRTRFAGHGPAWLAEEIAALRPRPGDVPGYATRVALRELGRRVQFLDAQLERLDELIGPLVTARAPGLLSLFGVGPDTAALLLVAAGDHPGRLRSESSWAHLCGAAPIPASSGKTSRHRLNRGGNREANHALWRIVITRMGSRPGHPATRAYVERRTKEGLSKKEIIRCLKRYVAREVYHQLRDGT

SEQ ID NO: 354626 - protein, 449 aa, unidentified
MQKRVSLEIVNPNAAGIDVGSRSHFVAVGQGKNDVREFGVFNEDLQEMCVWLKDHQIETVAMESTGTYWQSLFTVLQEAGFRVILCNGKFTRNIKGKKTDVQDCQWIQKLHTIGLLSGSFLPDQATEQLRTYCRHRSNLVDNAADTTRKMQKYLRLLNLRLDVVVKDIVGLTGLKIINAICAGETCPQKLASFRNGNCKKSEEEIAKALHTNGRNDYLFALKHEYFMYQTLQKSIQDCDVQIKAMLDDQINSDENKKQLYIDKKVHKRINKNTPKNIDLNLMAYQYFDGVDLFAIEGVSHGTVLSIISEVGLEGFYKFKTGKLMTAWARLVPNNKISGGKVLSHKVPKGSTRLKIALRNAAQAIGQLNGTPLSDFFKRIHFRKGPVAAITATARKLLIIIHSMVTKKQPYRNEQNYEYLDQKRKRKVQEMKKLIHKFNVSTDELGLQFQ

SEQ ID NO: 354627 - protein, 379 aa, unidentified
MLSVSKNNRGGDKNILTKDSIIIGMDVHKYTHQAVALNCLGQELSQLSFTNDELAHCRTWLNGLGAKPAIVVGLEDVNGVGTRLSQFLLQEGFTCRYVPAILTERERKHSVQHDKSDYLDAKRVGKVILTKSEETLPVSPILTQENTYIKELDLLLQERQELVREQTAVKNQLHVLLHQYYGNTYRQEFKHIFSQKALTWYKKDLRIIQSETKRPALLAAAILRRVERLQLILSQVAAIDKTLNGTSKTIREVAVLTKELVGCGKLTACKILVEVGTIHRFNSKDKIAKYAGIAPVRDQSSSKNRFYTNSGGNRKLNQAIHTVALSQIGAGGYEDAKKYFQKKVNEGKSKLWAIRCLKRQISNRIFLLLKNASNTKLTN

SEQ ID NO: 354628 - protein, 323 aa, unidentified
MSKHSIICAGIDTGKHKLDVALDGCPEQLEIDNTADGHAALSAWLKRHCVKRVGIEASGGYEQDVVAQLRCDDFVVVVFQPTQVRAYARFLLQRAKNDKIDAALIAACTAAIKKIHAPPDPRLAPLAARMTLIEQLTDQIAGYKAYRESCRDPRGQQFWKAEITRYNALLRAELKELVAAIRQHRDLAERLELIESVDGVGLKTAVAILVRMPELGRLTRGQAAALAGLAPFDDDSATHVGVRHIAGGRERLRGALYNAALAAAFQWNPQLIAFYRRLTAAGRPHKYALVACARKLLIFVNTVVERGTPWVSTASPSAIKKAA

SEQ ID NO: 354629 - protein, 343 aa, unidentified
MNQYVGLDVSLEQTAICVVDDNGKPVWQGKCASTPEMLVAAIRTRAPQAARIGLESGPLSLWHWHALRQAGLPVVCLDARHAKAALSLQLNKSDRNDARGLAQIVRTGWYREVAVKSFDSQLIRSLLTTRAQLVRMRVDLANQIRGVLKPFGLIAGKGGGQAFADRVRALVAGGPLQVVAEALLAAWQAVSSQVAILTRRLIGMARQDQAVKRLMTTPGVGTIVALTYVSVVDQPERFAKSSSVGAYLGLTPRRFQSGEEDYTGHISRCGDRLLRTYLFEAAGIILHRVSRWSALKAWGTRLAKRIGSKKATVAVARKLAVILHRLLREGTEFRWSAAQGQPA

SEQ ID NO: 354630 - protein, 460 aa, unidentified
MEAYLGIDVSKGYSDFLLLDTQHRRLAPVFQLDDSFSGHQILEKWIRDMLESHGISQLYAAVESTGGFEDNWFSCLSRLSATLPIKVSRLNPSVVKNAARADLKGQVTDAQSARNIASYLIRYTGQVAYQKGESRYCAYRSLHNHIQLLTKQKTQMVNELKQLLYRCNPELQRYCKSSVPKWVLGLLAQYPTAAKLARGKATKMARIKTITQAKAEQLIDRAKKSVASRGEFTDAYLVQALVQDIKAKQTRLDELKELLSENCTGTEVELLQSIKGIGAYSAACIMIQIEEISRFASPKHLAGYFGLYPTIKESGDKRYVSRMSKKGRPAIRATLFMCANTAVLFDPHLKNIYARHRAKGKGHKQALGVVMHKMLRMIWGVLSSGKSYDPRLDQHNILKTKHAPEHNIEKETQLKRALQPFDGEAPISRLAAKKRKAHQTSQASHAEQVRDLIDVPQEQT

SEQ ID NO: 354631 - protein, 451 aa, unidentified
MSKKKGSKIASLPVVDPNAAGADIGATQIFVAVPPDRDAEPIRCFDTFTADLERLADWLEQCQIRTVAMESTGVYWIPLFQILEQRNIEACLVNAQHLKNVPGRKTDVEDCQWIQHLHSVGLLRGSFRPDQEICAIRSLWRHRDNLIQLATIHLQHMQKALDQMNLQIHHVISDLAGTTGLAIVDAILAGERDLAKLAQLRDWRIRASEETIMKSLVGDYRDEHLFTLRQSLESYRHYQQLIQEVDVQVKQMMRRLPAKIDVGENPLPKEKNPRKTPWRNEPPQLREDLYRAFGVDLTQIPGINTLTAQMLLTEIGPDLSRFPTAAAFCSWLRLCPEPKISGGKVLSSKTRPSKNRAALALRMAAQGLHRSQTFLGDYFRRMKSRMGTPKAMTAAAHKLARIVYHMITTRQEYDTTVFQELECRVQNRKRMKLRAQARELGFDLVAREAVP

SEQ ID NO: 354632 - protein, 389 aa, unidentified
MILVGIDVAKDKHDCFIQTADGKVLYKAFSFANNYEGFEELYAKILSCNDSQIRVGLEATGHYSYNLLGFLLSKELPTFLSNPLQTNQFRKSLSLRKTKTDKVDAKTIALMLATESDENSHSLQAYQNEELKSLTRYRNDKVNQRSKLKQSLSRLVTILFPELESVVSNLHSNSIYAMLIKYPSAKDVAKSQFHSLVNLLENTSRGKIDKDKAKEIRNLARKSVGVYVSAKVLELRHTIKLIQILDDEITEIEERIQNHMQEIHSPIESIPGISFRLAAVIEAEVGDFKRFSSPDKILAFAGLSPTTYQSGKYTSQNATMEKRGSRYLRCALFLAAHLVSRYSKIFAAYLKKKRDEGKHYFVALSHVAKKLVRVIFHLQRTKESFSDFA

SEQ ID NO: 354633 - protein, 332 aa, unidentified
MSIIGCDLHTRYQVIAMLDTETGEVTTRRLEHEGGEAKAFYAGLGKPALIGIEATGYTQWFERLVADLGHELWVGDPAEIRARAVRRQKTDTRDAEHLLDLLINKRFPRVWIPTPEERDYRQLLKHRDKLVKMQTSVRNQLHFLAMSQGVCWKRRLWSTRGRRELEALQLGRWASVRRQELLALLDGLAPRIEEMDQAVKAEALRRAEAVRLMEQQGVGPVTALAFVLTVGPVERFPSSRKLVSYLGLNPREDSSGGHQRLGHISKQGNEMLRWLLVEAGHTAARLDPELGRVYQRLKFRRGGRVAKVAIARRLAVRLYWRLRNGHAGSHVQ

SEQ ID NO: 354634 - protein, 419 aa, unidentified
MPFKIIRKNCCGLDVHKTWIYACIGITDSNGRTEYFEKRFSSFSKGLRDLSEWLSKHKCTEVCMESTGKYWIPVFNILEKTCSVELAHPKYTKPQKGNKTDRKDARWICDLFMCGMTKPSFIPPADIRHLRDLVRYRFKLTCMLTGEKNRAQNCLTVSNLKLDEVFSDVFGKSSRSITEYMLAHPGETFDVAPFVDPRCKTPVEEIQAAVDGAISPEQAIKLRQCLNHIDELEKHKEEIEREIFRVSDPYLDALTLIRTVPGLDKNPFTAIQILSEIGGDMSVFPTDKNLVSWAGCCPRNDKSNKTIKSTRISRAGSYLKPVLVQVSNALIKSKKHPEITDRYRRIKSHRGHKKAIIAVCRMLLTAIWHILTDLKPYTPDGYLTPRPVKKEKVLTTSQALNLLKLRGYVIKDDIAAAIP

SEQ ID NO: 354635 - protein, 411 aa, unidentified
MDVVVACCAGLDVHQASVVACVNSTGPNGRSHKEIRTFGTMRDDLIALRDWLKDAGVTAVAMESTGVYWKPVFQMLEDDFETIVVNAQHIKNVPGRKTDVKDCAWISDLLRHGLLRPGFVPPRAIRDLRELNRYRRKVAQVQAGERNRLIKVLETAGIKLAGVASDVFGVSGRAMIRALIEGEDTPRAMAGLARGKLRGKLKELARALDVPLQPHQRFMLRTQLARIEQAEADLERIDTTLREMIAPYDHYMRLLMSIPGVEWINAVTIIAEIGIDMSAFASAAHLASWAGLCPGNNESAGKQRSGKSRKGNVFLKTALVTAAITGCRRRGGTHLAEKYRRLRARRGTMRAAVAVAHKILVSIWHMLSNGTFYQDPGAGFLDKMDRERTSKHLVRRLVNMGFEVQLQEKAA

SEQ ID NO: 354636 - protein, 353 aa, unidentified
MSQQNARVAVVGIDIGKNSFHIVGQDGRGEIVLRQKWSRSQVETRFANMSPCLIGMEACVGAHHLSRRLRALGHDARLMPAKYVRPYSKGQKNDFRDAEAIAEAVQRPTMKFVATKTADQLDLQALHRVRERLVSQRTGIIDQIRAFLLERSIAVRQGIRFLRAELPRILAMPPDVLSPRMVRIVEDLACDWRRLDERVEGLSNEIETIARQDAGCERLMSVPGIGPIISSAMVAAIGAGDVFTKGRDFAAWLGLVPKQISTGDRTILGKVSRRGNRYLRVLFVQAAWVVLIKPKIWERHGLKPWLEAARKRLHHNVLAIALANKLARIAWSVLARGRAFEVRKINQAAPQPT

SEQ ID NO: 354637 - protein, 348 aa, unidentified
MIIIGCDFHPSWQQICWLDKDTGETAEQKLVHGSGEAQKFYQQLAAPALIGMEATGNCQWFVEMVKAAGHEVWIGDAAQIRASDVRQQKHDRRDAALLLQLLLEGRFPRIWTPSSEQRDLRQLLIHRYKLVRLRAQAKNGLQHLALNQGLQKKRRLWSEAGQKLLRALPLKPWASRRREDLLGVMELLDQKIASLDQAVQEAAEKDPNARLLMTQPGVGPVTSLAFVLTMGDMTRFARGKQVASYLGLIPREYSSGGHQRLGSISKQGNRFMRMLLVEAAQVAVRCDPQMRQEYLHRCHQKPKGVAKVAAARKLALRLYWMLRTQKRYPEIVSIESSSRVPLVVRHGG

SEQ ID NO: 354638 - protein, 407 aa, unidentified
MLYAGIDWSDQALDFELLGTDGTVLVEGCVSPDVSGMTDLFMQLEQHGQPSQIGIAIEAVRGPWVEALLARGYIVYAINPKTADYFRRAQSAAGDKSDSIDRHVLAMFLMGQHRRLHPLKPVDPDLAALRIACEDRLRLVEERTAKLNELKAALKTYYPAALGLFGDLDSRISLTFLMEFPTQREMQSLAPKSFRNWLRRNKYNRNDRLEAMMAQLVAPVLEVANHLQDAKAGHIAYLAKSVRDLNDAVRQVDAAITRRFQAMPESGWVSSLPGAGPTIAPSLLVCVGRDPQRFACTRQAQALMGTAPVTKASGRVRTVHMRQACWKFARRTLQCFADHSREKCAWAASVYEQKRQSGYGHHGALRVVANKWLKIILAMQRAGRRYEEHRFTHSRERFLLNAAGSVA

SEQ ID NO: 354639 - protein, 340 aa, unidentified
MKMYAGLDVGGKQTAICVMDEVGKIIWRGMADTYPDVIAARLKGFQEKLVKVGIESGPFTPHLHRSLVGLGFPMVCMDARRAADAIKSRRIKSDRADAWALAEMLRTGWFTAVHVKSAESHKIKTLLGARDQLVRVKRSLGNQVRGLLRPFGVRLPSRAGMKKFAEAAYQAVQADKLLRASISALLEALASIDAQIAKLDDELKALARRSEVAWRLMSAPSIGPITALAFIATIEDPHRFRRTRDIGAYLGLTEKRYQSADTDVGLGISKQGDAMARHYLYEAANVLLTSVKKGSALRSWGLKLLKNIGPKRARVAVARKLAVLLGRMWKDGTHFEAMAA

SEQ ID NO: 354640 - protein, 335 aa, unidentified
MKHYAGLDLSMESTQVCIVDENGRKLVSEKVESSPEAIAMMLERYGPLERAVIETGRMSPAICLGLRELGVPVVCIDARQAHQSLKAMKANKTDPHDAAGLAQLARTGFYKEVHVKSPAAHGVRSVITARSHLVEARVRLDNTIRGLCATFGYRPGAGQGKAFLERIMQAAHIPGLGDAIASLLSVRAELVEQIKEMDRRLRVIASQSQACEILMTIPGVGVQTSAAFAAAVDEAGRFRQSRNAGAYFGLVPRRHQSGEVDWTGRITKQGDGTVRKLLYEAANSILTRSRETFALKTWAMKIAKRRGLKKARVALARRLAVIMHAMLRDGTLFQV

SEQ ID NO: 354641 - protein, 371 aa, unidentified
MEHTRFVGLDIHKERISIAVAESGRSGAVEYLGEISNDPVAIGKLCDRLERRGNALAFCYEAGPCGYGVHRQLTSLGHRCDVVAPSLIPHKSGDRVKTNRRDATMLARLHRAGELTPVWVPDADHEAMRDLIRLRSVVRQIVTRTRQHLQGFLLRHGRKHGRGTAWRMAYRRWLSTLAFGHPAQQIAFQDYTDAVMDAERRLKRVEEQISGLLPEWNLRPVVDALQAMRGIALINAVVLVAEVGDFTRFSNPRQLMAYFGLVPGERSSGETIRRGGITKTGNTHARRALVEGAWAYRMKARIGRHKVDRIEALPKIIRDIGWKAQVRLCTRYRRLRARGKTANVVNVAIAREMVGFIWSIACTVQSTLKTA

SEQ ID NO: 354642 - protein, 326 aa, unidentified
MEVKRVGIDLAKNVFQLHGVDRHEKAVFKRRLKRDRWLRVLLDNTDPDCVIGMEACSGAHHWARVLQSRGYTVRLIPPQFVLPYVKSNKNDANDAEAICEAMSRPSMRFVSVKRVEQQDVQATHRVRSELMKQRTAKAQQIRGLVSEYGLVAPLRLTALRAAIPRWLEDAENGLTSRFRALLHGLWRDLAGLDDRVAELTGEIEAIAKADPVAQRLQQLRGVGPLVATALLASVGDGHQYKKGRQMAAALGLTPRQHSSGGKDRLLGISKRGDAYLRSILIHGARAVVSTAKHKEDRLSQWVTQIAQRRHPNVAAVALANKTVRMA

SEQ ID NO: 354643 - protein, 362 aa, unidentified
MMDPRPGDVIAGVDTHTDTHHCAIIDHLGRPLDDREFPTTGPGYDDLAAWAASHGRPAAIAVEGTGSYGAELTRRLSAAGHTLIEVNRPDRSARRRHGKSDPLDAYAAARAALSGRARAIPKDRTATAGALRPLHNLRTMLVTQRTQTVNQIHALVTTAGQELRASLRGLSTARLIRACAALEPDAAPAADPDTVVRYCLAEQARHYQDLSARITDLGHRIDTLTAEAAPRLRALSCVGPQSAAQLILTTGDNPDRLSGEAAFAHLCGTAPVPASSGRRDRHRLNRGGDRAANKVLHQIVIARMRHDAATRAYVQRRLKQGLKKKDIIRCLKRYVARQVYKAHIRPAPDPAPTSTNTYTQAA

SEQ ID NO: 354644 - protein, 391 aa, unidentified
MPQSNDLSRSLTALDQDSTLIAVVEMSQSSWLVGAIIPGVERRPAKKLEASEGMLLALLHRWRDEAAKAGCTIDRITVAFEAGRDGFWLARWLRQRGIEAHVIHATSIAVSREHRRAKTDRLDAALLQRAFLGWLRGERGHCTMVAIASLAEEDAKRPSREREALVGERTRIGNRMKSTLARLGIRGIRPGLRKAAERLEQLRTPEGAPLPPNTLAELRRDLARLRLINDQIGEIEAARLERLRQQPDEARHPMILLLARVVGIGIETADMLVQEVLSRKLRDRRAVARYGGLTGSPEESGARRREKGLARAGNARVRRGMLQLAWRFLMFQKDSALAQWYRARTADARGATRKTMIVALARKLLVALWKLVTTGELPNGVVLRPAIQAAL

SEQ ID NO: 354645 - protein, 420 aa, unidentified
MFCHFGFHKRSIPMKYVGVDLHKKSISICVVVLQGRKRKVVARKRFACPDVEGICRFFRELGAFQVVVEATANYEWFVGLVERLAQRVVLAHPKRLRVIAESKYKTDKIDAWMLAEFLALDMIPEAYRPTPRQREHRVLVRYRYYVQKRTVSVRNKMRHILANYNADVQELFTARGLQYLPEQKVSAADRFVLDRLLEEWREHQRRLKEADQALAAFGQKAPVKEKEARRVLETFPLLGPVTADVVLSEVGEAKRLRSLKRAASFAGLAPGFRESAGRRKEGGITKEGPRLLRWAMIQLAWRLVGRTAYWGGIFVQLERRTGKKKAIVAVARRAFCVIVSMLRSGQGYRTPRGGATAGFRRDGKGVQGEEGRRRQTKKPGVSWPRQEAKTQAAVRVEAKPRKKPRASSRRPRRVAPLAHP

SEQ ID NO: 354646 - protein, 342 aa, unidentified
MNYHTGCDAHSKYCKFQHMAEDGSLGLHMTVKTTKEDIHKFLDHLDAPTTMTLEAGRNYWWLSQLFMQHPIVSKVNVVDPRRSRQLAEELSVISGYGRAKNDRIDAEMLADQERRGLAPAIHVPTEEQLEKRTLTRYRSVMVVNRTRAKNFIHSLMAMHGFKAAIKTLLVDQAEKQEMMNLLPAYLQFMVEQLLDQIRFLDNHIPNCENKLNELLPPTHPQMKILMSAPGIAIVLARIISSEILDIHYFKEPKYLISYSGLAPIDKDSAGRKGPIKLNRHCNYWLKYAFVEAAHNASDYPKYRRKYELDVKKHGKTIAKLNLARKLAKAVYWMLSRQQLYKS

SEQ ID NO: 354647 - protein, 386 aa, unidentified
MPQPNDQSRSLVALDQNSTMIAVVELSQSSWLVGGMLPGIERQPRKKLEPNPERLLGLLHRWRDEAVRAGHTITRIALAFEAGRDGFWLARWLAARGVEAHVIHASSVAVSREHRRAKTDRLDTELLKRGFLGWLRGERGHCTMARVPTIAEEDAKRPNRERDGLVGERTRIVNRIKSTLARLGIRNFKPTLRKAAERLATVHTPEGMPLPPNTLAELQRDMARLSFVVSQIREIEAARQKRLEQHETGPHAMVRRLARIVGIGVETADMLVHEVLSRPMRDRRAVARYAGLTGSPDESGARRREQGLSRAGNARVRRGMIQLAWRFLMFQKESALALWYRARTADSRIGTRKTMIAALARKLIIALWRFVTTGELLDGVVLRPAS

SEQ ID NO: 354648 - protein, 318 aa, unidentified
MNTKTNQNINVGVDTGKYQLDIYIRPLDIYFTVENNEKGIKEAIKTIKKYNPNRIVIEATGRLEMPFILACAKANLPFTIANPVHIKRFAGALGQRAKTDKLDAQLIAHYSEAIQPKLSRLKPETMQAMSDLVSRRNQLLTMQTMEKNRLQIMPKELLMTIKPVLTLFKNLIIKIEDKIAKLIDSCPEYQAKNMILQSMKGIGKIAAASIISNLPELGYINSKQASALIGVAPMNRDSGRYKGQRKIQGGRPQVRTVLYMAMMSAMQSNPVFKATYQRLLAAGKPKKVAIIACIRKMIVILNSMLRDGVMWEAPKVLN

SEQ ID NO: 354649 - protein, 449 aa, unidentified
MARQRARRQRSAQPFHPNAAGIDCGATEHFVAVPEDRDPQPVRSFHTFTADLHALADWLQQCGIDTVAMESTGVYWIPLFEILEARGFQVYLVDPGKIKNAPGRKTDVVDCQWIQQLHSVGLLSASFRPDDDICILRSYMRQRDMLVRYAAQHVQHMQKALMEMNVQLHHVIADITGLTGTRIIEAILGGERAPDTLAKLRDGHCKQDEATIARALQGNWRDDHLFALQQAYDLYIFYRQQMAQLDTRLEAYLHTFEDHTDGQPLAPCPRKRPPKPNEPPFDMPNLLYRMTGVDLTTIDGIGGHLALGIIAEIGTDMSSWASEKHFASWLCLSPGNHTSGGKQKRSKTGTRPSANRANQLFRLAAMSLSRSDSALGAFYRRLRGRLGAPKAITATAHKLAKIVYNMLKHGQAYVDRGAQYYDQQYRQRAVKNLRRRAEALGFTLRPQAL

SEQ ID NO: 354650 - protein, 344 aa, unidentified
MNSMHYIGFDIHKKVISFCEKQVDGTVVHRGVIRAIRQDLNKWAIERKVPWIGAMEATLFTGWIYDFLLPYSQELKVAHPEMLKAITAAKKKNDAADAEKIADLLRCNLLPECYMAPTEHRNLRRILRYRNLLVREAAKMKTKTATLLMEVGAEYSKRRLHGRRYFQDLLSGLEYVPESALNLLQMSHDSVDFFSKMQKTLIHALRNEPQISKRVQLSMSIRGVGEVTALTWVLEIGDINRFSSIGQMVSYCGLCSAQKESAGKEIRGPISKKRNKHLQTVLVEAAKLAPQWNPQLAEIHERELKKGNRNRATLAVARKLVAYLQAVDKTKKIFVPKEVLKEAA

SEQ ID NO: 354651 - protein, 460 aa, unidentified
MDHYFLGIDASKGYSDFVMLNAKKQPVIENFELDDTFHGHARLYELLAIFSQAHPHAIIYGAVESTGGYENNWFQSLLKFQGSLPIKTAHLNPLGVTHNSKAGLKRNVTDKISAQNVAEYMIAHPEKVSYQHQDSLASLRKQWGFITMLTKQSTQLLNQLESLVYNANPEILIYCKGDTPQWVLKLLTRYPTALRLSKAKVKSVARIPYVSSERAKRLVATAKKSIASASDKVTEQIIVATVKQILHLKKTIETQTQMLANECKIPEVELLKTFIGIGDYSAIGLMLQIQSANRFSTSKKISSFFGVHPAYKKSGDGIYKYRMSKKGRKEGRRILFIVAMSAIQSNPLIRDVYNQAVKRGMEKMAAMGLCMHKILRIVYGMLKHNKAFDPKIDLKNRHEKPRGQRKLRQDKDRRYQDFDSNAPISRRQKMKRKERKQSQNANSVECGISEAPVPITQLAN

SEQ ID NO: 354652 - protein, 426 aa, unidentified
MPDARCTRGLVCQNCALRRTRAYRFSGGSPTSPAQWLYGLLRALVSAKFGRMCERAVLTNRPSLDLSPIVLEGHRACRGAWDRSGVFLNPNSCKGFEPVPSKEGSWMMAQNDLVVVGIDVAKDKVDACIRSLSLGRTFPSTPQGRRQLTSWLRRHKVVKAVMEASGGYERDWARTLREARLEVRIVDPKRVRNFARSAGRLAKNDAIDAEMIAWFAETFVEAPGQDHDAAREKLAQIVAARQGLLDLQTRLQNRDEHAEVGPVHKMHERLLKTIALEVERLETAIAALIKATPRFTELAEIIESVPGLASTTSAGVIAMMPELGQVNDKIAGALLGTAPYDDDSGKRRGERHIKGGRRRIRNIFYMACLGASTQHNPVLKAFYRRLIAKGKEKKVALVACMRKLIVILNIMIARGEKWDASRYAVG

SEQ ID NO: 354653 - protein, 422 aa, unidentified
MLQEIQDHEEIIARVAALDIGKAELVCCLRLPGPGGSGRRVQEVSTYSTMTRSLQGLADRLRELGVTRVVMEATSDYWKPPYYLLEAHGFEVWLVNAKDVKHLPGRPKTDRLDAVWLCKVAERQMLRPSFVPPKPIRRLRDLTRYRVALVTDVGAEKNRVEKLLEDAQIKLSVVASDIFGVSGRDMMAALVAGERDPKVLAQLARTRMRVRIPQLEEAFVGHFDDHHAFLLTQMLDRIDAMTANIDTLDARIEEQIAPFADAVARLDQIPGVGATAAAVIIAEVGVDMTRFPTPAHLASWARFAPGVKESAGRKKGNGATGHGNRYLARVLGEAAVSASKTDTFLGERYRRIARRRGKKKAIVAVGRSILVIAWHLLSNPDTLFHDLGSDYYENRNGTRAATLNHVRRLQALGYRVTLEPVA

SEQ ID NO: 354654 - protein, 372 aa, unidentified
MPETPISYQSFIGVDLHKNTVTLAAVDPRSETLARLTISTKSVGKIETWLLALPRPSQLAVEAVGFVEWFIDRFRACVDRMEIADATELANRRGKRRKNDPNDALDVALRLARGECPLGYIADDELMQLRKLGRHWRQLSSVLARAKHCMKSMLLAANTRGPKFDGGSTQRWLLAHGHLLKPAQRQAFAHFTQIIQLIELQRQPLRCAIIEACRSPRFAPITTLLQTVPGIGEIWSCIIAAEIGPFDRFPNADTLEFWAGLTADVKESAGRTQSGKITKAGSRTLRWALCNAALTLCHSDATQEAIRQRIIRRTGNIKGKANVAMGRRLLRLLYAMVRDNKPYQRGPRRDRTSAANKARAAKRAGKTRKEAA

SEQ ID NO: 354655 - protein, 343 aa, unidentified
MQAVTTIGLDIAKSVFQIHGVDAAGNVIVRRQLKRRYVLPFFQRLPPCLVGIEACASSHHWSRELKALGHTVRLMPPAYVKPYVKRQKNDAADAEAICEAVTRANMRFVETKTPEQQSCLMLHRTRHLFIRQQTAVINAIRAHLAEYGIVAAVGRNGVEELLGVVADPSDKRVPEIARACLAALGAQLRMLKAQILEFDRMITVWHRSNETSKRLDAIPGVGPALATALVASVPDPKAFRSGRNFSAWIGLVPKQHSSGGKDKLGSISKQGDRYLRSLFTAGALAVIRYAKIHGTKHRPWLTALLARRPTKVAAIALANKIARMAWAMMARGDRYKEPVALAA

SEQ ID NO: 354656 - protein, 355 aa, unidentified
MTSIKYIGMDVHMESISICVRNSVGKIVMECVIETKASTLLQFLDGLRGDLRVVFEEGTWATWLYDLMKPHATEVLVCNTRKNAVRKGSKGDRIDARKLSEQLYMNNVKSIYHGEHGLRMMKELARSYLTITKDLTRVMNRLKALYRSWGIPCAGNEVYAPRYRAEWLAKINEAGVRRRAEHYYQQLDVLRPLRQEVRRDLLVESRKHKIWKLLRLIPAIGPIRAAVLIAVMQTPQRFRTKRHLWTYSGLGLETYDSAEYRAVQGQLERSRKQATVRGLNKDYNHDLKDIFKGAAMRASTATGPLRDFYENLLAKGRKPTMARLTLARKIAAITLIVWKKEVRFDANYLKPQQAA

SEQ ID NO: 354657 - protein, 345 aa, unidentified
MPIVGGLDIHRKQITFDYLDTVTGQVCRGQISPADRVHLQAWLARFAGREDVAFAVEGCTGWRYVAEELAAAGVTAHLAEPADTAFARGRKRHAKTDKTDCRHLRQLLAEGRLPECWIPPGHILECRALLETYHDLRAEHTAWVQRIHAVLFHQGAPALGEGALRTEQGLAALRAAAAAHLSPAGQLQVATALEVTGALETRLHAVRHQLLQAARHLAGAKVLAARLYGVGPVTALAMTCWLAGEGRFSSSRKAVRFAGLDVTVWSSDRKGPPGRLSRQGPPVLRWAVYEAGKAHARSSAPDHGYYAAVKDRCNGKRAALSEARKILRQACHILAELGDDAFAAA

SEQ ID NO: 354658 - protein, 351 aa, unidentified
MIVIGSDPHKRSYTFSAVAAKTGELLGGETIAATSTGHEQLLAWARPIDSERVWAIEDCRHVSGKLERFLLARGERVVRVPPKLMAGRRRGSRQAGKSDPIDALAVARAALEEGVQTLPVATLEGPAREVKLLLDHREDLIGERTRIQQRLRWLLHDRWPELELPSGCLDRMTWLERLSGRLRRSPQDADVRVMRHQIRRLRELVRETRALQRELLLLVRRLQPRLLEIYGVSALTAAKLIAEIAGIERFRSPAKLARLAGVAPIPASSGARHRVRLHRGGNRQLNSAFHRIAVTQLRDYPPAKDYISRKLAEGKTKREAIRCLKRHLVRTIYTAMTSAPEQTPAPALVLT

SEQ ID NO: 354659 - protein, 459 aa, unidentified
MQRLSYKDFAGPKPAWLFHSNQRTLMNSHTQIRLITNESFAAFVGLDWADEKHAVVLLAADSQIQEHTTLEHTPEALSDWVAQLHQRFAGGKIAVILEQSRGSLLYALLPHAHLVLYPINPQMAAKFRKAFYPSGAKTDPLDAELLLQILLQHRERLKAWQPDEPVTRQLQLLVEARRRFVADRVRLSNRLENALKTYFPQALQLVGQSLTTPMACAFLQKWPTLEAVQKAGPHRLRKFYYGQHSRAEDLIQQRLQLLAQAKPLTTDAAVVTAQSLLVKSVARELAALPAILAEYDQQIAARFAAQADYRIWDSFPGAGAALAPRLAAAWGTQRDRFESSDAMAAYSGIAPVKQASGRSVWIHMRWACPKFLRQTFHELARTSLAFCIWAQCYYQMQLQRGKGRHAAFRALAFKWQRIMWRCRQDRVPDDDTKYVESLKRDNNELYARVIAFQSTPTSA

SEQ ID NO: 354660 - protein, 459 aa, unidentified
MGPATERLGWTCTSPTRTVKHVPWGVRAKSASTGPMKHHDWPSREGILTESYRFFVGIDWAWERHTICVLGSDGEVIDRRTIEHSGAGLTQLADLLEKLSSGDPFSVAIAIEMPRGAIVESLVERGFAVYSLNPKQMDRFRDRHTVPGAKDDSRDAFVMADALRTDLHLFHRVRLDHPDILRIRELSRSEEDTQQDQVRAENQLRSLLNRYYPQMLQLCPAVDQAWFWDLLEMASLPARGAKLSKSRIEKLLRSYRIRRLDADEIHQTLSVPALQLAPGAAEAASEHVLWILPVLRLLDRQRAEIARRMQLLLEKMSEDEQVVEHRDVKILLSLPGVGRVISATMLAEASQPLAERDYHAIRSYAGAAPITRRSGKRKMVVMRRGCNPRLRNALYHWSRVSSQNDPRSKEHYAALRAKGHSHGRALRGVADRLLAVLIAMLRSGTLYDPNHQTAAMPLK

SEQ ID NO: 354661 - protein, 409 aa, unidentified
MELLIPRCAGMDVHQATVVITVRLPDEAGGRRSITQTFGTMTPDLLALRDWLQAYGVTHVALESTGVYWKPVYYVLEDAFTLLLINMHELKRVPGRKTDVKDSEWLAQLLECGLLQSSFVPPPAIRELRDLTRYRVQQVRDQAQETNRLHKVLEDAGVKLSTVVSDVMGVSGRAMVAALLEGTSDPVALADLARGRLRAKLPALQRALQGRFRPHHAFLLRQILNKIDFLEETIADLTKEIDTRVRPFEPMLTALDTIPGVDRIAAISIVAETGGDMQRFPSAAHLCSWGAMCPGQNESAGKRRSGKTRKGNVYLRRTLIQSALAATRKRDCALQTRYHRVKRQRGHKKAVVAVGHQILEIAYYVMRDGVSYHELGADYFVRRDRERTKRRSIQQLEALGYRVTLNDAA

SEQ ID NO: 354662 - protein, 333 aa, unidentified
MEAITTIGLDIAKSVFQVHGIDAEGNVIFRRQLKRRYVLTFFQKLPPCLVGIEACASSHHWSRELQALGHTVRLMPPAYVKPYVKRHKNDATDAEAICEAVTRPNMRFVATKTPEQQSCLTLHRTRHLFIRQQTSVINAIRAHLAEFGIVAPVGRQGVEQLLGVAADTNDKRLPEVARACVAALGAQLRMLKAQILQFDRMIRAWHRSNEESRRLDDIPGVGPALATALVASVADPKAFRSGRDFSAWIGLVPKQNSSGGKDKLGNISKRGDRYLRSLFTTGGGDPLRQNPWHQASALAHCVADAATHEGRGHRARQQDRTDSVGDDGQGRTL

SEQ ID NO: 354663 - protein, 338 aa, unidentified
MTCIGFDHHKKWTQAAAVDDQGKIIREMRVLNDNSSLKGFLKGLPQPLKGVVEAGPTWGWIYDTLTELGVKMIVANPSAVRAIAEAKIKTDKIDARMLASLLRVGLIPEVYVPTEEVRSQKMLWRERIWLVRMHVRLKNRIHRLLNHYHLEVPEFSDLFGAAGRRFLEELKLPEPGNRILEAQLKLLQSYRLQIEEVQRWAVKATQGHPNRAYLESLPGFGKVFAPIVALEIDDPKRFASPGKLASYCGLVPSLYSSGGKSWQGGIGKEGNHWLKWAFVEAAWAAIRSSAYFRVVYQRLRQRKTAQVSIIACARRLCEIAYHLLKERRCYEERPYRYA

SEQ ID NO: 354664 - protein, 350 aa, unidentified
MDKELYIGVDVSKQTLDLAYYDGESIDWKKAHIKVSNNNAGFKKIGSWVAKVSKGVDIVLFCMEYTGLYTQNFRLWLEEKHYIYRMVEPRKMHRFEPDLDDGLRSLDRIKTDELDSFRIAIYCEQNHRKILRNPSKLPPPVYFKLKRLLAERKQTVKQSVLYKQQLHDICAYDTDLSVERKNGQLKTLNDALKGIDYEIDMYIKEDADISKNFSLLTSIPGIGRVVALETIVLTENFMAIDNPRKYACYIGVAPFKKESGTSVRKGSSVSKKGFKQAKADLSIACLVCMQHIPNIRDYWERKRKEKCSGIVFNAIKFKMILRMFAVIKRGTPYVETDNYRNGKNKQPGVN

SEQ ID NO: 354665 - protein, 497 aa, unidentified
MPNKASIYPDGNPQIIKLFERAGHPAKVLCVALDYAKAQHSALICNGLGDLVHGAFAVENTPAGAKQLLEEVRSCAKQRKVRPEQVFFGGEDYPSYAENFLRHLGQAGFLVVRVNAWEAKKQRSNFQASTDALDLLGIARCCLNRRGQPVVDLPVAYANLRLATRDRDKLVRSATATSNRIHTYVDRLFPGFLSEARSGLTPFCEASLDLMSERFSPAEMRQRPRGALGQWLARRGVSEPHAVAAQLKELAKGALAPAPEQTVLLQRTLSQLVGMYRGLQGSIGAMDRELAYWLARTPGALLTSIGGIGITLAAGWVAELGPPQQWRAVRRMCSYAGVVPKTKQTGGPGQEPATGYVQQRCNKRLKNVVLQAVEKVRQFGPEDLVRAAQELEAHGSHTEFGMAKRLVRLAKYLALTGTIYRPKALMAADTAKEPLVLYYQEAWDKLLQKWKGKADLKDVFAPDHPLGQWRKMAQELYALELRLPAQRVTPASRASTP

SEQ ID NO: 354666 - protein, 402 aa, unidentified
MAYDFVIGMDVGKYFHHACVLDPQDRQVLSKRINQHEGSLRKLFGTYLADNASVLVVVDQPNNIGRLTVAVAQAMGADVRYLPGLAMRQLSRIHVGNSKTDVRDAYVIAHAGLNLPDALRSVDRVEEVFLQLKVLNGIDEDLARAYTRLINQMRSALVGTYPAFEHVLHGQMIHRKWILHLLAKYGGPTKIRRIGKARLAAFARGHRARNPEPVIDAMLAAIHSQTVSIAGAEYAELGVAMSAKDALAKLEHRKEIEAQVLELIQDIPQTEILLSIPGIGPRSAAQILMTVGDMSDFPDAAHLASYAGLSPRTNQSGTSIMSNSPNRAGNKKLKNALWQSSCASIRFHERSRQFYERKRKEGKRHNAAVVALARRRLNVLFAMMRSGELYRDISTVQEAAAA

SEQ ID NO: 354667 - protein, 360 aa, unidentified
MAKTKSVPPPFVVGGVDTHKDLHVAAVVDENNRVLGSDFFATTRQGYRQMLTWMASFGTVARIGVECTGSYGAGLLRHLQNAGITVLEVTAPDKMERRRRGKSDTIDAESAAHAAFSLIRTVTPKTRSGMIEALRVLKVCRKTAVAARRIALQMIQMNIVSSPDELRDQLRNLTRMQLIRTLAAWRPDVTAYRNVQDAYRIALKSLARRYLELHDEIADLDIMIASIVDELAPELIKRNAIGYESASQLLITAGDNPQRLQSEPGFAALCGVSPVPVSSGKTNRHRLNRGGDRAANSALHIIAIGRLRTDTKTQEYVAKRVAEGHSKMEALRCLKRYIAREVFTLLRNQNRQINSTQITT

SEQ ID NO: 354668 - protein, 340 aa, unidentified
MKLYGAIDLHSTNSVLVVIDEEDKIVYQKRLPNELAVILQQLSVYQSRLEGIVVESTYNWYWLVDGLMAEGYQVHLANTAAIQQYEGLKYSNDDSDARWLAHLLRLGILPQGYIYPREERPVRDLLRKRSQLVRQRTMNLLSIQNLMTRNTGLSMTANQIKGLDKTQVDGLLPDADLSLAVKANWSVMCSADEQVERLEQRVTERVKLRAQFSFLKTVPGIGQILALTIMLETGDIRRFATVGNYASYCRCVDSQKISNGKRKGSGNTKNGNKYLAWAFVEAANFAIRFNSKIKSFYQRKKAKTKAVVAIKAVAHKLCRACYHIMKDRVAFDVTKAFGQK

SEQ ID NO: 354669 - protein, 417 aa, unidentified
MADDIRWFAGVDWASEIHQVVLVDAHGTVTGERTFPHGGEGLGAMCDWLLTATGTSAEAIAVAIEVPHGPVVEMLMERGFPVHAINPKQLDRFRDRFTVAGAKDDRLDSRVLADSLRTDRHCFRPLHSADAVTVELREWSRMAEDLRQERNRLSNRVREQLWRYYPQLLKLTDDAGADWFLALWMLVPTPAKAAKVHKSSIERLLKAHRIRRIGADEALTTLRQKPIQVAPGTTEAAAAHIRALAVRLKVVNRQIKDAHRQLDALCAKLAGPGEAEPGQSYEQRDAAILRSLPGVGRIVLATLLAEAWEPLRARDYHALRCLCGAAPVTRRSGKRCVVVMRQACNVRLRTAIYHWARVAIQHDELSRRRYRELRKRGHSHGRALRTVADRLLAVACAMLRTRTLFDPARTSALKEAA

SEQ ID NO: 354670 - protein, 418 aa, unidentified
MKKNSNSQTKSERNSKRMKASGPVEGNTKEVMAELVAKLTERLGAKPAQENATEAKPRSAHAPAPNRDRLTVGVDLGDQWSHYCILGLEGETLAEGQLRTTPESFAELFQALSAARVVIEVGTHSAWVREVVVSCGHEVLVANPRLMDGTKRRKRKNDRVDANKLARVGRMDPQSLFPIEHRSTEVRQDLVVLRARDALVAARTQLINTTRGLVKSVGARLPKCSSASFPHKVEEALPAEVREALLPLVRLAEALSDCIKVYDERIEKLATEKYAHTSLLRQVKGVGPLTSLAYVLTLENPERFAKSRDVGPYLGLVPKQEDSGESQPQLGISKAGDEMVRRLLVGSAHYILGPLGPDTDLRRYGLRLCERGGKNAKKRAAVAVARKLAVLLHRLWVSGEVYEPLRNSLPAVTAQEAA

SEQ ID NO: 354671 - protein, 331 aa, unidentified
MYFSQFIGVDISKNTLDAAIYPAKDKKLDFFHFDNTQKGLGEMMRWLRRRGIKPSEMVICAEHTGVYTNPLIAFADKKGLALSLNSPLDIKRSMGIARGKNDIVDASRIAEYAHRHQDKLRLYEKPSDAIIKLQYLLTERRQYMRQRTALINLNSAMGKYETPEARTRNDSAIHHCEKLVKKVEEQMLTVLCTEPDVKRNFDLVSSVKGIGLINALNTIVYTNNFKSFETPRRYACYIGVAPFDHTSGTSVKGKTQVSKICRTQQKAELSMAARSAIIHDPGIKRYYLRKMKEKGGGNDAHGVVLNAVKFKLILRMFAVVKSGQPYKVLNY

SEQ ID NO: 354672 - protein, 393 aa, unidentified
MYLVGIDIGKLKHSFCLLEKETGEILVEPVFFENSRDGFNALLSSFKHLPQRDILIGMEDTGHYNLALLKFLLDRNYQVALINPVATDLTRKMQGGISKNDKLDTLTICDVLSSNQRVKSYRISKYSSFDLYEQKLLTREHHNLKEEENQLSNRLQKCIDVVFPEFNSLFKSKYGIVYMNILKEFGSADAIAHADIRTIRKCFDTGRGKNIALTAQELKEAARNSIGFPSSSETTQIKHLVARIELIKEQIAEIDKKIEEFSIQNNSPILSIPGISHFSGTSILAELGDIHNYSKPSQIIKFAGMAPLTYESSQFTAQHTAITKKGCKYLRKTLYQIITPVIQYNPVFRKFYLLKIAQGKGHRCAQGHCVRKLMRVIYHLLSTGTQFDPALLR

SEQ ID NO: 354673 - protein, 346 aa, unidentified
MKLYAGLDVSLKEISICVVDEEGKTVARGNCPADPEGILGWFRNRSLAPEKIVHESGMLSIWLQRGMARLGLPATCIDARKAHKSLSARLNKSDAGDAEGLAQLARTGWFTPVHVRSEGADRLRALVGARERLIRLRKDLEGHVRGVLKTFGIRMTGSSQGRQRQAFRDQLAAAGETDPLLHAIADGFIATHAVLCQAAADLDIAVKKEARDHSVARRLMTIPGVGAVVSLNFIALVDEPTRFGKTSDVGAYLGLTPKRHQSGEVDWSGRVSKCGDGVMRSLLFEAATTLITRVQKFSALKSWAIRLAGRRGFAKAAVAVSRKLAVLMLAIWKKETEFTRTKEAVA

SEQ ID NO: 354674 - protein, 373 aa, unidentified
MDGPALSIQARGPERSIFDPYRERSHIMRQIVRIGLDIAKRWFQVHAVDEVGKEVFNRKLPRDKVLGFLGSLPPCEVALEACSSSHHWGREIGRFGHRVRLISPNYVKPFVKRGKSDAHDARAICEAASRPDMRFVRVKTEEQQAALMQHTSRQLLIDQRTAVANSLRGQLAEFGVIENQGIENLAELVRRLDEKDPDIAHIPETALAVMRILADQLRAVEANLAMLDEQIEAWRQSSASAQALKTIPGVGVLISAALAAHVPEPSAFSCGRDFAAWLGLVPRQNSSGGKDRLGRITKQGNPYLRRLLVLGATASLRWLNKRTDPLALWTRQLLQRRPARLVTVALANKLARIAWAIMTTGELYRREALSVVA

SEQ ID NO: 354675 - protein, 413 aa, unidentified
MDRLIERCAGLDVHKATVTACVRVPGETGGRHQDIRTFSTTTAGLLTLRDWLQSYGVTLVGMESTGIYWRPVYYLLEDDFTCWLLNAQHLRNVPGRKTDVADSAWICQLVEHGLVRPSFVPPREIRELRDLTRYRKAQIQERTREAQRLEKTLQDAGIKLSSVASDVLGVSGRAIVQALVQGTHDPEVLASLARGALRRKLPELSEALEAHFGPHHALIASEIIAHIDYLDEAIERLSADIERVIAPFAEQVALLDTIPGVNRRTAETLIAECGADMGTFPSHRHLASWAGMCPGNNESAGKHRSGRTRKGSKWLRHALVESAGAAARTKGSYFSAQYGRLKVRRGHKRAILAVGHSLLVIAYHVLERGQPYSELGEDYLLLRDSTEVYTRRLVRQLERLGHRVSLKPLPASA

SEQ ID NO: 354676 - protein, 342 aa, unidentified
MNHVAIDLGSRESQVCVRSPDGAIVWERKHPTRKLEELMRSWPQSRVIVETSSEAFRVADAARSSGHEVRVVPATLSKQLGVGERGIKTDLRDARKLSEVSCQIDLPSVHIPSEEARLLRSVIRSREALIETRTKLVNHVRGWLRTQLWKLPGRGLRTLAARMRAQTSSQQNPLPDHIEQILQVLDMLNLQVREADQRVRTMASSSSVCQRLMTIPGVGPVTALSFVAAIDNVSRFRHAYRVHSFVGLTPGENSSSERQQRTSITKAGPTSVRRTLVQAAWIALRIRPTDPMVQWAKQVEARRGARIAVVALARKMSGVMYAMWRDNTVYQATKAVRTVTHA

SEQ ID NO: 354677 - protein, 421 aa, unidentified
MSQFSRDFIVGIDVASEFSYVAMLDPDGNLIRKAFRIDHTPNGFQYLLQIQKKEEERLNSKPIYFVESTGIYHLPLFFFLRSNDLKGFVLNPLCVHSTKNSNVRKVKNDKKDAEAIARLVQREDVKVSLVPEPQILSLRMLVREYFALADNLTDCKLRFSNDLHLVFPGFKQVFKDPFSAAALAVLEEYPSLHSLQSADLDKLTGVVAKAARRSFTWAKEKLVKLFDYASIADSIGLSSILMEGKLRIQIQTIQSIASSMAKLETAIRQQVESNAFPKEVRDNIELLDTMHGVGFISVVTLLAEIGDFSKFTSAKALAAFFGIDPTVKESGKFKGDRIQMSKRGTKLGRRVLYTIALASIRRNKKGDSINPILRAYYESKTASKKKKVALVAVMHKLIHYFFAVLRNLTNVVRPKTIGLIT

SEQ ID NO: 354678 - protein, 398 aa, unidentified
MNAVGIDVSKGKSTVAVIQPFGVVIAEPFDVSHTESDLNKLVQLIKSLSGETKVVMEYTGAYYEPIANALHNQGIFVSVVNPLLIDDYGTNRVRKVKTDKKDSLKIASFAIDKWLDLREYIPANDIRKTLKILNRQYVQYNKILVMQKNNLISLLDSCFPNANTLFTSPRRESVGHEKWVDFVLKFPHIHSISKLSLSAFKVKYQSWCRKNNYNYSDKKVADIHSYCKTQISVLPMTDSVIKIITEAAVMLNSTLETLCTFRDEMDRLSSTLPEYNAVMGIYGVGKVLCSQLIAEIGDVRKLNNSKSLVAMAGIDPPPNQSGKVDTKSRSISKRGSPVLRKTLFQIMTIIIQNKPVDDPVYQFLDKKRSEGKPYRVYMIAAAHKFLRIYYARVMQALN

SEQ ID NO: 354679 - protein, 344 aa, unidentified
MNELIRIGVDLAKNVFQVHGVDRREQPAWCKRLPREGWLRAVVATAPPGCEIGMESCSGAHHWARQLQARGLRVKLIAPQFVKPYVKSNKNDANDAEAICEAMSRPSMRFVSVKSVEQQDIQAAHRIRAGLVEQRTAKANQIRGLVAEYGLAAPKELLSLRRAIPRWLEDADNGLSDRFRHLLDGLWRDIRALDGRVAELDKDIGAIAQSEPDAVRLQQLRGVGPMIATALLAAVGDARQFANGRQLSASLGLTPRQHSSGGKERLLGISKRGDAYLRSLLVHGARATLRTAKGKQDRLSRWICRLAERSHPNVACVALANKTARMAWAMLRNGTDYQPDLAAA

SEQ ID NO: 354680 - protein, 308 aa, unidentified
MSERFVGIDVSKETLDVHVLPEGRAFAVARTDSLLAALSELGADLVVLEATGGLERVVTAALAGAQIPVVAVNPRQIRDFARATGQLAKTDAIDAAVIARFGQAIRPAPRALPDAAAQQLAELVTRRRQVIDMAVAERNRRRLVTARPALRSIDRVLKVLEAQLADIDREIGDRIHASPAWREAEDLLKSVPGVGDQTARTLIAALPELGTLSRRQIAALAGLAPFNRDSGQWRGRRSITGGRADVRSVLYMAALAGIRFNPALKACYQRLRTAGKPAKVALVAVMRKLLTILNAILRDKSPWQTQNA

SEQ ID NO: 354681 - protein, 320 aa, unidentified
MTSKGVEKMQNDTIGVDVSKDHLDAHRLADSASRRFANDKCGRKAFVKWCAETPIVRVVFEPTGPYHRAFEHALGAAGVPFVKVNPCQARRFAEAIGKLAKTDRLDAATLARMGAMLELKTRPPRSEALLKLKELHLAREALVKDRTAAKNRGKILTAPLLKRHNAQRLEQIKRHIAAIEAEILKQVRTDPELAQRFAILTSIPGLSALTAFALLIEMPELGALEPGQAASLAGLAPMTRQSGRWSGRAFIRGGRAEVRQAVYMPALVAARFNPDMKAKYRQLTCAGKPAKVALTAVMRKLIVLANALLKANRNWAPKYA

SEQ ID NO: 354682 - protein, 449 aa, unidentified
MKKLSSELHGLPVIQDRAAGIDIGSRFHVVAVPADLTDVPVRTFQAFTADLEQMADWLVDLGVTTVAMESTGVYWIPVYEILETHGLHVVLANARDARAVPGRKTDVNDAQWIQRLHACGLLRASFHPDREIAALRSYLRLRERHLDYAAAHIQHMQKALTHMNLQLHHVVSDVTGVTGMRIIRAIVAGERDAGRLATMRDTRCKSSVEIIRSALVGNYQLEHVFALEQALAMYDAYQVQLDICDQQIAQSLMRLSQQKPSPSEPLPRPRHRTRQPNALNFDVRTLLYQLVGVDLTQIHGIGPYLALRLVAECGTDLSRWRTAQHFTSWLTLAPGCRISGGKVLSAHTRKTKNRVAAHLRLAAVTIGRTNTALGAFYRRLSARIGKAKAVTATARKIAILFYNAMRFGMAYKDPGADHYEQKYRERVIKGLHRRAAEFGFTLQTVEGVS

SEQ ID NO: 354683 - protein, 435 aa, unidentified
MIKINYMSTLFVGIDVSSKSNVVCAMDFDENKYIASSFTNNQPGAEKLAGMLVECMNKHRNLDTIVVALEATSVYSIHIANFLSSAEVLMPYNPYVFCLNPKTTANYRKSYVGLEKTDPTDAFLIADFARVGRTKKSEPWRGSQFISLKRLTRHRLHLAECITREKTYMVSNLYLKFSELQLLDEADQPFSNVYGATSSAVLTEFMSLQEIIDLPEEELLQFLAAKSRNRISDISKTAELLKKAARDSYRLDQCMYEPLNVSLASSFNCIESYKKEIKLIDKAIEKCINGMNPNALTVLRSIPGIGSVWASGIMAEIGDITAFHSSDALAKYAGLFWPKSDSGDFFSEDNQISKAGNIYLRYYLCEAANSVRRHVPEYSEFYSKKYAEVTKHQHKRALALTSRKLVRLVFGLLVKNQLYTGDKLDAEMNTDSNEG

SEQ ID NO: 354684 - protein, 402 aa, unidentified
MLPKRACIALDVSKGNSHMQAFYSAGFKATEVMIIQHDKNGFNILNELIKKIEVETNDTVAIVFESTGSYSKPLEHFLWSIHKKYYLVPPLLSAKVRKSDIRPTKTDAIDCETIANVYYLKNLKEADRLNKISLRLKNYSSYYLFYINREVETKIKYRQYLDIVYPKIDEYFDVMALSFIEFIKNNPDPNKLIKRSHEDIYKRFLKFSYCGEIKSKARATSMKQYLSEAMITIDSDNPEITILADVAKVLLEDLNHLENMLNEIIVLAMKTEEYKYIVTIPGLSKNTAARISAEIAGIDRFSSASKFVAYIGIDPTVCQSGKLTGEHLNITHKGNQRLRCLLYLVCVGSLKNRSDYNPIRDFIIKKKNDGLAPKAAIVAGCNKLARIIYAVCSKREVFSIQQ

SEQ ID NO: 354685 - protein, 348 aa, unidentified
MKNKSFVGIDISKNVIDVSIFREDTNIKMFPHEVFNNTRKGFGDMCSWLKKSRVVLSQALFGMEFTGCYSLDLEKFLTSKNYSFCMLSTRIVKHHPMGTIDKRDKNDSAKIADFLYRYDGTECAKPYKLPSKAMQQLKQLVNERKFLVEQRTNFMNRMQMFETKEDSAMYESYIKKLNHDIEKIDQEECELMSKEEDVFDTFQNLLTIPGIGLVNATNIIAITRNFTAFDTARQYARYVGVAPCSHTSGTSVKWRARPSAHCNGQLKADLSMAALRAVEYDVEMQMFYNRKLGGRKDSDTKRKALNAVKFKLIRRMFAIGKQKRKWEVLNTSDDRKNLHIEKSKASEL

SEQ ID NO: 354686 - protein, 464 aa, unidentified
MSDVKRGSKKKTATKAGPAVLPVLQPMVAGVDVGSTQHWVCGPARADGEPNVRVFGTTTRQLHELADWLVKQDVTSVAMESTYIYWIPVFELLESRGLEVVLVNARQLHNVPGRKTDFSDCQWIQLLHSCGLLRGSFRPTEAISRLRVLQRQMANFVAERSRCVQWMQKSLDQMNVQVHRAVTDLTGTTGMAIVRDIVAGERDPGRLAMHRDRRCHKSIEAIAQYLTGTWREEHLFNLAAALRLYDSLQDTIASYETHLLAQLEALQPPERQQQDVPRHPNPTKEKTIRHRGEQPLRTSLWRFAGVDLTRIDGIRAVAAQTVLTEVGPDVTAFPSENHFVSWLRLCPRTPISGGKPLKKRRNGMGANRVAAALRMAALGIQRSKTALGASFRRIARHKGVAVAVFATARQLARLIYRMLRYGQDYVDIGEAAFEAKFQARRLAGISEAARSLGFTLTKNEVAAG

SEQ ID NO: 354687 - protein, 312 aa, unidentified
MTKIICGVDTSKEHLDAGIVPGEAFARFANDAAGIAGLAAFCAEHKVELVVMEATGGFERLAFTLLWEAGVACAIANPRSVRQYAQAMGFLEKTDRIDAFIIARFAHSKGLKPMPPASKNQCRLKALVVRLRQLTDDLVVNKQRRHQTEDAEIRATFDEIIALIKRQSRHLEGEITSLIDDDPLWAVLDQTFRTVKGVAGRTVARIMAELPEIGTYDNKAIAKLVGLAPLANDSGKKNGKRSIRGGRSGVRSILFLVADIARRYDASLADFHRRLIAAGKPKMVVRIALAHKLLVRLNAKARDARVKYANAT

SEQ ID NO: 354688 - protein, 415 aa, unidentified
MLKIVYPICCGLDVHKSSVFACIAATDGNGVTTYQSRKFSTFTHELKELSDWLAQNNCKDVCMESAGKYWHPVWNILEPMCNLVIAHPKYVKAIRGKKTDKKDAKWIADIFKHDLVSGSFIPPADIRQLRDLTRYYRKLVGFNTGEKNRAQNCLTVSNIKLDDVFSNVFGKSSTAIIDHLLEHPGEIFDVAPFVNGRCKTPITEIQAAVEGSICHEQAEKLKIIRSHMDNLELCKTNLESAVLDIAANYIPQTELVLTVPGVSDPFIAISIIAEIGVDMSVFSTAKHLCSWAGLVPQNNESAGKKKTTRITHAGAYIKPLLVQCAVAISRSEKHPEIRNRYLALRKRRGHKKAVIAIARMMLTAIYNILKKNEPYNAELYRKADKPPANRQVSVDEAVFILQRQGYLVTAPHTVT

SEQ ID NO: 354689 - protein, 316 aa, unidentified
MKDQQTAFTCFVGVDVAKAKLDICWKNNQTTEIKNTKGGIVKDLIKRLDEPGSTLVVMEATGGYEKELVSLLHEHEIAVSVVNPRRIRDFAKALGKDAKTDPIDARVIAYFAEVMKPEPQIAKASSDEKLESLVNRRLQLLDLIGQEENRFKQTTDQEIKKCIRKLLKTLRAQKKDIEGRIEAHLAKDIGNARKVEILKSVKGVGPVMVGTVIAKLPELGSLNREQIAKLVGVAPINNDTGQRTGKRRIMAGRADVRRALYMSTLVATRFNPQIKVFYQRLLARGKEKMVALVAAMRKLLTVLNTIIKKDELWQAP

SEQ ID NO: 354690 - protein, 400 aa, unidentified
MNETSFSGFLGIDVSKNKFDAYCIDIKGEKYFYLSCPMDRKGFEKLVSRLEALSIPQESLLIGMESTACYHMNLFSFLLAEGYTAVLINPLLISNFVKMQLRKTKTDKKDALVIAQYLLMHMDTLTQTSISSHVSDLRDLSRQRESLLSQMTALKCDMKRLLTITFPELEKLTGVFTKSALRLLSCFPSAHAIVQADPAEINQLLIDHSRGRNSATTTQAIIQAARSSVGTTSPSRELILKQKTDVLIHLEGHLKELTAMMIELCRSDMGDDIDVMTSLRGIGEKTATNFLVEMGGDIRKFKDHKKLIAMAGLDPAIYQSGKHDGQGRITKRGNRHLRRVIWLMTIRVIQFNDCFRQHYDRRRQDGLPFKKAVLATAHKLLRTIFAMLTQRTSFCYETNS

SEQ ID NO: 354691 - protein, 415 aa, unidentified
MDILVERCAALDVHKDTVVACVRLPGPDGGRHQELRAFKATTAGLLGLADWLDSYQVTLVGMEATGCYWKPVWQVLEDRVCCWLLNARHVRNLPGRKTDLADAAWLCQLVEHGMVRPSFVPPRPIRELRDLTRYRKAQIQERTREVQRLDKVLQDAGIKLSSVASRALGVSVRLMLEAMIAGTHDPEVLAELAKGRLRAKLPALREALAGRFRTEHHGLLVAQILAHIDYLDEAVASLSARIEQVIAPFSEQVALLCTIPGVERRTAEVLVAELGADMGQFPSAAHLASWAGLCPGNNESAGKHGSGRTRKGSKWLRSALTEAAKAAARAKGSYFSAQYSRLKGRRGPGRATIAVGHSILVVAYHVLDRGVAYHDLGEDYFQQRQQQAADRYAKRLVRQLEQLGHKVTLEPAHAA

SEQ ID NO: 354692 - protein, 385 aa, unidentified
MAPPARPEIVIGLDVGKSSHWACVVTREGELLASKPVLNRENAIDGLYAQYPGALVVVDQVRNIGSLALSRARLAGMPRAYLPGLAAHGASKLFAGDAKTDERDAMVIAKTALGIPDALLPVADRPPEIEAARSLAAQRDFLTCENTRSKNRLRSILLESCPEFEAHADLSDPATLKLMAAVGGPWSISEASPQAVGALTRGCGRAKVAALVESVGSSSRPHPAAVACEDRAVRLLARRISENAAEIESLTSEISALLSADETYRCLLTVPGIGPRTASELVISIDIADFPSHDRLASYCGLAPRNRRSGTSISSVSASRQGNKRLKNLLVFSCNCLARSRNRWGGYYARCRDRGMPHGKALKAVARKRLKVIYAIMRDKVPYSA

SEQ ID NO: 354693 - protein, 352 aa, unidentified
MFYVGLDIHDKRIAICILGETGQIVRRAQVRTIDEMMRILEALPGRFEVCYEASCGYGHYHDLLRPIAARVTVAHPGRLRLIFRSKDKNDRKDAERLAKLLYLGEAPAVHVPAADVRTWREMITCRGRVIAKRTRAKNSVRTLLRCAGVVPPSRPALWTKRGVAWLRRLELPTESQRLRRDLLLEEVEALSRQTERIELHLNQRAKYSPAVLLLRSIPGVGVRTAEAVTAFIDDPDRFRSAKAIGRYFGLVPSQDQSGDRNRLGHITREGPAVVRQLVAEATWQAVRRSPTVRAYFERVRRGDPERKKIALVATAHYLVRVMLALLKRGTTWEEVIAPPDEPRRAVPTAAAI

SEQ ID NO: 354694 - protein, 312 aa, unidentified
MAMLSFCGIDVSKDRLDVVVLPEGWFFSVSNDTAGWAELVARLRPLAVSAIGLEPSGGYERGIIRALLAAGLSVRRINPSKLRQFARARGVLAKNDRLDARLIAEYVAIMPTRVVQRDAAVERLAEIVTMRRQLCDEHVAVENQAAHLEDAMLRRLSKRRQTRLEADIRLLDKRLAEMVAANGALAQRYELLTSMPGVGPVLAFTLIALLPELGKMSRKQIAALVGLAPYDFDSGKLKGHRSIYGGRMPVRNVLYMAALSASRYSPALKTFHKRLAAADKKSKVIIVAVMRKMITTLNAMLRDSAAWQPRST

SEQ ID NO: 354695 - protein, 390 aa, unidentified
MDILYESCAGIDVHQANIVVCILHGPLTSTRPKREMATFDTTTKGLRACHDFLSQFHVEAVGMESTGVYWRPVWHALCNDFELILANPAHMKAIPGQKTDKKDAHWIAKLTRIGLLPRSFVPDETIQELRELTRQRKHYVESRNKETNRIHKILQSGGIKLTTYIEDIMGASGRNLLQLLIDKTPITARIVHQSVYTSLKKKVPQLLEALDGYFSDHHRFMLTQSLEFYDFYQKQIELLEERINSYLSQYEKQVDILDSIPGIDWITASVIISEVGVDMSQFPTAGHLASWVGLCPGNHESAGKKRSTKIRHGNSYLKKCLCQAAFAVKRQKGSPLAERYYQIQSRRGPQKATIALAHQLLKIAYILLKEQVTYPAFLAQKKTTRDELAA

SEQ ID NO: 354696 - protein, 387 aa, unidentified
MARVIIGVDPHKRSATIEVVNEREQTVGQGRFGTDTDGYKAMLTAGRRHKEREWAVEGCNGIGRHVAQRLVADGETVVDVPAKLSARARVFATGQGRKTDPVDARSVAVVALRTVGLRRVQADDTTVALRLLVDRRDQLGRARTELVSRLHHLLLELIPGGAKKDLSAQQARSLLAAVRPRDVVGKTRRWLASELIQELVVIDKKIKVAKQELTELVASTGSRLLELHGIGPSGAARLLGDVGDIRRFASRAHFASCNGTAPIDASSGENNRHRLSRAGNRRINRALHIMAIIQLRHDTQGRRYHRRRLAEGKPPMEALRALKRRLSDVVYRQMLADTKRLETGPAGHAGATLTSSAADPIPMIDTSDKSLPGPAEPQPKTPLKIKT

SEQ ID NO: 354697 - protein, 371 aa, unidentified
MNQLNGEISKGIGAEATQDKALGRVLKLGLDVHYRQVTVAMQEDGGRIKAAGKMNHGAFVDWIGTKLEKGWQLYSCYEAGASGYWLHRELVELGVKNLVVAPKAMGGAEAKRQKTDKRDSAQLCDGLDRYLRGQDQALSVVAVPTLEQEQNRALIRYHRQIIKDRTRAEARGKGLLCTQGIEVGGRWWEGKGWAEVQSDPRLKDWMKEQLEGWQKKILSAQSQEKPLREQIEALAPERLPKGVGAYSAAVLQHEMKGWKRFSNRRQVASYTGLCPGIHLSDGRGKEGSINRCGNPTVRWTLVEMVWRLMIWQPYYEPVRQLAAGLVKSKRAKKRLVVKAARRLAIDLWRLETEQTTAEKLGLIMQLRSSSK

SEQ ID NO: 354698 - protein, 355 aa, unidentified
MADHELLVTGGVDTHKDAHVAAALDQLGRVLGTESFPANAAGYRALLSWLGRFGPIVTVGIEGTGAWGAGLARHLATRDVDVIEVRRQNRQHRRRHGKSDPTDAIAAARAVQSGEEHGAAKAANGSVESIRLLQVARRSAMKARTQAANQIHAVVDTAPEDLRARFHRTPVHDIAATAARFHRVPIDSPHAAAKTALRHLARRWLDLSDEVAELDRQLDELTTSTAPTLVAMNGAGTQTASALLIAAGDNPERLRSPASFVALCGASPLDASSGLQQRHRLNRGGDRQANSALNIIVISRLRRHQPTQAYTARRIAEGKTRKEVTRCLKLYVAREALQAIRHDLGLNQEAEPIAA

SEQ ID NO: 354699 - protein, 360 aa, unidentified
MTFTNHQGFIRSLRMPYSVEHLVNHVRKHFGDQKVAFAYEAGPTGYGLYDGLVAKAYPCLIASPSMIPKAPGQRVKTNRLDSRGLSENLRGGQLRSIHVPCALYRELRHLTQLRDTFVSEMVGMKQRIKSLLLFEGIEFPPAPAGRQWSFMVKDKLRKLECSKTVRFKLDQLLDSLEFSEKQVLKATREIRRFCRNDAELSQCIEYLMTIPGIGWIVASQLVARIGDWRELKNIRQLGGFLGLVPTENSTGERTDRGSITHTGDGRLRSKLIQASWSAIRQDGELREFFRSVCRTHARHLASRVAIVAVARKLSVRISVVLMKQRPYEVRQKVRSTPLTQGETSPQGTTRRQAEPGEKNS

SEQ ID NO: 354700 - protein, 388 aa, unidentified
MPTAADRTEEPTAIQTNLAAIFTSLELSRSIWLITSLAPGGGEKMSKHSVPAGDIASLLARFSELKQKALARTGTSFPIVVIQEAGLDGFWVHRVLQSEGIESHVVDPASIATSRRRRRAKTDRIDGEALLRALLAFKRGEPRVCAMVKAPTPEEEDRRRLCRERKVLIAERVKHVNRVKGLLFSQGVSGYEPLRRNRRQRLDELTTGDGRTLPIHLKTQISRELDRVELLLGQIKQVESERDALLTAQQATMPAPAAMLLDIKGVGPEFAAVLWSEGLFRHFDNRRQVAAYAGLAPTPWQSGSVDREQGVSKSGNPRLRTTLIQLAWLWLRHQPQSALALWFKERVSRNGGRMKKTTIVALARKLLVALWKYVTAGVVIEGAVMKAG

SEQ ID NO: 354701 - protein, 449 aa, unidentified
MSKKTKKATASGCYEGLPQIRANAAGIDIGASEIWVDVGNKDNEPIRQFETFTADLEEMANWLKQCGIETVAMESTGVYWIPAFQILESKGIEVFLVNARQVKNVSGRKTDMLDCQWLRLLHSYGLLAASFRPSAPIAVLRSYLRHRQMLIQYAAGHIQHMQKALTQMNLQIHHVISDITGLTGMKIIRAIVGGERDPKRLAAMRDVRTKADEETIAKALEGDYRAEHVFALKQSLELFDTYQKQIQACDHQVAAHLSRLESKGAGELKPARREKKKRRNQSGFNIRQEAFRISGVDLTQIDGISESAALALIGEIGVDMSRWKTEKHFASWLALSPNNKISGGKVLKRSTRKTANRARDLLRVCAQSLLGSRSALGALCRRLCTRLGKPKGIVATAHKLALLVYRMMKLGRDYIDIGQDRYEQQYKERALKHLARKAKDFGFQLVPSS

SEQ ID NO: 354702 - protein, 358 aa, unidentified
MKQYVGLDVSQKETSVCVVDEVGQILFEGKAKSAPGALAALLRKRAPQAERIGFETGAMASWLWHELRRVDLLVVCIDARHAHAALSVRMNKSDQNDARGLAELVRVGWYREVKVKSEESQKIRAILVARSRLVSMRRDIENQVRSLIKEYGLLFPRAIGQQFRNLVSELLGDNHPLLSVISPLLLIHEHICQQQNKFDDEVRQLAKADETTRRLITVPGVGVVTALTFRHTIDDPLSALTVGAYLGLTPRRNQSGETDINGKISRWGDRLLRTYLFEAATVLLYRTKKWSSLKAWGMKLAKRIGMRKAKVAVARKIAVILHCIMAHPSTGGSRSQSDICSQVPGPVCRTGDVPLGRC

SEQ ID NO: 354703 - protein, 428 aa, unidentified
MNSTQNERINQITSSTLIVGVDIAKFEHVARAQDYRGVELGRPITFENNREGFELFVSWFRKIATEQGFKDAIVGMEPTGHYWLNLAYYLGEQQVLCGVVNPLHVKKSKELDDNSPTKNDIKDAKVIAQLVKDGRYAIPNLLQGKYAELREAMKIRDHLSTDLRVVQGRVHNWLDRYFPEFLTVFKDWECKSARQMLSLCLLPHELVTQSEEVLLRHLREVAKRGLGMERMRCLKAAAGRSVGIREGTELAKLELKLLLTQYELLESKFAELEAKLDELLEQTPHVKQLMAIKGIGRDSIAGFLAEVGDIERYRHPKQIIKLAGLNLKENTSGKHKGQTKITKRGRKRLRALLFRVMMPLVAKNRAFKALHQYYTKRPTNPLKKMQSLIALCGKLIRILFGVLKKGHRFSEEKMLQDIPRFTEVSLAA

SEQ ID NO: 354704 - protein, 408 aa, unidentified
MRIVGLDIHRVFAEAVMLDDGNVIKLGRIGMAREHLEAFARTLTHDDHVVVEATGNATAVSEVLAPHVGRVVIANPRQVHLIAEARIKTDVIDATVLARLYASNFLPEVWIPDQRTLALRRQVTRRNQIVRQRARLKTMIQSILHAHLLPPCPYADLLGPKGRAWLLAQSLPADEEAAVARHVREHDRLSDDLHIIERELARDALSDPSTKRLMTIPGIDMVVAIGVLAAIGPIERFASPDKLVAYIGLNPSVYQSGEGRPRHGRITKQGRTHARTMLVEAAWQAVRGPGPLRAFYDRLARRRGNHIAAVAVARKLAVFVWQLLRHGEDYAWVRPALHAKKLRDLELRSGQPARRGQRGTGYEYNIARTRREERHRAEQAEIAYRRQTDAWARRGPKVPTGAAKEERR

SEQ ID NO: 354705 - protein, 343 aa, unidentified
MQAITTIGLDIAKSVFQVHGVDANGQVVLRRQLKRRYVLAFFEKLAPCLVGIEACASSHHWARQLQALGHNVRLMPPAYVKPYVKRQKNDATDAEAICEAVSRANMRFVPAKTSEQQSGLVLHRTRHLFIRQQTSVINAIRAHCAEFGIVAPVGRRGVEELLNVIANAKDEQVPAIARACVAALGAQLHRIKQQILEFDRMITAWHRCCETSRRLDEIPGVGPALATALVASVANPRAFRSGRDFSAWIGLVPKQNSSGGKPKLGSISKQGDRYLRGLFTAGALAVIRYAKIHGTRHRPWHTALLARRPTTVAAIALANKIARMAWAMMARGQHYIEPIALAA

SEQ ID NO: 354706 - protein, 457 aa, unidentified
MSIDTTDLSSDPVADRVVRVQVGIDAAVVANHQVTIRETTRDGQVQLSRFHASPTIAGLTRLSERLAAHPHVMAVAEPTSMTWLGLHVALQEAGCDLALVGTRHAARLRGAISGKNKSDVIDADVLAMAGDVFTLSPLRPPAPPQLALRRAVVRRGKLVIDGNRSRRRPISLARWAFPDVWQEFAGSWPTAVAVLTRWPDLTALASARRSSVTNVVAAHTRGVPDVDARAERIRAAAARTTAFWDGHLDLEALAWETSEHLRDIALAAEQIERATDQAHHYWAALYGDDPLLLSVPGMGPMTAPTIRAFFADASAFPTAKAAAAYVGLTPSTWSSGTVVQPSRAITKEGPAVLRLACYQAAGGARRVDPQLAEYYRHLMVERGHCHTQATVAVARKLVERTWTVLTRGQPFEYRDLDGTPLTRAAAKDAARALAVPKTVRARARARSAATHRSKLTK

SEQ ID NO: 354707 - protein, 338 aa, unidentified
MFIIGIDPHKGSHTAAVLDRTETVIGELRVCADRRQRDQLLGFAASFTPRTWAIESASGLGALLAQQLVAAGETVLDVPPTLSARVRLLDAGCTDKTDPHDARAAAIVALRHTRLRQVTPVDHTAVLRLLADRHHDLTGLRTQAICRLHALLCGLTPGGAGRLLSASQAGRILGGVRPLEPVEHERKRMALELLGDVRRFDNQLIATNERIVEAVLASGTTVTDIHGVGPLGAAIILGHTGDIGRFPTSGHFARYTGTAPIAASSGPKQRHRLNPRGNRQLNRALHVAAVTQVRNDTPGRAYYRRKLDEGKSRKEALRALKRQIAKTVYRHLVADAHQ

SEQ ID NO: 354708 - protein, 339 aa, unidentified
MTIVMGLDQHRAQITADWLDTETGEVKRGRVAPGDRAGVHKFLGRFDGQELEVGLEATTGWRFVVEELRGVGAVVHLAEPTETAARKGKKKRAKTDRADARHLRELLMIKRLPESWIPPDHILDLRARVRLRHTLSEQRSEWQQRIQATLYHHGCPQRRALMVGDGREWLAAQPLPAPAREQVTVATAMVDALEAQIAPLDKGLRAYARRQVGCKALMAHYGIGELTAVTILAELGDCTRFSSSRQAVRYAGLDITVFQSDQRRAPGHISRQGPPALRWALCEAAQVARRGERSPDREYYLAAKERIGGNRACLAVARKLLKRSYHTLRELGQEALAPA

SEQ ID NO: 354709 - protein, 292 aa, unidentified
MIAATTVVGIDVSRDWLDGFCLPGEQRFRLANSAEGHELLVAAIREMPGPVKIGFEATGGQEWVLWATLVAAEIDAGQLPPAQIKAFALSRGTRAKTDRIDAELIARFMQFRPEAGRRLPSENLRILRALTTRRAQIVDMRKRLSAQIAARRKQDIPADVEGMDADLWAMLDTQVGDLERRIESVIAQEETSAEKARLLRSIPGIGPVSAAMLIAEMPELGRMTSGEAAAMTGLAPVPHDSGGMRGSSCPLWVWPGRAKLCTTAGTRTIRRTPRSSCTCWRSVPCNSSTIRW

SEQ ID NO: 354710 - protein, 428 aa, unidentified
MNYNTQNAKIASITEKTLIVGIDVGSETHYARAFDWRNFEFTRKPLVFSNTQAGFLTFKAWIEEIQEKNGKTAVIPGMEPTGHYWFALGKFLQDNGMKPVHVNPHHVKKSKELDDNNPNKNDRKDPKTIAALVNEGRFSYPYIPTGIYAEMRSLSNLRFQTQEEVTRIKNRIARWFAIYFPEYKDVYRDLKAVSGRMILKAAPLPEDIGKLGVEGVNQIWRDAKLRGAGMKRAKTLVSAAEHSVGSKEAPEAARMELKNLLDDMDVYTSRLEELVQKIEGKLKEIPYIDKLLEIKGIGMVTVSGFIAEVGDIRRFDNPKQLQKLAGYAIVANDSGKHNGESRISYRGRKRLRYVLYEAAISLVGKNAGFREIHGYYRTRKENPLKKMQSVVAVACKVIRVFYTILTKGVDYDAARLLGDIKHPQMQTA

SEQ ID NO: 354711 - protein, 340 aa, unidentified
MDKTLPAVGIDVSKLSLDVRVDAQERPRRSPGHLANSGEGFLQLQGWFQEHGMPRVHACLEATGTYSDAIARFLFEQGHQVSVVNPARVAAFRTSEGIRTKTDRHDALVLARFCTQKRPALWSPTPASVQQLQVLLGRHEEVQVTCRQERNRLENHRLDPLTRQEIQQHIDWLQTQSAHALQRADNLLLEHGELRQACAHLDSIPGIARLTAMRLYSVFFDQQRFDGAAKLVAHAGLCSAKEESGTSVHRKASISKKGNALVRKWLYMSALAVKRCNPDFRQWAAELKARGKSGMCIVVAIMRKLLHLVHGVLKAGEDDDARKAFPSHYGRPTPPVEEAA

SEQ ID NO: 354712 - protein, 458 aa, unidentified
MNETRNQQDEIEGFPVLRTHVAGIDLGSERHWVCAPTVDGQGREVREFGATTPELEKMAAWLKERKVVSVAMESTGVYWIPPQEVLERHGLEVVLVDARELARVPGRRKTDRLDCKWIQRLHSCGLLRGSFRPQEQINMWRTLVRDKGTLVAERADWIRRMQKSLDQMNVRVHRAVADIEGKTGMSIIRAIIAGERDAGALAKFRDPRCRQSVEQIAEELSGHWREDHLFSLGQALKMHDAIEERIQAYEKEILRKLAEMEREDCRQQEAPKLRNRNKAKLIQQRGEEPMRPALYRMSGVDLTGIDAIGVGAVQAVLTEYGPDLSGFPDEKQFVSHLTLAPKKAISGGKPVKKKRKRGSASTRVAEALRMAATSMRHSQTALGAYYRQIARRIGADVAVFATARKLATLIYRMLRWGQPYVDEGAQAYEKRYREARLRRLTASAAELGYELILKPANA

SEQ ID NO: 354713 - protein, 335 aa, unidentified
MKRIAVDLAKSVYQVAESVRSGQVVQRKRLNREAFRRYIQEQAEPVEWVMEACGTAHYWGWLAQSLGHQVKLLHPRYVRPYRRSNKTDRNDCDAMLEAARCADMHPVPVKSRNQQQLQQLHGLRETWKKSRTQRINLLRGMLREAGIEAPTSTVAFIRAANELVDHVLAEINLYEQCMAECEQQLKRWHAEDEIVRKLDEVSGIGLLTASALTTAVGKPERFANGRQLSAWLGMTPREFSSGDRRKLGHISRQGNVYVRTLLIHGSRAALLAAQRCQARTPEKLTQLQRWAVETAARIGHNKAAVALANKLVRICWAVWCHERRFNGNWQSTKPA

SEQ ID NO: 354714 - protein, 366 aa, unidentified
MGEDNTFIGLDVHKETIAVAVADGKRGGEVRFVGEIENSPRALDKLIAKLERCRQRLHFCYEAGPCGYGVHRHLTSRGHTCSVIAPTLIPRRPGDRVKTDRRDAVVLAKLHRAGELTTVWVPDATHEAMRDLVRARVDAVEDLRRSRQRMNGLLLRHGRIYVGKPWCKKHRAWLAAQRFEQPAQQIVAQEYLDAIDTAEARRDRLAEQIAALLPAWSMAPVVTALQAMRGISLITASALVAEIGDLRRFDNPRQLMAYLGLVPSESSSGATTHRGAITKTGSNLGRRLMIEAAWAYRLPARVGPHMLDRLNNVPRAAREIAWKAQIRLCARHRRLTASGKKPQVVTVAVAREMLGFIWAIAREVMV

SEQ ID NO: 354715 - protein, 333 aa, unidentified
MNKSEPTFLPCGIEISSQVLVIDLSGKAPCEFSNTPAGHESLIRWLQRAGLEIRVCMEATGLYGLDLALALHAAGIAFMIVHPRSARNFARAMMQRSKTDRLDARVLREYAARMPFEPWHPPSPQALHLMAIAHRLQALTRMITAEKNRLHAASLSRALPAVVRYDLARSIQSLERALKRLTLAALELVLSDPQLARRNQLLLSVPGIGVTSALNLLAELLRLGPDCGVRQWVAFAGLDPRHYTSGTSVAKKTIISKSGNAHLRRALYMPALVTVQHEPHFRGFYQHLVARGKTKLQAIVAVMRKLLHAIYGMFKHNQPFDGSKVYALETSCA

SEQ ID NO: 354716 - protein, 343 aa, unidentified
MWFVGLDVHQRSSAVCILDRNGKVVKRVQIRGHASKVVELLQGLRRRFAVCYEASCGYGWLYDRLRRVAARVVVAHPGQLRLIFRSKKKNDRMDAEKLAKLLFLDEVPTVYVPSVEVRSWRNLIEFRHRLVGKRTRVKNGLRSLLRGHGLVALSGRRLWAAKGRAWLAEVEFPTSQAALQRDLLLDELTSYDAQLARVENELNAIAREHPGVYLLRTIPGVGPRTAEAVLAYIDDAKRFSQNKKIGSYFGLVPCQDQSAGLNRLGHITRQGPATVRKVLTEAAWQGIRRSEHIRAYFERIQREDRNRRKIALVATAHYLARVMQSMLCTGEVWRWDQQQQKAA

SEQ ID NO: 354717 - protein, 392 aa, unidentified
MIYVGIDVAKDKHDCFITNSDGEVLFKSFTILNNREGFEALFQRVESVSDDLTKVKVGLEATGHYSYNLLGFLLDKGLTTYVINPLHTNLYRKSLSLRKTKTDKVDSRIIATMMMSDMNLKSYSDTSYHNEELKSLTRYRFDKVKERAKLKSSVSRLICILFPELEKRVPTLHIASVYALLSEFPSADAVANAHLTRLSNLLSESSKGRYGKDTAVMFRDAARSSIGSHMPAKSLELKHTIKLIQELTAEIDEIEAAIKRIVDEEIQSPILTIPGISYRMGSMILAEIGDFSRFDSADKILAYAGMSPSTYQSGQLDNCYSHMEKRGSRYLRYALYNATKYVCHWDKSFGAYLEKKRSEGKHYNVALSHATKKLVRLIFAMEKSGKAYLPVA

SEQ ID NO: 354718 - protein, 406 aa, unidentified
MRVVHERCAGLDVHKSSVVACALLPEGKQLRTFGTMTWQLEQLADWLRSLEVPVVAMESSGVYWKPVFNVLEAAGFELLVANARHIKAVPGRKTDVKGAEWIGDLLRHGLLKPSFIPGREERELRELTRYRRTLIEERAHEVQRLQKVLEGANIKLEDIISNVVGLNGRRFLGALIAGDYDPQAVAATANYGLQRKRELLAQGLRGSIGSHQRFLLDQLLSHIDFLEQRITALDRELKQRSLPFEAAIAHLDQIPGVGTRAAEEILAEIGTDMSRFPTHRHLASWAKVCPGNNESAGKRRSGYAGKGNRWLRSILVECAWSASRKKDSYFKAQYHRLAARRGRKRALLAVGHSLLTLIYHLLREGVLYQDLGSNYFDQRDRSQIARQAVRRLERLGFQVALTEGAA

SEQ ID NO: 354719 - protein, 358 aa, unidentified
MPKQINKMDFTGQNIYCGIDVHKNDWKTTILVEETFHKTFTQPPDPQVLCSYLETNFPGGTYHAAYEAGFCGFWVQKELSRLGVKTIITNPADIPTTDKEKRQKEDFRDSRKIARSLKNGDLQAIYVPSDIALEDRLLIRSRYTIAKDLRRNKHRIKSFMHFYGIRLPEEFSNSKSHWTKKFMAWLGGIKLKDESGDAALGILIKQVDTLSCDLLSVKRQLTGLSNRPRFKQNCELLMSIPGVGLITSMRFLSEIVDIKRFCSLDKLASYVGLIPSTNSSGDSQRVGDITPRGHRALRTALVESAWKAVGKDTVLMAKYYQLCKRMDSNKAIIRIAKKLLSRMAFVLREKKKYEISVA

SEQ ID NO: 354720 - protein, 435 aa, unidentified
MRLQEYGRTPDKRKEYVHHPDLLLVGVDVSKAKHNACMGTQTTMSCRKFELTHTREGFQRFEQTLKTHLGKTRCQRLLIAMEPSGIYWHALYERLQGCGYEVCLVHCQAVRNNRKTMQEGTSKTDETDAYSVFDLLRQGKFFLPVARDPELKAAYRLMQRHMALKKRVSQLRNQLRAALHLAFPELNPLLKDLSQPTALRFLQTTPTPATVLHNGRTAFLAQWQRRRRCGQWRAEKFHTIYDLAQDSIGLTDPYHLDAFEITALAQDLADALAKHQMYLEKVLELLAHRPDFQLLLTLPRIGQPTAAAILTAIGDIGTYTNGKQLVKLAGLDIRLFESGSSIRQLPRISHAGSAYLRYWLYHYAKRLVAHEPHFRAYYQRRKQQSPGKGAGQRALVAVADKVIRMIYRIRTAKEAYIPQKDQMIAQYYAAQRKAA

SEQ ID NO: 354721 - protein, 483 aa, unidentified
MAKGSSVYERLTGGTRKRRKELQRRLHAENPGLELVHPNAAGIDIGNESHFVAVPPARDAEPVQEFGSWTADLNRMAEWLIACGIDTVAMQSTGVYWFAAYDVLESRGLQVFLVNASHTKNLPGRKTDVQESQWLMKLHTYGLLRNSFRPPEEIRPIRAIWRLRDRHVQDAGRSIQHMQKALTSMNVQLANAISDISGVSGQAIIRAILAGERDPWKLAALRDPGVKASAKEVARSLEGNWQDDQLFELQQAVDEYDFRQEKLVECDRKLQTYLGKLPTRPTPVTEPGGTPPPASGKKKKAKNMKAGNAPKSFDLAAEMKRVTGVDAFRIDGVSVMTIQTVVAELGTELQKSWPTEQQFTSWLGLTPKRDVSGGKVIRHTRDKSSNRVAGILRMAANSLLRSDSYLGARYRGLRTRLGSPKAIKAMARYLACIIYRLFTKGQQWVDRGAEQFEQNRQARDLARLQAQALARGLRLVSATETVA

SEQ ID NO: 354722 - protein, 374 aa, unidentified
MSHTIIYLGLDVHKDSITIAVLPEGAPAPSRVERLPNDLAKLHRFCERLAAQGEVRACYEASGAGYVIHRAMRDWGYPCDVIAPSLIPIKPGQQRKHDKYDAAQLARLYRAGELTTIRIPSEAEERVRDLVRCRETLQREVLASRHYILKFLARRGFVYREGTNWSTAHYAWLRRLAAASSPLVAEDQEVFGEYLGLLEYKLSRRDALDHRIGELALTPALAPAVNRLQCFRGVQRHVAMVLTTEIGDWRRFGSPRQLMAYLGLVPKERSSGDRERRGSLTKAGNSHCRHVLVQAAWAYRFQPKVGAALTARQRGQSPVVIAHAWKAQHRLHTLYRKLAFRTKPQIAVVAVARELVGFLWAVMQDQDVTKSAAA

SEQ ID NO: 354723 - protein, 348 aa, unidentified
MYDSKDIILAVDYHDENLVIRQFNCHSGEERLLKYRTTSRNIRKVICDSASEVAEVGGHVFWIMESTTGWARVKKAIGPLATMLVANVLQMPLPPKAYRRKTDKIDTGRILREFLNGSLPMAFQPSDELRQIRRLVATRESLVSRRTALRNWINRYLAHETWRSRAGLWSAKGMRSLKRFAASVEGPDKVVLSVKLRELEHLVELQTIVETEMLAIYKQWPEAQWIDEIPGIAEISAVSILARVGPIERFDSPEELISFAGLAPGIQQSDGTRREGRIGGGGTDKHLRHYLIEATFWARRVPRYFKTYERMLDKRGPKIARVVVARMMLRSIHKMLRAQVRFNRLRVA

SEQ ID NO: 354724 - protein, 406 aa, unidentified
MAVMIGIDPHKASHTAVAIDQSEQLLGELRVRSSADQVERLLAWAVKWPQRTWAVEGAGGLGYLLGQQLVSVGETVLDVQPKLGSRVRLLATGNVNKNDPNDARSVAVAALRSKGLRSVAAEDHAAVLKLWSKRRRDLGSLRTQVVCRLHAVLCDLVPGGHPKKEMTATQVARALAALEPAGAVQAARYELAMDFLADLRRIDTQMREAKKRLEVAVKASGTTLTEVFGVGPYVAGTVLGYVVDVSRFADRDHFAAYNGTAPIEVSSGGHKVFRLSRRGNRRLNHAVHMAAVTQAAHRHSEGRAYYERKIKEGKTNKEALRCLKRRISDAIFAHLVADAKRKTQSGQAGPGGQRGNGSVSSVAGSHPERQLFGQATPRPIPTIRRTVTSRGAKSQEHVEKKSRKAS

SEQ ID NO: 354725 - protein, 413 aa, unidentified
MDALRPSYFVGIDWASATHAVCVLDVAGRFVWQGMIPHTAAGLTDLVRRLARLAPPVEIAIERPSGLLVDTLVEAGFRVVPIHPNALKATRPRYAAAPGKSDPGDAYILADVLRTDGHRFRPLRAPSDATRALRAAVRTRDDLVATRIHLANQLRSVLESFWAGAAALLADIDSPIALAFLDTYPTPESAARLGEQRLARFLQRHAYCGRRSAAARLTRLRAAPEGRAAALESETRGQLVRSLVAVLRPLVEQLRELEGLIAAQLAQHADGALLQSFPRTGTVNAAQLLAELGDDRVRFASAAQLAAEAGVAPVTHSSGKHRGVACRFACNKRLRQAATTWADNSRHGHPWAAAVYRQARARGCDHPHAVRILARAWLRVLWRCWQDHTPYDPQRHGRALPFLTSPHRATAAA

SEQ ID NO: 354726 - protein, 366 aa, unidentified
MFYLGIDLHSKQLTISLRDDEGEVLLRRQVSTRGEEPRKFLEDVARRAGEAGYVAILEVCGFHDWLAELLPACGCREVVLVQAEKQHSRKTDRRDAHTLSELLWVNRDRLLAGRKVQGIRRVVPPTPQGRDDRRLTQLRRNIAADLTRVLNAVRYILRRLNFEQHCPTKGIQTVAARRWLETVVKLPDLDRLEMDQLLARWKLLDEQQKQLDQRIRERSATHEQVAVLQTVPGAKGYTALALASRIGDIGRFPTPRSLANYWGLTPSCKNSGESNRRLGSITKEGSALARFLLGQLVLHVLRRDAGMRTWYQRIKKRRGSKIARVAVMRRLAVIFWHMLKKRQPYVLCADLKKPPPRRRTAAASPP

SEQ ID NO: 354727 - protein, 319 aa, unidentified
MSKSLGQPESFVGVDVSEARLDVCVLPGGARASFAHDRRGLARLVGWLASMAQVLVVVEATGGLERALTHALDQAGIAVAVVNPRQVRDFARAAGLLAKTDQLDAYALALYGERLRPAPRRPRSAADQALAALVLRRRQLAQLIEADRNRLRRAAEPLVRASLEAHVGWLKAAIAGLEDAIEKRLATSTNWQARATLLTAVPGVGKVTVATLIGLLPELGQISGKAIAALVGVAPFARDSGLLKGRRTIWGGRRQVRDVLYMATLVAVRHNPQLTSFYAALLAAGKPKKLALTAAMRKLLTVLNAMLRDGTPWRAPQST

SEQ ID NO: 354728 - protein, 423 aa, unidentified
MEVMHERVAGLDVHKAMIVACVRIVSGGKIKRECRTFETSTASLETLLGWLAASGCTHVAMEATGVYWKPVWNVLSDGAFELIVANAAHIKNVPGRKTDVNDATWIADLVACGLIKASFVPEEAIQELRSLLRSRKQLTREQTSHIQRIQKTLEEANIKLDSVISDIMGVSGRRMIEAMIAGVRNPHKLAALADRRIKASPKVLYDALHGRLTDHHRFMLELYLGQHDALGKAITRIDEAVAEATARMDEEVGAGQATFRSLILLLCSVPGINILGATTILAEIGRDMSRFPTAGHLLAWAGMCPGQNESAGKRKSSRLRKGAPWLKTILVQCAWAATRKKDSYYGAQFKRLRAKHGAKKAICAVAASMLTAIYHMLKDGTQHQDLGADHFDRRSSEVKARHHVAQLARLGFHVELQPVAQAA

SEQ ID NO: 354729 - protein, 411 aa, unidentified
MEVLHERVAGLDIGKAVLVACVRTPGPRGGRCSQTRTFPTTTRALGVMREWLLAEGVTIAAMESTSTYWKAPFYCLEEVMDTWLVNAAHIKAVRRPKTDVRDSEWIAQLLECGLIRPSFVPPPDIRRLRMLTRYRVQLMGDRTREVIRLELMLEDASIKLSSVAASLTSVSARAMLTALIAGERDPQVLAQLAKGRMRIKIPQLVEALTGHFNAQHAQLARTMLHRLELVEEALVELDDVIATACRPWAHQLELLQTIPGVGLMVAQVILAETGGDMSRFPSAAHLASWAGLAPGIFESAGKRHQPEQQHGNKWLTAMLVEAAGSVGRMKGKNYLSAQFARFTSRRGMGRAAVAVAHSILVSVYYMLSRDEPYQDLGADWLARRNDEAHTRRLVAQLERLGHTVALDQPAA

SEQ ID NO: 354730 - protein, 346 aa, unidentified
MKHSVGLDVSVKETAICIVDEAGKVVREGKVATEPQAIIAFLSSAGVEYARIGLEAGPLSQWLVNGLSEAGLPVICVETRHMKAVLKAQQVNKSDRNDARGIAQMMRVGLYKPVHVKTLASQQARMLLTSRQLLRDKLQDMENELRGTLRNFGLKVGVVSPGHFEARIKELVAGQPPLEMIVVPLLTVRRVVREQLAKLDKMVLDQVRDDKLCRRLMTVPGVGPIVALTFRATVDQAQRFARSKTVGAHFGLAPRRFQSGERDYDGRVSKCGDAMMHTALYEAAQVLLTRTRTWSWLKAWGMQVARRRGAKKAIVALARRLAIVMHRMWVDGTEFLWRKEADTAAT

SEQ ID NO: 354731 - protein, 514 aa, unidentified
MSEGTAQPPFSRLCPRLLRKHSAWLIRHIPLTQKFHPQPLAPAKMADWVHAHYARVRSPYAAQDKPFASGFTNPYRNGGDIMLKINYMSTLFVGIDVSSKSNSVYAMDFEENKYLSTSFGNNQPGADELVNRIAACMQKHKNLDTLLIVLESTSVYSVHISNFLASSEVLMPYKPYVFCVNPKATANYRKSYIGMEKTDPTDAYLIADFARVGRTKKLEPWRGGQFIALKRLTRHRMHLSECITREKTYMVSNLYLKFSELQLLEGDDKPFGNLYGATSSAILTEFLSPQEIIDMPEEDLLAFLAQRSRNRICDLSKTSELLRKAARDSYRLDKCMYEPLNISLASSFNCIQAYQKEIRLIEQAIEKCIKGMNPNALIILQSIPGIGPVWASGILSEIGDISAFHSSDALAKYAGLYWPKGDSGDFISEDNQMSKAGNPYLRHYFGEAANSIRKHIPEYADFYARKYAEVSKHQHKRALALTSRKFVRLVFGLLAKNQLYTGEKLDTEHNTESN

SEQ ID NO: 354732 - protein, 368 aa, unidentified
MFTQRTAIGLDVHARSIRATALDTRTGEVLEAKLPGGNEAVTTWINGIAADHGPVAVAYEAGPTGFSLARSLAGMNYPVTVAAPSKLLRPSGDKVKTDARDALLLARLIKVDELVAVRVPTLVEESARDLVRAREDARVELMMCRHRLSKLLLRHNFIYDGSTCWGSRHEAWLRRIRKNELASLGTGTLAAFDAAFDAATFGLARRDRLDEQISQMAAESQFTAVTNRLCCLRGINTLTGFALAVELGDWERFTGRTIASYLGLVPSEYSSGTSRSLGGITKTGNTHARRLLVEAAWHHKPRYQPGKTMTDRWAKASAQAAARGDAGNRRLNQRWNTLASHKKKHTVACTAIARELAGWCWSLAVMDE

SEQ ID NO: 354733 - protein, 404 aa, unidentified
MVFVGIDWSEKHHDICIVDQEGEILAKGRITEGIEGIARLHKIVAEHTEQLEDAIVGIETDRGLLVGALVAAGYQVFAINPLSVDRYRDRHSTSGAKSDPGDAKILADIVRTDRRNHRPVAGDSELADAIKLLARAHQSFVWDRQRHVNRLRNALREFYPQALQAFGTELAHRDAVAVLSIAPTPELGRRLSRSKIASALKRAGRQRNVETRAEKIQAALRSEQLQAPQRVTRAYGSIVSSLVRLIGGLNEHIADLEQELKEAFEDHPDAKILHSLPGLGTVLGARVLAEFGDDRIRYLDARARKNYAGTSPITKASGRSRVVLARFARNEHLYDACHLWAFSALTKSSGARGYYDLQRSRGKTHNQALRALANRLVGILHGCLRHRQSYDDPVAWQSFIEKAA

SEQ ID NO: 354734 - protein, 347 aa, unidentified
MDMIGIDLHKRESQLCILDAEGHATERRIVTSRDRFTAVLGSRPPARILVEASTESEWVACHLEALGHAVIVADPNFAPMYATRSRRVKTDRRDARTLADALRLGAYRPAHRVSAARRHVRAELAVREALVRTRTRCIALAKALVRRDGLRVPSSTTANFVERLTTLPLGSTLAAELAPLIAVLGPLNVQIEAADARIAALGRTDPIVALLQTAPSIGPVTSSGLVAIADDVGRFPSAHQFEAFLGLVPGERSSGEKRRVGHITKAGNRRARYLLVEAAWRILRSKAADTAVLRAWAQRILHRRGKKIAAVALARRLAGILYAMWRDQRAYDAGQLRMPPSEPVHAA

SEQ ID NO: 354735 - protein, 347 aa, unidentified
MEQYAGLDVSLDSASVCIVDAQGKIVKEAKVACEPEVLIAWFAAHGTPMARIGLEAGPLSQGLFAGLKAAGLPVELLETRHVRAAFKAMPVKTDRKDARGIAQLMRLGWFRPVHCKSLPAQEVRALLTTRKLLQAKRHDVEMSLRGVLRGFGLKVGPTTPKTFEARVRELVAQHGTLQTIADALLNARAVLEQAFEALEKRLSALARCHAPTRQLMTTPGVGVIVALTFASAIDDPARFRSSRTVGAHFGLTPRKHQSGETDVTGRISRIGDHGVRVALYEAANVILTRAVRGSDLKNWALRVAKRAGMKKAKVALARKLAVVLHRMLADGTTFMASPAARAVAGAA

SEQ ID NO: 354736 - protein, 354 aa, unidentified
MKEVIRQSIGIDCAMGEHVAGFSSMDADRTVSHVSSITFKNGESAFKKLEKWIKKHTPGPNLVIVMEATGVYHEKLACYLTDRNYFVSVVLPNKAKYFAKTLDSKTVTDKISAQSLATMGLEKKLIKWEKPSELFNQLRQLTRERDQVVHERSQIKCQLHAESSGAWPNSSSIKRMNQRIKLLTKQVQEIELEVKELVKNDPDLSAKINRICTIKGVGVLTAITVVAETNGFRSIRNKKQLVSYAGLDVKQHSSGISVNKKSRISKHGNKFLRKCLHFPALAAIRFEKNQKELFVRLVSKHGIKMKGAVAVQRKILVLIYTLWKNETVFDPEYELKKSRNELGQSRKTALKELA

SEQ ID NO: 354737 - protein, 341 aa, unidentified
MDITTIGLDLAKSVSHVVCCNQAGKIVRKRMLRRTQILHFFSELSPCLVGVESCASAHYWAREIAKYGHQVKQIAPQHVKAYVRGNKTDFNDALAIAEAVVRPEMRFVRTKTQTQQDIQALHVMRKKCERDRTANSNEIRGLLNEYGIILPVGISHVYKSLPKLFDRQVENGLSELFKELLERHYQKLVELDEHLNWYTKKIKQLSQHEACRRLQSIPGVGPIIASALYQHIGNGSEFKNGRAVSASLGLVPKQHSSGGKHNLQGISKRGDSYLRTLLIHGARAVMRVSKHKETPLSQWIKRIEQTRGRNKAAVALANKLARIAWALLAQGGDYQPELTTA

SEQ ID NO: 354738 - protein, 410 aa, unidentified
MRLFVGDDWAQDHHDVEVMNEAGRVLAKKRLPGGVAGMAGLHELIGRQLGDDDAAEVVIGTGTDHGPWVGALVAAGYSVFAVNPLQASRYRERHGVSGAKSDSGDAHMLTDMVRTDSHQLRAVAGDSADAEGLKVVARTRKTLIWERTRQVQRLRHQLLEYFPAALEAFDDLDAPDTLELLGKAPEPARAAKLTRAQVSAALKRAGRRNITERATAVLAALRSERLGQPPAVTAAYAVTVRSLIAVITTLNHEVKTLQGQVEADFGRHPDAEIYRSQPGMGAVLGARVLGEFGDDPHRYADGKARRNYAGTSPLTRAPGKKKVVAARFICNSRLVDALNAQAFSALKASPGARALYDELRARGIEHNDALRRLANRLVGILHGCLKTRTLYDEATAWSHRQNLPQSSVAA

SEQ ID NO: 354739 - protein, 349 aa, unidentified
MGQYIGIDLHKAKSFVTRLNGCGRVLEQVELPHANGALQQYLARVPADTRIAVEATGNWMWLYELIEDRHPDLVLAHPLKTKAMASARIKTDKIDATTLAQLLRADLVPAAYIPPRAIRDTRETLRYRASLVRLRTQVTNKITAILSKTGIQTPTKTACGVKSRRFLATVPVRPCYRLGLDGYLRLVEALTTEIRQVTETIEAHVQTDPQAQLLCTMPGIGAYSALLIVSEIGDVHRFPDSRHLCSYAGLVPSVHASGGKTRLGRLTKQGSSWLRWILVELSVHAINGAPQFRSLYYRVARKHGRNTGRVAVARAMLKTIYAMLKYQEAFRPREASTGSTGQRPGVMTG

SEQ ID NO: 354740 - protein, 315 aa, unidentified
MDETGCYVGIDVAKDSLDVAVVPSREEWRVVHDGAGLAAVVERVRGLAPAGVVLEATGGWEAPLAGMLAAAGVPVAVVNPRQVRDFARATGQLAKTDAIDARILALFAERVRPEARPLPDQAAQALGALVTRRRQLLEMLTAEKNRLGPAPKALSKSIQQHIDWLNQSLAAVDRDLEDTLRQSPLWREKDDLLRSVPGVGPVLSITLLAELPELGSLNHKEIAALVGVAPLNRDSGTLRGRRTTWGGRAPVRAVLYMAALVATRHNPVIRAFYQRLLARGKAKKVALVACMRKLLTILNAMLKHQTPWLPGEASV

SEQ ID NO: 354741 - protein, 352 aa, unidentified
MVYIGVDLHRKKTQVAAIDERGGLVFNRKVRTDPGELQLLIDELRPQPVEVAFEATFGWGWFADLLAELGIPAHMAHPLTTKAISTARVKNDSVDAKTLAHLLRTNLLPEGWIAPPEVREARRLVRMRSALVRLRTKLKAQVHALLGEHGIQPDVADLFGKRGRALLDQLELRPTSQRRLEACLRLIDEISEEIDRAEREIEESIKEDARVQRLLPIPGIGRISAATILSEVGDISRFPSADKLCAWAGLTPSEHSSADNVRRGHISKQGSRWLRWIMVEAAVHAYRDAEVRQLFLRVARRRGAKIARVAVARRLLTLVFYALRSETGCRSYPVPISSTSVEARSKAVMASR

SEQ ID NO: 354742 - protein, 413 aa, unidentified
MTQQPPQVWAGIDVGKGHHWITVVDADGDPLWNRKVINSESDILAALGEVLDAADQVTWALDLVDGPAALLLGTLANHGQNPRYVTGSKFAAFKVSFSGQGKSDLKDSYIIAEFARCLRRQTVPVPAPSRVTQELTLILAHRNGLSAERTRTINRLRALLTSIFPELERSFEFARSDGPLVLLSGYQTSAAIRRMGESRLTAWLVKRGVRKAATIAEKAVAAAKNQDAAACGEVLAAELVAELAQKITQMNARLKELESKIKELLSQHPQAPIVLSMPGFGELLAAELLAAIGDISRFPSAGRLAVASGMAPVSRDSGSNTGNRRRPTQYSRPLQRAFFMSSQSACLTAGTWEKEIYLRKYQGYTHDKGRHKKAVIAVARQRVSVLWAMLRDGRLYEREYNPREKAADEVQTA

SEQ ID NO: 354743 - protein, 350 aa, unidentified
MTILENRTITVTGGVDTHLDFHVAAAIDSNGGVLGVETFDTTTVGYQHLVGWLGAFGTVSLVGVEGTGSYGAGLTRHLTSKGIRVVEVDRSNRQARHRAGKTDVVDAIAAARAALTGTATGTPKSRTGNIEAIRVLTVARRSAASEWISVLSQMRHVTFTAPDEIRARFIGLSPITLVRTTAALKPRRTDPDVVRYTTLSTLRELGRRALFLREQKMRLNTEMRPLIREVAPSLLAVYGVGFDVAAKLLIAAGDNPHRLRSEAAWAHMCGVAPISASSGKIQRHRLNRGGNRQANSALYRIMLTRMASDQRTKDYVAKRTADGKTMGEIGRILKRYIAREIYPHLLSTID

SEQ ID NO: 354744 - protein, 363 aa, unidentified
MEEDRMNSIGVDVEKRQCRASIKDEHGRILEERSFTNDAVGIRNFLSRASRYGSARAVVESTGNMWIRIHDTLEKNGIDTVLAHPLKTRLIAEAKIKSDRLNSRILADLRGDLVYESYVPSKEFREKRSLVRHRVALVKARTSIENKIHALLDKYEYKTEFTDIFGKAGLEWLKGLELLPIDRVIMETSIASIENLTIQIGIVSKHIAKYAWNSSDVKLLLSVNGLDVLSAMVIATEIIEIRRFATHWKLVAYTGLAPGQRESAGKRRRGKIAKQGSRWLRWIMIQSARRAIVHDERFRTYYQRIRDRKGDAKAITAVAKEMLVVIWHILSKAERYRGVKEGLYQRKLAKLERIALEPEGIDE

SEQ ID NO: 354745 - protein, 357 aa, unidentified
MERYIGLDPHGTSCTFGVIGPSGRKLRHDVVETNGAALVQYLRNVPGRKHLCLEEGTQSAWLYEILSPHVEEIVVAGINESRGQKSDVLDAFRRAEELRTGTIETPVFKAPRVYSRLRELARVHTMLVRDVVRVQARVKVMYRARGIATPGKSIYGPGKRDQWLNRLPVSSRWATEKLHDEYDQLLELKREAERELVAEARKHRISRVLATAPGLGPIRVAQLLPIVVTPHRFRTRSQFWAYCGLGIVMRSSSDWVQTQAGGWARAQVQQTRGLNRRHNSTLKGIFKGAATTIVTRLHAEPLYEHYLRLTSAGTKPNLAKVTIARRVAAIVLRMWKDEKEYDPGKLKQQAFLASAVS

SEQ ID NO: 354746 - protein, 411 aa, unidentified
MEVVHPVCAGMDVHKGSVTVCLVRRDKMGKRCKELRTFSTMTNSLLEMRDWLARFRCPVIAIESTGVYWKPIFNLLEDEFEVMLVNPAHLKHVKGRKTDPEDASWLADLLEHGLLQASFIPPVEIRDLRDLTRYRRRMIEEKSAEVNRVQKILEDANIKLASVASDVMGVSGRAILAALLEGKMTAEEMAELSKGRLRDKREALQESLVGRFRPHHGLLLSKMLEHIDFLDGAIADCDKAIEELMRPFVLMIEQLDAVPGVDMRSAQDIIAEIGTDMSAFPTHKHLCSWAGICPGNNQSGGKRQSGKIRKSNKWLKAALIRCAHAAGRSKDTYLGAQFRRFVGRKGTQRAAIVVAHSILESIFFILHDGVDYKEMGPAYFDRVNKEHIVRQYKKRLEALGLVVEVRVAQAS

SEQ ID NO: 354747 - protein, 382 aa, unidentified
MESLVYVGMDVHKDTYSLCCYAPSEGSFFAEARIDADARLVRKYLEEVGKARPGSRFATCYEAGCLGFSLYKELTKLGIDCKIVAPTTLAKEPGSSAKKTDRKDARMLARNLAFGLCRFVHIPDEIDLETREFVRMRMAHKKALKKVKQQILAFCLRLGKKYGEGGRGKQYWTAAHLDWLKKLGLSPAMREILDEYLDTYDKYAAKLERLDGRLLERSDEERYKEPTDRLNCLKGVTKQGALTIVSEIGDFSRFATPNELCSYLGLTPGQSSSGQSVNYLGITKQGNSIVRWQLVESAQSIVRGTPGKKSKRTLAKQSGMPARVVSYCDRAAERMMRKFNRLVLSGKERNKAVTAIARELACFIWGLMTDNLDGRRQSAPSK

SEQ ID NO: 354748 - protein, 391 aa, unidentified
MVCVGIDVAKDKHDCCILDSDGMVRADCFTIPNNMDGFKQLLQTIRNCTKKSDKIKVGLEATGHYSYNILGFLLDNGLPTYVINPLHTNLYRKSLSLRKTKTDRVDARTIATMLLSDVDLKSYTDIAYHNEELKSLTRYRFDKVQECAKLKQSVSRLATILFPELEGLVSSIHGTSIYALLGEYPGAKQISEVHLTKLTNLLTTASKGRYGKEKAIQIREAARASIGSVMPAKSLELKHTIKLIQELASEINEIEDSIQKIIDELNPPILSIPGMGVNSAAVILAEIGDFSNFSSPDKILAYAGCSPSTYQSGKLTNCYAHMEKRGSRYLRHALYNATKYVCYWNPVFAEYLAKKRAEGKHYNVALSHAMKKLVRLIYALQKSGKAYLAAA

SEQ ID NO: 354749 - protein, 410 aa, unidentified
MEVLHPHCAALDFHKETVVACVRHMSGGKVKTAVRTFATITGALLDLSAWLATEQITHVAMEATGVYWKPVWHILADGEFQLVLASAAHVKNVPGRKTDVKDAEWLADLMAHGLIRASFVPDQPTQQMRDLLRARKQLVRERASHTQRIQKALEDANIKLDSVITDIVGLSGRRILEALVKGETVPQALATLAHRRIHASTDELEAALRGRVTTHHRFLVKLHLDQIDAIDAAIQSIDKEVDGNIEPFRAAAELLTEIPGISQLAARIVLSEIGLDMSRFETGGHLVSWAGLCPRNDESAGKRRSNRMKKGAPWLKTILVQCAWAAARTKGSYFQTQYHRLRSRRGSKKAICAVAASLLTTVYHMLKNGTCYQDLGANHFDQQDKARHIKRLVGRLENLGFEVKILPKAA

SEQ ID NO: 354750 - protein, 341 aa, unidentified
MSIITVGIDLAKLVFAVHGVDENGKAVLVKPKVSREQLLALIVQLPPCVIGMEACSGAHHWARQFRQHGHSVKLMAPKFVTPYRMSGKRGKNDAADAAAICEAVTRPNMRFVPVKEEHQQIILCLHRTRQGFVEERTALYNRLRGLIAEFGIVLPQKVTCLRREICAHLEELPGYANQCIGDLLAHADRLDERVADYDRIIAKAARDDARSKRLMQLPGIGPTTASAMLASIGGGHDFDNGRQVAAWIGLTPGQYSSGGKARLGRITKAGDPYLRSLLVMGARAVLSSLGDKQDRFSRWARNLQERRGYWRAVVAIAAKNARLAWAVLKYGEDFRLNASAA

SEQ ID NO: 354751 - protein, 387 aa, unidentified
MARKRTLSTLDTSIAYEAVGLDLAKTDVALAAFDSDHKEPYLIDRIPYDKLYELLADMAPTLVAMEPCSGAHQIAEQIQELGHEVMMISGRHVQAWVKDHCNGQKTDLNDAFAILNLAYDRWLTPIRGKTREECRLLALQASYRQLKGQRTKTMVHVKATLHAWGFPIRAGSFNQKALHELIDANREAFGDEVVETLHLMIDRVRDLDHDIATVLKLLTEATKRDPRASLLRSIPGFGVLTTSRWCAVVGDVARFDSPKQTMAFIGLVPNNRITGHHTETSSGREARGQGKMSKRGDKMLRSLCILGAGALCLMVRNDRLPDCPFVASIKERLASPRPWFKVLVYVAAKLVRIATALLKYGETFSYEKAGISKAVLKQWELEQAKAA

SEQ ID NO: 354752 - protein, 473 aa, unidentified
MTILVGIDVAKDKHDCFIMNSEGEVLAKSFTILNNKEGFDFLYKKIQSVSSSDKIKVGLEATGHYSYNIIGFLLNKDLATFILNPLHTNLYRKSLSLRKTKTDKIDSKTIAMMLLSDISLKSYSDISYHNEDLKSLTRYRFSKVEERAKLKTSLSRLAQILFPELEKLVPTLHMTSIYQLLEEFPSASAIASAHLTRLTKLLSKASKGHYNRETAIKIREAAKNSIGSNMPAKSLELKHTIKLIRALTIDIGEIEAEISKMMDKIASPITTIPGIGNNMGAMIISEIGDFSRFSSPDKILAYAGFSPSIYQSGKLDNCYAHMEKRGSRYLRYALFHAAKLVCHWDKTFADYLAKKRAEGKHIDVSQQTIDYIRMGMSATTQEGGTASYFAGLPKPIAGKTGTAENSHGRDHGLFVAYGPVDDPELVVVCIVEQGGFGSVAAGPIFFKAFEEFFQEKGYMPRPDKDAPKKDTIQ

SEQ ID NO: 354753 - protein, 429 aa, unidentified
MNYTQNEKIMQVKVSTLVVGVDIAKNKHAARFFDFRGIEYDKAIFFENNEAGFKKLLNWISKVSEKENKTNVIVGMEPTGHYWLPLEEYLRRKTDFLRVVVNPAHVKKSKSLDDNSPTKTDRKDAKVIAKLVIDGRYSIPHMPEKEYADLRIAMTHRERLVKDIINLSNKIQQLIDKYFPEYQTVFKKWSGKASIAVLKELFLPDLILEKTDEEIVEIFKKGANRGVGIKRARKLKKAALNSIGIKEGGEFTRYELRNLLEQYELLNNQKELLEEKVEKLFNSMEEAKYMESVKGVGIITVAGFIAEVGDINNYDHPKQIQKLAGLNLKEHSSGKHLGQTRITKRGRPKLRALLYRVMLPILAKNQEFKQLHEYYTTRRDNPLKPKQSMIALACKLIRIFFALGQKHVMYDGQKLMNDINRNLDLQEVA

SEQ ID NO: 354754 - protein, 484 aa, unidentified
MAKRKESTYERLRKGQPLNRREKREVAQRLNAADPGWEVINRHAAGIDIGNESHHVAVWADRDEQPVREFGSWTGDLERMAEWLKSCGVESVVMQSTGVYWVAVYDVVQRHGLQVHLVDARGTKNLPGRKSDVQECQWLLKLHTYGLLRSCFLPPEAIRRLRTVWRLRDQQVKEAGRAVQHMQKALTEMNVQLHNVISDLAGVTGQAIVRALLKGERDPLQLAGLRDGRIQAREEELVASLRGNWKDDALFELQQSVDAYDFHQKQITQCDERLQEYLAVLPSREVAAPEAPGEATEASGRLRRRTSKPRKPKGNQPAFALKPELERILGVDPTTIAGIDVMTVQTVLAEVGADLSAWKTERHWTSWLNLAPKRDVSGGRVIRHVREHRTNRVGNAFRMAAQSLLRSESYLGARLRYLRAKLGAIKAVKAMARHLACLFYRLLTKGQAWVDRGAAEFERRRQEREFAMLQRKARDFGMTLVPAA

SEQ ID NO: 354755 - protein, 312 aa, unidentified
MTETNSVVHAGLDIAKAQLQLHLENQQHVLPNTVTGHQRLIRLLRVVAGVHVVCEATGGYERKVVSALHSVNLRVSVVNPAQVRHFALAQGQRAKNDPIDAALLTAYGHALRPNATPVPQPVLAELRELVQWRDHLKEQLVRARQPAEHATLAFVRRQQSKEAKHLEKQMAAVEKELAAALARHPRWREQVQRLAELDGVGTLTAVSVLSQMPELGHLNRGQAAALAGLAPWTRQSGPWEGQRHIGGGRAVVRRALYMSAVALARQTGSTLGKFYARLRAAGKPAKVALTAVMRKLLLQMNQVLKYHVPDPA

SEQ ID NO: 354756 - protein, 377 aa, unidentified
MKRIKFVGLDVHVETIAVALAEQAGEIRSLGVIPNREDSVRKLVKKLGPVEDLQFCYEAGPTGYALYWQLTKLGAKCEVVAPTLVPVKAGDRVKTDRRDALKLARNYRAGELTAVWVPDAAHEALRDVVRAREAAKKDQLRARHRLGKFLLRHGRRPPMGVKAWTMKYLEWVKREVHFEQMAQEATLLDYLHEVEHLAARIARLDGAITEAVKCSPPQMRAVIEALQALRGIAQISAATVVAEVGELSRFAKAKQLMAYAGIVASEDSSGERTRRGNITKTGNAHLRRVVVEAAWAYRYRPAVGGTLRKRQETVSEEAKEIAWKAQQRLHERYRKLLARGKNKGVVVTAVGRELLGFIWALGIKVETAQKESLQRAA

SEQ ID NO: 354757 - protein, 496 aa, unidentified
MSAFLRRSGQNPHRWATKGMKSKKELLAKKKHIKRKSAKAKHNRVLGIHNPHAAGADIGATEIYIAVPPDRLEMNVRCFGTFTQDLRAIVQWLREYKVTSVAMESTGVYWIPLYELLEQEGFEIYLVNARHVKNVPGRKSDVQDCQWLQYLHSVGLLRGSYRPAQDICAMRAISRYRDNLVHFGAQHLQHMQAALDQMNLRLHHVIADLSGLTGMAIIEAILAGERDPRQLAKLRDPRIKASQETIAKALEGNWRVEHLFVLGQALQSWKQVQQQLGQCDQKLGELSSQLEGKIDLANSPLPPSAKYCGREPRSKNQPNGPWREELYRHFGVDLTEVPGLSLGVVQTLFVELGADLSAFPTPRHFAAWMGLCPDNAITGGKVIRRGTRRNRQRIRLALRLAATSLHHNKTHLGECFRRLRARLGAPKAITAMAHKLARIIWHLVTHRVGYDESIFAEREEQLLRRKQRQLRNLAHSLGFTLVPNPRPAATSNAEVS

SEQ ID NO: 354758 - protein, 421 aa, unidentified
MYVAFCGRKDGSRMDVLHDRCAGLDVHKEWVYVCVLIGQGSRQRRYKQKFGTFHHQLIALRTWLLEHGVTHVLMESTGVYWMPIYDVLEGYVEVVVGNAQHIMNVPGRKTDESDAEWLAKLLRFGLVKPSFVPERSFRELRQLTRYRRALVQARASEQNRIEKHLQIAGIKLSSVTSKMFGVSGTDMLKHIADGKTEASTLAALARGRLRKKSEALEQAFAGPISGHTQKLISLQLAELDRLSSTIAEVESNISRKARPYEAAIALLDPIPGINIPAAIDIVAEIGTDMTHWQTHRQLAAMAGVCPGNYISAGKRLKNRSRQGNPYLKSILVQCAASAINKNGSYFQAKYKRLRQSRGHKRAILAIAHALLVTIYYILKRQEPYRDLGANHLEAVDHTRKRTSLVRQLERLGFRVELNAMT

SEQ ID NO: 354759 - protein, 315 aa, unidentified
MVSYLGIDVSSLSLDAAVRPQGTRLHVSNDPAGFEALLDGLCGLSIKRVLLEATGGYERNILRFLQDAGYKVIRVNPRRARAFAESIGVKAKTDAIDAEVLAHYAEVIPDQPTLRISPERALLRELLQQRDRLVQQRDDDRRRLKQAQFSAVSDFLKANLQHFKSQIKLIEQAISQQTEALKDERVTQLVQVKGIGLVTAGKLITLLPELGRVESKEIASLVGVAPFNHDSGKSVGKRSISGGRFEARRSLYMSCLVAIKYNPALKARYEALRGRGKVAKVALVACMRVLIVRLNAMLRTGKPWLDLVLPQPMRT

SEQ ID NO: 354760 - protein, 339 aa, unidentified
MEKIYDICCGIDVHKKIIVVCLQYPRKKEIREFGATTWELMEMAEWLLKNNCQIIAMESTGFYWKSIYNIMESYDLHAIVVNPAHMKAVPGRKTDVKDAEWIAELLQHGLLQPSYIPSKDQRELRELVQYRKSLVGERTGELNRLQKMLKGANIKLSGTVTNINGKSARSILEYILEGKEIDETKYDEMYEKRIIAHNLKASKEQIVDDLKGFMSPLQKRMLKELLQHLDELNIHIENLNDEIDHFMKPEEKHASQVIQDVTGIGNTSAQTIIAVIGTDMERSPTDRHISSWAGLCPGDHESAKRRKSGRTRKENNLLKSTLVLCAHAAVRHKSSYFHA

SEQ ID NO: 354761 - protein, 402 aa, unidentified
MNAVGIDISKGKSMVAIMRPYGEIVSAPFEVKHTTSDINSLVALINSVEGESRIVMEHTGRYYEALAHQLSQANLFVSAINPKLIKDFDNDSLRKVKSDKADAVKIARYALDKWQNLKQYSVMDELRNQLKTMNRQFGFYMKHRTAMKNNLIGILDQTYPGVNTYFDSPARSDGRQKWVDFASTYWHVDCVRKMSRNAFIGHYQNWCKRKKYNFSQSKAEEIYGKAKELVPVLPKDAITKIIIKQAVDQLNSASTTVESLRTLMNEIAAKLPEYSIVMAMKGVGTSLGPQLMAEIGDVSRFTHKGAITAFAGVDPGVNESGTYVQKSVSTSKRGSSSLRKTLFQVMDVLIKTHPQDDPVYQFLDKKRAQGKPYYVYMTAGANKFLRIYYGRVKEYLASLPES

SEQ ID NO: 354762 - protein, 374 aa, unidentified
MNKNTIKYVGLDTHKNSIVIALADEDRNGEVRTYGTIPNSFDAVDKFIRKQVSQNIELHCVYEAGPTGFGLCRYLRANGIDCIVTAPSMIPKKDGDRIKTDRRDASNLARLHRAGELQEIYIPTRNDEAMRDLVRSRDDARHASRKAKQRLLSFLLRHGITYSGKTNWTQPHFNWLAELKLEHPAQQIAYQEYIGAIHEATRRLDRLDKEISRLAKQWERAPLVSAIQALRGVAELTAVTIVAELGNLERFTNPKQLMAYIGLVPSVYSTGTRTRHGGITKTGNGFVRRVLVEASWTYRLPARITKHLLKRNQGLPSAIQDISWKAQLRLCGRFRRLRAKGKPRQVVTTAIARELIAFVWAINRELNTPVRTSR

SEQ ID NO: 354763 - protein, 342 aa, unidentified
MSVMIGIDPHKGSHTAVVVNPDEVVIDETRVKATADQLVELQEWASGYKDRCWAVESARGLGYLVSQQLVAAGEQVIDVPAMMAARVRLLGSGKSQKNDPNDARSVAIAALRHPGLMLVGSDDHTRVLGLLAKRHRDVARLKNKAACRLHALLMELTPGGLASEMTVTKANALLESVAVADEMTRQRVVIATELVDDIGRFDAQMRASKKRIRVAVAASGTSLCDIRGVGPIGAAIILGSVGDIGRFPSPGHFASYNATAPIDASSGERKRHRLNPRGNRKLNHALHIAAVTQLRYPNEGRDYYDKKLAEGKTSKEAIRALKRRISDVVYRHLVADARHHIT

SEQ ID NO: 354764 - protein, 341 aa, unidentified
MSTITIGLDIAKHVFQVHGVDATGQVVIRKKLRRSEVLEFFKELPPSLVGMEACGTAHHWGRELTALGHDVRLMPAGYVKPYVKRGKNDAVDAEAICEAVTRPTMRFVEIKSAEQQSVLMLHRTRELLVRQRTALINSLRGQLAEFGLIAPQGVWRIPQLHALAQGATSSVLPDAMRACVELIMGQIEDLQMRIGTIGKAILACHRASEMSQRLQTIPGIGVITATAIAATVADANVFKSGRHFAAWIGLVPRQTGTGGRIHLGSISKKGDPYLRKLLVLGATAVIRYAKNKPELAAWINALLERRPARVVTVAVANKLARIAWAVMSRGETFRQASSAIA

SEQ ID NO: 354765 - protein, 321 aa, unidentified
MPILAELVDAVVGVDTHRDTHEVEIAHPNGAVIATCQISNATSGYAEVLAWILDHAPGPRLVVSIEGTRSYGIGLARAVSAAGVAVIECEQPTRNTRRGRGKSDPIDAHLAVLSALRLDADRLPTPRADGDREALRILLGARHELTTTNTAQTNRLRALLLTGDDHDRDRARGKLSDTALTTLARRRLPRDADRAQAIRHAEIRRLALALREATHALAANRAQLQAIIDELAPGLTDRRGIGPVSAAQAVVSFSHPGRCRNEAAFAALAGTSPLPASSGNTVRHRLNRGGDRALNRAIHTIAMTRARCCPTTRAYITRRRG

SEQ ID NO: 354766 - protein, 424 aa, unidentified
MGKKNSSPAGLGVLYERVCGLDVHKKVIVASLRILDPRAGTVKITRRQYGTMTADLLELRGWLAEAKVTHVAMESTGVYWQPVFNLLEGHMEAWVVNAQHIKKVPGRKTDMKDADWIAQLLQCGLLKPSFVPDRQQRELRDLTRQQTKLVQQRNAVDNRIQKVLETANIKLGSVASDVLGVSGRKMIEALIAGEKDVTVLAELAQKKLRDKIPQLQRALAGELTEHHRFLLQQLLGQYDFLEKEIARTSERLGVVAPPSFRAAVEQLDAVAGVGERGAKALLAETGTDMSRFPTHKHLASWAGQCPGNHESAGKRRSGKTPAANRHLDAVLTEMAHAAVRTKNSYFKAQYHRLAGRRGKKRAIGAVKHSLLVTVYFMLRDDKPYKDLGVDYFDKLNPQQSIRYHVRKLQELGQEVELSPMADAA

SEQ ID NO: 354767 - protein, 457 aa, unidentified
MESYYMGIDVSKGYADFVILDAKKDVVEPNFQLDDTFGSHCKLFEILKRFFDRHSGSVLFAAVESTGGYENNWLHSLGGFQGALDIRSARLNPLGVRANSKASLRRVITDKISARDVAEYLIAHPEKVTYQQEDSLAGLRRQWGFVRLLVKQKTQILNQFESLLYTANPELIAYCQSGVPAWLLKLLKQYPTAAKLAKARATSVARIPYVTAGRAKELIDQAKKSVASATDEPTGSLITAMAEQIIRMEETIRIQSQQMAKQCAIPEVALLKTIPGISDASAIGLMLEIQSVKRFASVKKLAAHFGLHPAFKTSGDGTSGVRMSKQGRKEPRKILFMVAMVALTANPHIRKIYEEHTDKGMKKMAAIGLCMHKIMRIIYGMLKNNQAYDSQVDQKNRENRTARKSVHTAKNENRRYEIFDQQAPISRRQSNKRKEWKQSQGDNITQCGIGVPIPSAA

SEQ ID NO: 354768 - protein, 353 aa, unidentified
MSPKEESDMWHSGMDVHSRLTAFHVLDGAGQRLAAGTIPTTEASLGEFCRALAKATHFYLEASTGSAWVARVIDANGHRVTVVDPNRIRAISGSPKKTDASDAATLATLGRAGLLTAVHVRSAETDRFRRVLTARHALVRARANLMRATRSLLRSEGHLLPRCDGDDFAARLRGTWEIPEGHAETVEPLAEAIDRLTGQVLELEKHVAEVAKANAPVVRLLRGIPGVGELVATSFMALVEDPARFRSSSEVAAYLGLAPWVNESAGKRREGGITKRGNRATRALLVQAAWSHMRCGMDTALKRWFYKLEKRLGGKKAITAVARKIGELMWTMWRKGVGYEPFPPSARRSPAPT

SEQ ID NO: 354769 - protein, 410 aa, unidentified
MKFMGIDWKDKGYTVRIIDKEGNDVSGAFEVEKKKEDFSELIAKIRKYCEDEEVLIGIETERDVIVDYLLALGYKVFLLCPNMIKSFRERHSVSGQYTDSLDSYVIADAIRTDRKRLNLIKPRNDKIRKIEFLLRHRRKAIEDKNRLMNRLTAYIKEYFPAFLDCFSDISRPTALSFLKAHPFYKDIKDLSKEDIMAFLKKHNYYRKSGVSKIWKAINKEQLKVDPIVEKERSRSARFLVKRLEMLNEEIREYEKELTNILEDDEDAKVFRSLPGSADILTPGLMIIFGKKRDRYKNAQEINSLCGMVPVTKSSGKWESHLFRFGCNLFYRNILTKLAYTSLNESKWARAYYNNKRAEGKSHYHALRCLARIWVKVAFALWEKREKYDENKHMAAIQKHNINNELVRKSA

SEQ ID NO: 354770 - protein, 310 aa, unidentified
MTETKTNYCGADISKEWIDIWSQGRVERIANTARAVRAFLKKLPVGTLVAMEATNDYHLLLADIATELGLTAYVLNPRITHHYQEALALRGTTDALAARTIASFIQHHHPDVRVYVPADPQTKQVRTLLRRRSKLVDVCVQLRQSVSQISLIRKEVEVAIAKLRKAIEKIDTLVDEMMQGNELRERLQTMRGIGPVTSAVIATELEAHDFATSDAFVAFCGLDPRPKESGKHKGKRKLSKRGSRSLRTSLFLAAMSASSTKLWRPYYEKTKAKGLAKLQAILVLARKLARIAWSIQRHNTVFDPARVPTA

SEQ ID NO: 354771 - protein, 352 aa, unidentified
MRFYKRQHRFYCGIDLHARSMYLCIRDHDDVVLLHQNLPAQADDFLRAIAPYRDGLVVGCECMFAWYWVADLCADHDIPFVLGHALYLKAIHGGKAKNDKLDADKLSALLRGGNFPIAYVYPKGLRETRDLLRRRLFLVRQRAHFVAHIQNTNSQYNLPVFGKKLVFARNRDELDVAERFKDPSVRLSIETDLQMIDKLDEQIYAVELHLERHAKVDDPNTLARLRSIPGVGKILALIFLYEIHDIRRFPDVGQFLSYARLVRCAHESAGKKKGSGGKGAKKIGNAHLRWAFAEAVCLWLRQSDRAKAWMKRHEKKRGKAKALAILGAKLARAMYHMLRKKEVFDEDKVLGG

SEQ ID NO: 354772 - protein, 353 aa, unidentified
MTASQLRRLQKGKERGMKRYLGVDLHRTQFTVCVRQEGQVVEVRQWRIEELPQFVVQLNGNDEIAVEAMGTTARFYDAVVSGVERVVVVNPHQFKVISESVKKTDRGDAEQLALFLEKGLLPEVRMKEPKQRELQHLLETRDLLVKQRSALKAKINNLLAAQGINLKREALSSRKALQRVLAIEASAVVKLELRILVEQIEHLNRSVQEVEKLILEEGEQLPGHKNLTSIKGIGALSATVLLTAIGPIQDFADENKLAAYLGLVPKVQNSNESQRSGGITKRGNKLARTALVQCGLVAQRHSPYLKQRYERIKQRRGAGKAKIALARKLVKIVHDTLKNDWVFADFPSFTLAA

SEQ ID NO: 354773 - protein, 350 aa, unidentified
MITIGIDPHSRTHSAAALDEHGRILAELTVGSNARELDRLARWIAGIGRERVVAIEGARGFGLALSRRLLVAGETVVDVAPALTVGERRAARRPGKDDRGDAVAVGRIALREQSLPRVYPEVTGTDVKLLVDARDQLVAEATRTRNRLHALLVAIAPGYHEQVRDLTSSTALMVARRLASRARRADRVRSTLACAAISRLRSLSEEIGALERELTAALDREAPANLLAICGVGPLVAAKILGEARDVGRFSSSSAFASYAGTAPIPPSSGTVIRHRLDRGGNRQLNRALHTVALTQARRDDRARAFLVRKRGEGKTPREARRALKRHLAVAVYRALVLDAEEARSAGVLT

SEQ ID NO: 354774 - protein, 341 aa, unidentified
MGHCFVGLDVSKEETAVCVRTRAGEVKAAFKTSTDPDVICQSLNHYGADIRCVVLETGRMANWLYNELSQRGLPMVCIDARQAHAVLSQMHNKTDENDAAMLAELARTGFYKRIEVKSRIAQERRALLRAREVAIKARMNVENTIRGLLAGFGIRLPKHLKTYDQRVRKVLEDQPVLSGIILPLLRLRTEALRQAAGLTKDMARIARTDEACQRLMTIPGVGAVSAVTFVATIDTPDRFCRSRSVGAYVGLTSRRHQSGDIDYGGRISRRGDRMLRTVLYEAANSLMCRVKSGSGQDLKDWAKALKKRTSHKKAVVALARKLAVIMHAIWKDGTEFEPKEA

SEQ ID NO: 354775 - protein, 460 aa, unidentified
METDKARQGAGGDRRQLRGLPAIRPLVAGMDIGSERHWVCAPTVDGSGREIADFGATTPELLRMAEWLKQRRVESVAMESTGVYWIAPHEVLEAQGLEVLLVDTRQLARVPGRDKKTDPTDCEWIQRLHGCGLLRGSFRPQENICMLRTLVRDKGNLVAEGGDWVRRMQKSLDQMNVRVHRAVSSLEGLTGMAIIRAIVAGERNPQQIAKLRDPHCKKSEEAIAEQLSGHWREDHLFSLQQALRMYDAIQERIAAYEKEILRKLGQMERETGTTAPPLRNTNKARMIRNRGQEQKRQALYRMSGVDVTQIDAIGVEAVEVVLSEYGPDLSRFPTEQAFVSHATLAPHVPKSGGKPVKKKKRNSASARVANVLRMAALSLRNSKTALGAYYRHLAQRLGADVADFATARKLATLIYRLLRWGQPYVDEGVEAYEKRYQEQRIKSLKSKARQLGYEITPLTA

SEQ ID NO: 354776 - protein, 314 aa, unidentified
MSSLVFVGIDVSQARLDIAVRPGAPFSIVHTESALATLVEQLRALSPTLIVLEATDGMEIPLTSALATAGLPVVVVNPRQVRDFAKASGRLAKTDALDAQVLAQFAEVMSPQPRPLPDAEARALAALLTRRRQLVELLTAEKNRLLSDAAPIRTRLRTHSTWLERELQHTNTALAEAIRQSPVWRDKDELLQRVPGVGPVVTSTLLASLPELGILTHKQIAVLVGVAPLNRDSGTLRGRRTVWGGRAQVRAVLYMSALVAARFNPVIRAFYQRLCRAGKAKKMALTACMRKLLVILNAMIKQRTPWHQAEVPLA

SEQ ID NO: 354777 - protein, 416 aa, unidentified
MRRVKAFCGIDWASDHHDIAVVDETGSLLARARIDDTAEGLDQLLRILAEQGDTPQEPIPVAIETSRGLLVACLRTTGRPVYAINPMAGARYRDRHTVSRKKSDHLDAMVLANILRTDAAAHRQLPADSELAQAVAVLARAQQDAVWDRTQAGNKLTSHLREYFPGFLAAVGHRREGIYHSIARTLLAAAPTPQRAAKLTRAQLRALLKKAGRKNTIDKEVERLHAALRIPQMRHLPLVEEAMGRQTLALLRQLEAACVSADDLAEASVQAFEMHADAEIITSFPGLGPLSGARVLAEIGDDRSRFADARGLKAYAGAAPVTRASGKSVSVVARRVKNQRLASVGYMWAFSAMAHSDGARAHYDRRREAGDRHTAAQRNLFNRMIGCLHHCLTHRVTFDEAVAFPSRREPHLALAA

SEQ ID NO: 354778 - protein, 322 aa, unidentified
MGTLSFCGIDVSKDRLDAMVLPEQQSSCMGNDPAGWAQLVEWLSDFSIAAIGLEASGGYERGVMRALLAAGLSVRQINPFKLRQFANASGVLAKNDRLDARMIASFIAVMPTRAAQRRTPGIEQMSEIVTVRRHLSDQKIAAENATKLLEDPMLQRLSRRRIAQLASDIAQLDNRLAEIVAADSALSRRYQVLTSMPGVGLVLACTLIALLPELGRMSRKQIAALVGVAPYDFDSGKLKGKRCIWGGRAPVRHVLYMAAMSAGNWNPTLKAFRHRLKTAGKVPKVTIVAVMRKMITTLNAMVRDDVAWADHLAGRRSAPTAR

SEQ ID NO: 354779 - protein, 318 aa, unidentified
MTMVGGLDVHRQQITFDYVDDDGVVHWGQIRPATRKALRGWLAEHYPGGDAEFALEGCTGWRYVCEELAAAGVGVHLGDPAEIAALRGPKKRAKTDRADARLLRTLLLEGRFPDSWIPPAHVVEIRTLGRLYCTLMDERRAWQQRIHAQLFHQGCPPIKALLTQAGRDALAGAELSAAGRQYENTALGCIDELTTEIEPLRTQLVHFARHQTGCRALQHHYGIGWLCAAIIWAEIGDARRFRSCDQLVRFAGLDITVYSSDGKCSPGHLSRQGSPELRWAAFEAAKCAARRGSPDYGYYHTLAAKRDGHNGKNPTLAV

SEQ ID NO: 354780 - protein, 350 aa, unidentified
MIIIGCDFHTRYQQIAMMDTETGELVERRLEHENGEARAFYASLPKPVVVGMEATGYAQWFERMLAEFGDELWIGHASEIRAGVVRKQKTDARDALHLLHLLLEKRFPRIWIPSPAERDTRQLLRHRHKLVCFRVSVKNQLHALAMSQGVCRKKKLFTAQGREVLEKLSLGPWARRRCQELLEMLDQLNTVIEELDRAVQQQAESHAEAARLMRHPGVGPVTALAFVLTLGPVTRFRRSKHVVSYLGLNPKERSSGGKQRTSTISKQGNTMMRWLLVEAAQTAARYDPELLRLYQRLKFRRGANVAKVAIARKLAVKLYWMLRATATCVQRAPMQGSSRGTLVPQAGSSF

SEQ ID NO: 354781 - protein, 405 aa, unidentified
MKVYIGIDWSSKKHDIVYLNEEGGIIAYQIIPHTPLGFESFDDQRMKLGVGVEDCLVGIETEHNLLLDYLSSHQYRQIYVIPPTTIKDSRGRFGASKANTDRSDAHLIADMLRTDRARLHVWHADSLLTQQIAALASLEQFLTHTIIQTNNRLRNVLWRYYPNAASVFTGLDLQISLEFICAFPTPQAAAELTFEQFKAFARSHHHSAPSKLPACFARLQRPQPEARQQTVLAFQSEAVRLARLSLQAVQDKAATIREIQDLFVEHPDYPIFSSLPGVGKILAPALLAKFGDDRQRYPTPQVLQSVAGTCPVTRASGKHKYVSFRYACDHEFRWIVQQWAKCSIDDSVWAYTYFQSIRPHCDSLSHAYRRLANRWLEIAWRLWQDRVPYDEERHLRQHALRVKPI

SEQ ID NO: 354782 - protein, 358 aa, unidentified
MAKASMAHRQATRVIVGVDTHRDVHVARAKDTLGRALGEMAIPASAKGYRALLSWSRGLGEIEAFGVEGTGCYGAGLARHLRSEGEVVIEVIRPNRQARRRRGKSDPADAEAAASAVLSGEASAIPKAGDATVEMIRALRVARSTANRARTQAINALHALVVTAPEELREDLRGLPGPRLVRTCASFRPGELIDPLSATKTALRSLARRHEALTAEVRGLGRELRRLTVKACPQLLDIYGTGPDTAGALLLAAGDNAERLRSEAAFAKLCGASPVEASSGMTTRHRLNRGGDRHANAALYRIVMVRLRQRHPPTIDYVSRRTAEGKSKREIVRCLKRYVAREVYRALTEVNGATSSAA

SEQ ID NO: 354783 - protein, 365 aa, unidentified
MEKTMYAGIDLHKTQFTVCVMRGEDGLVVLEEQYPTTDTGYREFSEKMHDEEEKGYGIELAVETTGNARYFKNRMEAEGFGVVVVNTNRFKVITMSTKKTDANDAATLAFYLMKEMLPEAHLCDQTSEEIRRLLKTRSILVQSVVKIKNQIHGMMLGYGIETKAAQFQSKKKRQELYKDLADQSYSQFTASSLEVTLNILDTLEEQIKAVEKQLHEMLDEDETVQLLMTVPGIGFINASTIASYTRDMERFGGDFKRFSSYLGIVPSVHNSNNTVHLGHITKHGPQDLRTAFVQVAMGVIRQPQNTGDWKLMKDYRAMKVEKGSGRAIIALTRKMARIVFAILNNRTAFDPTRMYDKPISIQQTA

SEQ ID NO: 354784 - protein, 410 aa, unidentified
MEVVHAHCAGLDVHKETVVACVRHMADGKVTTTIKTFNTATQELLALSDWLSAENATHIAMEATGVYWKPVWNILSDGEFELVLGNAAHIKNVPGRKTDVKDAAWLADLMAHGLVSGSFVPDQTTQEMRDLLRTRKQLVRERTSHTQRIQKTLECANIKLDSVVSNVVGVSGRRMLEALISGRTDPKELAAMAHGRLQATPAELEAALRGRVTAHHRFMLKLHLDQIDSFDEAIARIDKEVKDNDKNFRAAVELLKSVPGVGSLAAEVIVSEIGIEMNRFATAGNLVSWAGLCPKNDESAGKRRSNRLKAGAPWLKTTLVQCAWGAARSKETYLHAQYVRIRARRGNQKAICAVAASILTTVYHMLKDGTFYVDPGPDYFDKRNKDQQANKLVNRLQNLGFNVTIQPAAA

SEQ ID NO: 354785 - protein, 340 aa, unidentified
MEKDVKCFLGMDVSKLWVDITLLQVVDHHKQPAASERFDNTEAGIKALDKWLRKQQVPFDDSSLLVIENTGVYHRLIWQYCSSHGLPLHIGNATHIKYSFGIARGKNDKVDSQRLCSYALKNAAELKATPALNPVLLQLKDLMTARSRLLSQLNSIKQYLSELKLSNTREVHQLLEQAHTAALEGIKASLKTVEEQIKQLIAQEPAIKHNYELLVSVPGIGHLSAVYIICCTNNFISKITGKQLACYAGVAPFGNTSGTSIRGRDKVHKMANKELKKLLHMGALSAIQHYEEFRTYYERKVKEGKHELSVLNAIRSKIALRAVAVINNQQPYVDNYKKAA

SEQ ID NO: 354786 - protein, 343 aa, unidentified
MPHYVGLDVSQKTTAICVVDAQGKRLWRGVCATDPGPISARISQHAGVDAKVGIETGSMTPWLVHGLRAAGLDVACLDARRVKAALQMQLNKTDENDAEGLAQIMRTGWYRAVHVKSLDAHRARALLGARAQLVGMTTRLSNMIRGVLKTFGLLPGAGRGLRFDRKVEALLEGAPEIALVVRPLLATWRQLREQIAVFDKAVLQQVRADPICRLLMTVPGIGALSSLMYVSTVENPSRFSRSRAVGAHLGLTPRRYQSGETDRSGHISRCGDGLARTLMYEAAIVILHRVKRPLHLKDWAEAIERRSGSGKARVALARKLSVILHSVWRSGEPFRCAAPAMAV

SEQ ID NO: 354787 - protein, 350 aa, unidentified
MLIIGCDYHPSFQQIAFVDTDTGELQERRLEHREEAEKFYRGLGVQEMKVRVGMEASGQARWFERLLGELHFELWIGDATEIARKRERKQKTDRQDAQHILRLLLKDDFPRIWVASWENRDLRQLLWHRHRMVQARTRIMNQLQAVALNEGLRCKKRLWREHGREQLESFRLAPWASRRRQDLLELLDRLNPTIAELSQAIEQEAEKFPEARWLMTHPGVGPLTALAFVLIIGRADRFQCGKQIASYLGLVPLEDSSGNRRRLGHITKQGSSILRFLMVEAAQVTVRSLPEWRSKYFHLMMRRGRKTAKVAMARRLAICLYWMWRKGWDYEQMKKFGSHAGQPGNRDGVQ

SEQ ID NO: 354788 - protein, 370 aa, unidentified
MKKRITFVGLDTHKNSIEVALADEGANSEVRLYGSIGGDLDSLDKMIRKLSIPGAELRFVYEAGPCGYEIYRHLRAQGLHCDVVAPSMVPRRSGDRIKTDRRDACNLARLYRAGELTAVYVPHEDDEAMRDLVRGRQDAINAQRKARQQLGGFLLRHGVRYPGKCLWSLAHGRWLSGIKMPHPAQQIMMQEYIHTVEECTQRVIRLNEQIQQLLPDWRMHPLVAALQALRGVAPVVAATVVAEIGPMGRFKNPRQLMAYLGLVPSERSSGGSVRRGAITKTGNGHARRALIEAAHSYRHPARISRTILKRQETLTEPVRQIAWKAQLRLCARFRRLIARGKSRNRVVAAVARELSGFMWAIAKQVPVPQG

SEQ ID NO: 354789 - protein, 414 aa, unidentified
MNGDVVHSRCCGVDVHKDSIAACMRWIDDNGNVAKESRKFGTTTQEINAFADWLRSRDIRLVAMESTGVYWRPVWNLLEGQFEVKLANSEHIRNIPGRKTDRKDGEWIAKLLQHDLVPTSFIPPKEIRELRDLTRSRTKLVHGRSAVAYRVQKVLEDANIKLASVATDILGHSGRAMLDAMVQGQSDVAVLADMARGRMREKIPRLRLALEGHITAHHRMLLRELLDQIDFLDGKIFALEGEIWQRSKQFEKPIRLWSAIPGVDRLSAATLVAEIGVDMRQFPSAGQLASWAGLCPGNNESGGKRKSSKLRHGNPWLRSLLCQVAWAASRTKKTYLSAQFHRLAARRGGKRANIAVAHTILVIAYHILKEKRPYQELGGDYFDRIRAEGLKRYYVRRLQGLGMEVTLTPVAVSS

SEQ ID NO: 354790 - protein, 349 aa, unidentified
MAMTIVEAAPGITGGVDTHLDTHVAAALDPLGRLIGSEPFPADAAGYMALLGWLEGFGEVTKVGMEGTGSYGTGLARFLRRKGIEVVEVNRPNRQARRNHGKSDPLDAIEAARAALSGRATGAGKTRDGPVEAIRVLVVAKRSARGARTKALVQMRHLGFTAPEQLHCRMKGLSVTALVNEGAKLRPTRSADPVTAATKAALSSLAHRVQALDDEIAELDEKIESLLAATAPDLLALFGVGPDTAAALLVAAGDNPQRLHSEAAWAHLCGVSPIPADSGKNAGHLRRHNGGDRQANSALWRIVMVRIAHDPETTAYFERRVKEGRTKRDVIRILKRYVAREVYRHLPRG

SEQ ID NO: 354791 - protein, 387 aa, unidentified
MTKNKGRVVGLDVHPDSFAGAVVEGRDPASAKVLSTSTRVELEQLEQWALRHTCTEDTLVLEASGNAFAVAARLRAIGRKVEILDSHRAGKVGKVYCANDRVDAVKIARIYLSALSPIVWQPDVKTLERREVFSAYQAVVKESTRAKQQLRSMLNEHCVRLEKGFRLCHPNAITRLLRLREWTPARRMLLQQLHGSLVAARARRTLLRRHMAQEIVAEEALLRLTRLCGINLITLYGVVAAVGDVRRFTHSKKLVAYLGLNPSVSQSGNFQGSGALKRHGRGALRALLIQSGKKLLEVNNPLQKWGLAVAARRGRNKAAVAVARKLCVALWHVMMGHLIGTLERLDTLQTKLSKFATEIGPGALAAFGYTNKTDFVQKKLYVLRSYP

SEQ ID NO: 354792 - protein, 397 aa, unidentified
MMRFAGIDIGAERHMVAVLDEQGEVLCRSSPFGEDASGYARLFELLGPSADCLVALEATGHYWRNLFVALIAKDYAVAVLNPLRTARFAEEELRRTKTDAIDALGIARFAQQKRPRAAQLPDSVTEELRELERLRERVVEDFADRLRQLHRAVDLGFPEFTRYVRTLESQLAATILSRYPTAASFRGVPVKKLARIVYDGSHKIGEELARNLIEAAEKSVGAHHSEPYRRRIKYLCEDLDVLRRRLKDLARDVERKLDDHEVGKLLMTIEGLGPLTAACLIAELGDPARFDSPGAIASYVGVIPRIRQSGKKRFTKGPAIPLGNARLRKSLFMVVLQMVRRNPWLRQYYERLRAAGKPGKVAIIAAMRKLLTAVWSVATHRRPFVPIMPQLPAPKNA

SEQ ID NO: 354793 - protein, 316 aa, unidentified
MAQEQVVVGIDVAKEKVDVAIRRGAEGCFANDAQGRRQLLAWLKEHAVGQAVMEASGGYEKSWTQLLRKAGVEVVIVDPKRVRHFAKSAGQLAKNDPIDARMIAWFGEAFEHRGKPEDAAREELDQLVTARRGLSRLKDKIDNWGEHEQPKAVQKAYQALLREVDRQQARLEALIADRIEKTEHFAERAEIIQSVPGLATNSAAALLAFLPELGQVDRQAASALLGVAPFDDDSGKRRGHRHIQGGRRKLRCLLFTPILGAATRHNPVLTAYYRRLIAKGKAHKVALVACMRKLVCILNIMLQRGEKWDPARHALP

SEQ ID NO: 354794 - protein, 329 aa, unidentified
MKKDWYVGIDVSKKWLDVAIFVENSDLMGYFHTQVSNDKTGYKELLRWLKEHDVDASTCMYGMEHTGFYSDGLQHFLDKKGYKYTMLEPAVIKHYPIQPREKNDHLDAAKIADYLFRFKETIKLSRVPDKTMEELRNLHRERKFYVEDRVVYLNRKQVVGKEEAKRLDKMIALLDKQVESIEEKIREIIRNDKSLMESYLYLTSITGIAFVNAVNAIVITQNFTVFKTARDYASYIGVAPHTKKSGTTVRWKPKPYKHCDLTAKADISQAAKIAVVHDVELKRFFERKLGGKEDADTIRKAMNAVKFKLVLRMFAVVKQKHEYRQFATI

SEQ ID NO: 354795 - protein, 373 aa, unidentified
MMRTVVGIDISSASFYCCFTNKFADGTTKIAATRSFNNTESGYKQLMEWVAKHHQQQQPVLFVMEATGVYYEKLAYYLYEEQQQVWVVLANKMKSYFKSLHIKTKTDQVDAKLIAAYGLEREPVLWEPMASEYKLLRDYCRELLALKKDRQRAKSQLHAMKAAHSKHRQIIELKQSQIAFYESSLEVIEQQLKQLVSQDTTLKEKIAQLESIPGIGFETALILACETNGFKLFHNIRQVVSYAGLDVSHHESGSFKGRSHISKKGNARIRQALYMPALSALRFNEPISRLYERVCEKNPTLKQKGVVAAMRKLLAMAYVVWKKDEKYDKKYEWKPNNSGKEQTQPALGLLAKPKKSGAMTAPHKIDLSLINQP

SEQ ID NO: 354796 - protein, 352 aa, unidentified
MERFIGLDAHGQSCTLCVMGPSGKRLGHHVVETNGKALVERIRSIAGERHVCMEEGTQSEWLYEILQPHAKRIVVTQPLRRAGNKSDEIDGWSLADLLRRDALERVVFKSPQTFTALRQAARGYVAVQQDLVRAKCRLHALYRSRGVMPSSEIYDEQQRDVWVRKLPPSYRPLAELLSEQLDGLTEAHQAAQSWLLEESGRIALTRQLATAPGIGPIRAALLVAIVVTASRFRTTRQFWSYSGLAIVTRSSSDYVRENGRWVRKPVAQSRGLNRNRQPLLKTIFKGAATTVIRQMPSHPLHQDYQRMITEASIKPNLAKLTVARRIAATTLAMWKHQEDYDPSKQRRAPLSQ

SEQ ID NO: 354797 - protein, 454 aa, unidentified
MSRTLLDHINRNVAGIDCGAAEHFVAVPPDRDPTPVQAFSTFTTDLIRLADWLTTCRVTSVAMEATGVYWIPIYEILEARGFKVLLVNARHFKNVPGRKSDVSDCEWLRELHSVGLLRGSFRPSEGIVALRTYQRHRQTLVETASTFIQRMQKALVQMNLQLPLVVSDITGATGLRILRDIVAGQRDPAHLAQHRDPRCRATRAEIVAALTGHYRPDHLFVLQQNLEGFDACQAQIAHCDTTIEGHLRTLTAAIPAPVAPLPASRSRRTTPKNNDLPFDLRAPLFHLTGGVDLTQIDGIASLTALKLISEIGTDMMRWPTEKHFTSWLTLAPNNKITGGRVISSRTQPSANRAAATLRMAAMTLGRTQTALGAFYRRMAARLDKPQAITATARKLAILVYRALKGELVYQDPGAATYDAAQRSRILRRLRQRASTLGFELVHRATGEVFAAGVS

SEQ ID NO: 354798 - protein, 343 aa, unidentified
MELKRVGVDLAKHVFQVHGVDRREQPVWQKRLSRDRWLQVISTTVEPDCEIGMEACAGAHHWARRLQAAGFRVKLIAPQFVKPYVKSNKNDARDAEAICEAMSRPSMRFVSIKTVAQQDIQATHRVRSELISQRTSKGNQIRGLVAEYGLVAPQQLVRLRAAVPDWLEDAQNGLTVRFRRLLNGLWEDLKALDRRVAELDQEIKSIAESDPDAKRLQQLRGVGPMIATALVAAVGHADQFANGRQMAASFGLTPKQHSSGDKVRLLGITKRGDAHLRTLLIHGARSVIRAAKSKDDRLSQWVTGLAERRHPNVAAVALANKTVRIAWAMLRYGTDYQPNRMAA

SEQ ID NO: 354799 - protein, 342 aa, unidentified
MESAVTMGLDLGKSVFQVHGVDAAGAVVVQRRLTRSKLLAFFAKQPACLVGMEACAAAHYWGRELRKLGHRVRLIPPRYVKPYVKRQKNDAADAEAICEAVTRPRMRFVEIKTCEQQGTLVLHRVRLMLTRQRVQLSNAIRGHMAEYGLVAPVGRNGLQRLIAILGNPDDERVPTVARASLAPLVAQFELLNGQVLENDRRVRASARATELGCRLMEVPGVGPVLASAIVATVPDPAAFKSGRDLAAWIGLVPRQNSSGGKEKLGGITKQGDRYLRQLLVAGALAVIRYAQRHGTKRPWLVQLLARRTPMIAAVALANKMARMMWAMMMTGERYREPTVAAA

SEQ ID NO: 354800 - protein, 388 aa, unidentified
MFQTIDQSKKCLNAFEQDSTLVAVVELSQKSWLVAGIVPGVDRHPLKKFDADENRLLALIQRWKQEAIKAGREIKRIVVAFEAGRDGFWLARWLQALGIEVCVIHSTSVSVPREHRRAKTDRLDTELLKRATLGWLRGEPDHCRMVAIPTLEEEDAKRSNREHQYLVGERTRLINRLKAALARLGVRNFNPKLRKASERLRALVTPEGMPLPPNTLAEMERDMQRLQFVRQQIKAIEQTRFERIKKAPKTRLNMMVLLVARVLGMGIETADMLVHEVLSRDLRDRRAVARYAGLTGAPDESGARRREKGLARAGNARVRRGMIEFAWRFVRFQKDSTLAQWFRARTADARGPTRKTMIVALARKLLIALWRLVTTGEIPTSLTLRPVA

SEQ ID NO: 354801 - protein, 409 aa, unidentified
MSNVSFYVGVDLGNQKHAICVLDPQRRLVKSTFVANDERLLDVVMAAIGTAAPAGVHVALEDRNNVVVDALLARGFAVFTANPKQVDRFRDRETVAGAKDDRRDASVLANALATDERFFQRVAVQSEFEVELGSLAATLNELDEDHRRIANRLRAVVLRFFPALLSLCPGTDEKWFWALLLLLGDADAAKAVQQTDIFKLLKMHRKQVVKVEHVAAIVGARHLATGPGVKEACRNHVAILVKQLLAVEEQRAHVTAARDAVLERLMAAEPDSTPSDVAILRSMPGVGPKTVTSLVCECLPLLKSGDLERVRALSGVAPVTKQSGKGRRVTMRYACNPRLRFALFHVATNAIRSAGRLKDKYAKLREKGHNHARALRAVADLVLHILRAMLKDRTTYYVNDVAPVVAAAA

SEQ ID NO: 354802 - protein, 408 aa, unidentified
MEVVYRCCCGIDVHKKVIVACLNKGGEQELHEFGTTTSEIKSLAKWLTESGCEMIAMESTGVFWKPLYNLFELMDLDAIVVNAAHMKALPGRKTDVKDAEWIADLLRHGLLKASYIPSREQRELREITRYRKSLTEERCRETNRLQKILEGANIKLDSVVKDINGKSARKLLERIIEDDVPTSETEVSQIVHSSMRPKLGQLVTAIEGITTPLQRKLLAQVIDHIDDLNKRISNLDKLVQGYMDEYETAITALCDIPGIARRSAEVILAEIGLDMSRFPSAAHLCSWAGVCPGNYQSAGRRKHGKTTKGNKPLKTILTQCAKSARSVKRSYFSAQYQRIAARRGKNRATLAVAHSMLIAIYHMLKDNVPFRDLGADYYDSFNRDRKIHGYLKRLKALGWEPDALPGSA

SEQ ID NO: 354803 - protein, 339 aa, unidentified
MGLYGGIDLHSNNNVIAIIDERDHVVFQKRLHNDIGIVRKSLEQYRDDLVGLAVESTFNWYWLVDGLMDNDYKIHLANPAAMKQYSGLKYADDKTDSRWLAHMLRLGILPEGYIYPKENRPMRDLYRKRSQLVRQRTTNVLCVSNIITRNTGSSIKCAAIKKLSDKEIDAMITDEHVALAIKSNLAVIRCLEQQIENIERVVKTKAKETQEYKLLLTVPGIGETLAMIILLETGDIKRFPKVGNYSSYCRTVSSEHRSNKKKKGQGNTKNGNKYLAWAYFEAATFAIRYNERANRFYQRKAAKTKPIVAKKALANKIARACYYIMRDLVPFDNERLFAS

SEQ ID NO: 354804 - protein, 341 aa, unidentified
MKKNLFFIGLDISKADFAASIYKTPGESIVTKEAIPNDRKGFEMLLLWLNDHHINKKNCRICMEATGVYSQAIAYYLLFQDFPVSVEPPLKVKRAFDPVGHKTDPVDSKQIAEYAYRFQDELTSWKPRDEILEKIRQLLSVREQFTKQKTALKNAIQAYSKQRVQVALINKAHQETLAQLEKQIARIDKELANLIKQDPVISQRANHLDSIPGCGMLLAAHLLVITENFTKIQNFKRLAAFIGIVPYQHQSGSSVSKRAKIRHFGPMPSRKLLRLAAQSVATHNATFRHYYLRKLDQGKAKPLVLNNIANKLLKIACTIIRNNTRYIKDYRSIHPMYLKSI

SEQ ID NO: 354805 - protein, 432 aa, unidentified
MTTHRLQAGIDFSQKKADFCLLFPDGRPLEQHRSFDNSLPGYSLAKALMIDAMETHQFDGLDVSGEATGFLWLPFFNQLAADPDLEAYDLNLFLLNPRWVKWFKKCFPQDDKTDQKDSFYIADRTRTRRPDVTWSPQLDTLPLRFYTRLRFHLVQNLAREKCYFSAFLFLKASSYRRLKPFSDVFGVTSRHVLSQYTTLDDLASIPVEELALNLHEMSDHHLPDPFNNARKLHRVAAESFPLPDALVLPVHRILDLTLDHIRFLEGQIDQVEDWITTEVQLHPTILKLATIPGVGPVFSCGNGAEIGDTQRFLQGQKWDKKRKRYRPRNLRDAEDAVAKIAGLWWPRSNSGDFEAEDRRMAKTGNRYLRYYLIQAANLMRQNIPEYADFYRRKYREASKHHHKRALVLTARKSVGLVVGLLHRNETFRPKEV

SEQ ID NO: 354806 - protein, 428 aa, unidentified
MQYALIQVLPDVPPGGVCAGIDWASTDHVACVVDMAGRVVDRFTAAHDRAGIAGMIARLRRAGAGEVAIERCDGPLVAALLAAGLTVVVITSRQVKNLRSRFSAAGGKDDRFDSYVLAGTLRTDRARLRPLVPDTPATAALRAAVRARKDLVAHRVAAANQLRAHLAVAFPAAIGLFSELDGPLSLAFLARFGSQDAAAGLDEDAMAGWLSTLPARGNPAPPAVLCARLRSAPPGATGGDGGAQAGVTAALAASVASLATQIKALEIQIAGQLAGHASAHIFTSLPRAGTLRAARLLAEIGDCRSRFPDPWSLAALAGVAPVTRRSGSHTAHTFRWAVSHQLRDAVCDFAADSRHASPWAASICHDARDRGKDHPHAVRILGRAWIYVIWRCWQDRTAYDPAKHTALQRLLDQQRAAQAARPAPQEDR

SEQ ID NO: 354807 - protein, 318 aa, unidentified
MNTNTLQNIHVGVDTGKSKLDIYIRPLDIFFTVSNDENGIKEAVQTIKKYHPQRVVVEATGRLEMPFILACSQAQLPFVIANPIHIKRFAGAIGRRAKTDKLDANLIAHYSEAIQPKLTQLKPEIMRLMSELVARRHQIMTMQTMEKNRLQSMPKSLASTINPVLKVFEAQIEKLEKLIVALIRIIPEYQAKNEILQSVPGIGKICAASIISNVPELGYISNKQAASLIGVAPMSRESGRYKGKRVIQGGRAQVRTVLYMAMMSALQSNPVIKTTYQRLLAAGKPKKVAIIACIRKMVVILNSMLRDGSKWDANMGEN

SEQ ID NO: 354808 - protein, 340 aa, unidentified
MKKEVRFYLGMDVSKLWVDITLMCVVDHQKQPLVSERFDNNEAGMKALGKWLKKHNVSFNTNSLLVIENTGVYHRLVWAYCSKLGLPIHIGNATHIKYSFGIARGKNDKIDSQRLCTYAFKNADELKATPALNPVFIRLKDLMTSRSRLLAQQNSIKVYLKELKLSNSKEVQQIIEDAHKAALEGLKQSFKTVEQQIKQVIKEDQAIEKNYKLLISVPGIGHLTAVYIICCTNNFICKITGKQLASYAGVAPFGNTSGTSIKGKDKVHKMANKDLKKLLHMGAISAITHNPEFKDYYERKVKEGKHELSAINAVRSKIVLRAVAVVNNQKMYVNKYKKAA

SEQ ID NO: 354809 - protein, 394 aa, unidentified
MRFAGIDIASETHALAIVNAEAAVELKPVSFAEDAVGYQRLLSLLGDPAELLVAMEATGHYWKNLFAVLAAAGYSIALLNPLRTHRFAGEDLARTKTDALDALGIARFAAQKRPSPTLLPDAATEELRELVRLRERLLHDFGDRVRQLHRLVDLGFPEFTRHVRTLESELAGAILRDYPTAAAFRGASVRRLAGVRYDGQHQVGLELARSLIDAARCSVGQHHSAAYRIQVRYACDDLAVLRSRLREIDRDIESKLREHEVGRLLTTIDGIGPNTAARIIAAVGDPADFHSAAALAAYVGTIPRLRHSGKRQPARAPLTPIGNASLRAALWMPTLTAVRSNPWLRAHYERLRARGKLPKVALVACMHKLLFAVYSVAKHRQPFVPMLSAPSADV

SEQ ID NO: 354810 - protein, 407 aa, unidentified
MKKENVIEYEQVVERGCGMDVHKDLIVATIQGKGIKIQTKSFNAFTSSLIKLKEWLLKYQITHVAMESTGVYWKPVFNILGDDFIILLVNARHVKNVPGHKTDKKDSRWLSKLLLSGLLKGSFIPKRPIRELRDLTRYKTKLTNQVTAEKNRFQKILEDANIKLSSVLDDVFGASGTKMIKHILSNENYHPEELLQYVHGNVKCSRQDIKEALTGFITPHHRFMLKTIMGNITKIESTIAEVDVQIEDCIKPYKVERKLLESIPGVGKDGATYIIAEVGVDMDQFPDQTHLASWAGVCPGSNETAGKNKSGRITHGNKYLRSILAECGWAASRTKNTYMSAKYKNLASRRGKKKALIGVAHKILIATYFILKDKIEFKELGYDHLTNYRKDRLIAYYQQQLEKLSAA

SEQ ID NO: 354811 - protein, 468 aa, unidentified
MKTKKTRSRTNRKPDQNRQRKFRKGKLEPLRIRDDAAGIDVGATELFVAVPPEKDTESVRRFSSFTRDLHALADWLEQCGVRTVAMESTGVYWIPVFQILEERGLEVCLVNAQHLRNVPGRKTDVSDCQWIQQVHSLGLLNASFRPAQQVCAVRSLLRHREGLVQTASQQVLLMQKALDQMNLQLHHVLSDITGVSGMAMLDAILAGERDTARLAAMREPQVRASAATIAKALEGDYRSEHLFTLRQSLTLYRFLQKQVAECSESIQRELSGWETRIDPGEPLLAPAAKSIKADGLSRVEAVSLREQCYRILGVDLTSVDGINGQFIQVFLSEVGPDLSLFRGASAFASWLKLCPNREISGGQVLKSKTGKNASRLAKAFRLAASSLLQSESALGDCFRRLRTKLGAPKAITAMAHKIARIVYHLVTTGQPFDPAVLLKQQEQQRKHRESRVRKEAARLGFNLIPAHS

SEQ ID NO: 354812 - protein, 317 aa, unidentified
MAEADCFCGIDVSARRLDVALRPQGTTWHVANDAAGVAALTARLVAAAPTLIVCEATGGLEIPLVLACAAQGLPIVVLNPRQVRDFARSLGRRAKTDKLDAAVLAHYAEALRPPVRPLPDAAAYALSALVARRQQLMEMLVAEQNRLGSALPGVRPSLETHIAWLRAEVRDLDQELAAQVASNPVWHATAALLQSVPGIGKGIATVLVAELPELGTLTRRQIAALAGVAPFDRESGGTRRKGLIGGGRSGVRRALYMAVVTGIVHNPVVRRYYRHLRTEQPAKPPKVALVACMRKLITILNAMLRDGTRWHETTSAA

SEQ ID NO: 354813 - protein, 353 aa, unidentified
MTGQVRALVDGVDEFIGIDHHKRRSQVMIKDRRGRVVKRGNIPTDRESLRRFLGERDGRVRMSVFEAGARYRPMYRWLSELTDEVVLANPGRVKVISETAYKDDKIDAEKLTNLLMLGIVPEAYPCSNRAWDRRQWLRQRAALVKMQTSVKNRIHALVDQHPDAEPARPQATDLFGKQGMMWLGELEIPKADRLRLDQLLEVYAFLHCQVKRSDAAVRKAVKADEPCGWLKTVPGIGDFFALLIMAEIDDVGRFAKSKHFVSYTGLVPGRDRSDLVDHPKHIHKRGSKWLRWALVEAAIPATRSNLALKLLYDRVCRKRGPKAGPNVAKVAVARKLAEIVYRLLKERRPYEER

SEQ ID NO: 354814 - protein, 343 aa, unidentified
MEKIATVGLDLAKSVFQVHAIDEAGEPIIRRALRRSQVLDFFRKLAPCVVGMEACGSAHFWAREIKTLGHDVRMMPPIYVKAYVKRGKTDAADAAAICEAVTRPTMRFVPIKTADQQGAGMILKTRDLLIRQRSQAANALRAHLSELGIVTAAGMASISKLIELIREEGDDRIPDAARRALMAMAAQIEALAVQVERLERRIIATVKDDEAARRLTSIPGVGPIIAATVRAAVPDPRGFRTGRDFAAWIGLTPRAHSSGGKERLGSISKRGNCQLRTLLIVGATSILKLGKRGLKLPHWVGALMLRRPFKVVAVALANKIARTIWALLVKGGTYQTPRAMAKG

SEQ ID NO: 354815 - protein, 330 aa, unidentified
MHWVGFDVGKAFHWVCVLDGEGEEVLSRRVEATEEDLEAACSEIAALGGEGTVGIDLRGGPATLLEAILLERGEKIFHVPGIAVNRARDAYPGESKSDARDARVIADQLRLRRGSLQEIRPRNEVVAEMRVLTAHRRDLLQDQTRRAARLREVLLGVFPGLEAALDLKREGALLAVTKVATPSAARRLGGARLHQWLKAKGVRKARDLAERVVAAAKAQCRELPAAEAKSALAAELAFEMLRTRQRLAELDRRLEELLATTPEAEIVRSLPGMGVVFTAEFLAEVGDLGRFASADSLAAAAGIAPVLRASGASSHQRRARRGNKVLKRLL

SEQ ID NO: 354816 - protein, 450 aa, unidentified
MSPLALDVVTKTDKTPVLGRMLSKYVGRKTSSIENGITKARNHSRQRGNIMRVVFGIDVSKASSEVAILVNGEKVHGYTIPNDAIGFNRLLGDLKTVHQPEIVFEATGVYSRRLQAFFEDNSYTYTRLNPLESKKQLDSLRVRKTDKIDAEKLAMSQFILNRKPSYVQEALYQELRDLSRFYQNLTEDIVCAKNRLHKVLQITFPELENILSAPTGEQYWNLVITFPCNSFVLESDDATLTAIIRQSTAKRISEKRVTYLVDKLTKLANQSYCAVKKTSPVIEEVKYYAGELLRLSEHRQGVVEEMVTLAQSLPEYEILLSIPGIAETTATSIIGELGDIRRFHSANQINAFIGIDLRHYESGNFLAKEHITKRGNPYARKILFKCIHNIASAGYTNPCHIADFYEKRKRQSQVTSTKPHTIASIHRLIRTMYYLITHNKLYDYTSIQNR

SEQ ID NO: 354817 - protein, 415 aa, unidentified
MTTDYQIAAGLDVHKRFIVATILWTNGSKLQEKFDRTVQGLLALKNWILKNKCQVVACESTSDYWVQIYDSLIEHLPVIVGNAHDIKVLSHKKTDKIDSEIIALLALKGMIAPSRVFSRHHRDFRKLVRLRHFLVKKRTDIKNRIHGILDTELFHLSETLTDIFGVSGRLIMNGILQGDPADKVVKQIPWKVLDKKETEIRNLLEQSLSQNALIQLGHCLRVMMKLDEEIGVLTNHVIYYAHTNYPREVEILKSVPGVGDITAVTLIAEIGNFKDFSSSDKLASWLGIVPKVYQSADHQVKRSITKRGSKLGRWILTQAAHAATKKKKSVLRDFYEAKKTVIGTGKAIMALARKMITIIWHLIVNNETYVDVYAQPKKQVKYHNVRIPVSYTLEEALKLLSDTIKEIKKPDPDPI

SEQ ID NO: 354818 - protein, 345 aa, unidentified
MKTFFIGIDVSKEKLDATLIRYESQSDREQQLAYTTVENNPKGFRSLVSWSKKNAGRGVKTDTMLFCCETTGGYDRALCDWLYGNDLDIWRESALQIKRSMGLRKGKDDKADSEMIAYYALRFRSKATLYKPLDGNMRSLRDLFLYRQSLVAERRAKMVSAKEKQHISSKSKVDDFIYRDAQKAINILTKSIQECECRMLEIIKEDEEMYRNYLHLISCKGVGLVTSIMLIIYTDNFKGWNAKKMASYCGIAPFYESSGSSVFHKANTSGYSNRRLKGILTQAARSAITHNLTLRQYYLRMKAQGKSYGVILNNVNNKLVHILFSLVLHDCDFELDHEAKRALRA

SEQ ID NO: 354819 - protein, 313 aa, unidentified
MSMQSRAKSPVCLTIGVDVGDRFSQICVLDGDGEVREEARIRTTPAAFGQWFRSAASALVVLEAGIHSPWISRLITESGHETIVANPRRLRLIYQNDRKSDRVDAESLARVGRLDPRLLCPVKHRGPEAQADLALLRSRDSLIRARTLLINHARGSSKAVGVRLPKCSAKSFHQKVAGRLPEVLADSLSPELETIGRLTAQIRDLDRKIEEMAETKYPEIAALRPVYGVGPVTATTYILTLEDPHRFPRSRAVGCYVGLRPRQADSGDQQPQLHITKAGDEALRSLLVCAAQYILGPHGPDSDLSRNPPLPPP

SEQ ID NO: 354820 - protein, 341 aa, unidentified
MAEIVKQVVGIDVAQNELVVSLGRMNHDTGVDIYAYKIFANTVAGFGSLTSWAEKKTVKDIKVRYVMEATGVYHEHLAYYLSDQGKQISIVLPNKISNYFRTLDVRTITDKTASQAICQFGLERKLEDWLQPKKIFRHLKQLTRERDQLITDRTALKNQLHAEMAEKFPNQSSIKRISKRIQLINKQELEIETDLSKTVKEDAELARKIDLITSIPGVGKLTAIIALAETNGFELIKNKKQLISYSGLDVRVKESGTSVKGKPKISKRGNRHLRKAMHMPAITAIRHNANHKAIFVRLVSKHGIKMKAVVAVQKKILGLIYTIYKTDKRFDIDYNKIAIER

SEQ ID NO: 354821 - protein, 315 aa, unidentified
MTSERELFVGIDVSKGQVAVSVHGREENWLFANDAEGFGPLIATLQPLSPALIVVEATGGYEFVMVAELCAAGLPVAVVNPTRVRRFADSLGQLAKTDRIDAHVIAHFASVARPPVRALQSEEAGYLSALVERRRQVIVMLTAEKNRLYTSPLRLRSDVQEHIDWLESKLKELDGELGDMIRRSPIWREKEALLRSAPGIGPVTAVTLLVDLPELGTLNRQKIAALVGVAPFNKDSGIKRGKRRIVGGRASVRRTLYMAALAATKFNPVIRRFYESLVGRGKEKKVALTACMRRLLVILNAMLRKQEPWRCSQAV

SEQ ID NO: 354822 - protein, 347 aa, unidentified
MEHYVGLDVSLKLTAICIVDRAGKIEREGVVASDPEAIAAFVKLHAPHVVRVGLEAGATSTWLWTELNKMGLPVICIDARHAKAALKMQINKSDRNDAVGIARIMQCGWYKEVRVKDLDSHAIKALLVSRALLVKIKRDMENQIRGLLKNLGLVIGRAKMNVFAVRATELAEARPELAAAIEPLLKAREAVGQQIVDLDRKVLRLARNNAQVRRFMTAPGVGPITALCFLATIDDPVRFKRSRSVGAYAGLTTRRYASGEVDWTGRISKCGDKMLRSYLYEAANVLLTRVAKWSALKAWGIRLAKRSGLRKAKVAVARKLAVILHRMWIEGTEFRWSSKEAASQPAS

SEQ ID NO: 354823 - protein, 339 aa, unidentified
MNSMAVGVDIAKQVFQVHYVDRETGEIVNRQIKRAKFLEHFANRAPCLIGMAACGDAHHWARELTKLGHEVRLMPAEFVKAFNIRNKNDAADARAIWLAVQQPGKPVAVKTEMQQAMLALHRMREQLVKFRTMQSNGLRGLLTEYGEVMRKGRAALDKEIPAALGRIAARLPAALIDTLREQWNGLARLDEQIAEIERRMREWKPEDRAVKAISEIPGVGLLTATAAVAMMGDPKAFRAGREFAAWAGLVPKQTGSGGKVNLHGISRRGDTYLRTLLIHGARSVMTHTKEPGPWVEQMKQRRPMNVVIVALANKMARMIWAVLAHERPYRNDYVSVKPA

SEQ ID NO: 354824 - protein, 349 aa, unidentified
MTQTITETIGVDLGDKYSAYFVVDQASGEEVARGRLRTRPGDFERFFASRGTARVVMEAGTHSPWASRITKPFCAETYVANSRTLRFIYGNSRKSDDKDAEALARVGRADPKLLSAIQHRGEAAAKDLAVIRARSVMVGCRTDLVNSLRGLVKSFGARLPRLNTDSIGEKTARLLPEELRDQLTPLLLSIQHLSKQIASMDRTIRKAARESYPETSALTQVWGIGELTALAYVLTLEDPDRFRHSRTAGAFLGLVPRRDQSGETDKELRITKAGDALLRTLLVECAQRMLQRNAPDTDLKRHGLRIAADGGKVAKRKAVVAVARKLAVLLHSLWKTGEVYQPLRSERVD

SEQ ID NO: 354825 - protein, 341 aa, unidentified
MQVTTVGLDLAKNVFQVHGVNAKGKVVVRRRLRRAKVREFFAGLEPCLIGLEACGTAHFWARELRALGHEVRIMPPSYVKAYVRRGKNDAVDAEAICEAVTRPTMRFVPIKTEDQQSALMLHKARELLIRQRTMLVNALRAHMAELGMIAPQGKEKIDDLIAVIEDGEDESIPALAKAALKPLVAQLRAAEEAIAAADAEIMAWHKGNEASRRLETIPGVGFRTASAIAANVPDPSFFRSGREFAAWLGLVPRQNSSGGKERLGRISKQGNRYIRSLLVLGATSTLRSARANRAPGADWVNGLLERRPPRLVTVAMANKTARIAWALLAKGETYRAPGAAA

SEQ ID NO: 354826 - protein, 361 aa, unidentified
MKTQPTAQPKLYIGMDIHKKSWSVHLRTDISDHKTLTIPSNCDVLYDYVEKHFHGHEVSLTYEAGCCGFSASRHFINLGWNVLVVNPADVPRMDKQNYQKTDKIDCRNLAKQLHAGQLKGIYIPDEAQDLLKSLLRQRAETSKQLRAIKSNIKGLLLYHGIEIPEEFDNPNWTKAFLEWLQQISWLHPTGKICIDSKLRMHEVIHKEYLQLANELRSYCRKHHNKDYYLLKSIPGLGGYLASAILAEIGDLRRFNNETQFASYIGIVPTMRNSGGTEKIQGVTPRCRRLLRSYIIESSWVALRMDPEMQAYYRKHIGRNPKSIIIKIARKLLNRMLAVIKTGKPYHTNYSLNNGKETKMNK

SEQ ID NO: 354827 - protein, 420 aa, unidentified
MPATFSIPRTNDLERAMTAVMIGVDPHKGSHTAVMISPAEEPLGEIRVRASAAQAGKLAEWASAWPERTWAVEGAAGLGRLLAQQLVAAGERVLDVQPKLASRVRLLQAGDTNKNDPNDALSVAIAALRSRTCREVAAEDHPAVLKVWSKRHRDLARLRNQVACRLHAVLCDLVPGGIAKEISAAQAARILGQATPSGAVEVARAELAAEFLEDMRRLDAQLRGTRKKLAAAVKVSGTTLTQVFGVGPVIAGTIIGDIAGVPRFPGRDHFASYNGTAPVEVSSGNRKIHRLSLRGNRRINHAIHMAAITQLRHKHSEGRAYYEKKLAEGKTHKEALRSLKRKISDAIFARLQADARQAAATQAKGPGGHPGNDSASSAAGSHPARQLFGQATPGPGTSLRPATPAGTPSKPVSKKTQTTT

SEQ ID NO: 354828 - protein, 343 aa, unidentified
MQTIATIGLDIAKSVFQVHGVEATGQVVVRRQLKRRHVLEFFAKLPPCLIGIEACASSHYWARELQAIGHIVRLIPPAYVKPYVKRQKNDAADAEAICEAVTRPNMRFVPIKTFEQQGCLVLHRTRHLLVRQQTATINSIRAHLAEFGIVAPVGRRGVEHLLEVIADANDTRVPEVARACVAALGVQLRQLKAQILEFDRRILAWHRSSEASRRLNHIPGVGPLLATALVASIADPKAFRSGRDFSAWIGLVPQQNSSGGKDKLGNISKRGDRYLRTLFTAGALAVIRYAKIHGTKHRPWLVALLVRRPTKVAAIALANKLARIAWALMTKGSRYRQPAALRV

SEQ ID NO: 354829 - protein, 340 aa, unidentified
MKRLYSAIDLHSNNNVVVILDEQDRVMYERRLPNDLKVVLAELAPYRKRLDAIAVESTFNWYWLVDGLEEAGYTVKLVNTTAVKSYDGLKYTSDEHDARHLAHLLRLGILPVGYIYPKEERAVRDLLRKRAQLVRSRTVQILSIQNLASRNSGKGLSTADIRKLDDEAIAKLCGGDSHRALAVTSSLSVLRCLDEQIKRLEGVVLAQAKLRPAFEKLLTVDGIGQVLGMTIMYETGTIDRFEKVGRFASYARCVDSSRWSNGKKKGEGNRKNGNKYLGWAFVEAATFAIRYNERVRKFYQRKKAKTNGVIGIKAVAHKLARACYHVLKEQVDFKEALAFA

SEQ ID NO: 354830 - protein, 331 aa, unidentified
MLLAIYPMNTATLGIDIAKRSFDVCLLVGGQVIAKHFDNSPDGFAKLTRLLQKHAAEQVHACMEATSSYGTALARYLHEHGHRVSIVNPARIAAYAASMMSRTKTDKVDARIIAQFCLHQQPDAWMPPPPEVAELQALVRHIEALIVDRQQHANRLEGAEVPEPIRQSITVIIKVFDEQIKRLKKQINEHIDQYPQLRAHKDLLKSIPGIGSLTAAKLLGEILEFTRYPDARKLIAYAGLSPVTRQSGTSLRTRGHISKKGNARLRKALYMPALVALQRNPILQALKERLVSRGKSGKQIVVAAMRKLLVLAFGVIKSGTPFKPNFVLDKA

SEQ ID NO: 354831 - protein, 338 aa, unidentified
MELKRVGLDVAKNVFQVHGVDRNEEVRCRRQLRRSGVLKFFAGRPPCLIGMEACAGAHYWARELSKLGHTVKLMAPQLVKPYVTSQKNDANDADGICEAVGRPKMRFVAVKTVAQQEMQAAHRIRSELIRHRTAKGNQIRGLLAEFGLVVGQRLEVLRRVLPELLEDGDNGLSGGMRRLVDGLRRDLVQLDERVAEVEAVIVAEARANEACVRLQTIPGIGPLTASALVSAVGDGRQFKNGRQLAAWVGLVPRQDSSGGKPRLMGISKHGDTYLRTLLIHGGRAVERTCGAKTDPRSEWLRALGSRRHKNIAAVALANRNARVAWALLARGESYRAPA

SEQ ID NO: 354832 - protein, 368 aa, unidentified
MLKQSHYKVGCDAHKHYSLFAILDHRGRPVERTRVNHEPGAIRAFLSRFPEGTPVALETVGNWYWIVDEIEQAGCVPLLAHAQMAKKMMGHVHKTDKLDAEGLAILQHLGSLPTVWIAPGEIRDERELPRTRMALSKMRTALKNRMHSTLAKYALSLDTQSDIYAPKWRPQLLELICSLPVETRRCMQQELELLDQVQEQIRRLEARILERVQLTPTIQLIQSVPGPAEILSIVIDREVGSIDRFPSPHHFASYSGLVPKVTASGGKTHYGKMIKAANNYLKWAFIEAANVIVRQQHHPNWRKKYVVALFERTRQRKGHAVAVGTVARYLAEATYWVLKKSEPYREPVPRHPVGRESAISPKQGQART

SEQ ID NO: 354833 - protein, 330 aa, unidentified
MQFFLGLDLAKDTFVALLIDERGTVLQQRSFPNSAAGFDELLDWLPNSQQTLALCEPTGVYGKRLQHALASRLGSLHELNAQTLRRFSFSQVQTKTDQADALSIAQAARMLFLSRPEILEKSRVQPNLTREDLALWLNECDRLRDAIARLRNQIAGLEHSPAPTAGEVKQRRHQELQRLLLERKEVIRKIQELYRQLNDQDAACIDSIPGVGPLTTAAALVAIRDIRRFDSADALKAYLGTYPARRQSGLRERPAHVARHGNRLLRHMLWNAARAAVWHQHPQNPFRKLFDHLRAKGKTYGQAIGAVVRKLVQVIYGVLKTKTHFQYPAS

SEQ ID NO: 354834 - protein, 430 aa, unidentified
MSYRIAGIDVHKRMLAVVLSDVEVDGEYQFERRMFGSNPEQLRSLAAWLVEQEAEEVVMESTAQYWKPVWETLERYWKPLREKRESARRRSGTLHLAQAQSNRGRRGRKRDFADAERLLKRLVARELTLSFVPDAEQRLWRTVTRKKYQLRRERVRLHNQLESLLEEAHIKLSSLVSDLLGASALRMLKALADGETNPAALAALADQKLRATPEQLCDALGACTDLKPVYRRLLKMALEQLQFLEQQIGQLDQELATLLHPHQDAVQRLAEVPGLGVDSAQQIIAEVGPTAAVFPSAKQVSSWVGACPGDEESAGVNYSHRSPKGNRHMRRLLNQAANAAAKTKGSIFEIVYRRSVPRLGHNQTIGAIAHRQCRLIWLILHQGVRYEERGPAVNKQSKQRRTSKMIRQLRNLGYRIEPPNPQQPSPARPE

SEQ ID NO: 354835 - protein, 333 aa, unidentified
MAIAPEVGAVKGHSQKPSAKELFDFLKKNYPDGEYQAVYESGFSGFSTYYALTEVGIDCIVIHAADVPTTQYEDVMKTDRVDAAKLARSLKAGLLKGNYVPEKQYIDDRSVVRIRKTIQKQLSGYKSRVKHLLHCHGVEMPERFSKIQTHWSRAFITWLMKDVKLMSDTRTSLDLLIRQVEVIRGTLLEATRQLRKMSQTERYKRRHDLLRTIPGVGPVVSMCILTEVCDVKRFHNENEFAAYLGLIPTSHSSGEKIVHGEKTFRGNKQLGPMIIEAAWVTIGRDAGLGAQYFQYKQRMEPQEAIVRIARKLSNIIFSVLKNEKEYVPYQTGN

SEQ ID NO: 354836 - protein, 346 aa, unidentified
MKINRVGVDLAKNVFQLHGADYKGKTVWKRQLSRSKWLPVLCDTVEPGTEIGMEACAGAHHWARQLMQQGYPVKIIPPQFVKPFIKSNKNDANDAQAICEAMGRPDMYPVKVKTVEQQDLQAMHRIRDEIKSHRIAKANQIRGLVTEYGLVAPLQLHALRRAIPEWLEDADNGLTFLFRQLLQGLWGDLYALDQRMTELDKQIAVVAQEDPTARRLQQLRGVGPLIATALVATIGDGKQYRKGRDMAAALGLTPRQHSSGGKDRLLGISKRGDAYLRCLLVHGARSAMRTAKDKDDRLSRWIIDLQSRRHANVVAVALANKMARMAWAMMTSGVDYDPDLAAASVN

SEQ ID NO: 354837 - protein, 356 aa, unidentified
MEKITRGQAVRVGVDLAKRVIQVHAVDVAGRVLTSRALAREKFIEWCVQLPAGCIVAMEASSSAHHWARKLISLGLDARIIAAQLVSPYRSQGATGKNDANDAAAICEAASRPTMRFVPIKSIEQQSMLCVHRLREGIKEDRTECINRIRGLLAEFGLVFAQGSRELQGALSDVLEDASNELGTLARLTLQRAQAQWHELDAHLAWCDERIDAHVKDNAAAKTAATLIGIGPVTASAVVATVGDFKQFKNGAQFGAWIGLTPRQNSSGGKNNLGGITKRGDTYLRTMLIQGAKSAVMTADRRQDKISQWAVALRERSGWQKAVVALANKNARILWAVMAHGEAFDANHVSVKPVGA

SEQ ID NO: 354838 - protein, 345 aa, unidentified
MHIASIGIDLGKNTFHMVALGEHSKVLVRKKFSRTQLLAHTANLPPSLIGLEACSGAHFLGAAMREQGHEVRLIPAQFVKPYRKSNKNDFIDAEAIAEAVIKQNMRFVPIKNEEQLDVQAMHRVRDRLVQRRTALINEIRGFLLERGITFPTQPIHLRKNLPAVIEDAEQNLTPRLRWLLNRLWQEWKQTEIEIETVTDEIERISAEDERCRRLRQIPGFGPLVSTAMVAAIGNGAAFRRGRDFAAWVGIVPRQYSTGGKPRLFGISKRGNIYLRRMLIHGARAVLFRIKYDTAGLGQWVHRLSQRAPRNKVVVAIANKLARIAWAVLSSGKDYRHQALSAAAAA

SEQ ID NO: 354839 - protein, 359 aa, unidentified
MHVDTHQHRFYGGIDLHARSMHLCMLDAAGPVVCDKNITARPEAFLKAIAPFRPDLVVGAECRYAWYGLADLCTQEKVPFALGHALYMRLIYGAKAKNDQIDAGKIARLLRGGNFALACVYPQGLRETRDLLRRRTDLVRQRAALFTHLQILNGPYNLPPFPKKLSFAANRAELNIAERFRDASVQKSAAVDLAVIDALDAQISALELYLTRTAKVDDVQTYHRLQTIPGVGKILALVLLDEMHDIGRFGSAGQLLSDARLVRCAHESAGKHLGSGGKKIGNAHLRWAFAEAACWFLRSSARAKKWKEKQLKKRSEGRVLALLAARLARAVYHLWRKGQAFDEARFWEGQPAKVPAPTV

SEQ ID NO: 354840 - protein, 457 aa, unidentified
MGDDVLVSVDPHKASNTLAVMDPVTKTVIARQRFMNTAVGYRRLREFAGGWTHRRWAVEGCHGAGRSLAQRLAGDGEIVLDVPAKLAARVRVYSQGHGRKSDADDAISIGLAALNSTRVAVVRRDDTLVSLRLLCDRRDELGALRTQAVCRLHRLLCELTPGGTHRGLRASRAEQLLAKLRPVDPVDVVRCQLAHQHLDDIRALDAKMTAVRAQIAALVDGTGTRLTELYGIGPVIAGRILAEVETIDRFPSKDHFASYNGTAPIDASSGEQVRHRLSRAGNRRLNHALHMMAVTQIRQPETIGRRYYERKRLEGKTPKEALRCLKRRLSDVVYWQLVADRRATITQCGSATTPTRTRPTSTSATTPVPRTAPPRRPPHPTASTGSSHSTGKTAASSASKSSTPAVGSPKTSSTKQKTRAEATRKPTTSSAAVPDRRPTSAAAAGVKAGAATRRARP

SEQ ID NO: 354841 - protein, 388 aa, unidentified
MIYVGIDIAKLNHFAAAISSDGEILIEPFKFTNDYDGFYLLLSKLAPLDQNSIIIGLESTAHYGDNLVRFLISKGFKVCVLNPIQTSFMRKNNVRKTKTDKVDTFVIAKTLMMQDSLRFMTLEDLDYIELKELGRFRQKLMKQRTRLKIQLTSYVDQVFPELQYFFKSGLHQKSVYALLKEAPTPNAIASMHMTHLAHLLEVASHGHFDKEKARELRVLAQKSVGINDSPLSIQITHTIEQIELLDSQLFSTELEMANIVTCLHSVIMTIPGIGAVNGGMILGEIGDIHRFSEPKKLLAFAGLDPSVRQSGNFQASKTRMSKRGSKVLRYALINAAHNVVKNNSTFKAYYDAKRAEGRSHYNALGHCAGKLVRVIWKMLTDEVEFNLE

SEQ ID NO: 354842 - protein, 342 aa, unidentified
MHTVVGIDIAKKVFQLYWIAETGEVMSVQLKRSRFLAHFANRPPCLIGMEACGGSQHWARELRKLGHQVKLVATQMVRPFVGGNKNDAADARAIWTTMQQPGVKAVAIKSEAQQAVLALHRMRSQLVKFRTAQINGLRGLLTEYGEVMPQGRAGIRRNLPQALQRISDRLPAVLIDTLREQYARVSSLDTQILEIERRLQQWHAQDAASQRIAAIPGVGLLTATAAVATMGDARAFRSAREFAAWLGLVPRQSGTGGRVRLSGISKRGDTYLRSLLVHGARSLFHSKSPPQWATDLARRRPKNVTFVALANKLARTIWAVSAHQRDYQSGYRHSRVAEAGTI

SEQ ID NO: 354843 - protein, 388 aa, unidentified
MNLIPVAGIDVGKRFSEMAVLSPSNEVFARIRINHDSFKNFEKAFELLKKAEKEFAAKPVVVMESTGHYHKILFHALNNVGYEVSVINPIQSDSIKNIGIRKVKNDKVDARKLALLYRFEQLKGTKIPNEDIDCLRSLCRHYYKLSDQLTAYKNKLLGIVDQLFLSFTDVFEDVTSVTALAILDKYPTPEDILNADRDELITLIKKSSRKNLKWATAKYELLYSKARDFKPLSINSVANVAMLKANLSMIKTLYQLLENALDAIYELLEQDSQKDMPLLSLTIDILCSIPGIGILTAVTIIAEIGDFSAFSKPDKLVAYFGIDPSVKQSGQFEGTKNKMSKRGSRLLRRVLFTTALANIRKKRNGKSIILFYMNTTEKSVLANLRKWL

SEQ ID NO: 354844 - protein, 430 aa, unidentified
MEQGNDSRLRAFRQVKTEIRGSTEYLIVGIDIAKERHNAFYGTATGRTLHKGMFFDNTYDGFQKLLNQTDALKVQHGLRKVVFGVEPTANYHKPLGEYLIKGGHLVVLVSAAATSKNRELLDGRWDKHDTKDSANVADLISQGKCLYYDCPGEDLRSLRGLLSLKRRLKKEEHGLRVRIRNQLLAQYFPEMDQHFGSVASLNVVRCCLDPSLISLMEYNEFCRTVSPGKANLAQQRRLTQIWRAAKQSIGCSVGEAVCVEAQIMVTGLHQVRETIKTLEDKIEDICLKFPEYSFLLTIPGFGPDISSKVLAAIGDPERFTSGKQVLKMSGFDLCASRSGKTSNSATPVISKHGKGDLRYALYQAALISSLNNKDFIVYHTNKIRGREREKGIGIKMRVKLAAKLLIIAWTLMKKKEPFDPGHLNRLEKAA

SEQ ID NO: 354845 - protein, 326 aa, unidentified
MKDANSGEPTMIAGIDLGDRYSYLCLLDAESGEVIEEGRIRTAPEAFGRRFGSQRAMRIAIETGTHSPWTSRLLEERAHEVLVANARKLKLIYAESRKTDRIDTEKLARLARLDPKLLAPIEHRGEESSQAHLTLIRSREQLWCAPGLGSSTTYGLCGQGVGLPPAQVLGAGLPQEGRGPDTGKALKPALDPILQTIAELTARIREYERKLAALAEELYPETKLLEQVQGVGPLTALAFVLIVGAPTRFANGRAVGAYAGLVPGKDHSPEIATPRGASPDTATSCSEGSWWDALTTSSEHSGKTPISGVTEKRSPKGAARTPGRGR

SEQ ID NO: 354846 - protein, 349 aa, unidentified
MLIIGCDFHSRFQQIAMVDTETGELIERRLEHGNGEAKKFYAELQQPGRVGMEATGYAQWFEGMLAKLGHELWVGDAAEIRAAMVRKQKTDSRDALHILDLLLTNRFPRIWIASPEERDVRQLLRHRHKLVCLRTSLRNQLQALAMGQGVCRKKKLWASSGRAELEALGLDPWARRRRQELLEILDRLDPSLAELDRAVAQEAEHRPAARYLMQQPGVGPVTALMFVLTIGPIERFQRSKQVVSYLGLNPRESSSGGRQRLGAISKQGNSLARFLLVEAAQTASHYDEDLRRDYQRLKFRRGSAVAKVAIARKLAVQLYWKLREYSSPAPSTRTQGSPETPVVGASLSS

SEQ ID NO: 354847 - protein, 342 aa, unidentified
MTIVAGFDVHRTQITFDALDTDTGEVTRGRIDATPTAVERWVGRFAGREVHVALEACTGWLFVSRALGHAGATPHLAEPVETHALRGRKRRAKTDREDARWLRRLLCEGRLPESWMPPEHVREWRSRARLRKTLVDERTQWLQRIQATLFHHGIGGVPEKLNGSGGREFLGRLELPADARERIEISLAMIDSLEDQLRPLEAELRKLARRQTGCRALMELYGMGELTSLVTLTELGDVERLSASRKAVRMAGIDIGVHRSDRRSRVGKLNRQGSPDLRWALYEAALSACRTTSPDHQDYLALKARGLSHTRASLTIARKLARRSFHILRELGPAALEPLPTT

SEQ ID NO: 354848 - protein, 356 aa, unidentified
MNVTHYIGFDVHKKSISYCVKTADGQMAEEGRLIAERSTLRQWASERPQPWRGAMEATLFSGWVYDTLRPYAAQLDMAHPAMMRAISAGKKKNDQIDARTIADMVRCDWLPVCYVAPPEMRELRRLLRYRGLVVRESVRMKNKIAGLLMEVGAPYNKERLHGRKYFTDLLKNLEEVPESVKDLLRLTRGAMETFEAAQKQLVKRLLAEPALAERVERLASIPGVGQITALTWALEIADPQRFSSSADVMSYCGLTAALKSSAGKEQRAPISKQRNAWLQTALIEAAKLAPHWNPQLAQVHQRELERGHRNRATLAVARKLAAYLLAIDKSGKPFQLRTPPPAAQPTVAASEAEKAA

SEQ ID NO: 354849 - protein, 381 aa, unidentified
MQAIKTLVGVDVSAKTLAAKRRRKNEGKDEAKEFPNDAAGHRELLKWIGRGARLCMEATGVYHLQLALMLVAAEVEVMVVNPRVAKDFGRALANRSKTDRIDAGTLLEYVARMDFVAWKAPSSAVMELRELGRRLSELVHAGTEEKNRFHAKNVAAISRAVISDVQAHVAQIEKRVTQIEKAAALVIRADADLREQFEILTKVPGIGRRSAILLLSELAVLDPTMTVKQIVGHAGLDPREYESGSSVQKPPRISKAGNAHLRAILYMPALTAIRHDRGARLFFAQLVARGKKKMQAIVAVMRKVLHGIWIVLQRRVAFDSSVLFAVSLAKAESSDSAVAANQPEPSQDHPKGRSEAEELRQQLDPGSAQATRSRRKRSKAA

SEQ ID NO: 354850 - protein, 463 aa, unidentified
MRGNGRNAGKADTGAEAEGLPVIRRQVAGLDLASEVHWGCAPCVDGVGREVEKFGATTPELERMAAWLKERNVESVAMESTGVYWIAPHEVLERHGLEVVLVNTRELARVPGRKKTDRVDCKWIQRLHSCGLLTSSFRPPEQVVMLRTLVRDRANLVAAAADWLRRIQKSLDQMNVRVHRAVADIEGVTGMAILRAIVNGERDPRQLAKLRDRRCKQSEEEIAEQLSGHWREDHLFSLRQALQVYDSLRERIADYDGEILRQLAEMERDECRGQQAPPLKNERKAKAIRARGEEPLRQALYRMSGIDATAIDAIGVGAIGVVLSEYGPDLRRFPSEKQFVQHTTLAPHKPTSGGQVLRKKKRGSASTRVAGALRMSAASMRTSKSALGAYYRRIAHRLGPDVAVFATARKLATLIYRMLRWGQPYVDEGAQAYEKRYQQSRVKSLTATAKALGFQLTPSVSVA

SEQ ID NO: 354851 - protein, 345 aa, unidentified
MPIVGGLDIHRKQITFDYLDTATGQVRRGQIAPADRVHLRAWLARFAGRDDVAFALEGCAGWRYVAEELAAAGITAHLAEPADTAFARGRKRHAKTDKTDSRHLRQLLAEGRLPECWIPPARILECRALLELYNDLRRERTAWAQRIHAVLFHQGAPALGEGALRTEKGAAGLRAAAAAHLSPAGQLQVATALEVIDALEARLHVVRHQLLDAARHLAGAKALAARLYGVGPVTALAITCWLGGAGRFSSSRQAVRFAGLDITVSSSDRKGPPGKLSRQGPPVLRWAVYEAGKAHARTSAPDHRYYAAVKDRKNSKRACLSEARKILRQAHHILAELGDDALAAA

SEQ ID NO: 354852 - protein, 409 aa, unidentified
MKLFVGLDVSSQDAKVCFLNGEGDRLESFTITNDLPGAIILKEKILNTASKLTCEVIKIGLESTSIYSYHPAMFLHNDKELRTYGSQVFMINPKQIANFKKSYPEMDKTDAIDAFVIADYVRFGRHTMSIVKEEQYIALQQLTRSRYQLVHALTKEKQHFLQHLGLKCSQFTQDVGSSVFGNAMMELFLERFSLEELAQMPLQDLALFLQEKGKNRFGNPEEIAKSIQKAVRGSYRLSKVVEDSIDLLLSTSIQIMRTYQAQIKEIEKGIESLMSSLPQTLESIPGIGPVFAAGIVAEIGQIERFTDETRIAKYAGLFWKKYQSGRFTAENTSLTRSGNQYLRYYLVEAANSVRRHVPEYRDYYAKKSAEVPKHKHKRALALTARKFVRLVDALLRNNQIYAPGRSVDR

SEQ ID NO: 354853 - protein, 400 aa, unidentified
MRAVFGIDVSKTSSEVAILVNGEKVHSYTILNDAIGFNRLLGDLKTVHNPEIIFEATGVYSRRLQAFLEEYSYAYTRLNPLEAKKQLDSLRVRKTDKIDAEKLAKSQLVHNRKPTYVQEEVYQHLRDLSRFYQNMTEDLVRTKNRLHKVLQDTFPELETLLSTPTGEQYWNIVMAFPCKEFVLSLSQSNLCEIVRQSTSKRISEKRIAYLTDKLIKLAKQSFCAVKNTSPMLEEVRYYAQELLRLSERRQVVLNDMVALAQPLPEYDILRSIPGIAETTATSIIGELGDIRRFQSSNQINAFIGIDLRHYESGNFLAKEHITKRGNPYARKILFKCIHNIASASHTNPCHIADFYEKRKRQSTIASTKPHTIASIHRLIRTMYYLITHNKLYDYSLTQNR

SEQ ID NO: 354854 - protein, 438 aa, unidentified
MSNKVIFNLDELFISVGIDVGADFSWMSIALPNQQFVGKPYKILHNSIDSLTTAVSKIKEAEELYSLESRIFLESTGIYHYPLFCYLRDKGFNCSVINPIITKNSTNINIRKVHNDRFDSKKAALVGLKPDLKVSLMPSDLALNCRNLCREYYDLMDNRSAYVNKLQGELRMAFPQYLGIFSKVTINTSLTLLETYTSPSAFLEADKQEIIDIIRSTARFGLTYAQNKYNAIIQAATDANQFGYIINSNIKRIRLYISFIRKYDEEINSILESLHELVDANEDADFVKQIHLIETFKGAGFLSAVSIMGEIGDFSAFSKPKQLFAYFGLDPAVKQSGKFEGTKVQMSKRGSAIARRVIHTLTLQSISISRNGEAKNPVLREYYLKKCDSKPKLVAMGAVSHKVCNMIFAILRDNKPFKIIAPQEHIKQYNAAKCDIAA

SEQ ID NO: 354855 - protein, 407 aa, unidentified
MIFVGVDWAEAHHDVHVQDEQGKRLSGGRLPEGVEGIGRFHDLVGVHVDDPSEVVIGIETDRGLFVAALVAAGYLVFAVNPMSTSRYRDRHSTSGAKSDPGDAKVLADMVRTDRHNHRPVSADSEAVQTVKILARAHQSMIWSKGRQTNALRSTLREFYPAALAAFDDLSGGDALEVLRVAPTPELGRGLSVSKIAAALRRGGRQRRVTERASEIQAVLRAPQLAAPAAISTAMGASVSASVAVIAAMVAQIAVLAEELEAGFDQHPDAEVVRSLPGLGTVLGARVLGEFGDEPNRYGSAKSRKNYAGTSPITRASGTKRVVLARYARNQRLADAIYLWAFAALSASPGARIFYDCRRAAGDTHHAALRALGNRLVGILHGCLNHHSTYNENIAWAHRTEQETNQAA

SEQ ID NO: 354856 - protein, 413 aa, unidentified
MRNLLEVCCGLDVHKEVLVACMLKGGIDEEPEPVIKEFPTLLYGLDEFKKWVMENDCHDVAMESTGVYWFPIYNVLESIFYEDGQVNIIVANPHHMKNVPGKKTDIKDAHWIATLLRAGLLAPSYIPPKEIRELRDWTRYRDILIKELVGHKNRIEKHLQQCGFKLSTILSDIFGMSGFELIKKLCDKGKLTQLDVEECLHGTLRAKSAEVQQAVAGQLSAHDKVFLTNLVKIMENCQKEIEEVERHIEGGARQYEPTLQLLETVPSIQRRASTIIVSELGVDLTMFPTAGHLCKWAGLCPGDNESAGKKKSTRITKGNPRIKSVMVQCAWAATRCKNFFLRDWFYRLRARRGTKKALIAVARKLLAIVWHILTTGEIYEETRYEETKKNQEERRKQKLKAEAAKLGFKLIPA

SEQ ID NO: 354857 - protein, 358 aa, unidentified
MERYLGLDAHGSSCTFAVVGPSGRKLRQDVVETNGTALVRYLRSIPGRKHLCLEEGTSSAWLYEILSPHVEEIVVAGLTERRRGQKNDALDAFQWAEELRTRTIKTPVFKAPRRFSRLRELSRVHSMLVRDVVRVQGRLKAMYRARGIPTPGASVYGASGREAWRAKLPLSCRWATEKLYEEYDCLRALRQEAERELVTEARRHPISKILVTAPGMGPIRVAQLLPIVVTPHRFRTRSQFWAYCGLAIVMRSSSDWVRSKSGEWVRAQVQQTRGLNRNHNSRLKGIFKGAATTIVTQLTSDPLHEHYLRLTSAGSKPNLAKLTIARRVAAIVLRMWKDEKEYDPNELKQQEILASATG

SEQ ID NO: 354858 - protein, 343 aa, unidentified
MKLHVIGIDLGKTIFHLVGLDSTGKAVIRKKCSRKQLLAFTANLEVQLIGMESCSGSHFLGRALREQGHEVRLMPAQYVKPYVQTNKSDYLDAEAIAEAVQRPRMRFVPIKTEEQLDLQALHRVRERWVMRRTAVVNQIRSLLLERGLTLPKGRRYVDEQLPRILEDAELRLSGSFRVLLAQLKIELEQLTARIEEMDRVMQKTARENEACQRLTEIPGVGPVIATALIGAVGNASTFGKGRKLAAWMGIVPGEYTTGGKQKLLGISKRGNKYLRTLFIQGARSVLQQRHKQAPGLSRWIEQLLERTHQNVVIVALANKLVRMAWAVLCKNERYRAPVLAVTP

SEQ ID NO: 354859 - protein, 347 aa, unidentified
MVTLGGDCHKRTHTLVAVDDNGQQLGAKMVSAVSAGHLEALDWARQWAERRWALENCRHLSRRLEADLLLAGEVVVQVSPKLMAGARRSAREWGKSDPIDALAVARAALRESDLPVAQLEGKSREVKLLLDHRDDLVGERTRVQNRLRWLLHELDPNLNVPERSLDRKVVLKRIAKVLAVHRGVAADIAVEQLERVRQLTERINELEGQIRAVVSHLAPNLLELDGCAALGAAKLIGETAGITRFKTPARFAMHNGSAPIPVWSGNSARHRLNRGGNRQLNVVLHRIALTQMRLGGRGYDYIQHRRACGDTKKEAMRALRRRISDEVYRRMWQDSMKATSDQACAAA

SEQ ID NO: 354860 - protein, 344 aa, unidentified
MDHYAGLDVSLEQTSVCVVDAQGQVVREAKVASEPDALVDFLAREDLEIARVGLEAGPLSQWLHAGLIAAGYEAVLLETRHVRAALSAMTVKTDRRDARGIAQLLRLGWYRPVHAKSASAQEVRSLLTARKLIQGKLLDIESGIRGVLRGFGLKVGAISRGRFEARIRDLVEGQAMLATVVGSMLAARSALQAEFARLHRALLALVRADPVCRQLMSVPGVGAVVAITFKSGVDDPTRFRRSRDVGPHFGLTPRKYQSGELDVTGSISKVGDRMVRTALYEAASVMLTRTVRMSPLKSWALAVARRRGAKKARVALARKLGVVLHRMWVDGTDFRWTRETPAMA

SEQ ID NO: 354861 - protein, 326 aa, unidentified
MSKVIGIDISKQTFDVSFREENKLLHQVYANNLKGFKKFIESDFYKDDPIVVMEASGPYYVSFASYLYDNAIKVCVVNPLMVKRFGQMKFYRAKTDKKDASVIMEYGETVIKSLSLWKPETKGVQSLKQMRTTVELLHKQERQSKNQLSAFKSTGVLNHEVERGLKSIIRSLEKTISKIEDQMLVVCNSCYKESLELITSVPCVGEKTAMMLIAITDDFSKFEHYKQLIAYVGFAPRVYQSGTSVRGKGHICKMGKSQTRKLLYMCSWTAKKYNKTCKEMYERLKAKGKPERVIKVAIANKLLKQVFAVATSKQKYIENYQPNICF

SEQ ID NO: 354862 - protein, 347 aa, unidentified
MRFYNRQHCHCCGIDLHVKTMYLCILDSAGQVLVHRNVPSTPEEFLKTIAPYRDDLVVAAECMFTWYWLADLCAAEGIVFVLGHALAMKAIHGGKAKNDRIDSHKIVSLLRGGLLPQAYVYPAAMRSTRDLLRRRLHLVRKRGQLLAHIQNTRAQYNLAAFERRLAYPANREGVADRFSDPSVRKSIEVDLVLVDTYDGLITDLELTIVREAKRHDADAFHRLRSVPGIGKVLALTILYEIHDIARFDRVQEFASYARLVKCGHQSAGKKLGTGGAKMGNVHLKWAFSEAAVLFLRHAAGGKKLLAGVEKKHGKGKALSILAHKIGRAVFYMLSRGTIFSMEKFLAA

SEQ ID NO: 354863 - protein, 366 aa, unidentified
MLVLESIQLSINPQLKQREDMKKFFVGIDFSKRKMDVSIVEKDFPERTIDCKQFINNAEGAKKMCEWVEYTTNTSTKLEGEVLFCCEHTGSYCLEVCDYLSENGKYIWLGNPLDIKRSMGLVRGKDDILDSRRIATFAAEKHHRAIMYMRPEDSTRALKYLLSIRNTLVEHKKALTCQIKENFPKLHDAALLCEIENELKHALDFIKTEIKKIEKMMLDIILSNKEYKHTFDILTSMKGVALINAAAIIVFTDNFKRFSFNSRKICTYWGITPFRNESGDSIRRGTHTSPIRNNWLKAILSEAVLCAIRYEKRLKEYFLRLIAKGKHRNVALNNTKNKLLKTLVAMVRDGKKFDENYVSIPQTCAV

SEQ ID NO: 354864 - protein, 413 aa, unidentified
MGHKTAEVELHYERCCGLDVHKELIVACFRNGTKNTIKEFGATSKELQKLAEWLISNDCEMAVMESTGSYWKPVYNILELFGLDVMVSNAREVKNLPGRKTDVNDAEWMARLLAQGLLRPSFIPDRPQRELREVTRYRKSLTEERAREINRLGKMLEGANIKLTSVVDDVLGKNSRSLLEAAIAGEPITGITIEGMLKGKIKGKAALLVDAMDGVLSKTQRLLIKAVLDHIDDMTQRISDLDDIIRVEMEKYDEAIRRLDTVPGIGPDSAQTILAEIGLDMDQFPTAGHLAVWAGVCPGNNISAGKSKGGSTRKGNQTLKTTLVQCAQSATNTKDTFFRAQYDRLVVRRGKNRAKMAVAHSIIIAIWHMLKYESDFIELGGDYYTKFNPEKKINMYLKKLAELGWTPPVPATA

SEQ ID NO: 354865 - protein, 375 aa, unidentified
MEGAPTLDTTTFVGLDVHARSIKAVSLDVMTGEVRCATFGYDAGAVAEWVRSVDPKAKCVYESGVTGFDLQKRLSGLGVDCVVGAVSKMIKPSADRRRKNDRNDAEFLARMPSVGNVVEVWVPDDECEAARDLTRALEDARDDLSRSKQRLSKFLLRHGLVFDERTPTGRRKGNWTRAHWSWIESIRFAEGADNDVLAYYVDAVRRAAEDKARLEGLVEAEARKPRWRRRVDSLRCLKGVDTATAADLVFEAGEFSRFRNARSFAAWVGLTPSEHSSGESDRRGAITKAGNKHLRKALVEAAWHYLTCSGRPKDLAKGQAPDRVARRHAAKGVRRLVERREALLARGVHGSKANVATARELACWVWAVGLMAEEA

SEQ ID NO: 354866 - protein, 366 aa, unidentified
MSDATATMTAAANQSSTMTILAIDLGKFKSVACRFDPARGQHTFETIATTPVTIHDLLIAANPALLVIEACSICGWIADLAESLAIAVRVANANTEAWKWKKVKRKTDRDDALKLAKLAAADQLPIVHVPQLAVRQQRSLIKYRHALIDRRTGVKNTIRSLLDAQGLPLPGRSRGWTIASIKELKSLARPLQECEVTNLWRGQLDSELKMLEAVSGLIKEADKKLDAIAAKDGRVTRLRTIPQVGARLAELVVAMIDNPHRFKNARQVSAYAGLVPKQYQSGQMNRLGRITGQGPGLLRRMLVQIAWGMQRRTDTRGHAVFERLCHGQRTRRKQAVVALARKILIWCWAMLRDGSVWDSTRDVSLS

SEQ ID NO: 354867 - protein, 372 aa, unidentified
MTKDTLCIGLDTDKKHIDIAIAEPLVPAKAGKGELRYYGRIPNERAALERVIKRLRKDGQQLRVCYEAGPCGYTVHRWLDGKPGVTCEVIAPSMTPRRPGERVKTNRRDCLSLARLLRSEELTAVWVPDPAHEAMRDLVRARGAAVADVTRCCQRIGSFLLRQDVRYAGKPWTQKHRAWLGRLAFREPAHRLMFGELLEALDQAQARRDRLTDHIAELVPSWSLAWLVEALQVLRGFRLINAATVVAEIGDIRRFARARELMGFLGIVPSERSTGDKVRRGPITKAGNSRARKALIEAAWTYARPAKRPKADANRHSPALRAIADKARHRLGARYRKLVARGKLKPVAVTAVAREQAGFIWAIAHAAAPTKG

SEQ ID NO: 354868 - protein, 379 aa, unidentified
MTIVADTPTHVDLEVTVGIDTHADTHVAAVIDPLGRHLGQASFDTTVAGFKALLAWAAEFGTIILAGVEGTGAYGAGLARFLTAEGVTVVEVDRPDRKTRRDQGKSDPIDAYAAARAAASGRASATPKARTGGVESVRVLRVARTGAVRARAKALTQLKALITTAPDELRAQLRSLDGSRLVARCARLRPDRDEAPTPSVHAKRAPRPGRLIDPNAATKRSLASIAGRVQLLDREIAELDDDLHALLTPLVPTLLAIMGVGLDSAGQLVVTAGDNADRITTEAKFAHLTGVAPIPASSGKTAGKHRLNRGGDRAANAALYRIVMCRLRHDPATLAYVEKRTKEGKSKKDIIRCLKRFVAREVYAAIQADLNPRNPQTAP

SEQ ID NO: 354869 - protein, 350 aa, unidentified
MNKIYAGIDLHSNNLVCALVDQAGHRLKHQRLDNRLGLVLEFLQPYQSRLQTVAVEGTFNWYWLVDGLIEQDYPVDLANAAAIRQYDGLKHGDDESDAYFLAELARLDILPTGHICSKEQRPYRDLLRRRMLLVQQRTSQMLSLKSLYARMTGQTLSQGLVKSLSIEEVPKYLSHVADRQIATEQVRLMEQFTQGIRQIEKTVEKVADQLPCYARLQELPGIGRILALTITMETDQISRFASPEDFASYCRCVKAERESNGQRKGFNNEKCGNKYLAWAFVEAAHGAIRTDAACRRFYERKKAKTNAAVATKALACKLAKAAWHVMKKNEPYDPARVFPFLREKNAAVKA

SEQ ID NO: 354870 - protein, 326 aa, unidentified
MEHELHYIGIDTAKEKLDVDVLRPDGRHRTKKFANTTKGHDELVSWLKGHKIDHAHICIEATGTYMEPVAECLYDAGYIVSVINPALGKAFAQSEGLRNKTDTVDARMLAEFCRQKRPVAWEAPHPLERALRALVVRHQALTDMHTQELNRTETAREVQRPSIDAHLLWLEAELKRLEKQIKDLTDDDPDMKHRRKLLESIPGIGEKTSAVLLAYIGLKNRFAHARQFAAFAGLTPRLHESGSSVRGASRMSKAGHVSLRRALYMPAMVATSKTEWGRAFRDRLAANGKKGKVILGAMMRKLAQVAYGVLKSGVPFDASRHDPVAA

SEQ ID NO: 354871 - protein, 342 aa, unidentified
MEFYSGIDLSARDSSICVIDGQQEKVREVKLRNDLGKIIEELTPYRPNLQIVVESTFNWYWLVDGLREAGFDVCLAHTLGLHMITGAKIKTDRRDAYSLAKLLRVKMIPKAYIYPAETRPIRDLLRRRLSLVRQRANEYSSIRHLLMREGILDHSRNRVKGIEEQDLERWFKHPLLRLHAAQEVERINLYTTQIEQLEERIIAEAKPNKEIGRLRQVPGLGPILSLTIFYEIGEISRFKSVRNLSSYSRLIPGVAQSGTVNRRGRASKQGNPYLKNAFTQAAIAAVRWYPEVERYYESHLKKRGGKASKLVAYNIVAHKLAQAVYQILRYGVSYQKKLLFSS

SEQ ID NO: 354872 - protein, 345 aa, unidentified
MDQISRIGMDTSKHVFQLHGVNAAEEVVLRKKLRRKEMVSFFEKLAPTVIAIEACGASHHWARLLHSFGHTVKMIPPQLVKPYVKRGKNDAADAEALCEAMSRPTMRFVPVKTAEQQAALMLVGVRDQMTRHRTQLANAIRGFAAEFGLTAAKGMAHLVPLLERIQTDESLPALARGLFAIQAKEYEQLQTQIDEVDAQLMARHRADDCSRRLAKIPGIGPIGAMLLTMKTPAPELFRSGRQFAAWIGLTPKDHSTAGKVRLGVITRAGDEGLRSVLVVGATAVIQQARRSGKASPWLGALLKRKSPKLAAVALANKMARTAWKLMLTGEAYTATPAPAALAGAA

SEQ ID NO: 354873 - protein, 368 aa, unidentified
MRTDLSENFPTHSPTLMKNLAAPEGDRRFGHKLTRVGFHPDGVNLTPEGITMQTILDLGADVDSRYIWVACAAHSFAPYRIGNTRSAILAWLHTLPRGSRLAMESTGSYHELLAELACKAGLQVFVVNARDLRRYAQGVGQRGKTDRISAELIARYVAHEHTELHAYVPPTQEQRALQQLFKRRAKLTVTKGALIQSLRGLRGANREIKQLMSALDHLITHIDRLTERTLRKIPPAREAAEHIQTIAGFGALSSAYLGNSFTRHPFSSSDSVVAFSGLDPRAEDSGKKHGRRRLSKRGPSEARRILFNCARSASRTKLWRPYYQAQRAKGLSATAATVIVARKMLRVAFALYKTKQPFDSARLTFGPA

SEQ ID NO: 354874 - protein, 414 aa, unidentified
MEKERIDIYHKRNTCFVGIDMHKDTHCAVVIDCWMNKLGEVNFENRPSRFPAFVEDVRKICGTKEIVFGLEDTRGFGRNLAAYLVGRKFEVKHVNPAYTSAVRLANPIIYKDDSYDAYCVARVLRDMVDTLQDAKHEDIFWTIRQIVKRRDLLVKSNVMNKNQLHSQLAYSYPSYRKFFAMIDSKSALCFWENYPSPEYIWNTTPEEIYQTIKPVHQALKIQRIHEIISMIERDGDTRKDYQPERDFIVRNIVKDIRHNKELIAEIDDELRKLIPLTGYKLHTMPGIDLVTEAQIISEIGDINRFPDSDKLARFMGLAPVQFSSAGKGKDQRCRNGNRALNAIFHFLAIQMVAVSASGKPRHPVFREYFEQKVKEGKNKPQALVCVARRLVRIIYGMMKTKTEYRPYEKADDKN

SEQ ID NO: 354875 - protein, 361 aa, unidentified
MNVIHYIGLDVHKKTISYCIKTADGRIVREGKLQALRSTLRSWAESLREPWCGAMEATLFSAWIYDTLKPYAQRLVMGHPAKMKAITAGKKKSDSIDARTIADLLRCDLLPTCYVLPPEMRDLRRLLRYRNMVVQQSVRMQNKMAGLLMESGTAFVKDKLHGKKYFSELMKSLEEVPESVKDLLRMSRGSMEMFESTQKQIIKRLLSERALQQRIERLLSIRGVGPITALTWALEVSDPHRFSSIGDAVSYCGLTAAFRSSAGKQQRGPISKQRNAWLQTVLIEAAKLAPRWNPQLATLHARQLELGHPNRATLQVARKLVAYLLAVDKSGQPFRVLTPPPTLENATKTKRRKRASIAKAA

SEQ ID NO: 354876 - protein, 335 aa, unidentified
MKEIKTLGIDLAKSVFQLHGVDERGVVVLRRQLKRAQLLNCIAQLPPCLVAMEACASAHYWGRQIKALGHQVKLIPPQYVKPFVKGNKTDRNDAQGICEAALRPDMPAVALKSEEQQAVVSLHRLRAVLEKQRKQLANQLRGLLGEFGIVIPRSMAALRRELPQAIEGVPAVLRSSLQQCAERLRQLQELCEQHTQQIQHLAQATPVCRRLMQERGIGPLTASAYTATLGDPRHYRNGRQVAASLGLVPRQHSTGGRAVLLGISKRGDSYLRTLLIHGARAVLRHVPGKTDPLSVWLQQLARRVGMNKAAVALANKNARRLWAIWRAESAELAAA

SEQ ID NO: 354877 - protein, 365 aa, unidentified
MDAIYIGVDFHARQQTICYLKTETGELVIVELKHQDKEQVRAFYQQFSAPLIIGLEASGYTPWFEALLEQLGCEVWLGHATEIRRRARWRQKNDRRDAELIWDLMVHHEFPRLHRPTVQSREVLRMLRYRQKLIKLRTMTKNSLQAIALQAGLAKGQQLFSSAGQEEFKAAAMSPVLQWQREHWFELLKPFNQQLLETMVWFKEQSNDLVIKRLRTHPGIGLLTSLCLLHTLQPVSRFRNTRKVVAYAGFDPVERSSAERQHFLGISKAGSRLLRYLLVEASHTAVRYDEDLKRFYKRVAERRGRPKAKVAAARKLLIRAYIMLRDEIDYAEFRRRAVAVRLARRGQGPASVPEVLIGQSASPGA

SEQ ID NO: 354878 - protein, 416 aa, unidentified
MTHPKMQYTYVGIDSHKDTHTAVFLDCFFEKLGELQFHNLPSSFDSFLLQAQAYLMPGTSLLFGMEDCSSYGLLLMKFLREKGYQVKHVNALLVARERKNQNTTQKTDSIDAECAARVLLSKFSELPDASHEDKYWVLRSLVVRRNLLVRHRAATKHYLHSLLTQHYPNYRRFFEKIDCKTSLAFFERYPSPGTLKNVTAEELAAFLEIPSKRSVGMAKAKQILKSLHDIGAGASNTHQEVRDSVVRSAIRQIQFSIDEANTLEASIEAFLKEFNCTLTSMVGIDTITAAQLLSCIGNIKKFSSPAKLARYAGIAPVTHASGKKDLQFANQRGNRELNSLFFWLAIRVSYPMGPYHRVMNSFFHDYFNRKMSEGKTKRQAIKCVERRLVNVIWTMLTNNQEYVNPPTYLLRDASDT

SEQ ID NO: 354879 - protein, 464 aa, unidentified
MVRKNMNAKKNKRAAQILKTIQPDSAGIDLGSREHWVAGPPNQDNTPNVERFGTTTPELVRLAKWLKEQGVKTVAMESTGVYWIPLFEILDHRGFEVLLVNARQIRHVPGRKTDMLDCQWIQRLHACGLLRGSFRPSDDICRLRAMIRERSMMIEQRSDWVRRMQKSLDQMNVCIHQAVSDITGVTGMAIIRAIVSGERNPQVLARMRDRRCSKSEQQIAEFLTGNWRSEHLFNLRQALKIYDQICNVIEDYDLEISNYLAELQSPGSPDREVPPPISKAKAKSIAKRGHEPMRQSLFRFCGFDLTTIDGIGVDTTTVVISEIGLDLSPFPTEDHFVSYLRLAPNLSISAGKKVAGKLKATACTRVSNALRMAATTLRNSKTALGAFYRRVAWRKGASVAVFATARKLAILIYRLIRYGQAYVDIGAKTYEEHFNQKRIKAYASALRKMGYTIESPPIAEAIAQ

SEQ ID NO: 354880 - protein, 529 aa, unidentified
MVLKGVPMALKIVYKICCGIDVHKNFVVACIAKTDKQGVTTYERHHFSTYTKGLKQLLKWLLDRNCKDVCMESTGKYWIPVYNVLEHDCSIVLAHPKYVKAIRGKKTDKKDAKWIADLFKHDLVAGSFMPPADIRQLRDLMRYRFKLTCFKSSEKNRYQNCLTVSNIQLGNVVSDTFGKSSQKIIAKILENPDDTSFDIGSLIHGSMKDKLPELELAIDGYITPEQAAKLKIIKEHFDNLEARKAELEELILALANPYQQEISIILTAPGFKNTFTAIGIISEIGTNMEAFPSAKHLCSWAGLTPTNNESAGKKKSVRVSKAGCYIKPLLVQCANAAIKSKKHPEIRIALRESDENYLVKEITRQKIELPAINDRAGLATYFKFHSSDYRWESPRYRGVVLHCVDKKTVKQAKKMLKKVPEKEWADQLRQTFNTSGTEKIQVEQGIFADGDNKYIDKLVFKKGGFESVMSYPFTIVAGKKQKGPDDYREVIDQVRKDYRNYLNAYWERELEESGKVEINQEVLKTVNNN

SEQ ID NO: 354881 - protein, 396 aa, unidentified
MWTLGIDIAKFKHNASLLDESGRVVFKNLFFTNDGVGLEKLLNRIAETGRSPAGIVAGMESTGHYWTLLYQHLKQRGFEVQLINPLITSARRNIGIRGGKTDGIESLQIAKLLREIDLKKSALPDATVAELRSLTRMRFELMQDAVAEKIRLISLLDLAFPEYKDHFTDVFGRASREVLHNFPTAELLAKVDVRRLTGIISKASRGRMGRSQAEALKEAAQNSFARCLSNQTLEIEIKHLVDRLNLLLKQIDELEKRIADYLPDQQKLLQTIPGIGKVWAPTILAEVMPIFNPERRDGGSAFVAQAGLDPKMNQSGCSEGKARMSKRGSKYLRTALIEAASVAANTAKDPMFKAIYDKQIAKNKPHMVAVSHVANKLCHVIFAVLKNQKAYKPIIT

SEQ ID NO: 354882 - protein, 402 aa, unidentified
MNAVGIDVSKGKSMVAIMRPFGEVVATPFEIKHTTSDINSLVKFINSVEGESRIVMEHTGRYYEVLAHQLSEANLFVSAINPKLIKDFDNDSLRKVKTDKADSVKIARYALDKWQNLKQYSVMDELRNQLKTMNRQFGFYMKHKTAMKNNLIGILDQTYPGVNTYFDSPARSDGSQKWVDFASTYWHVDCVRKMSINAFIDHYENWCKRKKYNFSKSKSEEIYGKAKELVPVLPKDDITKLIIKQAVDQLNSASITVESLRTLMNETASKLPEYPVVMAMKGVGTSLGPQLMAEIGDVSRFTHKGAITAFAGVDPGVNESGSYEQKSVPTSKRGSSDLRKTLFQVMDVLIKTHPQDDPVYQFLDKKRAQKKPYYVYMTAGANKFLRIYYGRVKEYLASLPES

SEQ ID NO: 354883 - protein, 348 aa, unidentified
MTTMTEAPRRVTGGVDTHRDVHVVAALDDNGVELGVESFPTTAAGYRATLRWLRRFGEIQRIGVEGTGSYGAGLTRFLHDHKVETVEVSCPSRQRRRSHGKSDPVDAIAAAKAVLSGDAVTEPKTRDGNVEAIRALRTADRSARHARVKALNQMRALLLTGPDELRQQFRGTTVFRLVRGAAKLRPGDPTTPTGATKYALRILAKRVLELETELADLKVILKTLVTGTAPELVARHGVGTETAGALLVAAGDNPERLRDERAFAHFCGVSPIDASSGTIVRKRLNRGGNRSANEALWRIVMVRLVSDPDTRAYMERRTKEGMSKREAIRCLKRYVARELYPYIVETGP

SEQ ID NO: 354884 - protein, 389 aa, unidentified
MLLDHPSDGLAAIRTHIGAIFVSLELSRKNWLVTSLSPGKGEKMSRHSVTAGDVAGLLALFAELGRKAEARTGQSYPIVTIQEAGLDGFWLHRVLQQNGIESQVVDPASIAVPRRRKRAKTDKIDGETLLRTLLAYKRGEPRVCAMVVAPSPEEEDRRRLCRERQALIAERIRHVNRIKGLLFAQGISDYKPLRRDRRARLEALRTGDGRELPSHLKAQIGRELDLIELLLKQIKSVEAERDALLAAARKPASEAAAPNPVTMLLALKGMGANFAAVLWSEAFYRQFANRRQVAAYAGLAATPWQSGGIRHEQGVSKAGNPRLRTTMVQVAWLWIGHQPNSALTRWFKERSPQGRKRAIVALARKLLVALWKYVTQGVVIEGAVMKTAA

SEQ ID NO: 354885 - protein, 342 aa, unidentified
MDIAVLGIDLGKNSCSLVGLNSSGQVVVRRRMRRDSVIKFASGLAPCVVAMEACCGAHHLGRILGGHGHQVRLMSPEYVRPYVKSQKNDDRDAEAIAEAATRPTMRFVELKSADQLDMQSLHRVRDRLVGERTALINQLRAVLMERGITVPQGRRKLEQHVVTMLDSGEAQLSPRVLKLIGDMKSEWAALDQRIAAFDDEFAAQAKTNDVARRLASIPGIGVLNATALAAALGNAATFERGRDLAAWLGLVPRQLTTGGKPRLLGISKRGNKYLRNLLVHGARAALPSLSAGTTPLGKWLRGLQERAHKNTVIVALANKLARIIWAVLRHGGTYDAARVKAA

SEQ ID NO: 354886 - protein, 334 aa, unidentified
MWHIGIDLHRRTVVLAAVHDSGQVNEARTFSCQATDQIIEHVRHLKPFRAVIEATSTYRWLYDLLSLEGTVLLAHPARLRLMIQRRAKTDKLDCQLLANLLRINQIPLAYVPPISYQQLRDVTRHRARLVRGQSQAKIGLRVLLARHNREAPYRVPFGPRGVAWFKKQEFGGIDDQVRDELLARLTHYHREIKAIDERLVALRERFPQVESIIDIHGIGLYRALVIIGELGEVDRFRSARQVGAYAGLTAKVSQSGDHCYYGKITRQGSPWLRWSLVEVAMHTVRRDDRLRNFYQRIRKRSGSNKARVAAARKLAEICWKRLRRWHREHERQAA

SEQ ID NO: 354887 - protein, 483 aa, unidentified
MRLRITNNPTPTVDVFSFSFEFAGALEIVNEYSGFAVTSARYIAFAELKQCTSHLITLSLWEVFMSSLTQEFTAFIGIDWADTKHDICLQPANSQQREFDQLPHQIPAIEQWAYSLQKRFGGTIAVVLELSKGPIVYALQKYDFFVLFPVNPSTLAKYREAFKPSRAKDDPTDAELALDLLLCHGDRFKPIKPQSEEMRTLTYLVEQRRQLVGDKTRFVNRLCDTLKQYFPQTLDWFEHRDTVLFCDFMTRWPTLTQVKRARKASLETFFKTHNVRFDTVIATRISGIRAATPLTLDVAVLTAHQLQAMAQVNQLRTTLQAIDQFDDAIAKLAPTLPDYALFNALPGAGPHLAPRLLVAFGEQRERFTSAAQLQQYSGVAPVTERSGKKCWVHWRWQCPTFLRQTMVEWAAQTINKSFWAGAYYRQQRDKGCSHQTAVRALAFKWIRILYRCWQNRTPYDESKYLNALKRRDSPLLKQVTTTS

SEQ ID NO: 354888 - protein, 412 aa, unidentified
MIYCGIDWAERTHDVALVDDSGQLLAKRHITDDAAGYKILLDLLAEYGDTAENPIPVAIETSRGLLVAVLRTGKRKVFAINPLAAARYRDRHSVSRKKSDPGDALVLANILRTDMHAHRPLPEDSDLGRAIAVLARAQQDSLWNRQQLANQLRSLLREYYPAALAAFEPWRTGLCRPEARELLRAAPTPTRAAKLTRTQLTAALRRAGRKRGIEEEVGRLQGVLRADWAHQPPLVEEALGKQMLALLVQLEAACTAANDLAEAVEEAFPQHPDAEVILSFPGLGIQLGARILAEIGDDRKRFANARGLKAYAGASPITRASGKKSSITRRRIKNDRLNHAGYLWAFSSITASPGAKAHYRHRRDHGDWHAAAQRNLFNRMIGQLYHCLQQGHRYDEALAFPAPPDEVRTAAA

SEQ ID NO: 354889 - protein, 369 aa, unidentified
MFYLGIDQHRKQLTVNLRNEAGDVVLRRQVSTEWSKVRKFFAELAERTAGDGGYAAILEVCGFNDWLLVLLGNEPSCRRVLLVQAEERAKHKTDRRDANRLCELLWTNRQRLWQGKKVQHLRVIQPPTATDAQARQATALWRRLTARRTRTINGVQHLLLKHNLQQTCPTKGLQTKRARAWLAALELPALDRLEMDQLLEQWSLWDRQREQLECEIQARQSQHPTAPTLATLPGCSAFSSLALACRVGDVQRFAGPQSLANYWGLTPGCRNSGDATDRLGSITKQGSAIARFVLGQLVLHVLKRDAKLRRWYQQIKNRRGSKIARVAVMRRLTTIIWHMLRHNEPYRCQERCRRPADPPAGKLVVATSP

SEQ ID NO: 354890 - protein, 370 aa, unidentified
MEETITFVGLDVHKKSIAVAVADGGIGGEVRYLGVIDNTTKALDRLIARLERPGRVLRLCYEAGPCGYGVDRHLQGRGYTCMVVAPSLIPRRPGERVKTDRRDAAMLARLLRAGELTAVWVPDADHEAMRDLVRTRAAAMRARHRARQQLSGFLLRHGRVRSGKNWTLAHRRWLSTVRFDHPAQQIVLQDLIDTVDDADARCARLVAQIVALLPQWSMAPVVEALQAMRGVALIVAVTLVAEVGDLRRFDNPRQLMAYLGLVPSEHSSGPRVRRGAITKAGNGEARRVLIEGAWSYRLHARVGRTMLDRLQGLPKPVREIAWKAQVRLCARYRRLSAAGKPQPVVTTAIAREMLGFAWAIALHVPPRTTN

SEQ ID NO: 354891 - protein, 418 aa, unidentified
MKEELIARLMRRYLALDIHKHYSVAAGVNFEGQVVLEPVRIEHADLENWLAKHIQPTDYVVLESTTNAWHIYDLLEPLAEKVLVANPIKVKQIAQARVKTDIRDTLILARLLAANMIPEVWVPPVHVRELRYLLSQRRHLVGMHTQTVNRMHSVAHRHHLSHARGKRFNEKNTRWQHDDELSDTEQFQLELDMNTKKHLAEQAEKINEKLRWMSHQKPWAESMMYLMQLPGFGVITGMTVLAAIGDITRFKDFKKLSSYSGLTPGVEQSGTKNRGKKITKEGRKDLRWAMVEVAQRAVKSDPLWTHRFIELCRRMHKNQAIVVIAHRLLALVWYVLSRKQAYRNFSHERIAYKYLTWSWQLSEADRDGLTRQQFTRYYLMKLGIGHDLEQIALNPRYKRRLASEAEVLALRPELNQTE

SEQ ID NO: 354892 - protein, 388 aa, unidentified
MASKRGRVIGLDVHPDSFAGAVLEGSDPARARVVSTSTRVELEQLESWARRQAGPEEVLVLEASGNAFAVAQRLRAEGHRVEILDSHQAGKIGKVYCANDRVDAVKIARIYLSGLSALVWQPDPRTRERREVFSAYQGVVKESTRLKQQIKAMLNEHCVRLGSGFRLSHPSAITRLLKLKAWSPVQAILLEQLHSGLVGTRARRRKLRHFMAREILDEEAGLLKLARLCGISLVTMYGLSAAIGDITRFSHSKKLVAYLGLNPRVCQSGNFEGSTALKRHGKGPLRALLVQSAKRLLQVDNPLQKWGLAVAARRGRNKAAVAVARKLCVAIWHLLQGHPIGALEPVQRLQTKLSKLATELGLREIKAQGNKSKAAFIQQKLYLLQSYP

SEQ ID NO: 354893 - protein, 341 aa, unidentified
MNAITIGLDIAKSVFQVHGEDHTGKVVIQKRLRRHQVEAFFSKQLRCLIGIEACGTAHHWARTLVALGHDVRLIPAGYVKPFVRRNKNDARDAAAICTALSRPDMRFVTIKSVDQQASRGLERSRDLLVKQHTQLMNCTRSLLAELGIIAAVGWRGFAELIARVKHNEAAIPPVLLAALLPLIQQIEGLHTAIAALEDRIIAAARDNPVMRRLAGIPGIGGLTAHAIVTAIGDGRQFGSARDFAAWCGLTPPQHSSANKRHDKGISRQGDIRLRKLLALGASTIMRNARSRSDRATLWQRGILARRPVKVAVLAQAAKNARIAWALLVSGETYRNTTATTA

SEQ ID NO: 354894 - protein, 377 aa, unidentified
MEYCTTIGVDVSDRTSKICVMTKAPSGERRIVVETTCATTEAGFAECLAKFDRGWPVAFETGTHCRGMERHIRSLGFRVIVANPAKARISGDPTSKNDRGDARGLARLALADPALLFPVRLRGESCQRMLRLHESRQLLMRMRTSAICQIRSFAKSMGFRLPDISPERFHELDRSGWPGDFERTVWPMVGAVKTINQKIAAYDSLIDELAEEPAFKAMVCRAMEVYGVGILGATALVAAIDCDPGRFEHARDVGPYLGTTPRTFQSGESDPQLGATKAGNDLVRRVLVECANVVMKSNAKDTDLKLKGLRIGARGGKIAMKKAKLAVARGLAVTVIALLKDPSRKYVPLSEAGRAGFERYRAEQADLPERRGRAAAV

SEQ ID NO: 354895 - protein, 344 aa, unidentified
MKVTTVGIDLAKNVFQLHGVNEFGKTVIKKQLRRDQVSEYFVNLPTCLIGMEACGSAHYWARKLQGFGHTVKLMAPQFVKPYVKTNKNDAADAEAICEAVARPNMRFVPIKNVEQQAVLALHRVRQGFVKARTAQANQIRGLLGEFGLIVPQGIGYISTRVPELIEDASNELPGSFRVLVQRLLDHLKEMDRQVGELEVQIQAWHRSSEVSTKLAKIPGIGPITASALVASIGDAKNFDSGRQVAAWLGLVPRQHSSGGKQNLLGISKRGDTYVRTLLIHGARSVIYRAGQKPESCSWINGVVNRRNKNVAAVALANKNARIVWALLAHDREFRPDYTTAKAAM

SEQ ID NO: 354896 - protein, 340 aa, unidentified
MGKRYIGIDLHRNRFTCCIRLENERTYVTEWELEDLGKFVKKLRPSDEVAVEITSNTRLFYDAVAPHVARVVVVNTSQFKVIRQSVKKTDAHDARALALYLSKDMLPEVRMKDKERGQLASLTQTRDTLVKLRTALKNKINNILSARGLNLAKEALGSEKKLGEVLELPFDEMVRIELRVIVEQIRSLNKSIAELEKTIGEEGSKLEGHKGLSSIKGIGKITGAILLSVIGDVNDFADEGRLASYFGIVPRVSNSNETEHSGRIHKRGTKLGRTALVQSALIAAKYSPYLKRFYERVKARRGAGKAIIALARKFLGIIYRTLKNKWVFEDFPNFVLAEAS

SEQ ID NO: 354897 - protein, 350 aa, unidentified
MTEAYDGRQVVGMDLHRRRSVLVRMTADGRKLDTARIVNSPAELRRVIAKAGDHPKVVLEATYGWYWAADVLAAAGAEVHLAHPLGVKAFTYSRVKNDEKDAGNLADLLRMGRLPEAWIAPPEVRELRELTRYRIKLVRMRSSGKEQVHAVLAKLGIPVTCSDLFGTWGSAWLDRLALPQPYAGKVASLRELTGWLTTEIGLLDAVIADLLGSYQPYHAVRALPGLGPVLAAVTVAEIGDISRFPAPGQLCSWAGLTPRHRESDTKVARGHLTKQGSPLLRWAMVEAIQHQPDGSPPRELKDRIIARRGAQARNIAKAAAARKLLTCVFYAMRDGQVRSLAARSQAAEAG

SEQ ID NO: 354898 - protein, 408 aa, unidentified
MGTKLGSEAPGHAITVERNMRFVGIDIGSEKHVVAIVDETGKPLRKPIPFSEDASGYERLRSMLGEAADAFVAMEATGHYWQNLFAFLHAAGFQIALLNPTRTSRFAAEDLRRAKTDALDALGIARFAQQKRPAATPMPDAATLELRELMRLRDRLVQDLGDRARQVHRALDLSFPELTDHVRDVASAKATTLLVVCPTAEKFRAADPKVLAELKYDGRHVIGLELAKALCEAAKTSVGRHQGTPYELQIRYACEDIATLRARIRKLDEDISQSLDRHEVGKLLTTIDGIGDNTAARMIASIDFDGFKSAAALAAYVGVAPLVNHSGKRQPLRGHACAMGDADLRAKLWMPTLRAVTHNPWLKAFYARLVAAGKPKKLAIIAAMRKLLGAIMSVARTRTPFVPKLAAA

SEQ ID NO: 354899 - protein, 400 aa, unidentified
MKGFFTYEIIGIDIGKNKHFFCVMDQQTGEIISQPVSFSNDKEGFDFLLQKIKSYPKDSILIGMEDTGHYHFALLKYLLDLQYTVALINPKTTDFNRKMQGGITKNDKLDTINICDVLDTPERKKQYRITKVNSFDLYEQKQLTRHHHNLKEEENVYKNRLQKCIDIVFPEFNKLFNSKYGIVYMNILKMFGSAENIANTDIRTIRKCFEIEGRGNRTSLTPERLKECARSSIGISSSAEVIQIKHLTAQIELIEEQLTEIDKKIEEFSIQNNSPILSIPGISHFSGTSILAELGDISNYSKPSQIIKFAGVAPLHYESSQFNAQHTAITKKESKYLRKTLYQIILPVIRHNPVFNKYYQLKISQGKGHRCAQGHCVRKPLRIIYHLLKTNQQFDPQLLR

SEQ ID NO: 354900 - protein, 351 aa, unidentified
MEYIAFDSHKRYTLASVEKPCGGQSCELRLAHQPGSIRQFLSRWTPGSPVAVETIGNWYWIVDEIEQAGMVPRLVHARKAKLMMAMVNKTDKLDARGLNRLQRCGTLPTVWIPSRELRDQRELPRTRMVFSRTRTRLKNRIHATLAKYGLSIPQVADLFGKKGRELLPQVLAQLPPHTLFSTEQLLAQLDTVEHQIQQFERRIKEVFAPSVELARVMSLPAVGFILGAVILLEVGKVDRFPSAAHLASYAGTTPRVHASGGKMHYGQLRPDVNRYLKWAFLEAANVICLNHRHLPQRHVHRLYQRVASRKGYQKAIGAVARHLAEATYWILKKEEPYREPQASKKVSSTKG

SEQ ID NO: 354901 - protein, 365 aa, unidentified
MPSTNFQHSADFTGLDFYIGIDIHKKSWVVTVRALNLQVDRFTQPPSPENLLSHLKKKFPNGIFHSAYEAGFCGTHFHHQLCLLGIENIIVHPADIPSTDKQKKNKTDLHDSHSIAHYLEKGLLHGIHVLSEEQQELRALFRLRQSKVRDVTRINNKLKSYLAFMGIITPRNNTNNQLTNKVICWLNGLELSTSAGTITLRQYLGDLNYHRNQLLEVTKKLKQQVLRFYHQQYECLLSVPGIGPIVAMALLAEIGNFNRFKNSDEYCSYLGLIPWENSSGEFMTTKGLQPRCNKYLRPLLVETSWAAIRHAPELLAYYRKHAIKNNKHAIIKVARKIALVAKAVALNLQYYSSNHQAALSCSIEE

SEQ ID NO: 354902 - protein, 396 aa, unidentified
MISVGIDISKDKSTVCMLRPYGEVVEAPHSIDHTEQALNALIERIQSFDEDVKVVLEATGGYHQVVVTKLLSAGIFTVVVNPYIMKKNCAAALRKAKTDKIDSIRIASYGIDHWFSMTAYCPPDEIYAELKLLGRQYDRYVRLKVNCKIQLANLLDGVMPGIKTILQGTVPAYSTKDKLCDFVEKYWHYDNIKKMSEKRFIEDYGKKGYRCSESQAIAIYQLSKNNIPTLKSDTPSTKMLVLQAVKAVRDAEITLSLIISQMQEIASTLPEYSVVRNMKGVGDVLSVRLIAEIGDVRRFHNGSALVAFAGIDAPPYESGKFIGTKRNISKRGSSTLRKIGYEIMHSLKVVKPTEDSAVYDFIIKKETEGKPKRVAKIAGLNKFLRIYYARVMETYC

SEQ ID NO: 354903 - protein, 340 aa, unidentified
MEWTVAVGVDTHKDAHVCVALDRLGRQLERASFPASEAGYGACLAWALALGEPAFAVEGCGSFGAGLARVLTGAGLPVWEAERPRRRERRRGKSDTLDALRAARRLLSDGEGLSELRSLPGREAVRVLLVERRSAVSARTQALNQLHGLALTAPTRLRERLETLAGERLAEAALRLRPAERADVDERVLVEVARRLGRRAQALTRELAALDARIAELVRSLAGKLLAEPGVGPVCAAQLVVSSGDPARLRSEAAFAALAGTSPVEASSGRQKRHRLNRGGDRRLNEALHVIALNRIRHHPETAAYHARLLERGKTRREARRCVKRVLARYFYRQLCALLA

SEQ ID NO: 354904 - protein, 346 aa, unidentified
MEHYAGIDVSLELSSVCIVDTQGKIVKEAKVASEPEALVDFFGSLHFAVKRIGLEAGPLSQWLHAGLRRAGFETVLLETRHVKAALSAMTVKTDRKDARGLAQLIRMGWFRPVHAKSMGSQEVRALLVARKQLLGRLIDVELSIRGILRGFGLKVGAVTRKGFEARIRELATGQATLERIAGAMLSARATLRAEYEKLHKAVLAIVREDAVCRRLMTVPGVGPLVAVTYKSAMDDPSRITKSKAAGALFGLTPKKYQSGEKDVTGGITRTGDEMVRTALYEAANVLLSRITRFSKLKRWGMDVAKRRGLKRAKVALARKIAVILHRMWVDGTTYRWTAAEQIAAQA

SEQ ID NO: 354905 - protein, 476 aa, unidentified
MATKRSARLESQQQPRLTNETLYVGVDIGRKAHVAGFISSTLLARHQRFEHCPALALENSREGFRLLIDRVQTFVPLTQVQALLEVTGHYHRALLQYLQELDIPVFVIHVQKRQEGLLKTDKRDALGLANMLYNQLEKGIQVGDPLQAVRRLVPLNEAAASLRGMVRHHYELVAESTERKNKLTAICDELFPEFTRLLRNPNLPTALALRERFPTPADLAAATLWELRAARGRTCSVSDAKLQELQRLAAQTIGTKDPARIRGLVVEQKQLIRELNMIAEHLAQLETEMAQVVAGCREGLILTSIPGIGPQAAATLLALIGNIANFERASQLKSYVGWVPKVAQSGSSLDWTRLSPRGVRQMKQTMYLIVWRAIQWDSEWKAMYERLIARKCRSDERTRRLIGREKVIGRLAGQMTGVIYTLLKRDQELLASLAPGTQTPPPALYDPEVHRQHRLGQYQPSRLGGKTPQLIQPPSL

SEQ ID NO: 354906 - protein, 340 aa, unidentified
MEKAIMIGLDIAKNVFEVHGRTAAGEVVVRRSLKRGQVEKFFARLPAAVIGMEACGSAHHWARVLGKLAHEVRLMPPAYVKPYVKRNKSDVIDAAACWEAVGRPDMRFVPIKTVEQQAALSLHRSRDLLVSQRTQLTNALRALLSEFGIVAGKGRAGLARLVDELRAGTLELPADAVVAATALADQRAALDAAADALERRIVAQAKADKNAAMLQTAPGVGPLSTHATLATMPDPALFKSGRDFAAWLGLAPRLNGTGGKTRTGAITKQGNSPLRRLLVLGATAWLRQVKARPEKASPWLRGMMARRPSKVVAVAQAARTARILWAMLSHNQPYRAPAIG

SEQ ID NO: 354907 - protein, 408 aa, unidentified
MKTLHKRCAGLDVHKVEVVACLRLISKRKVEREVRRFPTTTQGLLALAEWLESAGCTHVAMEATGVYWKPVWHILEGRFALLLANAAHVKNVPGRKSDVNDATWLADLLAHGLIQSSFVPPPAIQELRDLTRTRKQLTREIVQHVQRIQAVLEEANIKLCSVITDIMGASGRRMLKALIAGETDAEKLAALGHERLGCTRAELVQVLTGCVREHHRFLLEQHLRTIEQLEDSVAAFDARIEAALSPFDDIVERLKEVPGLGATAIETVIAEIGIDMSQFPTAGHLLSWAGFVPRLDESAGKRRSTRIKKGAPWLKPVLLQSAWGAARKKNSYLQAQFLRLKARRGAKKAAIAVAASILTIVYHMLRDGTYYQDLGPEYFARRNPAKTAARLANRIRNLGYQVEIRAAA

SEQ ID NO: 354908 - protein, 309 aa, unidentified
MEVFVGIDVSKDRLDVHVLPSGEGFSVTHEAEGLSRLVERLKGLSPVTVALEATGGFEVVAAGMLASAGLPVVVVNPAQVRAFAQALGRRAKTDRVDAWVIARFVEATRPPLRPLAAAEQQLLSDLATRRRQILQMLTAERQRLSRTLEPRLKKSLMRLIRALEKELGQIDTDIDQAVRASPVWRRKADLMQTVPGVGKLTARALLAEMPELGSLDRRQAAALAGLAPFTRQSGRWRGKSFIGGGRPQARGALFMAALSASRFNPPLKVFHQRLIAAGKPKLVALVAVARKLLLIINAILRDQTPWKAA

SEQ ID NO: 354909 - protein, 355 aa, unidentified
MNQEKYIGMDVHQATISVAVMDSSGKLIMECILETKAATILELIAGLRGTLSVTFEEGTSAAWLHDLLKPHVSHLVVCDPRRNALLKDGSKSDRIDARKLAELLHGNKLHAVYHGEHGLRALKELGRSYLTITKDLTRVMSRIKALYRSWAIPCSGATVYAPRHRAEWLAKILEPGVRLRAERLYQQLDLLQPVRQEARRDLLVESHKHHAVKLLRQIPSIGPIRAALLVALLQTPHRFRTKRQLWAYSGFAVETHDSGEYRFVRGKLQRNRERITVRGLNHNHNHDLKNLFKGAALSASTRPGPLCDFYVALVEKGMRPTMARLTLARKMAAITLIIWKKGVEFDAKPLNRQAA

SEQ ID NO: 354910 - protein, 419 aa, unidentified
MEVMIERCAGLDVHQATVVACVRIRDGGKRARREVRTFGTMTHELEELRDWLSEHGVTHVGMESTSVYWRPVYAVLEGHTALIVGNARHIRNVPGRKTDVKDAEWIADLVAHGLVRSSYVPPRPLRELRELTRYRRKLTELQAAERNRLQMQLESANIKLASVATDVLGVSGRAMLRALIKGEEGPDAMAELARGRLRTKRAELAQALRGRMDETQRILLGMQLRRVEQTEQQIEELDRCIDERLKPYRAEMALLMQIPGVQRVNAAVVIAEIGIDMAVFLSVHHLAAWAGVCPASHESAGKRSNIGVRHGNKHLRTALFEAAMAGSRTKGSYFRDKYYRLKARRGAKRAGLAIAHKILIAVWHMLTRRVDYHDLGEAWLDQLDQQRTARNLRRRLEHLGYEVTMVPRQPTSGVAEEVG

SEQ ID NO: 354911 - protein, 347 aa, unidentified
MRFYTNQHRYYCGIDLHARSMYVCVLDPQGQILLHRNMPCAPESFLKAVAPYREDIAVAVECIFTWYWLADLCSKQNIPFVLGHALYMKAIHGGKAKNDKIDAHKIAVLLRGGMLPMAYVYPPEMRATRDLLRRRMHLMRKRSELLAHIQNTNSQYCLPQFGKKIAYKTNRQGVAEQFSDLSVRKSIEMDLSLIDHYDKLLTEVELYITQTAKVNDVNVFYRLRSVHGIGKILALVILYEIHDIERFPTVQDFVSYARLVKCAKESAGKRHGTSGKKIGNVHLKWAFSEASVLFLRANPKGQRWVEKLSSKHGKAKALSILAHKLGRAVYYMLKRKQAFDMNKFFNS

SEQ ID NO: 354912 - protein, 412 aa, unidentified
MWYAGIDWAEQHHDVAVIDDLGNKMATRRVHPSAEGLDELKAFLCGSTARAGAAEKAPHPEQIACIVQTSCGLLIAALLEAGFAVYPVTPKTLDRRRTAAGAKTDAIDAYLLAKKGRSDVHDRRRLTPDSPLVQELKALTRDQDLLVHEQTRLVNRLTACLKAYYPVALQVFTKLQQPLTLAFLQRSPTLATAQAASVDELAAFLRQQYPSYPGPARAAQKIWETLHRPQLRADAITTRTKARLMLVLVGQLEPLLGQIAAYDADIQRLLRAHPDSDLFLGLPGAGKRLAPRLLAEWGDDRERDAPAQNVQALAGTCPVPFQSGNYAHARKRTACIKPFRNALHLFARESVQQEEWAAAYYRQKRQQGTSHSVATRALANVWVRILYAAWSRHTRYEPAVFLAARESHARVA

SEQ ID NO: 354913 - protein, 375 aa, unidentified
MCERAVLTNRPSLDLSPFVLEGHGACRGAWDRSGVFLNPNSCMGFEPGPSKEGSWMMAQNDLVVAGIDVAKDKVDVCIRAPSLRRTFASTAEGRRELASWVRRQKVGKAVMEASGGYEREWAKALRNAKIEVRIVDPKRVRSFAQSAGQLAKNDTIDAEMIAWFAETFDEARAQTYDVTREQLQQMVNARQALKDMQSKLTSQDEHAVPAAVQRIHARISKTIAVELVKIEAAITALIQATPRFAELAEIIESVPGLARTTSAALIAAMPELGQVNNKIVASLLGVAPYDDDSGRRRGERHIKGGRRRTRNVFYMACLGAATQHNPVLKAFYDRLVAKGKLKKVALTACMRKLISILNIMIERRQKWDAKRYALS

SEQ ID NO: 354914 - protein, 452 aa, unidentified
MKRGAPIFDETRRNVAGLDIAGHADHYVCGPRRDDGMPDIAHFGTTTAELHRMLAWLKERKVVSVALESTSVYWIPVADLLEADGIEIVLVDTREVRMVPGRKSDVKDCQWLQKLHSCGLLRGGFRPPENIAAVRTLLREKESLVAMRAQCILQMQKSCDQMNVRIHHAVSDIDGKTGMDIIGAIAGGQRDPAVLAKLRDKRCKQTEAQIAGHLTGTWREEHLFTLEQAYRTLQFIDGRIAEYDGKIASMYKRIAEGSGRPPSPPPSADIKPSAKDRRHAEEKRDLQRIAGFDLTTVPGIGYDTAATVVGELGADFSRFPTESHFASYIGLAPSLGKSAGKNVRQRKRCRNTSRAGRALRMAASTLYKSRTELGAFFRSVARRTDRKTAVKATARRMAHMIYRGIRYGVAYLDKGAEAFEARAREKAVRAVKNLIKAHCINEMELKSALAAT

SEQ ID NO: 354915 - protein, 350 aa, unidentified
MKHTATTIGLDIAKHSFYAVGVDRNRREVLRRKLTRTQVLRFFRAHPPAAIGIEACAGAHYWARTLNAMGHEVRLIAAQHVSRRVVGNKNDYRDAQVIGELRGNPQMPFVPINTEPQQDIQMLHRVRERLVTQRTALMLQIRGLLGEYGAVFAPGVRPLRQGLVEVLGGEHLNLSASALETFADLYRQWQQLDEQVIGYDRRVQCLAAQEETVVRLMEMPGIGPLNGTALLASLGDARHFRAGRIFALNLGLTPREFSTGGKQRLFGISKRGDRYLRTLLIHGARSALRCAEGKPDRLLQWALRLKETKGFNVAACALANKLARVAWALVAHGRHYQPQGLTRAESAAHG

SEQ ID NO: 354916 - protein, 356 aa, unidentified
MSRDIKYIGMDVHKEAIVIAVLNDGGKLVMESIVETKASSILQFIHGLQGELHVTWEEGTWAAWLYDLLKPHVHQVLVCNPRRNALLKEGSKNDKVDARKLADLLRTGMLRPVYHGEHGLRTLRELARSYQTISKDLNRVMNRVKALYRGWSIACAGTQVYAPRYRQEWLGKIEHAGVRRRAELLYQQLDGLQALRRTLRPELLAESRKHKAAKLLRQIPCIGPIRAARLLALMQTPHRFRSKRQLWTYSGLGIETRDSAQYRFVRGQLQRAKKPQQIRGLNQNHNHEMKEIFKGAATRASCGVGPLRDFYVALLDKGMKPEMARLTLARKIAAIALILWKKEERFDAEQLKTQAA

SEQ ID NO: 354917 - protein, 344 aa, unidentified
MQHYVGLDLSVKETSVCIIDKAGKVIREVRVATEPVAIFAVLTEEPLAIERIGLEAGPLSQWLYSALAEAGLPVICVETRHMKAALSAQINKSDRNDARGIAQMMRVGLYRPVHVKTLASQKRRMLLTSRQLLQAKALDIENDLRGTLRNFGLKVGMVGTVKFEARIRELVADHPDLAAIVEPLLIARRVLREQLGVLHRQLLEIVRHDEVCCRLMTTPGVGPVVALTFRATVDVPSRFTSSKAVGAAFGLTPRRQQSGEIDRMGGISKCGDALMRETLFEAALVLMTHRGKWSWLKAWGMKIARHRGMKRAIVAVARRLAVIMHRMWVDGTEFRWTREEAAAT

SEQ ID NO: 354918 - protein, 438 aa, unidentified
MSNKVIFNLDELFISVGIDVGADFSWMSIALPNQQFVGKPYKILHNSIDSLTTAVSKIKEAEELYSLESRIFLESTGIYHYPLFCYLRDKGFNCSVINPIITKNSTNINIRKVHNDRFDSKKAALVGLKPDLKVSLMPSDLALNCRNLCREYYDLMDNRSAYVNKLQGELRMAFPQYLGIFSKVTINTSLTLLETYTSPSAFLKADKQEIIDIIKSTARFGLTYAQNKYNAIIQAATDANQFGYIIDSNIKRIRLYISFIRKYDEEINSILESLHELVDANEDSDFVKQIHLIETFKGAGFLSAVSIMGEIGDFSAFSKPKQLFAYFGLDPAVKQSGKFEGTKVQMSKRGSAIARRVIHTLTLQSISISRNGEAKNPVLREYYLKKCDSKPKLVAMGAVSHKVCNMIFAILRDNKSFEIITPQEHIKQYNASKCDMAA

SEQ ID NO: 354919 - protein, 348 aa, unidentified
MSRAYIGIDLHRTVIQICILDESGAIRAEERVRYQSLEEGLRAVAFVQGFAQDCRVAVEALGLNRWFVNACRKAGLDVLVCDPRKLDLKKFGKKTDRRDAREIARRLWLGDLDRIARTYYPSDLEYGRRKLLRVRHRIVQMRQQTINQLRGMLNAYQIAAPRAVLYTRPSRAQLAAVRFPVPELQQAFAALLAVLDGLQQQIDGLNRRVRRLLREESDVAILAAELPGIGAQSAATLLAELGDARRFAGPRAVAAYAGLVPRVSQSADKAHHGRMTKQGNSELRWILSQWAVRLIKDDPAVSAWVQKLRRRVHKNKARMALARRLLVGVWIMLTRGETFDLNRCLGQE

SEQ ID NO: 354920 - protein, 355 aa, unidentified
MTITKYIGMDVHKESISIAVMNAAGKLVMECVIETKASMLLQFMNGLRGDVHVTFEEGTWAAWLYDLLKPHVSEVLVCNPRKNALLKDGSKSDRIDARKLAELLRGNHLKPVYHGEQGLRTLKELARSYLNISKDVTRVMNRLKALYRSWGIACAGTKVYARRHRSEWLGRISEAGVRRRAEHCYEQLDVLRLLRQQVRRDLLLESKKHQAWRLLGLIPGIGPIRAALLIALIQTPHRFRTKRQLWTYSGLGLETHDSAQYRVIEGQLQRSKKPVTLRGLNQDHNHDLKDIFKGAATRVSSSSGPLHDFYEHLLAQGRKPTMARLTLARKIAAITLIVWKKEVRFDASYLKSQAA

SEQ ID NO: 354921 - protein, 358 aa, unidentified
MEKLYVGVDLHKRSCWVTVLDADGHLRESRRIGTTKPELLEFFGKVRRPAAVAVEATFNWYYFLNVMEPLGLELHLVHPWKTRAIASARIKHDRLDSRVLAELLRTGFLAEAWIAPRPVREERQLLRYRVHTVQWATRAKNSIHGVLNRNGIRSPFGSPFGPKGRSFLEEVELAGTDRWEVDGQLERLDLLGEQLAALDREIRTRAKASPVARALEQIPGIGPFIASLVMAEVGDIRRFPSAKHLVSYTGLAPSLYASGEHRWGGPITKQGSTVLRWALVQAAHRAALNPRFCGFYQRQRERHGTSRAAVALARKLVVIVFYRWRHALRVQEALPQVEKVRERTSGGAWSEHRPLASD

SEQ ID NO: 354922 - protein, 473 aa, unidentified
MTAYFGRPSRASMTLPPPASPEPLIDDRGTRRRAPVSDHSTVGSFASAWVLPRAASRKATGLSLEDGPLFFVGVDWATTEHAVCVLDRAGAKVAAFTVEHTAAGFARLTARLAKLSDTESIPVAIERPDGRLVDALLEAGHPVMPVKPNAIKTWREAEVLSGAKSDPGDAHVIADYLRVRIHRLRPAVPYSGSTKALRTVTRTRGDLVDARVAAVNQLAALLDAHWPGAKAIFASLSSAIALAFLTKYPTAAAAASLTEARIAAFCTKQGYSGKKPAAVLLARLRSAPAGTTDPDLCEGVRAAVLAQVGVINALNTAIKNLDRVIAATMGTHPDGKIFRSFPRAGTVNAAQILAEWGDARAAFEHPDAIAALAGITPVTKASGKQRGVSFRWACNKRLRQAITTFADNSRHASPWAADIYNRARASGKDHPHATRILARAWVRVIWRCWKDNTTYNPALHGGNQHHTKQQLAA

SEQ ID NO: 354923 - protein, 341 aa, unidentified
MNVKTIGIDLAKNVFQIHGVDEHGKRLFNKQLRRAQMASFFANIPPCLIGMEACASAHFWANKLISMGHNVKLMAPQFVKPYVKTNMHDAADAEAICEAVTRPNMRFVPVKTAEQQAVLALHRSRQSFVKQRTAQANQIRGLLAEFGIVVPRGIQQLQRRLPELVEDADNPLPVLFRTQLSLLQHHMAYLFDVIATLDKQIEQCYRQNALCQRIGKIPGIGPVTASALIATIGKANNFENGRQLAAWLGLVPRQHSSGGKQVLLGISKRGDSYLRTLLIHGARAVLQSAKHKQDAVSSWANQLMARRNNNIASVALANKNARTVWALLAKEREYCAPIISA

SEQ ID NO: 354924 - protein, 343 aa, unidentified
MKLQVLGIDLGKTVFHLVGLDSTGRVVIRKRCSRTQLLAFTANLQVQLIGMEVCSGAHFLGRALRAQGHEVRLMPAQYVKPYVQTNKSDYLDAEAIAEAVQRPRMRFVPIKTEEQLDLQALHRVRERWVMRRTAVVNQIRGLLLERGLTLPKGRSHLDEQLPRILEDAELHLSDSFRVLLAQLKLELEQLAARIEEMDRVIQKTARENEACQRLTEIPGVGPVTATALIAAVGNASAFGKGRNLSAWMGIVPGEYTTGGKQKLLGISKRGNKYLRRLFVQGARSVLQQRHKQAPGLSEWLAQLLARTHQNVVVVALANKLVRMAWAVLCKNERYRAPVFVGTT

SEQ ID NO: 354925 - protein, 397 aa, unidentified
MDPTYAVFCGIDVGKGEHHAVGLDPAGTRLFDKALPNDEAKLRSVFARLAEHGPVLVVVDQPNTIGALPVTVARACGHAVAYLPGLTMRRVADLYPGQAKTDARDAFIIADTARTMPHTLRRVDVGDEALAELGVLVGFDDDLAGEATRISNRIRGLLTGIHPALERVLGPKIAHPAVLEILSRCGGPVGIRKAGKRRLTTLATKHAPRMGARLAEEILAALDVQTVTVPGSSAAEIVLPKLADSLKEVLQQRKSIAEDVERMLDDHPLSQVLMSMPGVGIRTAARILLEVGDGSAFASAAHLAAYAGIAPVTHRSGSSIRGEHPARSGNRKLKRALFLSAFAALHDPTSRAYYDRKRAEGKKHNAALICLARRRCDVLYAMLKNKTFYRTPAAAAA

SEQ ID NO: 354926 - protein, 462 aa, unidentified
MRESRGQEGKGTPGAAGGGLPVVRADAGGIDAGSAEHWVCCPAKPDGSANVRRFGTTTVELGRIADWPETEGVKSVAVESTGVYWIPLYELLESRGIGVVLVNARQLRHVPGRKSDMADCKWLQMLHACGLLRGSFRPAGPVCALRGLMRECANLIGERTRAVQRMQKALDQMNVQVHRAVSDITGATGMAIIRAIVAGERDPLALAGLRDRRCQKSPAQFAEHLRGTWREEHLFNLAMNLELHDKLEEMIGRYGAKIAALMEEMGPEDRRDGGPPRHPSPTKARAIERAGDQSLRQTLWRMSGVDLTRIDAVNVGVASVVLTEAGADLSAFPSENHFTSWLRLAPNRPVSGGKVLKKKRNAAGATRLANALRQAACSLQRSKTALGGQFRRLARRKGYSVAVFAMARKLAILIYRMLRHGQDYIDEGLAAYEERFRQRRLHNITSMAKEMGYQIIPIPAAA

SEQ ID NO: 354927 - protein, 369 aa, unidentified
MTQCIKTRFVGLDVHKDTIVIAVAELGREAARVVATVPHEWKALRKVLDKLGPRSEVACCYEAGPTGYGLARTLIAADWACDVIAPSLIPKKHGERIKTDQRDAVKLAQNHRSGELVAVFIPDEQTEAIRDLERARGAAKKAERVVRHQLSKFLLRNGRRYPGKTTWNDAHHTWIAKQTFAEPAQQYVLSDGLAAVEGATLRASQLTARLREVTAGWSREPLLKALQAMRGVEFVTAVTLVAEVGDFRRFATAQDFMGYVGLIPSEQTSGNHRRQGPITKTGNAHVRHVLVESAWHYRRQPRMSKALRERSAGISPQVCAIAWKAQKRLHGRLNRLIGRGKNKGEAVTAVARELAGFVWAISRECPCSA

SEQ ID NO: 354928 - protein, 328 aa, unidentified
MASSPHPTPIIGADVSLRLIVLAWAGTALRRRIANTRPAILAWLKTLPAGCIIGMEATGRLHQMLADLAAAHGHTVYVLNPQRVALYAKGLGQRGKTDRLDAAVIARYLARERDGLHPYTPPSAVQRTLRDLLSQRAGVVRHCTALRQSLKATARSTHGALKRAEQGVLKQLNTLLSEIDHELQRLIGAEAGLEQKRRQLQTITGIGLINSVALTHRFDRTPFANSDAVVAAYGMDPRPKDSGDHVGKRRLTKQGNAEDRRLIYLAAQSAVKTKLFSPLYRALLAKGFATTEAIVIIARKLLRIAFAVWTTGQPFDPNKIEKNTCKKP

SEQ ID NO: 354929 - protein, 352 aa, unidentified
MVVAVQYRSPSLNKNVMVQIYGIDLGMSSFDVSFLSESGSVRHLSGVKNTVHGISKFLLSLPSSAVLCAEHTGVYGDLLLRLCTLNRTCLCFVPGYQIKHSLGLQRGKSDPLDACRIREYAERFYDLLRPCFYPGEEMSELQELYRTRSLLVDSRKRLDTLNIGDNCKSSVSLAADHARRAVLAELNTQISGLDHEIEALIQNSSEFSRNYQILTSIVGVGPVTSCELIIKTENFRKLDTAKKCAAYAGIAPYPKESGKMKCGHKISPMGDKQLKTLLFLCARSAKEHNKEIRLYFLKKHKVEKKHFFVAMNNIANKLLRLIYSLIQKQQTYDRDYIQRDPRCVVISDTNKC

SEQ ID NO: 354930 - protein, 355 aa, unidentified
MERYLGLDVHAASSTLAVISEAGRQLKTQVLETNGRALVEAVRLIPGRKHLVFEEGAQSAWLYEILSPHVDEAVVAGVTKSRGQKDDRRDAYGLAEKLRTGTLDKRIFKAPRQFAMLRELARTHQAIGRDLVRVQLRLKSVYRSRGIGTPGRAVYGKTHREQWQQQLPATARTTATRLYEQIDFLVALKESAEQDLIHESRKHSIARVLETTPGLGPIRVARLLPIVVTPHRFRTRQQFWSYCGLAIVMRSSSDWVRTPDGHWMRAQVQQTRGLTRQHNHALKDVFKGAATTIITQALDDPLYHDYERITEAGTKPNLAKLTLARKIASTALALWKKEEPYSPKHRTALETNRGA

SEQ ID NO: 354931 - protein, 368 aa, unidentified
MADRITYVGLDVHKDSIVVAVAAGGLRGEVREYGRIANTSAALDRLLRTLGDGMKLRFCYEAGPCGYGIHRRLSARGHECVVVAPSLIPRRAGDRVKTDRRDAASLAKLHRAGELTAVWVPDCRHEAMRDLIRARLDAVHSLRRARQQLSGFLLRQGCHYGRPAWTKLHRRWLAGLSFAQAVHHIVLEDYIATVEDAEARRDRLTAQIEAMLPDWTLAPIVAALQTMRGMALVNAATLIAELGDLSRFANPRQLMAYLGLVPSEYSSGANIKRGGIAKAGNRAARRLLIEAAWSYRFPARLSREVLLRQERQPKLIRDIAWKGQLRLCARYRSLVRTGKSANIVTTAIARELAGFVWAIPRQVTMTTG

SEQ ID NO: 354932 - protein, 359 aa, unidentified
MSGTMTYVGLDVHARSTHAAAIDVGSGELRRARFGGGSEEVIGWLRTLPQPLRGCYEAGPTGFALYRAAEAAGVAVEVIAPSKTPRAPGDRIKSDRKDAELLARLLLAGQLKAVTVPPPPFEAARHLARAREQVRGDLMRCRHRVSKLLLLHGRVYEGSAWTKRHRGWLEQQRFEQAATELAYLDTLAAVDGLVARKAALEERLSRLAREGDWWQTVARLRCFRGIDTLTAFVLALEIGDFARFQRPAQLASWLGLVPSLDQSGESRRQGAITKTGSGYARRLLVEAAWHYLRQPGAGVALTERRAGQPDHVLQISLRAQRRLHRLHTRLRERGKPANVTTVAVARELACFLWAAAMAD

SEQ ID NO: 354933 - protein, 413 aa, unidentified
MEAIIEKSCGLDVHQGMIVACLLVGRADQKPRKEVRTFGTMTKDLKDLRRWLQSEGCTHVGMESTGIYWMPVYAILEGGFQLVVGNATHIKNVPGRKTDVKDSEWIADLLRHGLIKSSFVPPKPLRDLRDLLRYRRKLVESQTAERNRLLRLLETANIKLATVASDVFGVSGRRMLRALVDGDMSPEEMAELAKGRLRDKKDQLALALEGRVEEHHRFMLAIQIERLEQVETAIRKVDDRIDVRIEPYREQHNRLVQIPGVDWVGAAVIIAELGVDMSVFPTVRHAAAWAGVCPGNNESAGKRKGQPGRKGNVHLTTALVQAAVCASRKKGTYLSQKYWRLKARRGPLRAAMAVGHKILIAAYAILSAGVEYRDLGAAYLDKRTTAQTRNTLVRRLESLGYRVILEPREAPAM

SEQ ID NO: 354934 - protein, 319 aa, unidentified
MNTIGLDISQKTIDATLHKTDGSTYHTKVGNNREGFKSLKDWIKANKVRKCVIGMEATGIYYEDAAENLSEIHTVYVINPLKIKDYGKSQFNRTKTDKADSNLIAEYTKRHADKIIPYSKPKNRYLQKLINLKQQLKDHQKQIKNRLHSSDDEMIQAIHQDLIQTYQEKIDKTQTAIDAQIKAQADDGHYKNLQTISGIGKDTAAILYAQLTDKTFQTANQFVSYAGLSPQTEQSGTSVNKKGRLSRYGHRRVKRSLYMPALVAYRTGAFPQLVRNLTNAGKPKMVIIVAIMRKLAKLAYYIVKTGKPYDSTRHKVIQA

SEQ ID NO: 354935 - protein, 328 aa, unidentified
MTNPHQHARVHLGIDVSKRALDACILPEDASQEEGESFAVANDQEGVQEILSRLAKMGASVKLAVMEATGRYERLAATMLAANGISVAIVNPRQARDFAKAIGRLAKTDKIDAFVLARFARAVEPRASVIPDEQALALQGILARRRQLIEMLVSENNRLKMAPKPLAKRIRAHIEWLKKEIERIDSDLDEAIEENATFKANEALLSSVPGVGRVLSRTLLAELPELGTISHKRLCALVGVAPFNRDSGQSSGKREAWGGRAPVRAVLYMSALVATRHNPHLKEFYERLLVAGKPKKVALVACMRKLLCILNAMMRDRATWRCPHALTP

SEQ ID NO: 354936 - protein, 399 aa, unidentified
MFVGWDWASTAHDVTVIDSAGELVHRMAIPHTEDGIARAVAKLADYGDPGELPVAIEATRGLVVDRLLGVGHPVIPVHPNAFHAVRPRWGAARAKNDPGDSFKLADYARTDIHRLPMLVPTLPETLELQALTRQRDCQLALRIAAVSQLAALLDQYWPGGKTIFAQLHSPIALDFLDRYPTPRAAASLTPARIEAFCHRRGYSGRRSGAELLDRLRSAPISASRLGEPVVAQMIRGQVAVVRALQAGIDALDIVIAEKVTAHPYAGLLAVLPRIGTLNLAQIIGEVGPILERATSFDQLAAETGLAPVTRSSGKTHTVAFRYATNRRARQALHTWLDNSRRSSDWAQQRYAAARARGQRHPHALRTIGRAWLRIIWACWRTKTAYDPARDERAKQPTAA

SEQ ID NO: 354937 - protein, 354 aa, unidentified
MSHQLNSAIAVIGIDIGKNSFHVVGQDKRGAIMLRQKWSRGQLATRLANLPPCLIGMEACVGAHHLGRKLRMLGHDARLMPAKYVRPYSKGQKNDFRDAEAIAEAVQRPTMKFVATKTAEQLDLQALHRVRERLVGQRTGIINQIRAFLLERGVAVRQGLRFLRAELPRILATPCDALSPRMLRVIEGLAGDWRRLDERIESLSSEIEVLARRDVGCERLMSVPGIGPIISSAMVAAIGTGDAFSKGRDFAAWLGLVPKQISTGDRTILGKISKRGNRYLRVLFVQAAWAVLIKPRSWDRHGLKPWLEAAKKRLHHNVLAIALANKLARIAWSVLAHGRTFEAQDSGRVIMQRA

SEQ ID NO: 354938 - protein, 472 aa, unidentified
MGKEKTVYIGIDVSKGYADFIVLNQEKKVVESNFQLDDNHIGHSVLHEKITSLNSSGFKVVCGLESTGGYEQNWIRCIKQLTEKKLPVEQYKLNARGVKHQLESELRRTITDGVSAEGIAIYVINNYATKLQDWKRGIAKEEVTTGKQMLCKLIVSQQKHLTAKYNQLEKMIYRQFPELLQYCKNGIPLWITRLLEKYPSLTAVKNAKLSGVDKIKGITEAKANILKGLAKNSVGNLTKDPIMDIIIQTLCSEILHTDQQIDKLKEQLIAQGADEDVQLLCSIKGVAQWSAIGLLVHLGDIHQFDSGQQLASFFGVHPIFKQSGDGKWGSKMSKAGNKTMRSVLYNAAVNVVQHNPYFKDIYARHRAKGKKHKAVVGIIMHKLLRVVYGILKHKQPFNEQTDIINQEKSHQNEQNETIKLGVSKTSRRYQHLGVEAPVSGRNYKKRKIALEGFQASMDASTESPESNLMEQT

SEQ ID NO: 354939 - protein, 415 aa, unidentified
MERLYERCAALDVHKQQVTVCVHVPDQAGVRSELRAEFATMTADLLGLRDWLKGLGVTHVAMEATGVYWKPVYYLLEDDFELLLVNAQHVKNVPGRKTDVQDAQWLCQLLEHGLLKSSFVPPQPIRELRDLTRYRKSLVWERGREANRLQKVLEDANIKLASVASRPLGVSGKAMLKALCEGESDPEALADLAKGKLRAKLPALRAALEGRFRGHHALLVGHLLAHIEYLDETISSLSEEIEERVRPFERQVQLLCTIPGVAERTAEVIIAELGPDVERFPSHRHAASWAAVCPGHDESAGKRRSGKTRKGDSWLRVALIEAANSAAGRTKDTYLRSQYLRIRRRRGHKKAIVAVAHSILVSAYHVLQDGLSYQELGGDYFLGREDRERITKRLVRQLERLGQTVTLEPATVEAG

SEQ ID NO: 354940 - protein, 384 aa, unidentified
MNRIVKIGMDVHSTNYTLCAMEPVLDGEDRIFANIKVTPDYKNVIQFISKLKNKLGASDTYSIECGYEAGCLGYSLYHQLTDAGVKCTILAPTTMLTPQGKRIKTDKRDALMIAQCLSYGGYNAVHVPDEKDDAIKEYLRMRDDHKLVLKKIKQQINAFCLRHGHFYDGHKWTIKHREWLKTLNLSNLYRETLDEYMATYEEQESKIERLDRRIEELASDSAYKEKVKKLGCFLGIKTHTALSLIVETGDFKRFAKGNTYAAFLGLAPGESSSGDNVNRTGISKAGNSHLRTLLIEGARGICKGKIGHKSKDLRLRQAGNSAEVIAYADKANVRLRSRYYRFMRHEKKKNVAVAAIARELACFIWGMMTDNISIVPERGKQNVA

SEQ ID NO: 354941 - protein, 373 aa, unidentified
MKKVRFLGLDVHAETIAVAIAEPDGEVRSLGIIPNREESIRKLVKKLGPAEQLQACYEAGPTGYVLYWQLTALGVKCEVVAPTLVPVKAGDRVKTDRRDAMKLARSYRAGDLTAVWVPNQEHEALRDLVRAREAAKQDQLRARHRLSKFLLRHGRRAPAGIKMWTQKHEEWIKKQVHFEQPAQEYTLLDYLHEVEHMGDRIQRLEQAIAEAVKLAPPRMQEVIQSLQALRGIAQISAVTVVAELGEISRFEGARQLMGYSGAVSSEHTSGKRMQRGPITKTGNAHLRRIAIEAAWAYRHRPSIGPRLRKRQEGLSEEVKEIAWKAQHRLHKRYRTLSAAGKEKQKVITAVGRELLGFIWAIGVQAERNSKRVA

SEQ ID NO: 354942 - protein, 348 aa, unidentified
MRVAADEIAGLLARFAELRRKAQARTGRCFPIIVIQEAGLDGFWIHRVLQAEGIESHVVDPASIATSRRRRRAKTDKIDGETLVRALLAYKRGEPRVCAMLRVPTPEEEDRRRISRERKALTNERVRHVNRIKGLLFSQGVSDYQPLRRDRRTRLEELWTGDGRPLPTHLKAQVGRELDRLELLIGQIKAVEAERDAMLAAAPVGSAHFADCEQPALPMLLALKGIGPEFAVVLWSEGLSRHFDNRRQVAAYAGLAPTPWQSGSVDHDQGVSKAGNPRLRTTLIQVAWLWLRHQPHSALSLWFKQRVKQNDGRLKKKTIVALARKLLVALWKYVDAGVVIEGAVMKTP

SEQ ID NO: 354943 - protein, 346 aa, unidentified
MMHAGLDLSRKRLEVQLLTDQGERVEHLAVRPTADGLQDLVGRVARYRQPVQAAIESMTGARFVHDQLELAGWEVAIADAVKAKGLAPLACKTDKIDAWVLAELSRRDLIPAIWLPDPGVRAERERARWRLHLAHHRTALKNRIHQTLITFGHPCPVADLFGVSGRQLLTALALPEPWLGSVTAALQLIDQLDGQIDERERELREMGADHPYVVLLRTVPGIGWVLAYTIASEIGDIHRFASSTKLISYTGLCPLVRQSGDRDYRGPLTKHGPRYLRWALIEAAQHAAMLPAYRPRYQTIKRRLGRQRGSNVATVDVARQLAKAVWYMLTRNQSFAPGGATDSVAA

SEQ ID NO: 354944 - protein, 507 aa, unidentified
MNNLAAVVASEPIPADTTAGRRFAAASIRSFPPHPARVKSRKPATLTARVQKSERTLPREGHRISSTMNRVIPTSAAVTTRKESKNMNAWNEVTHFAGFDWAKDHHDVLVLDNAGKIVAELRFEHTAAGWSLCQQKLAAFPHLAIAVESGHGAAIERLMVLGYRVYPVHPRSSKSYRTRKLPSGTKTDHIDCWALADALRLEGESWHMLNTPEPLVQRLRLLCRDEVALIEQRTALINQLQQALYEYYPAALAAFDDWTSLSAWAFVARFPTPQALVKAGKRQWEKFLHTQKLYHPEWYQKRLAIFAKADEFCGPEAVTAAKSVLATALVKLLQTLELQLASYRLLITECFKQHPDYHVFASLPGAGPKLAPRLLAELVALQPLADQPQVLQCLAGMAPVSYQSGKVSVVYLRRQCNRFLRATLHLWVDLSRHYCDWARIYYEAHKKKGQSHACALRCLGMRWLKILAAMIRSHTPYDAALHARSQLQHGSWVLQLQPKLSITKDAS

SEQ ID NO: 354945 - protein, 316 aa, unidentified
MTTETKYVGIDVSKARLDVAVVPGSESFSVPNDDEGIEQLTARLRELQPGLILLEATGGLERRALARLVTQGLPAMAINPRNVRDFARSLGKLAKTDRLDAVILARFGQSVRPDWRPMTDEQTHQLHEHLTRRRQLVEMITAEKNRLLAVDHSRIRKQIKESIEWLEKQLSINEYDLDQAVKETPVWREKADLLQSVPGVGRVTVTTMLALLPELGTLTRRQIAALVGVAPFNRDSGKMRGPRAVWGGRAAVRSTLYMAALVASRHNPALKAMYLRLLAAGKRKKVALVACMRKLLTILNAILRTGKPWHTAEPTP

SEQ ID NO: 354946 - protein, 430 aa, unidentified
MGLVVPTAMQLEQEDQPLLYDWFVGIDWGSQQHQVCVLDRDRRRVGERVVDHDGASLARLADWLWTVSAGHPQRVAVAIEVPRGAIVEGLLERGFHVFAINPKQLDRFRDRHSVAGAKDDRRDAFVLADSVRTDPPSFRRLQLDGPQLLRLRELSRAEETLLEEFRRSANRLRDQLHRFYPQMLELCSAADEPWLWELIDLAPTPAHAALLSEEQVQRVLKAHRIRRVTAKEALTCLQAVALPVAPGAAEAAQAHCEFLLPCLRVLAEQLQACSQQVSALLRTLAAEPGEGEGPSDVAIVLSLPGAGRKITSWLFAEAAQPLAERDYQMLRSHSGVAPVTKQSGKRRLVVIRRGCNPRLRQALYHMARVAMQRDAHFNRVYAALRAKGQRHGRALRRIGDRLLRILMAMLRDRTYYGASRIRCEPVVQMG

SEQ ID NO: 354947 - protein, 395 aa, unidentified
MVLIYVGIDVAKDKHDCCILGDSGVCLRESFSFSNDKEGFSKLIAAISAVSGKSADSSQIRTGLEASGHYSANLVAFLRSSGFQPVVFNPLRVKLYRQAISLRRTKTDKADAKCIAGILMSEVSSPVTVSYQIQELKSLTRHRHRLVAICSRSKVSMSRMVDLLFPELPSLGLRTGQASTLALMAELPGADMIAACRIDRLTNILRYASKGRYGREKAEAIKSMAKNSIARTSKALSLELSQVIEQIRFFKRQIAFLDRQIAAMVAEINTPLLTIPGIGFRTAAVILAEIGDIRRFKKPDQLQAFAGLDPSTYQSGKFNAANTPMVKHGSTYLRWSLMQAARLCSIHCRDFRNYMEHKIAQGKHYFVALGHLSKKLIRVIFHMLYTNEVFVSMAA

SEQ ID NO: 354948 - protein, 362 aa, unidentified
MVRVPSIGVRRTAMEHYAGIDVSLELSSVCVVDAKGKIVKEAKVASDPEALILFFKGLGLIVERIGIEAGPLSQWLHAGLTKAAFETVLLETRHVKAALSAMTVKTDRKDARGIAQLIRMGWFRPVHCKSTGSQEVRALLVARKLLLGKLLDLEFSIRGILRGFGLKMGVVTRNGFETRVKELCAGQAMLELIADSMLAARYALQKQYTKLHKAMLSIVRGDAICRRLMTAPGVGPVVAITFKTAVDDPTRISKSKAVGALFGLTPKKYQSGETDVTGGITRVGDESVRTALYEAANVLLSRVTRFSALKRWGMDVAKRRGMKRAKVALARKLGVILHRMWIDGASFRWTKQAGGDKQLARA

SEQ ID NO: 354949 - protein, 315 aa, unidentified
MTNIAVFVGVDVSKAQLDIAVRPEGRFAAANDEKGIATTVERLRQMQPTVVVLEATGGFEVPLASALATAGVPVVVVNPRQVRDFAKASGILAKTDLLDAQILAHFAAVMRPVPRPLPDEETQALGAIVARRRQLLEMLTAEKNRLSAAAKPLRKSLRAHISWLEREVAHTNNDLTRAIHASPVWREKDDLLQSTPGVGPVLSTTLLAGLPELGRLDRKQIAALVGVAPLNRDSGTLRGKRTVWGGRAHVRAVLYMAAVVATRYNPVIRTFYQRLCAAGKAKKVALTACMRKLLTILNAMMKHRTPWHAGVIQCG

SEQ ID NO: 354950 - protein, 309 aa, unidentified
MKEQVVYLGVDVAKAYLDAAIGKHKRRLANDGTGHRQLINWIQQIEAQVQVICEPSGGYERMLIQALVGAQVKVSLVQANRVRQFARAAGILAKTDSIDAEVLCAFGEAMRPQTLSASKLAQEQLRELESQRRHLSRLLVMEQNRGARLGDSSVRRLNRSLNKQIQKQIERIDLLINQHIAGSQELSTKAHKLTAICGVGPRTAALLLAQMPELGQLNRREVAALVGVAPFNRDSGKLRGKRTIFGGRRHVRHGLYMAALVTARHNPILRAFYRRLRAAGKPAKLALTATMRKLLIVLNSALKPDPIYA

SEQ ID NO: 354951 - protein, 468 aa, unidentified
MPKAHLQRVFKQHLMIMEENKIAMEIINPHAAGVDIGSRSHWVATGQGSNDYREYGVFNEDLYKISDWLKENKVRTVAMESTGTYWQSLYAVLISEGFHVILCNGKFTKNIKGKKTDIQDCQWIQKLHSLGLLSGSFLPDEKTEQLRTLCRHRSNLLNSAASASKKMQKYLRLLNLRLDVVVNDICGLTGLSIIKAICNGETNPEKLASLRHGNCHKSEEEIAKALQSNGRKDYLFALKQELEMYELFQSKITQCDIEIAKMLSEIIDSDDNKKQHYIESKPHKKINKNTPKNIDLNLKSYQYFEGIDLLAIEGMSYSTVLSVMSEVGYNGIKKFPTAKHFASWLRIAPNNKISGGKVLSSKVPRGSSRLKIALRNAANAIGNLKESTPLRDFFQRINFRKGRVSAISATARKLAVIIWNMINKNIPYHNPHEYLYLDQKRKLGLVKRIQKQITKFDLKPEELGFTNN

SEQ ID NO: 354952 - protein, 324 aa, unidentified
MSSHEIVGIDVAARKLVVIGERLALAEYENTAAGRNKLVNALSRSPQPVRVVLEATGMYFLDLACELAAAGIAVMVVNPKATHHFAEAILQRRKNDPVDAAMLREYGRRMDFVSWQPPRHELFGFRALTREVQALSKTVAAARNRLHAITATKLAPAVLIGALERQIADNQALINELVAAAVAQTESDPELARLLARTDSVPGFAAKAAVLVIGELAVLPPMTARQWVAQAGLDVREETSGTSLARRPRLSKRGNKRLREALFYPALTAARCCPAAAAFVDRLVAHGKTRLQAIVALMRKLLHGLHAMWRNDEDFDAEKLFAPA

SEQ ID NO: 354953 - protein, 338 aa, unidentified
MAIVGGFDLHRRQITFEYLDTASGEVSRGRVAPADREHLRAWLGRLEGQEAAFAVEACTGWRFVVEELERAGAQAHLAEPADTAALRGPKRRAKTDRADARHLRELLLAARLPESWIPPAHVSDARTQIRLYKALVDERTAWLQRVHAILFQLGAPAVPGLARASGRGRLDLAALPPAARSAAEVALRSVDRVNEELDTLRPDLARLSRAQCGCRALQAHYGIGPLTSVAIWAELGDCGRFSSSSDAVRHSGLDVTVHSSDSRRARGHLARQGPGVLRWALFEAAVCAARPASPDHAYYLQVKARLGHQRAVLSVARKLTRWCHHTLRALGDQALAPA

SEQ ID NO: 354954 - protein, 347 aa, unidentified
MNITRIGLDLAKTVLQVHGVDERGKALLRKRLKRGEVVAFFARLSPCLIGMEACGSAHHWARELAALGHTVRLMAPQFVKPYVKANKSDARDAEAICEAVGRPSMRFVPVKTLEQQSVLSLHRARQGFVAARTAQANQIRGLLSEFGIVIAKGIRQIEGRVPEILEEAENGLCGMNRALFQRLFEHFRQLDRQVKQLEEQIHAWHREQVDSRRLAGIPGIGPLTASALTAAIGNAREFAHARQLAAWLGLVPRQASSGGKDRLLGISKRGDVYLRTLLIHGARSVLRRTRACPDPAQGWLAQLVHRRNPNVAAVALANKNARIVWALLAHGREYQPGYVGAPLPTAA

SEQ ID NO: 354955 - protein, 380 aa, unidentified
MASMHDSTRSKTTVYAAIELSKKSWVVAIARPDRDRPSIHRIAGGNLADLIGRLRKAAGEKQRIVVCYEAGYDGFWLARSLAKIGIDCRVLDPASIQVNRRARRVKTDRIDSLALLRALIAIDRGERHVCAVVRVPTVEEEDSRRSHRERQRPVRERTGHINRIKGLLFAQGIRGIEPKRRRTRIDFGKLTTAEGMPLAERLRRELEREYQRLELIETQIRIVEKERDTADAQDPAVEQKRELLCALQGVGGASAAILAREVFARQFASRRQLGSYLGLTPSAYDSGSTTRCQGISKAGNSWARRVLIEVAWLWRKYQPGSPLSHWYAQKTADQSPRIRRIMLIALARKLAISLWRYVETGLVPDGAVMAKTTPHMAAAA

SEQ ID NO: 354956 - protein, 322 aa, unidentified
MAHVFIGVDIAKSSFHAHILGEATASFEAKNTPAGFERIARRVPEGAQVFLALEATSTFHEALADWAVEQGWTVFVVNPAKLKHYVRSQSSTHKDDAIDARLIARYISKHHEHLHAYRPLSKAQRQLRSLTRRRDQLKRMMTQESNREGHLTDLDELTRESHQRLQAALKEELVLVEAAMAKVCKEDKVLDGKRRRLESVPMIGKVIASVLLAEMGDEARFENAKQVTAWSGLVPLHQRSGSSLEKKGRISRAGNKRIRQLLYMAAMGAMRNAAWQPWIKARQKNGKNGKVLLVAIMDKMLRICWGLLKHEADFDPKIAFAA

SEQ ID NO: 354957 - protein, 377 aa, unidentified
MKKELYLGLDVHKDCIITAVAEEGRKGEVRESGAISNDLHAVEKWIGRLRKADGKETLLRACYEAGPCGFGLARRLRQLGVECQVVAPSLTPTRSGERVKTDKRDARKLARLLRAGELTPVYIPEPTDEAIRDLCRARSDAVDDRRRSRHRLKGFLLRHGYRYQGKSSWSAAHERYLRELVLPHPAMKVIMEEYLQGIAAGGERIERSEEAMRVLLEQWRLAPAVRALMAMKGFQTVAAMILVSELGEVHRFAHPRQVMAYLGLVPTENSSSDRRRQGHITKCGNAHARWLLVECAQHYALPPKVSKELSRRQQGQSAQVRAISWRAQNRLHNRYRRLLARRLQRNKAIVAIARELCGFIWELLRTQLCYQAQSTAV

SEQ ID NO: 354958 - protein, 461 aa, unidentified
MNSDGTPPPADGQARPAAVLSAPAGVEVAGPAAAPIPAALLDTGRLWTAQDVAAYLQLSVKEVRQRARTEATEAGSIPHLWLPSTPEPGKETSGNVKSGHPVIKRGRSPASDEPFSRKEPAMHILGLDAHSATFTLEILNPRGRVCREVKRETSAESLIEAVREAPGPKVVVVEESHLAQWVKRTVERYADQVVICDPKRNKWISGDEFNDDASSAHKLAELYRGGYIKEIRHPDEPGAKLRSLFLHYYDLNRQLTRFKNKLKAVFRQEAIGTAGAGIYEEELHEQWLRKLRGQQHLQHAARQRFELIDKLEALKQQTYEVMVTMARKNAAFALLEGMPGAGPVITTGYLALIDTPHRFSRKNKLWSYAGFGNKRHTSDEEVYEEHASKNGNRPLKWVVSEHFLHAVEQPKKANRFKRCYEELRRKGLDETAARREVCRKLLSTVRALWMKGEAYRDDPLS

SEQ ID NO: 354959 - protein, 320 aa, unidentified
MKFILGIDVAKAKLDVALQLVDGKIRSKVVDNTPQGFAVLSTWLNKYGVIDLHVCMEATGIYWEAVAEFLADAGHTVSIVNPAQIKAFGAAELVRTKTDRVDARLIARFCVAQRPEPWQAPSQAIRELRALVARRDALNAMRTQESNRLLVAREAVRAGIETHLAYLEKAIAEIDAALRQKIDNDPGLKEQRALLDSIPGLGDKTIAVLLSYYGGAPRFDKAREAVAFAGLDPRQYESGSSVRGKPRLSKVGHAPLRRALYMPAMVATTRTVWGRAFRDRLAAAGKPPMLILGAMMRKLIHVAFGVLKSGKPFNPTLHIS

SEQ ID NO: 354960 - protein, 358 aa, unidentified
MQRNKISFKGQKIFIGIDVHKKNWDVAIAPEIGVVKRHPQKASARELFEFLRKHYPDGDYLAVYESGFSGFATYYALKEVGINCMVIHAADVPTTQYEEVMKTDRIDSVKLVRSLKAGLLRGIYIREKENIDDRAVIRIRKTIQKQLSGYKVRIKHMLHTNGVLLPERFEKSGSHWSGAFIKWLKEDVTLLSASRTSLDLLLRQVETIRLTLLEATRKMIELSQADRYKQKFDLLMTVPGVGVAISMCILTEVYDIRRFHNEREFAAYLGLIPTSHSSGEKIIHGEMTFRGNKQLGPMIIEAAWVAVCRDAGLGCLYRHYKERMKPQEAIVRIARKLSNIIFAVLKNEIKYVPYHWGN

SEQ ID NO: 354961 - protein, 400 aa, unidentified
MLSIGIDVSKGKSTVCGMKPGGEIVYTPFEVQHTREGMSELVSLLRGSGEEVRAVLESTGSYHCPVVAALLENGIFVSVVNSLRMKRFCSQSIRKVKTDRIDAMQIALYGLAYWQELQPARLPEDTYRELQLLARQYYQMTSMLIKAKVDFNAICDQVLPGMQELMNDHAGRHKLSDFVLRYRHTTHILEMGETRFRKDYCKWAEKKGYRNCERMAALIFATAQNGIPVLPNAPSTQIVITEAIRVLHTVEASRDAILTQMQALAKTLPEYSLVREMPCIGDTLAPRLIAEIGDVRRFHSKRALIAYAGIDAPPYQSGKFCANNRHISKRGNRYLRKTGYEVMQSYVMHKPANDPIFTFIEKKRGEGKSGKLAMVAGLNKFLRVYYGKVTELYRSLPAIE

SEQ ID NO: 354962 - protein, 410 aa, unidentified
MEVLYQRCCGLDVHKETVVACLRVVSGGEVVREVRTFETTTASLMALSEWLAENGCTHVAMEATGVYWKPVWHILDDGDFQLILANAAHVKNVPGRKTDVNDATWLADLLAHGLIRASFVPDTQTQELRTLLRTRKQLVREKSSHILRVQKTLEDANIKLDSVITDIIGMSGRAMIEALIAGESNPAKLARLANYRLRASQEKLREALRGRVTKHHRFLLRLHLNQIDALDASIATIDQQVEAGIAPFRVAVELVTSIPGVSDVGAQVIVSEIGTDMSRFPSEGQLISWAGMCPRNDESAGKRRSNRVRKGAPWLKTTLVQCAWAAVRKKDSYLKAQFLRIKARRGPKKAIMAVAASILTAIYHMLKDGTLYQDLGSNHFQSRSKGQQTKRLVKRLADLGYDVALTPLAS

SEQ ID NO: 354963 - protein, 392 aa, unidentified
MYIVGIDIGKNHHEASIVSPKGRQIGHSLRFATTHKGADSLMSFIFKNIGNSPCVFGMEATGHYWYPIYSFLKAKGYTICVINPIQSDSLRKMYIRQTKNDSIDSFLIAEVIRFGQFGTTSMADENILAMRQLCRYRDSVISSRTEIKLRIGTIMEQIFPEYEKQFSSLWVSTSMGILEKYLTPENIENAPIDELFEIIKDKSHNRLTKAKAISIKEAAADTFGIKIAQDAFSFQLKQLIDRMNFLDKQIEALDIEIMKYYEQFDCYLHTIPGIGMIATATILAEIGDIHRFKSSSALVAFAGIDPTVRQSGEFNSTHNHMSKRGSPYLRHAIFLAATTCSFHNSPLNAYYKKKRDQGKHHLTATGAVARKLTTVIYAVLRDSKPYEPKKFC

SEQ ID NO: 354964 - protein, 412 aa, unidentified
MEQMLECCAGLDVHKATVAACVWQRGPGGRAHKTVQTFGTLTADLLVLGDWLTAQGVTHVAMESTGVFWQPVYNILEADFEMLLVNAEHIKRVPGRKTDVTDCEWIADLLAHGLLRGSFIPPAPIRELRELTRYRKALTDERVREVNRLHKLLQSANVKLSSVASDVMGVSGRRMLDALLAGTTDPAVLADLAAGKLRTKLPALQQALAGRFRAHHRVRLAHLLAPIDFLAGAIAELGAEVAARTAPFEAVLQCLDTIPGVDRKAAEGTVAELGVDLARFPTHRHLAAWAGLCPGNRESAGKRKAGKTRKGDVWFRRYAIAMALAASRTKGTYLNALYHRLVRRRGHKKAVVAVAHAIVVIMYHVITDQVPYQELGADYFDTLHATALTRHHVRRLETLGFKVTLEAVAAAA

SEQ ID NO: 354965 - protein, 394 aa, unidentified
MKLVGIDVGKNSHHFCVMDKETGELNVTPSSFPNNKEGFDFLINSLKPYSKKSILLGMEDTGHYHVALLKFLLSNGYTVALINPKTTDLTRKMEGGITKNDKLDTITICDVLDTPERKKQYRITKVDRFDLYEQRQLTRHHHNLKEELNIYCNRLQKSIDLVFPEFNTLFSSKYGIVYMNLLKTFGSAEAIASTDIRTIRKCFEIKGRGCRISLTPEKLKECAKNSIGISSEVETIQIKHLVSQITLINEQIAEIDKKIEEFSITNNSPILSIPGISHFSGTSILAELGDIGNYSKPSQIIKFAGVAPYHYESSQYNAQHTSITKKGSKYLRKTLYQVILPVINNNPVFKKYYRLKISQGKGHRCAQGHCIRKLLRVIYHLLETGQSFDPALLR

SEQ ID NO: 354966 - protein, 347 aa, unidentified
MRNIAYLSMDVHARNCVLGDMDGNGKFLGNRSFTTCENNIIKALKAVKAKKKYLVMEAGPLSNWAAQVANDHVTEAIICDPRENALIYKSSNKRDKVDTKKLCRLLRLGEFKAVYRPENDQRAIFKAAVQHYMDLRDQLAVLKKKIKAMYRQWGVIDVFTNSVYSTRGRDKFLKQVKHHPIYLQLKRLYELMDHTAVIKQAAEKSMTSLGRNYPEIKEFEKMSGMGPIGAHTFDAYIQTPHRFAKRSRLWRYCRLGITDRTSDGKPLGYKRLDKSGVGELKALSYRAFLSSMKGDNEVKRFYLNSLQRTHDRKHARLNTQRKILSTMLSIWKKGKLYRSELFLDPSI

SEQ ID NO: 354967 - protein, 356 aa, unidentified
MEKRTPVTPDWTIGIDLGDRRNAMCVLDAGGEVVERCWVSTTSKGIMRFFERRDPCRVVLEVGTHSPWVSRLIASRGHEVVVANPRAVTSIARRSNKTDFADAEQLARLGRVDPKLLAPIQHRGEQAQRDRALLAVRAQLVGARTQLIVQARGLTKAQGQRLPRSTTSGFARKLRTQGLVDLFPGLETLVAIVDELSTRIAAMDRQIETLCHERYPETKLLRQIQGVGPITALAYVLTIEDPHRFAKSRTVGSYVGLRPKKRQSGERDPQLGITKEGDRYLRTLLVQAAHYILGPFASDSDLRRFGERLVARGGKAAKRRAIVAVARKLAVLLHRLWVTGEVYEPLRNAETNVEAA

SEQ ID NO: 354968 - protein, 320 aa, unidentified
MNETSTRTAGIDTSKKSLDVATYPTSDRLRVANARDGHQELVAWLSARKIKRIGIEASGGYERAVVEYLREQGFEVALLQPRQVHAFAIYKLRRAKNDRIDAALIAECAANLGDLHEPPDTRLAAFAEHLLFIEQLEYDIAHLKTRREHFTTKRILNQLKRDVQRLQRRREAELLLLQVVVCKHDDLARRLELIASVDGIGIRTALTLVIFLPELGKVSREQISALVGVAPYDDDSGERTGERHIAGGRSRVRRALFNAALPASQRWNTALVALYGRLTNNGKAHRKAIIACVRKLLIFANAVVERGTPWSKAPPASHAA

SEQ ID NO: 354969 - protein, 360 aa, unidentified
MTKVRTLVGLDVHATKIVAAVLDAETGQLQMFAMSGETERAAEFCSALPVPVRVAYEAGPTGYGLARELTKREVQCVVAAPSKIPRASGERVKTDRRDAEHLVRLLAAGQLHPVRVPGPEEEALRDLVRAREGVRMDLMRARHRLSKLLLRHGIRFEDGHAWTERHRQWLAAVELDWPAAQSTMLDCRGAIDALVIRRDQLEREIVRLLPTSPWTVQVGRLRCLRGIDTLTAVGLCGEIGDFERFAKPEQLMSYIGVVPSESTTGQQRRLGSITKTGSVHARRLLTEAAWHYRPRPNLGNSLRERQHSQPPTAVAISWKAQLRLHRTWARLEARNKRRTLIAVAAARELAGFAWAICQIE

SEQ ID NO: 354970 - protein, 348 aa, unidentified
MTISMIGLDTAKAVFQVHGVDERGRVALKRQLRRGELIPFFEQQPRCTVILEACGAGHHWARLLSGLGHEVKLIAPEAVRAFVKKGKKNDAADAAALCVAGSRPEMRFVPIKSVEQQAVLALHTARSLLVKQQTMLANALRGLAAEFGLTVAKGMGKLAELIALVSMDKSLPAAGRRAMAELYAHGREVADRLVALEAKITSHARHDETARRLATIPGIGPITASLIAATVGDNIGAFRSARHFAAWLGLVPRQYSTGGKVRLGRITKAGNAEIRKLLVLGATSMVWRAAHWNSRAGLWVQGVLARRPVRLVTVALANKMARIVWALMTRAEVYRAQGHALPTVEAAA

SEQ ID NO: 354971 - protein, 347 aa, unidentified
MNFYTKEHLFYCGVDLHTRSMYICVLDQSGQILLHRNLAADPQRFLDAIGPFRQDMVVCAECMFSWYWLADLCAKENISFVLGHALYMRAIHGGKAKNDKIDSHKIAALLRGGMIPQAYVYPAPMRPTRDLLRRRNYLMRKRADLLSHIQNTNSQYNLPEFGKKIAYRSHRTGVAEQFPDANVQLSIKTNLELIDHYDKLINALELFVLQNARDHDPGSLHLLQTVPGIGKILSLVILYEIGDINRFPSVGQFVSYARLVACAKESAGKKQGTSGRKIGNMHLKWAFSEAAVLFLRKNPQGMKYKKRLQQKYGKSKALSILAHRLGRASYYVLKRHKAFDMKRFLSR

SEQ ID NO: 354972 - protein, 423 aa, unidentified
MSQKKRSVAGLGAIYGRVCGMDVHKKLVVACVRILNVKDGTVQSTLRRFGTMTADLVELRQWLAEQQVTHVAMESTGVYWQPVFNVLEGHLEVWVVNAQHIKKVPGRKTDMKDAEWIAQLLQCGLLKPSFVPDRQQRELRDLTRQQSKLVQQRNAVDNRIQKVLETANIKLGSVASDVLGVSGRKMIEALIAGEKDVGKLAELAEKRLRQKIPQLERALEGELTEHHRFLLGQLLDQYDFLDKEIARTSERVGAIAPPSFREAVKQLDEVAGVGERGARALLAETGTDMSRFPSSKHFASWAGQCPGNRESAGKRKSGKTPEGNRHLDAVLTEMAHAAVRKKDSYFKSQYHRLAGRRGKKRAIGAVKHSLLVTVYFMLRDNKPYKDLGADYFDKLNPQQQIRYHVRKLNELGHDVELSVRPAA

SEQ ID NO: 354973 - protein, 337 aa, unidentified
MKRIPVYVGLDYHQGSVQVCVMDAAGQTLMNRRCANDWLAVVDAVAGYGQVAGAALESCCGAADLAEELIEHAGWSVDLAHPGFVSRMKQNPDKSDFSDVQLLADLERVGYLPKVWLAPQEVRELRRLVRYRQQLVADRRNTKLRVGALLRDQRVRDAPARPWTRVWTAWVVQTSQLSEQSRWLIGRHLHRLALVVEQIEEVEAHLEELTGDDSVVCVLRTHRGIGPVTAWTLRAEIGRFDRFRTGKQLARFCGLSPRNASSGTRQADAGLIKADNRQLRATLMEAAHRLIEFDDYWKGFAMDLIKRGKPKCLAVAAVANRWVRWLFHQMQPERLAA

SEQ ID NO: 354974 - protein, 377 aa, unidentified
MKKELYIGLDVHKDCIITAVAEEGRKGEVREGSALSNDLHAVEKWIGRLRKAHGKEVILRACYEAGPCGFGLARRLRQLGVECQVVAPSLTPTRSGERVKTDRRDGRKLARLLRAGELSPVYIPEPTDEAMRDLCRARSDAVDDRRRSRHRLKGFLLRHGYRYQGKSSWSAAHERYLRELVLPHPAMKVILEEYLQGIGAASERIERCEATMGDLLEQWRLAPAVRALMAMKGFQTVAAMILVSELGEVHRFTHPRQVMAYLGLVPTENSSSERRRQGHITKCGNAHARWLLVECAQHYATPPKVSNELSRRQQGQSAEVRAISWRAQNRLHRRYTRLLARRLQRNKAMVAVARELCGFIWELLRTQPCYQAQSRSV

SEQ ID NO: 354975 - protein, 323 aa, unidentified
MDAQLVVGHHVGIDVSKHRLDVHALPSGRALAVDNSAAGVAQLIEFLKGLGDVALVLLEATGRYERRCAGDLLEAGFNVAVVNPRQARDFARALGKLAKTDRLDAQTLAEFARLGHARTCEKVPETRRALDDLVTRRRQVVQMIVAEGHRLDALQQKAARQSVHAVLRLLDQQREDLDRAIAELIESDDDWRNKRDLLQTVPGIGPAAANQLVSDLPELGKLSRQEVAALVGVAPMNRDSGTLRGQRHVFGGRRDLRCVLFMAAASAKRFNPLIRAFYQRLRAAGKPYKVALVACIRKLLTILNQMVRNNEPWRAATPIAQPV

SEQ ID NO: 354976 - protein, 282 aa, unidentified
MMIIGCDFHPSWQQVSWLDTETGETGERKLVHADGDAERFYRQLAAPALIGMEATGNCHWLVDLLAELGHELWVGDAAQIRASYVRQQKTDKRDAAHILKLLVEGRFPRIWMPSSDVRDLRQLLLHRYKLVIIRARVKNELQHLCLNKGVQRKHKLWTKVGQQVLRELPLKAWAGRRRDDLLGLMAMLDQQIEPLDMAVKSEAQRDKMALLLQTQPGVGPITALAYVLTMGDVRRFPRGKQVASYLGLIPREHSSGGRQHLGAISKQGNGRCWVLCRCPSFG

SEQ ID NO: 354977 - protein, 341 aa, unidentified
METTRHIGIDLHRNCFTTCIRLENGRNYVTEWKLEQLPKFVAKLRPSDEVAVEVTGNTRLFHDAVAPHVKRVVAVNPNQFKVITHSVKKTDPNDARNLALYLAKDLLPEVRMKDKTRAQIASLTQTRDTMVKLRTALKNKINNIFSAHGINLSKESLASEKGLKAVLDTQFDVLVDLELKILVDQIRSLNKSIAELEETICRESQRLEGHKNLTSIKGIGGLSAGILLSIIGDIRDFADEGKLAAYFGIVPRIHNSNETEHSGRITKRGTKLGRTTLVQCALIAQRFSPYLKQYYERKKSRGTGKAIIALARKFLGIIYRTLKNNWVFDDFPNFVLAEETA

SEQ ID NO: 354978 - protein, 358 aa, unidentified
MRVQSKELNFKGQNIYVGIDVHKKDWKVSIQSNGLTYRTFSQPPKVTSLVEHLHRNFPEATYYSAYESGFSGFWAHRELVREGVNNIVVHAADVPTTQKEKAFKTDKRDCRKIARSLSSNELEAIHVPTLKTQEDRSLVRLRLTFRKDLTREKTRVKSMLNFYGKEIPERFYASSHWSEAFIKWLKEVKFETGSAEEALKLLIDQVEYLRIGMLDVTKKVRTLAASESYASDMKLMIGIPGIGLVTGIAFLTQLETIERFPCTDSLANYLGLVPNCHSTGDKENTGEMTYRGNKWLRELLVESAWMAARSDPALHLTYIKLCKRMKPNKAIIRIARKLLNRIYYVLKNKREYEKGIVQ

SEQ ID NO: 354979 - protein, 391 aa, unidentified
MALFVGIDVSKEKFDACGIGEQGEKVFVVSLRMNKSGFEDLLRRLSYSDTRLLVGMESTACYHIPLFSYLTAKGYRVAIINPLLINHFAKRSLRKTKTDRKDAYTIAQFLMREEETLSVQAPTHRSSELKDISRRREKLVDQMTSVKNDMKRILSVTFPELETITGIFTKSTLRLLSQHPSAHAIRQAGHDVVADIFITQSRGARPRATIKALMDAAASSVGVTSPAKDLIIRQEAASLLHLERQAQETTKLLINLCDENMKKDMNILTSIKGIGKKTALNFLIEMGGDAKLFKNDKKLIAAAGLDPSTYQSGKYEGKSRISKKGNRHLRRVIWLMTRRVITSNELFRVHYYKRRKDGLPYKMAVLATAHKLIRVMYAMLIHQTYFEQRRN

SEQ ID NO: 354980 - protein, 391 aa, unidentified
MIYIGIDVAKDKHDCFITNSDSEVLFKAFTIFNNLDGFNDLYQKIESVMDDVTKVKVGLEATGHYSYNLLGYLIDKGLPTYVINPLHTNLYRKSLSLRQTKTDKVDARTIASMLMSDVNLKSYSDTSYHNEELKSLTRYRFDKVKERAKLKTSVSRLVCILFPELEKLVPTLHMASVYALLSKFPSTKHVATAHLTRLTNLLSESSKGRYCKDTAITFRDAARASIGSNMPAKSLELKHTIKLIQELDSEIDEIENEIKIIMDGINSPILSIPGINYRMGAMIIAEICDFNRFDSPDKILAYAGFSPSTYQSGQLDGAYAHMEKRGSRYLRYALYNATKYVCHWDPTFAAYLAKKRAEGKHYNVAISHAVKKLVRVIYHLEKTKQQYIKAS

SEQ ID NO: 354981 - protein, 327 aa, unidentified
MTQKQDVVGIDVSKATLDVYALASQQARQFANSPAGHGELAGWLKQLGIDIAVLEASGGYERTATQSLRQAGLTVHVVDPKRVRHYARAAGQRAKTDRIDARMIAAFGAAFLLGRSAGIADAGNPARQMLSDLVAARQALIDHRTTLQQQADALPPGLAKRELLATLKPLGRRLEALERHIAATIAKHQAFAALARRLDTVPGLGPVSIAALIAWLPELGHLGRRQLAALVGVAPFADDSALRAGQRHIQGGRMKLRNVLYMATVGAATRHNPVLQARYRRLLENGKKPKVALIACLRTLLTILNAMVARQQDWNPTGLPATEPVAA

SEQ ID NO: 354982 - protein, 388 aa, unidentified
MSQHSRFDASRSLTALEQDSTIIAVIEMSQTKWLVAALVPGVERQPLKKFDAQEEMLLKLLHRWRHEAGQAGRNIKRIVVAFEAGRDGFWLARWLRARDVDAYVIHPTSIAVSREHRRAKTDRLDTELLMRVFLGWLRGEKRHCSMVAIPTIAEEDARRPNRERQNLVTEQTRIINQIKAIFSRFGIRSLRPTKRKLAEGLEDLRTAEGTPLPQNTLSELRRHLARLRFIRDQIRAVEQERQRKLAVAPKSADAMVYLIARVLGAGVETADMLVNEIFSRHWRDRKAVARYAGLTGSPDESGSRRRERGLARAGNVRVRSGMIQLAWRFVRFQKHSALAQWFAARTADGRAGTRKTMIVALARKLLIALWRLATRGEVPQGVVLRPAS

SEQ ID NO: 354983 - protein, 411 aa, unidentified
MLYLAIDQHRKQLTVCDRNEAGDVTLRRQVSTEWARVRAFLAEYRDLAKKQGGFVAIVEVCGFNDWLVKMLREYDCREVILVQPQQRSKQKTDRRDANHLAELLWINRHRLLAGRRVQGLRRVHLPAPQDADARQLTELRKRLGQTRTKTINRVKHLLRKHNVEQDCPTKGLDTIRGRKWLKQVAFGPIDRLELDMLLEQWELHDKQIKQIDEEIKRRQATHATAVLIATLPGCAAYSSLALASRIGAIQRFARPGSLANYWGLTPGCRNSGEKTDRLGSITKQGSPTARFILAQLVLQVLRRDGKMRAWYLRIKKRRGSKIARVAVMRRLATIIWHMVKHQQPYMIGGPPRRPLESPCVFRTKGTDSKREGHDSPRKTRPSPSFDRVARQQSPTNGNHARCSAIVKPSTG

SEQ ID NO: 354984 - protein, 379 aa, unidentified
MSAMYNVQDVCCVSLELSKSTWVCAFQAPGDDKASVHNLPARDIAGLEKLLRRLLHATEVRLARPLQMVVCHEAGYDGFWISRSLVARDFNVIVFDPASFLRPRRGRVAKTDRLDATGMCRTLRCWLGGDRSVASSVRIQSVEEEDAKRIGRERKYLIQQRGRVVSRIKGLLALHGIYVDVKGIGKRLSSVLTSLKTAEGLELPKFIRRDIERMVQHWKLLAEQIAAVDKERAEAIRSEATFPHADKVSRLSKMGGVGEISATVLVAEIYHRTFGSRRHLASFIGLAPSPYSSGETSRDRGINKAGTKLARCTLVELAWFWLRYQPQSELSQWWHQRFGKAGMRGRKVGIVALARKLAIALWRYVEFGVIPAGATLKPE

SEQ ID NO: 354985 - protein, 343 aa, unidentified
MQTVTTIGLDIAKSVFQVHGIDAAGNVIIRRRLKRRHVLAFFQRLPPCVVGIEACATSHHWSRELKALGHAVRLMPPAYVKPYVKRQKNDAADAEAICEAVTRANMRFVETKTPEQQSCLMLHRTRHLFIRQQTAVINSIRAHLAEFGIVAPRGRHGVEDLLDIVADPTDRRVPEVARACLAALGAQLRMLKAQILEFDRRIMAWHRSNETSKRLDEIPGVGPALATALVASVADPKAFRSARHFSAWVGLVPRQHSSGGKDKLGSISKQGDRYLRSLFTAGALAVIRYAKIHGTRHRPWLTALLARRPTKVAAIALANKIARMAWAMMAKDERYKEPAALAA

SEQ ID NO: 354986 - protein, 396 aa, unidentified
MQDTQQHGAVDVFVGVDVGKGQHHAVALDRNGKRLYNKALPNDEVKLRALIAELKTHGRLLFVVDQPSTIDALPVAVARAEGVLVAYLPGLAMRRIADLHAGEAKTDARDAAIIAEAARSMPHTLRSLRLANEQLAELTMLCGFDDDLADQVTQTSNRIRGLLTQIHPALERVLGPRLDHPAVLDLLERYPSPAALAATSEKTLANRLTKLAPRTGKGLATEIVQALSEQAVTVPGTQAATIVMPRLAQQLAALRKQRDEVAAEVERLVLAHPLWPVLTSMPGVGVRTAARLLTEVAHKAFASAAHLAAYAGLAPVTRRSGSSIRGEHPSRRGNKVLKRALFLSAFAALRDPVLRAYYARKIQQGKRHNQALIALARRRCDVLFAMLRDGTIYQPK

SEQ ID NO: 354987 - protein, 388 aa, unidentified
MPRQRKPNDLSRSLIALDMDTTLIAVVELSLSSWLVAGIVPGVERQPLKKLKTDEHALLTLLNRWHDEAVRSGHQISRIAVAFEAGRDGFWLARWLKARGIEAHVIHASSVAVSREHRRAKTDRLDTELMKRAFVGWLRGERDHCKTASVPSLWEEDAKRPSRERESLVGEQSRLINRMKATLIRLGIRGFNPKLRHAEQRLETLRTPEGEPIPPNTLAELKRDMQRRRFVCDQIRSIEQDRLERLERTPHTEPHAMVRLLARITGIGIETADLLVHELLLRNMRDRRAVARYGGLTGSPDRSGGTNREKGMARSGNARVRRGMIQLAWRFLLFQKNSALAQWYRRRTEHAPKARKTMIVALARKLLIALWRLVREGVVPEGVAMRPA

SEQ ID NO: 354988 - protein, 463 aa, unidentified
MARINKGKMHKKPIHSLKAIQPDAAGIDLGSREHWVAGPPLKDNTPNVQRFGTTTPELLRLADWLKEQKVKTVAMESTGVYWIPLFEILDSRGFEVILANARQVSHVPGRKTDMLDCQWLQLLHACGLLRGSFRPSDDICRLRALIRERNTMIDQRSDWVRRIQKSLDQMNVCVHHAVSDITGVTGMAMIRAIVDGERDPRTLARMRDRRCQKSEEQIAEELTGNWRPEHLFNLRQALKMYDQFCQTVTEYEAEVLAYIKTLQPGVDDDQSAPPPVSTSKARNIAKKGQEPMRQALYLLTGFDLATIDGIGVDTAAVVISELGLDFSTFPDEGHFVSYLRLAPNLSISAGKKVPSKLKGTTTSRVATALRMAALALRNSKTALGAFYRRISRRKGASVAVFATARKLAQIIYRLVCHGQAYIDIGAKAYEAQFNNRRLKYYTKALKDMGYKVKPLAAEEAQVA

SEQ ID NO: 354989 - protein, 327 aa, unidentified
MKSKKLICGIDVSKDTLDTYYNDKEGKEYSLKVKNNKKGYVELIKKLGKSRTYIMESTGVYSLGVSFKLKKSKADVRVENPLVIKRFIQMNMERQKTDKSDAKWIYKYGKEHEATIWHLPSKEQFYCLQILRTIDFYKKHLTMLKNFFISNGLHPVKLKEIGQSIAGSKRVIENEITKLENLLDSFIDIWCVDLKKNLLTIPSIGNVAASYLIVYTDAFTKVQNHRQLIALNGTSPREHTSGTSISTKKGICKMGYANLRKTLYLCSWSAIRCNQPCKAQYERLKANGKHSKVALIAVCNKLLRQAFAIATSGIPYQADYISRLSKN

SEQ ID NO: 354990 - protein, 377 aa, unidentified
MHSENIAAYIGLDVHKETLAVAIAAPERLGEVRYYVTINNEAQAVRRLFQKLQGLYGNILSCYEAGPCGFGLYHQLTAMNIKCQVIAPSRIPKSPTDRIKNDHRDAISLARLLRAGELTPVWIPDLTHEAMRDLIRARAAAKRDSRVARQRILSMLLRTDKRYAGKHWTGKHRTWLANQSFSQPSQQIAFQHYCQSLEQIEDRILQLDQEISRLLPEWSLCNLVCQLQALKGVGQLTAITLVAELGDFSRFSSPKQLMAFLGLVPGEYSSGNSIRPRGITKVGNSELRRLLYEAAWSYRTPAKVGAWLIYYRPDSVTQYSKDIAWKAQQRLCSRYRSLTAKGKKSQVAITAVARELTGFMWDIALAAQSSFSQQKQN

SEQ ID NO: 354991 - protein, 346 aa, unidentified
MKILALDLGKYKTVGCAYEAESGSHQFQRSFTTAAGLRKMVQEVKPDRVVIEICSIAGWVCDLLWQLGIEVQVANTSDDAWRWRKVKQKDDRRDALKAARLSAVNQLREVYIPPPAVRQWRSLITYRQQLVRRRTKIKNHIRDLLLREGQLLGRGSSGWSQAALKQLSEQARPFSECGPAELWRGELQLELEQLKEIQRQLGVVTAQLDKLGAEEARVQLLRTVPGVGARLAEAIVALLDQPRRFRKASQVSGYIGMVPKAMDSGETERRGHITRQGSRLVRSLLVEVAWAGLRHNAWVRQTYQRLSAGKKARKKIAIVAVGRKLLVKCWAMLRDNRAWDWQPQIT

SEQ ID NO: 354992 - protein, 394 aa, unidentified
MKLIGIDIGKNKHFFCVMDQQTGEIISQPVSFSNDKEGFDFLVQKIKSYPKDSILIGMEDTGHYHFALLKYLLDLQYTVALINPKTTDFNRKMQGGITKNDKLDTINICDVLDTPERKKQYRITKVNSFDLYEQKQLTRHHHNLKEEENVYKNRLQKCIDIVFPEFNKLFNSKYGIVYMNILKMFGSAENIANTDIRTIRKCFEIEGRGNRISLTPERLKECARSSIGISSSAEVIQIKHLTAQIELIEEQLTEIDKKIEEFSIQNNSPILSIPGISHFSGTSILAELGDISNYSKPSQIIKFAGVAPLHYESSQFNAQHTAITKKGSKYLRKTLYQIILPVIRHNPVFNKYYQLKISQGKGHRCAQGHCVRKLLRIIYHLLKTNQQFNPQLLR

SEQ ID NO: 354993 - protein, 410 aa, unidentified
MLFLGDDWAEAHHDIEIEDDSGRVVARKRLAEGMAGITALHELVAEHLDPAAEPDQVLVGTETERGPWVQALLAAGYVVYAVNPMQVARYRERHSTSGAKSDAADAHVLAEIVRLDRAHHRPIAGDSEIAEHVKVAARAHQTMIWSRVRQVNALRSLLREYYPAALAAFGTDLADRDALAVLAAAPSPDQGRRLSQNRIETLLRRAGRQRNVTAAALRIRAALQSEQLSARPGVVPAYTASAAALVAVLIEMVKQTEVLAGQVEQGFGQHPDAEIYRSQPGLGPILGARVLAEFGDDPDRYADAKARKNYSGMSPITKASGSKRVVLARYARNRRLGDALFLQAYSALRVSPGARAFYDQQRARGATHYQALRALANRLVGILHGCLRHHALYDETRAWHTTEEKLPTAA

SEQ ID NO: 354994 - protein, 386 aa, unidentified
MQKLNDLSRSLTVLKGDSTLIAVIEMSQSSWLIAGIVPGVERQPLKKLAVDESALLKLLNRWREAAEKAGRGIERIAVAFEAGRDGFWLARWLRARDIEAHVIHASSIAVSREHRRAKTDRLDTELLKRAFLGWLRGERDHCKMVAVPTIEDEDAKRPNRERENLVGEQNRIVNRMKATLSRLGIRGFNPKLKKATDRLQGLRTPEGEPIPFNTLTELRRDMVRRLLLREQIRQIEDARLERLEQAPGDGPHAMVRLLARVIGVGIETADMLVQEVLSRNMRDRRAVARYGGLTGSPDESGTKRREKGLARSGNARVRRGMIQLAWRFLLFQKDSSLVKWFRARTENARGNRKTMIVALARKLLIALWRLVREGVVPDGVVLRPAQ

SEQ ID NO: 354995 - protein, 313 aa, unidentified
MTIISKVHVGVDISKNSLDIHILPLRKVRKIANSEADITKFIKELAKYDIAQIACEATGGYEKELARILKENGYSLWIIDPRRIRGFIVASGCRSKTDKIDAQKIAEFSSKNPRDYQAIDRTENQHNVQALVNRKNDLTKFLGTEKTRLKHPSHALCLSSIQNLIATLLVEIKTIEQQIRELIKSDIELAKKAMLLESIPGIGAASAALLLSHIPELGKISNRKISALVGLCPYDNESGRYKGKKRIRGGRVAPRNNLYMCALTTIKYNLILKGFYDRLTGKNKPFKVAIVAVMHKLIILANAILKKGEVCRA

SEQ ID NO: 354996 - protein, 400 aa, unidentified
MRFFVGIDWASRAHAVCIVDQPGRIRWQGSVPHTTEGLTELVGRLRRFRGRLRVALERPSGLLVDTLVAAGVELVPIHPNALKATRPRYSAAGSKSDPGDAFILADLLRTDGHRFPALRPPSDDTRALRALVRGRDDLVRQRLALANQLRALLERFWPGAAAIFADVDSPIALAFLARYPTPLSAARLGEKRLAQFLGQHAYCGRRPVGELLARLRTAPASQVGEAEAEASGDLVRALVAVLTPLVGQVQHLSAAVTAALAQHPDGPLVQSLPRSGAVNAAQILAELGDDRARFPSDEHFAAEGGLAPVTHASGQHHAVVFRWACNKRLRRALTTFADNSRHASRWAALVYQRARGRGCRHQHAIRILARAWARILWPCWQDRAPYDVTRHRAAQALAAA

SEQ ID NO: 354997 - protein, 343 aa, unidentified
MGEISMIGLDLAKNVFQVHGVDASGAVVVRRQLRRGQVEKFFAQLPACTVGLEACGSAHHWARVIGRYGHQVRLMPPAYVKPYVKRNKNDGRDAEAICEAVNRPTMRFVPVKSVEQQATLAVHTARALLVRQRTMLANSLRAALSELGIVAAQGIKGLRELMVKLEAPNQEIPEMMRGALLMLAQHWQALDVDERALEQQIAKAARSDREARRLMEVPCVGPIIASTVLAKVPDATVFRSGRDFAAWIGLTGRDHGTGGRHRPGRISKQGDRTLRALLINGASAYLRHQRVRGVSNPWLRGLLARRPYKVVMVALAAKTARILWAMLVKGEPYRERASAPAAA

SEQ ID NO: 354998 - protein, 418 aa, unidentified
MTATHSMASTVLVAIDISKHRHEVLIGVPGKKRRRRMTVMNTLDDFQRLSAALISYDLPVQIGFEATGNYHRPLAHHLGQAGFDLKLISSVGLARTREALHNSWDKNDPKDAQVILHMLEIGAVQFFHDPLVVGTADIQELSKTHEIVSRSKTELWHRILTHYLPLYFPEAERFHRSSRTDWFLAFLEKYPTPTMITAMSREAFIEDAWQVVGKKVSKERLLSDIYATAVDSVGLPVSPDSDAVRMFRLVLAEGRSLVRQRNEIEARAVELLSDLPDYQLLTTIPGIGPINAMTILAEAGDLRRFRHHRQFLKFCGMDLATVQFGMFRGQSRISKYGNARLRRTLWMAGQTAVLTKTNSFRDKFERYISKDRHNAHLRRKAYTAIAAKMARTVHAVVNHGEPYRPFYEGVSPGGRTSL

SEQ ID NO: 354999 - protein, 408 aa, unidentified
MNPLYVGIDVSSKSNVVYFMLPDGSKHSNFSVANSHTGSSQLVKRILSAMPSCSLDSVLIGLEATSVYGDNLVYFLREDAVLSRFNSKIHVLNLKQVSKFKEAYNDLPKNDFIDSFVIADCLRFGRINKEVYIGDYRYKALQNLTRARYFAVSNLIKEKQRFMNILFKKYSTMTQEKVFSDTFSTTALAVYDEFESAEALADMDLHELTAFIMEKGKNRFPNPNAVAKAIQKAARSSYRLPKTVNDSVNQVLSISITSIKALEAQIKEFDKAIATQMELLPNVLISIPGIGPVFSAGIMAEIGDINRFHNQAQLAKYAGLAWKQHQSGDFEAQTTRLINSGNRFLKYYLCEAAFSLVRCDKEYSDFYHLKYKEVNRYQHKRALALTARKFVRLVFRLLKDNRLYTSAE

SEQ ID NO: 355000 - protein, 344 aa, unidentified
MKKNIFFIGLDISKADFAASIYQTPGESIITKEAIPNDRKGFEMLLLWLNDYHIDKKNCRICMEATGVYSQAIAYYLLFAGFPVSVEPPLKVKRAFDPIGHKTDPVDSKQIAEYAYRFQDELTSWKPRDEILEKIRQLLSVREQFTKQKVALDNSIQAYSKQRVQVALIKKAQKETLNQLKKQIARIDKELEKLIKQDPQIFQRANNLDSIPGCGMLLAAHLLVITENFTKIQNSKRLASFVGIVPYQHQSGTSVYKRAKIRHFGPGPSRKLLRLAAQSVATHNATFRRYYLRKLDQGKPKPLVLNNIANKLLKIACTIIRNNTRYIKDYRSINPMYLKSLKSA

SEQ ID NO: 355001 - protein, 473 aa, unidentified
MNSWKAAEPAVRVAPKGQARTARGSHERFDVSRMKMLKPLLERPTMTNRDPIPAGAILVALDIAKLRNEVLIESPGQQRRRRLSVLNKRAEHDRLIEILKAYDAPVICAFEATGNYHRPIAWRLMEAGFDTRLVSSMALARTREALHNGWDKNDPRDAQVILHMLRIGAAQTYHDPMKAGINDVQELSKTHEAIAKAKTEIQHRILTHYLPLYFPEVERFRGNTRSDWFFAFLEAFPTPGSILALPKEQFISDAWQIVGRKVSKERLLSDIYETARTSIGLPLPLDSPAVRMFRMVIAEARGLIRQRDEIEELADTLLHGSADYQALRQVPGIGPIIALTIIAEAGDLRRFRHHRQFLKFCGLDLSTQQSGQYRGQTRLSKFGNARLRRCLWIAGRVAIRQRENGFRDKFERYIARDRDSPDLRRKALTAITAKMARVVHAIVKSGSDYRPFFEGRVPGGRTPLRRAVRAPVG

SEQ ID NO: 355002 - protein, 400 aa, unidentified
MLSIGIDVSKGKSTVCGMKPEGEIVYAPFEVQHTREGMSELVSLLRSSGEEVRAVLESTGSYHCPVVAALLENGIFVSVVNSLRMKRFCSQSIRKVKTDRIDAMQIALYGLAYWQELQPTRLPEDTYRELQLLARQYYQMTSMLIKAKVDFNALCDQVLPGMQELMSDHAGRHKLSDFVLRYHHTTHILEMGETRFRKDYCKWAEKKGYRNHERMAALIFATAQNGIPVLPNAPSTQIVITEAIRVLHTVEASRDAILTQMQALAKTLPEYSLVREMPCIGDTLAPRLIAEIGDVRRFHSKRALIAYAGIDAPPYQSGKFCANNRHISKRGNRYLRKTGYEVMQSYVMHKPANDPIFTFIEKKRGEGKSGKLAMVAGLNKFLRIYYGKVTELYRSLPAIE

SEQ ID NO: 355003 - protein, 368 aa, unidentified
MKRIAHVGVDYHVKSITIAVYQSDEKSFLETIHLNNDDKVITRYMKKLSQQFDLRICYEASGSGYTFQRKMRALGLHCDVIAPSLAPRKPGERRKNDFRDAKRLAQHYAHGLLTIIHPPTEQEESVRSLVRCRFAFKETIKRVKQQINALLLSQDHFWKRSKWTYQHRAWLRSITLPTVHLQLVLQELMAHLDYLESRLHYLEEQIAQLAGSEIYAPSVKRLCALRGIGTLTAMVLIVEVTDFRRFSSPRALMAFLGLIPGEDSSAERRKPGSITKAGNRRCRTLLVEAAQHYARKPCVSYALKKNLSQVAAPVSALAVNCMQRLHKRYWFLVCKGKLRQKAIVAVARELVGFIWALMQEPAEAAVAA

SEQ ID NO: 355004 - protein, 343 aa, unidentified
MKLMRVGVDLAKSIFQVHGVDRHEQVVWRRKLTRANWLRVFIETVEPGCEVGMEACGGAHHWARVLQAHGYSVKLIAPQFVKPYVKSNKNDANDAEAICEAMSRPNMRFVAVKSVAQQDVQAVHRVRAEVSKQRKAKGNQIRGLVSEYGLVAPKELVHLRAAIPAWLEDGENGLTGRFRRLLNALWHDLRALDQRMLELDREIAQIAAADPVAKRLQRLRGVGPVIATALVATVGDVRQFANGRQLAAALGLTPRQNSSGGKERLLGISKRGDAYLRTLLVHGARSALRTARNKEDRLSRWISRIAETRHHNVAAVALANKTARIAWAMMKNGTDYEPDRAAA

SEQ ID NO: 355005 - protein, 338 aa, unidentified
MKITTVGLDLAKSVFTLQGVDERGSIVLRKTVRRARLLELFAQLPPCVVGMEACSGAQHWARELRKFGHEPRIMAAEFVEPYRCGGKNDANDAAAICEAVSRPKMRFVAIKSVEQQAVLAVHRLRQGLVEERTALANRLRGLLTEYGVVVGVGLDRLRRALPEIVEDGANGIPGIARDVFADAGQQLRELDARVTAYDRRIAALARASEPVQRLMKIEGVGPVTATALVASVGNASVFNNGRQFAAWLGLTPRQHSTGGKQRLGAMTKHGDVYLRTLLIHGARAVLRVTANRNDAKSRWAESLRRRRPDNVAAVALAAKHARIIWALLARGQDYRPAA

SEQ ID NO: 355006 - protein, 350 aa, unidentified
MSHRSTSSLITTIGIDIGKNTFHLVGLDQRGAIVIQLKTSREQLERRLSNLPRCLIGMEACSGAHHLGRQLTALGHDVKLIPAQYVRPFLKGHKNDYRDAEAIAEAVQRPTMSFVTIKTPAQMDLLALHRVRSRLVSLRTGVINQIRGFLIERGIAVRQRPAPLRKALSDILSASPSALSPRMVRLISDLSEDWRRLDDRIATVSAEIEALVEEDGSCQRLMTVPGIGPIISSAVVAAIGDGAGFKQGRDFGAWLGLVPRQESTGDRTILGKISKRGNKYLRTLFVQAAHVILARRPSAAMRGLWPWIAQASKRLHRNMLAIALANKLARIAWAVLARGREYQPMSMRAA

SEQ ID NO: 355007 - protein, 394 aa, unidentified
MTKRGQSQARHNRNRKVRRNLTVINPDAAGIDVGASVHYVAVPPERDEQPVRSFGAFTEDLHQLAQWLVQCGVRTVAMESTGVYWIPLYQILEDYGLKVKLVNARHVKHVPGRKSDVQDCQWLQQLESFGLLSGSFRPEAKICVLRSYMRQRQMLISNASRHIQQMQKALTQMNLKLHQVISDLSGQTGMRIVRAILQGERDRLKLAELKDPRIKSSVGTIAKSLEGDYRAEHLFALRQAVELYDYHQQKIAECDQEILKEMQSLESRAEPGSVPPPSLKRKGRSRHNLIPFDSRAELYRILGVDLTRIDGLNEATVQLILSELGLDLCKKWPTEAQFASWLGLCPNNEISGGKVLRRGTRRVINRVANALRMCAESLLNSKSALGRPPHESKT

SEQ ID NO: 355008 - protein, 320 aa, unidentified
MQYLGVDISKEKFDVALIQDAQNPEKVKQKVFANSPAGFTRLMSWLESRATEPVHVAMEATGAYWEALAVFLCEKGLTVSVVNPGLIKKEAESWGVRNKTDSVDARVIARFCLAKRPRAWVAPRADLRELRDLVRHLDCLEQEKRQNENRLGAGVTSDAVKHSLEEVLAFLDAEIKRLEDHIADHIDRHPGLKTESKLLESIPGIGKKTAAVVLGELGDISNFSRAKQVAAYAGLSPRRIASGKLKGQTRMCKAGNSRLRRALYFPAIVAASSNPVIRGFYERLRRDGKCKMSAIGACMRKLIQIVYGVLKTGTAFEVPA

SEQ ID NO: 355009 - protein, 427 aa, unidentified
MPYKIAGIDVHKRMLHVVVSDVEVDGEYEFTRRIFGSSTEGLRSLAAWLMEHQVEEVVMESTAQYWKPVWGALERCWKPICQKREGALATSGTLHLAQALSNRGRRGRKKDFRDAERLVKRLVANELILSFVPDAQQRLWRTVMRTKYQLTRNRVQLRNRLEALLEEAHIKLSSLVSDLLGVSARRMLKAIAEGETDPAALAALAHERLRAKPEQIRDVLGVCQELHPVYRRLIQMALDESASIDKRIDRLEQEMADLLRLHEDQVQRLAEVPGLGVDSAQQIIAEAGATAATFPSEKHLASWVGACPGDEESAQVNYSRRSPQGNHHMRRILNQAANAAVKQKGSIFEILYRRHVPRLGHKHTIGIIAHKLCRLIWKILHLGVRYEERGPEVSKTSKQKRTQKMIRELRRLGYRIELTTSQPAMSA

SEQ ID NO: 355010 - protein, 345 aa, unidentified
MIIGCDFHPSWQQIAWLDSETGETGERKLVHAAGDAKAFYQQLAAPALIGVEATGNSQWFIELVQDSGHEIWIGDAAQIRASYVRKQKTDKRDAAHILKLVVEGRFPRLWTPDGEQRDLRQLVLHRHKLVEIRSRVKNELQHLSLNKGMQRKAKLWSEAGQKLLRELPLKPWAACRRADLLGLLALLNQQIGTLDQAVQQAADQHPQAKLLMTQPGVGPNTALAYVLTIGDVSRFPRGKQVASYLGLIPREESSGGRQKLGAISKQGNRLLRSLLVEAAQIAVRYDPGLRKQYLHRCHQKPKGVAKVAAARKLAVRLYWMLRTEKPYPEIVRIESSPRVALVGAS

SEQ ID NO: 355011 - protein, 409 aa, unidentified
MRMFVGLDVSSFDMKVCVLDQEGDQLSVFTVSNDWPGAQVLKERLLELLADTEVDILKIGLESTSVYSFHPSMFLHDDDDLKPYGAQVFVINPKQIANFKKSFADMNKTDEIDAFVIADYMRFGRNQMSVVKESQYVALQQLTRSRYHLTKAMTKEKQHFLQHLEYKCNTFSKEVDSSVFGHAMMELFLEKYSLDELAQLPLEDLARFLQEKGRNRFPDPEAVAASIQKAVRSSYRLDKVVEDSIDVLLGTSIELIRSFQKQIKAIDQSITRIMKGLTQTLESIPGIGPVFAAGIIAELGQIDRFPDETKIAKYAGLYWRKHQSGRFTAEDTSLTRQGNHYLRYYLVEAANSVRRQIPEYQVFYQKKYQEVPKHQHKRALVLTARKLVRLVDALLRKNQLFTPERGVNL

SEQ ID NO: 355012 - protein, 376 aa, unidentified
MDESSKVYVGLDVHKETIAIARALSGREPARLMGEIAHDVGRLVKKLQPLGDPVDVHIVYEAGPTGYGLQRKLRGLGYACEIIAPSLIPRRAGDRVKTDRRDCLRLAELSRAGELKAIWIPEPADEAIRELSRAREDAVTARTRARLQLRGFLRRHDIRYPGKTAWTKTFGRWLATLSFEAPGSQIAFTEYCLVVQACDARVERLSLALLQAIQGWRFEGVVKALCALRGIDAVSAIGLVAEIGDIARFDHPRKLMGYLGLVPSERSSHDRVNRGPITKSGNAHARRLLTEAVWCYRFKPRVGYQAQRRQEDLPESTRAIAWKAQLRLTGRYAKLHARGVTLNKVCVPVAHELAGFVWAVPRNASAHPMRAPGAAV

SEQ ID NO: 355013 - protein, 350 aa, unidentified
MTNTNISSVIIGVDTHKSIHVAVAIDNNGSRLMAFSAPATTKGYKTLEDWACALGTIIAFGIEGTGSYGAGLSRHLLAQGHKVIEVTRPNRQLRYQHGKSDSLDAEGAARSVLAGQAIAQPKTQTGSVEMIRHLKIARDTAVKCRSQAMVTLKTLIINAPAALRDTLDQISGKIALIRYIAAFRPGAMTSTIASAKTALRALAQRWLALHEEIQSHDKALEQLVAVRAPTLLASHGIATMTAAEMLILVGDDPTRIRSEAALACGVCPIPASSGKTNRFRLNRGGNRQANAALYRVAIVRMRNHPPTLAYVSKRKMEGKSNREIIRCLKRYIVREIFTHLCRPKASLTST

SEQ ID NO: 355014 - protein, 339 aa, unidentified
MNITTIGIDLAKTSFSLAGSDKHGKIVLRKTVNRGKLLSFIAQCPPCLIGLEACSGAHYWAREFEKLGHQVRIIAVKFIEPYRKGGKNDNNDAEAICEAVRRPNIWYVPVKTADQQAALCVHRVRQGVVRDRTAWVNRLRGLLSEFGIVMPKGRYAVQSAVPAILGDPDNGLPELARQMIHDLWLSIQQANDQILGYDRALSRLSKEDETAKRLLTIPGVGEQIATGVVASVPDPRLFKNSRQFAAWLGLVPRQYTTGGKIRLGRITKRGDKYLRMCLVHGARAVVAKLGDKQDHVSCWVRDLIERRGYLRAVVALAARNARLIWTLMMKREDYRPMQN

SEQ ID NO: 355015 - protein, 499 aa, unidentified
MKTTQTKPSERPRETVTRVKSPAQAKPRRRGERAAVVLENLEQINLHAAGIDVGSAENAVCVPLRSLKSGQAHVRLFGVFTQEQDDLVEWLKECAITTVAMEATGIYWMCLYDKIEAAGMEVLLVDPHSVRHVPGRKSDVLDCQWLQQLHTYGLLRGAFRPEATVRRLRVLARHRADLVAEGGSHLQQAQKALVQMNLQLPLVVSDINGETGLRIIDAILAGERDPGVLVKLRDPRIKKSTVAQMAAALTGHYSEELLFVLEQNIQAWRFYQKQIELCDQQMEGVLKAMASASKAAVPPIPPKPVPVALAGSPGAKPKRQRPLHGNNAPKVDFSEQIRRICGVDLMKVCGLNLLSVLMIVAEIGVDMSQWRSAKAFSSWLGLCPGTKISGGKQLSRRTRHVVNRASVLLRLAALAAGKTDTWIGRFYRRKKAHLGAPKAITATAHKLACVIYHMLKYQEDFRPLDVAVYELKAQERRMRHLRKQVEELGYELIEKQQAA

SEQ ID NO: 355016 - protein, 340 aa, unidentified
MKNVNLLAIDIAKINFQLHGVDLTGNIVLRKKLTRNKLIEYISNLPSCTIAMEACGGANFWARKFTQFGHTVKLISPQFVKPFVKTNKTDRNDAEAICESASRPSMRFVSPKTIEQQDVQSLHRVRSLIMQERTALSNQIRGLLSEYGITIVQGIHNLTKCLPNILTDEETELSTLSKIIFRDLYEQILLKTKKIEEYDKLIEAVFKQNIDCQKIAQIEGVGILTATALIACIGDINIFKNGRHLSAYLGLVPKQHSSGNKQKLLGISKRGSVYVRSLLILGAKAAIRSAAKKSDRKSNWIKEIQKRRGNNIATVALANKTARTIWAILKNNSNYAVIAA

SEQ ID NO: 355017 - protein, 356 aa, unidentified
MNKISKLNFEGQQIYVGMDVHKKSWSISILTDKFEHKTFSQSPEVGTLVNYLKRNFPGASYKSVYEAGYCGFWIHDRLQEHGVQCLVVNPADVPTKDKERTKKTDRVDCRKLARSLRNGEIEGIYVPSRLRVEDRSLIRTRQSMVKKQTRCKNQIKSILHFYGIQIPEELANSTWSKRFINWIEAIRMERASGNFALKVHLEELNNIRKIIADITRVIRTLAKSDEYRQNVRLLKTVPGISTLTAMILLTELYDISRFKNFDKLCSYVGLIPNTDSSGETERKTGITGRRNAQLRCILIESSWVAVRKDPALLMTFNALSKTMPKTNAIVRIARKLLNRIRYVLKNQQEYVSAVVK

SEQ ID NO: 355018 - protein, 409 aa, unidentified
MDVVYERCCGLDIHKKSVVACLLTPGTAGQAVKELRTFGTVTDELLALADWLAAAGCTHVAMESTGVYWKPVWNLLEAHFALLLVNARHVKAVPGRKTDVKDAEWLADLLRHGLLRGSFVPDRPRRELRELTRYRSSLVQERSAEVNRLQKTLEGANIKLGDVATDIVGVSGRQMLRALIEGATDAVAVAALAQGKLRTKRPALAAALRGHIGSHQRFLLAQQLAHIEQLEATIAAVTAEIEARLHSFADELDLLQTIPGIGLRTAQVLVAEIGADMRRFPTAGHLASWAGMCPGNDESAGKRRSGRTRKGNRWLRAALIEAAHAAARSKGTYLAAQYRRLAARRGAKRAAVAVGHSILVSVYHLLRDGEPYHELGGNYFDERDRLAVERRLVRRLEALGHKVTLESAA

SEQ ID NO: 355019 - protein, 348 aa, unidentified
MQSKSQIQSIGIDLGKTTFHLVALGNRCQVVVRKKFSRQQLLLYTANLPSSLIGMEACVGAHFLGRALREQGHEVRLIPAQFVRPFVKSNKNDYRDAEAIAEAVERENMRFVPIKTEDQLDVQALHRVRERLVSRRTSVINQIRAFLLERGISFAKGPASLRRQMPEILENAEEKLTTRLRRLLDFLWQEWKHLQLQIESLSEDLELIASSDQACARLQQIPGVGPLVATAVVSAIGNGAAFHKGREFAAWLGLVPGQWSTGGKTKLLGISKRGNPYLRKMFIHGARAVVLRAKREGSYLGQWMKSLEGRAARNVVIVATANKLARISWAVLSSGENYHPMPAVAVAS

SEQ ID NO: 355020 - protein, 440 aa, unidentified
MSMVMIGVDPHKASVSIEARDSATERLVATGRFGTDTAGYRQLRAVARQWPDRVWAVEGTAGTGQPLAQRLVADGETVLDVPAKLAARSRVFDTGQGRKTDAYDAHAIVLVALRDRGSLREVREDDALTILRLLVDRRDQLAKTKVQGLCRLHRYFTELIPGGAPKQKSVDQYRRLVASVRPRDQVGRTRRRIAADQVKELMRIEAQLKASKKELTAAVLATGSSLMDLRGIGPVNAARILADVGDVARFPSKAHFASWNGTAPLDASSGEQVRHRLSRAGNRRVNHALHMAAVVQLRHDTPGKAYWRRKNNGPGKALHAMRCLKRRISDTVYRQLVTDAATHHDQEEVAAGRVGHPGASLASSAADLPPDIGTSDQPQPEPADPTVDPNERGDQTPAGGPPAAPRRRRARGVNVQRPTGRTTLTPTNTDAESRLEHTGT

SEQ ID NO: 355021 - protein, 437 aa, unidentified
MITLRSRDTQEIESAMRKLVIHCNLFSEVFVMLNAVGIDVSKGRSTVAVLQPGGVVLHRPFDVFHNTKDLHNLARYLVSLDGETRVVMESTGRYHEPIRNVLSEAGLFVCAVNPHLIKNFGNNTLRKVKTDSADAKKIARYTLDNWATLREYSVMDTTRTELKTIHSQFNFFMKQKTSAKSNLIALLDETYPDVNKLFSSPIRSDGSEKWVDFAYSFWHVNCVLDAGLKTFTERYQRFCKRHHYEYQPNKPVQIYEQAKRLVPAVPKDPIYKELIQDSIQQLNLISQHVEQLRKKMDELASALPEYDTVRAMYGVGPSLGPQLIAEIGDVTRFTHREALTAFAGVDPSKNDSGQVVHKSGRASKRGSARLRKTLYQIMSVMLKLGPRDDDPVSQFLFKKKSEGKPYLVYMTAGANKFLRVYYGKVKECLRNQAAQET

SEQ ID NO: 355022 - protein, 340 aa, unidentified
MDVVIGIDPHKATHTAVALGEGELELARLEVRSGRSQLERLLDWATPFPQRRWAIEGAEGLGFLLAQQLVAADQLVVDVPATLAARTRLLGNGRTNKNDPNDALSVAVTALRHRELRTVTTAGYSELLRLLAKRHIDLSNQRTRLVARLHALATELSPGGIGKKLNSTDAAKFLAAITPTDAVAQLRWDLIAELADDIARIEAQTKQSERRLRDAVAVSGSTVTDIYGIGPIIAAMLIGNTGDINRFANRDRYAAYNGTAPVEFSSGGRVVHRVSERGNRTLNHALHLAAMCQLRQPRSDGRTYFDRRVAEGKTNKEAIRALKRQISNIVYRHLVADAAH

SEQ ID NO: 355023 - protein, 343 aa, unidentified
MEQYIGLDVSLKETAVAIREGGKRIWRGKCPSDPRLLAGVIRKRAPHAVRVVFETGPLSTWFHHALVAEGIPAVCIEARHAQKILNETLNKTDANDADGLAQLAEAGFYKTVRVKSFDAMLSRTLVGARNQLLDISTKLSNQIRGLMKTFGLVVPPGKGAVFHRNVREFLDGQDRLAMIILPLLEAWRDIRKHIVDLDRQLLTVARQSQAVQLLMTIPGIGAVTAVSYVSAVEDPANFRTSRSVGAWLGLTPRRYQSGEVDYDGHISRRGDNRLRGLLFEAATAMLTRTTARTESSLKDWGLKLRERLGFRRAAVAVARKLAVIMHTMLKTGETFNASAGAIA

SEQ ID NO: 355024 - protein, 370 aa, unidentified
MENRSMFVGLDVHKETIDVSIAEGHRDGEVRHYGVIASDLEPLDKVVRALRAPDRQLHFVYEAGPCGFGIYRHLTKRGEDCVVVSPSMIPKRSGDRVKTDRRDSLMLARLHRAGELRAIYVPDDTDEAMRDLVRAREDAVVVGTQAKYRLKAFLLRQGRRYPGREGWTLPYRRWLADLSFPSAPQHIALQEYRDAIAETEQRIDRLTEQLRQLAPTWRWAPVVAALQALRGVSFVTAVALVAELGDLTRFRHPRELMAYLGLVPSEHSSGPSVRRGGITKAGNPHVRRLLAEAAWAYQGIPRIGRQHAYRQEALSTVVCDIAWKAQLRLTARFKRLVARGKAKPKVATAIARELTGFIWAIAREVSPVPR

SEQ ID NO: 355025 - protein, 470 aa, unidentified
MLLRARVSVSCTDRGLWRAARPLSHRWGVLLQEVARRMKVLHERVAGIDVHKEMIKVAIRSPGEKPWTRKTEILEYRTFYGVLQEMARELRRRGVTHVVMEASGVYTEPVYYALAERDFTEVAVINPAHAKALKGHKTDAKDCTRLAELFECGLLHGSYIPAPELKEVRDLTRYRMKTVQARTSEIQRLAKALESAGIKLGSVASSITGVSATAMIEALIDGERRGGVLADLAQGRMREAGKLADLSMALSGRFTGHHALLCRLHRDRIKMFEDAVAGLEDRIAGKAAPWRRELDLLMTVPGFGDAVTQAWLGEIGPAPHLHFSSHDKLACWVSLCPGNNISARKRKYGRTGDAGTYIKPMLVQAAWSAIRVRGRLQARYNRLVRRFGGDKNPGAKKKAIVAIAHTLLKIAYQVLKTGTPYQELGADFYARRESPEQKQAWLERQLQKLHPGCAITITISPPQTALPPGA

SEQ ID NO: 355026 - protein, 317 aa, unidentified
MQTPIVYGVDVAKAELVIAGPGASCVKLANRASEISRWLEGIPVGSFVAMESTGSMHRLLAQMAHRHGMTVFVLNPRDIHHYARALGSRGKTDRNDAEVIARYVAAEHGGLRPYEPASELQERIDLLLRKRASVVRHRDALRKSLRELPGLDDAAMRAMRSLAELLARIDDQLEALVRSEQSLVQRSALLRTMPGVGPLTSVSLANLLERVKLANADALVAFVGLDPKPNDSGQHRGRRRLSKRGPSEIRRLLYCAALTAARGAWRPLYEALRSRGLASTQVVCVIARKLLRVAWAMCRTNSPYDPALAPKPLDATT

SEQ ID NO: 355027 - protein, 344 aa, unidentified
MNPTTIGLDIAKSCFQVHGVDEHGKTALQKRLRRTQVLGYFANLPACLIGIEACGSAHHWARELSKLGHEVKLMSPQFVKAYVKTNKNDARDAEAICEAVARPNMRFVPIKTIEQQELLMLHRARQRLIQARTAQANQLRGLLAEFGFVLPQGLPALERDFPTILADTENALSSRLRERFSDLFRQLRELSEMVADWEREILSWHRENPLSRRLQEIPGVGPLTASAFVASVGDARTFKSGRQLAAWLGLVPRQDSSGGKIRLLGISKRGDRYLRTLLILGARSVLARRKPTPGDWLERLKARCHPNIVAVALANKTARIIWALLVHNREYVAGYRKRPACATA

SEQ ID NO: 355028 - protein, 450 aa, unidentified
MPRKRNRVAQLPVIEPNAAGIDVGATQIFVAVPADRDPESIRSFETFTVELEKLADWLQECRIQTVAMESTGVYWIPLFQILEKRNIAVCLVNARHIKNVPGRKTDVEDCQWIQHLHSVGLLRGSFRPDDDICAIRSLWRHRDNLIQLATVHLQHMQKALDQMNLQIHHVISDLAGTTGLAIVDAILAGERDPHELAKLRDWRVKASEETIAKSLVGDYREEHVYVLRQSLECYRTYQKMIQDLDVKVKHRMGRLPSKVDMATKPLGKERNPRKTPRRTEPFDLRLELYRAFGVDLTQVPGINALTAQVLLTEVGTTLARFPTSAAFCSWLRLCPEPKISGGQVLSSKTRPTKNRAALALRLAAQALHKSQTFLGDYFRRMKARLGPPKAITAVAHKLARIVYHMITRQQEYDTTIFQEQERRVQDRKHNRLCLQARALGFQLVPVKAVP

SEQ ID NO: 355029 - protein, 472 aa, unidentified
MPSLFADISSLEARMFNGQEKRATRPRRRLSPINPAAAGIDIGATFHVVAVGEDRCERPVRTFRSFTSDLGELANWLTEARIKTVAMESTGIYWIPVYEILEARGFEVLLVNARDVKNVPGRKTDINDAQWLQQLHQYGLLRASFRPREALARLRAILRHRERMVEYAASHIQHMQKALMQMNVQLHHVVTDITGLTGLRIIRAICSGERDPAVLAQLRDSRCKASADVIRAALTGHYRAEHAFTLRQALELYDVYQAKIEECDRELEDALVEINRGHSAAEESLPKRRDAGGRNEPHFDVRTALYTLLGRDLTQIDGLGTYTVLRLVGECGDDMTKWRTSKHFASWLCLAPGNKVSGGKLLSSKTRRSSNRAATLLRIAAVNVGRTQTALGAFYRRLAARAGKAKAVTATARKLAVLFYNALRFGRDYLDPGADYYEERYRRRVIRSLHRRAAQLGLILTEARVVTESGVS

SEQ ID NO: 355030 - protein, 461 aa, unidentified
MANEDQKGRPECSEAIDEGFPVLRGNVAGIDVGSEEHWVCAPARTGRGREVAVFAATTPGVEQLAAWLKDRDVTSVALESTGVYWIVPHEMLEAHSFDVVLVDSRWLGRVPGRKKTDRRDCEWIQRLHSCGLLRGAYRPVEQVCMLRTLVRDRGTLIAERADWVRRMQKTLDQMNVRVHRAVANVDGATGMAILRAIVAGERDPHQLATLRDPRCRKSEAQIAEQLTGHWRDDHLFSLRQALKMYDALSDTIAAYEREILRYLETMTSVDRRDDQAPPPTSPTKAQAIKSRGQDPLRHALYRMSGVDLTTIDAVGVETVSVVLSEYGPNLSQFPTEKQFVSHVGLAPHAPRSGGKVVKKKKKPGSASARVGAALRMAATSLRHSQTALGAYYRQVARRAGADVAVFATARKLAQHLYRLLRWKPYVDEGTAAYDKRYQLARAKRLAATAKDLGYKLIPVEA

SEQ ID NO: 355031 - protein, 336 aa, unidentified
MKKNFDYYVGIDVSKLTLDVTVLFECNNSTKTEYCKIENNAKSIAQFVKKLLARCGSGQILFCFENTGIYSLPIAFYLNENKLSYWQVPAMEIKRSKGITRGKSDKIDSKDIAFYACTHTHKYRPGMMPAKSIQQLRLLFTEREKVLKALALFESTAENRNFVPKDVFKAVESANKSVINKLKQTIKCLEEKMLFIIASEDQLNRQYKLLLSIPGIGMQTAIYSIIATKGFESFDNWRQLACYAGVAPFPYESGTSIRGRTKVHPMADKKLKSLLNLCAMTAIRYDKELKLYYERKVKEGKSKMLVINNVRCKLLARVFAVIKRQTPFIDTCKFAS

SEQ ID NO: 355032 - protein, 352 aa, unidentified
MAKASVSTEISAIGVDLGDRRCQVCVLDGEGGVVEEASIPTTHSAFERKFRSIPRTRVVIETGTHANWIHDLLLEIGHEVLVANARKVRAISANERKCDALDARMLAKLGRVDATLLQPVAVRPEQARLDLGLIRARAALVETRTSLVNSVRGLAKTAGHRLASSSTESIHKLPFDASLESSLLPLMATLEQISKTITEYDKKIEALCRERYPQTELLRQVPGVGPISSLYFVLAVGDPNRFEDARDVAAYFGLVPRRDQSGERDPQMRISKTGDRMARTLLVQCAHYILGRFGPDSDLRRFGLRLAERGEKSGKKRAVVATARKLAVVLFALLRSGMAYEPLKNSAKDSAS

SEQ ID NO: 355033 - protein, 344 aa, unidentified
MHSVNNTELSSLEETRCQFNGGRCAIKLGIDVHQDFYVVVMQEGGSNPKPPQRFPKEAFLHWAAKLKSRSGEVYAVYEACGFGFSLQRQLSALAINCYVVCPQKLDECRKRVKTDGLDAKALCLRLDRFVQGNGDALAMVRVPSEEEERSRAIHRQREQLVKVRKQLEAQGRSLMVNHGIEPVQQWWKERAFSKLPVPAWMKELLGNTQPMLIALQQKIAALTLQLQSAALPEQPRGLGKMTSVVIDREIGDWRRFNNRRQIASYTGLCPGEYSSGNTRLQSCVTKHGNPRLRAALVELAWRMVRFQPNYRAVRKWKQLLEARCPQHRRSPQKSHRSCSATIGS

SEQ ID NO: 355034 - protein, 400 aa, unidentified
MRVVFGIDVSKVSSEVAILVNGEKVHGYTMSNDAIGFTRLLGDLKTVHKPEIIFEATGVYSRRLQAFLDEHGYAYTRLNPLEAKKQLDSLRVRKTDQIDAEKLAQSQFALNRKPTYVQEEVYQDLRDLSRFYQNLTEDIVRTKNRLHKVLQVTFPELENILSTPTGEQYWNLVIAFPCKDFVLDLSKDELSESIRQSTSKRISDKRVAYLAEKLIALANQSYCAVKKTSPMLEEVRYYGKELLRLSEQRQSVLDEMVELAQPLPEYDILLSIPGIAETTATSIIGELGDIRRFQSANQINPFIGIDLRHYESGNFLAKEHITKRGNPYARKILFKCIHNIASASHTNPCHIADFYEKRKRQSQTTSTKPHTIASIHRLIRTMYYLITHNKLYDYTSTQNR

SEQ ID NO: 355035 - protein, 344 aa, unidentified
MKHYAGLDVSVKETSICIVDEAGRICREMKVVSHPEDLLAVLCDPAWRLERVGLEAGPLSQWLFSGLAEAGVPAICIETRHAKAFLKAQVNKSDRNDARGIAQMMRVGLFQPVHVKTLASQKRRALLAARKILQEKALAIENDIRGLLRNFGLKVGIVGVVGFEQRIHDLVEGVPELADIMEPLLAARRVLREKFAKLHRKVLLLARDNEVCQRLMTIPGVGPVVSLAFISTVDVPARFRNSKAVGPSLGLTPVLNQSGESHRVGRISLCGDEAMRALLYEAAQVMLTRVQKWSWLKAWAMNIAKRRGQKKAIVALARRLAVVMHRMWSDGTEFRWTREMAPTI

SEQ ID NO: 355036 - protein, 345 aa, unidentified
MTQYKRIGIDTSKAVFTLHGIDHNDKPVVRINLRRSQLVPFFRKLPATEIVLEACGAAHHWARELSALGHEVRLIPPQYVKPFVKRGKNDRNDAGAVCEAGGRPDMRFVPVKSIERQANGMMLKVRQRLLDQRTALTNALRGHAAEFGVIAARGLSRIEPLLTAIERETSIPAEAKEMFALLGEEIAHLDARVEQFDARLAAAHKANEMSQRLATIPGIGPVTGLTLALEIDPASFQSGRHLAAWAGLTPKEHSTGGKQRLGGISRAGHERLRALLVAGATAVINAAIRFGDHRLSEWLRGLLRRKPRKLAAVALANKMARIAWVVMTRGEVYRRPAGAASAVAV

SEQ ID NO: 355037 - protein, 351 aa, unidentified
MKTQQTAFPKLFIGIDIHKRSWKVHCSTDLFGGKSFSMSSDPEQLRVYVSRHFPDYEVSVAYEAGCCGYYAHRCFEGYGWRSLVVNPADIHRKGKERYTKTDRIDAQLISRELKDGRLESIVVPDIEREELRSLFRRRNDLVKDFRRIKSYIKMQLLYFGIKEPGEFDNDHWSHKYRKWLDDMVFEHPTAKAALESRMRFFRFVDQELRDVSSQLRRYCKTHYKKDYMLLRSIPGIGGIVACGILCELGDLRRFNNVKHLAGYVGLAPSVHQSGGNYKTMGMTPRAHRLIRSYFVEASWQAIRADPVMQGYYRKHTGKNVKSIIIKVARKLLSRTLAVIKTEVPYTIGVVE

SEQ ID NO: 355038 - protein, 391 aa, unidentified
MFLLGIDIAKLNHVASCIDSSTNEVIFSNFKFKNDFKGFSALLNKIKSFDAKNLIIGLESTSHYGENLINFLFKHDFKVALINPLQTSHLRKANIRDAKNDNLDSLNIAKSLLFTKLNFVSEKNIECFSLKKLTRFRSNLIKQRSKAKIQLTSLLDLLFPELQYLFKSKIHSKAIYSLLKKYPSTEEIAALKDDEISNLLYASSKGHFKKEKSIELKSLAKTTVGIKDTSISLHLIQLIELIELYTKQIKDIEIKITDTVNKLDTTLLSVPGISIIACAIILGEANNFENFSSSKKLLAFAGLDPKIRQSGNFNASSCRMSKKGSPYLRYALIFTAWNIVRHSEKFNKYYSLKRSQGKSHYNALGHVAHKLVRILFTLIKKNISYQEEKLE

SEQ ID NO: 355039 - protein, 338 aa, unidentified
MDRQYVGIDFHRRRSVIVRLDSNGERLGVHRIVNDPFELSRVIALCGEAPQVVIEATYGWYWAVDLLQDLGAMVHLANPNALNWGDRRVKNDEIDAHDLADMLRLGRMPRARIAPPAIRELRERVRYRAKLVKLRTGLKAQVHAVMAKEGVLPRVSDMFGPAGTRQLDALELGAPFAHRVASLRELIGVYDREIATLERDIHAHLKAHRGYQAVQAINGIGKVSAAVLVAEIGDITRFATPAHLCSWCGLTPKHRESDTKTRRGRISKQGSALIRATLIEGISRYHGGSALDAQYQRIAKRRGRNKARVALARKVLTLVYYGLRDGEIRCLAPVEAAA

SEQ ID NO: 355040 - protein, 360 aa, unidentified
MVESTPVVAFDQHAASVVAAVLLPGQRTPALHTLGPDLTAVSRFIERLHVAEVRCCYEAGPCGFELQRHLRARGISCEVIAPALIPRRAGNRVKTDRRDAAQLAVLYRAGALTAIHVPTEAEEAVRDLLRCREDVQADLLRAKHRLSKFLLRHGRRCPDAKPWSTRFFVWLAVQQWPLAALEQTFVSYRQAIDDLMARRRAIDEDLRAALTVEPLASRVARLRCFRGIDDLSALTIAAELGDATRFAAARQVMAFTGLVPSEYSSGARQRRGGITKTGNAHLRRILVEAAWHYRHRPAISPRLRSRQRHALPAVLRCAWTAQHRLHARYRRLVARGKAPQLAATAVARELSAFVWSALTQ

SEQ ID NO: 355041 - protein, 411 aa, unidentified
MDRIYDKCCGIDVHKKLIVACFRQGNRQEVREFGAATRELLEMAEWLQDGGCEMAAMESTASYWKPLYNILESSDLKAMVVNARHMKAVPGRKTDVKDAEWIADLLQHGLLQPSYIPDKDQRELRELVRYRKSLVGERGRELNRLQKMLEGANIKLSGTVSDINGKSARSILEYLLAGQTIDEARFDEMYDKKTIAHNLKAAKEQIIDDLNGVMSLLQRRMMKELLKHLDELNSHIKNLDDEIDNFMKPEEKAASAAIQEVTGIKNTSAQAVISVIGTDMGRFPSDRHICSWAGLCPGDNESAKKRKSGKTRKGNVLLRTTLITCAHSAVRNKKSYFYAQFMRISAHRGKKRAYVAVAHSMLIAIYHILKDGVVFKDLGAEYYNQFNKERKINAYLKKLKALGWEVPVVAA

SEQ ID NO: 355042 - protein, 350 aa, unidentified
MELHTIGIDLGKTVFHLVGLNQRGEVVVRKKFSRKQLLHFTANLQVKLIGMEACGGSHFLGRALREQGHEVRLMPAQYVKPYVKTNKSDYIDAEAIAEAVERPKMRFVPIKSDDQLDLQSLHRVRERWVMRRTAVINQIRGLLLERGITLRQGRRHIDAALPGILEDASAQLSGALRLLLAQLRQELDHLQMRIDEADAVIQKIAGENEACRRLVAIPGIGPVTATAIIAAIGNGAAFKKGRRFSAWLGIVPGEYTTGGKQKLLGISKRGNSYLRRLFVQGARAVLQQSAKQSSGLSAWLAQLTTRTHSNVAAVALANKLARMAWAVLAKNEPYRPPMLAGAATECLACR

SEQ ID NO: 355043 - protein, 398 aa, unidentified
MTRKNTLKSLPTDTEFRVVGLDLAKSDVSVAAIPVDDNTPSLVDRMTYADLLDWAGKISPTLFAMEPCNGYSLSCLQLENLGHEIKVISGSTVSMWINTHLSGQKTDLNDAIALARLAVSDAELTPIRHKSITEIRIQTVQAVRQQLMSQRSKSIVSFKALAQQWGIPCAAGHRNLKKLRESIEAKVDLITRPVANAMLFLLDAVKSLDRQIGQLNQTLQELVMSDERGRLLQSVLGVGTQISARVITVVGNIERFNSPRSLVAYVGVAPRNFITGHKNLTKKKHGNCPDLSHKGQGKISRRGDKLLRSLFIQGAACLYMQFCKDQLPECQLKRWILKQLARQKPYGKLIVSLAAKLIRIVWAVLTYREKFNIQKAGMTRSMWSEMALETPLNKEVPA

SEQ ID NO: 355044 - protein, 342 aa, unidentified
MQISTIGIDIGKNSFHFVGFDARGGIVIRRQCSRTQLVRALANVPPCLVGMEACCGAHHLGRILIAQGHDVRLIPPQYVKPFVKSHKNDLLDAEAIGEAVQRPTMRFVPLKTMEQLDLQAIHRLRTRLVGRRTAVINQMRGFLLERGVTCPIGREALVKRFPELLDNPALGLSVRFCRLLKQLRDEWRLLDDDIEEVDQEILSLARDDEACDRLMQVPGIGPLTATALVAAVGNGAAFAKGRDLAAWLGLVPRQHSTGGKTVLRGISKRGNAYLRSLFIHGARAVCRHHRQKPHRLGRWLANLEARAHPNVVAVALANKLVRTAWAVLQRNSHYDGRLLANA

SEQ ID NO: 355045 - protein, 348 aa, unidentified
MNLKRIGLDTSKAVFTVHGVDHDEKAVLRRNMRRAEMEAFFAKLPPTHVALEACGGSHHWGRRLAAMGHTVQLIPPQYVKPFVRRGKNDRNDAEAISEAAARPDMPSVPVKSAEQQAEAIVLSARELLVRQRTQLVNAVRGHAAEFGIVAAKTIGKLPGLLEAVAAAETVPATAKQMLAFLGAQVAQLDGQIAELECRMKQQHKANPVSQLLAEVPGIGPVSALSLALTIDPGRFTSGRHFAAWLGLVPKEHSTGGRQRLGGISRAGNERLRQLLVVGAMAVIRYAKPGSKTASAWLPALLERKPRKLAAVALANKMARIVWAMMATGEMYRGSKKVAAPAAGAAAAA

SEQ ID NO: 355046 - protein, 462 aa, unidentified
MQEKRESEAGRNRRRQLQGLPLMRADVAGIDIGSERHWVCAPTADGGGREIADFGATTAELIRMAEWLQARGVRSVAMESTGVYWIPPHEVLEAHGLEVLLVDTRQLAQVPGRDKKTDPTDCEWIQRLHSCGLLRGSFRPAEAICMLRTLVRDKATLVAESADWMRRMQKSLDQMNVRVHRAVSDIDGTTGMAMVRAIVEGERDARKLAQLRDPHCRKSEAEMAEQLNGHWREDHLFSLSQALKMYEAIQQRMADYDNEILRKLGEMEQEEARGQEAPALKNANKARKIKSRGQEPIRQALFRMSGVDGTQIDAIGVETMEVILSEYGPDLSRFPSEKEFVSHATLAPHVPKSGGRPLKKKKRHSPSARVANVLRMAAQSLRRSNTALGAYYRSMAQRKGADVATFAVARKLATLAYRLLRWGQPYVDEGAEAYEKRYQEQRIRGLKSRAKQLGYQLTPLTT

SEQ ID NO: 355047 - protein, 422 aa, unidentified
MSKRRNRVCGADIHKDLIVATIRDDTQSLFQEEFGTTQSELKRFRDWLLANKCKQVAFEATGVYWLPIYDFVSSSIDTIVANPWKIKNIPKDKTDAKDSQWIATLCLNGQIKRSRILSKDDRDLRTLTRARSGYVKTRTQFRNRIHKYLASNGIKLSSCITDIFGKSGRYILQCLIEGRSIDSILDGIPSGQVRKKRDLIKAALGNGLDEISRMLIKDTMDLLNPLETKIEAASQEAINRLQAKNKDLAIVMSIPGIGFVSGSVILAEIGKYHDFKTPEQLAKWCGLSPGENESAGKKRPCGITKQGSKHLRTVLVQIAHVVAGKTNTKLSRFFQRLSKRKEYNVAITALARKLICLVYHLLINQELYQEEICQKRGSKSVEKSPAASYSPEDQLEDKVAAIVEAFYHLKVKGRKKSLDGGG

SEQ ID NO: 355048 - protein, 317 aa, unidentified
MAMQVGKLIVGADVAKAELVIHHDDRDEIIRLKNSKLEIRRWLKQQPLNTAIAVEATNVYHLDLVELAHSLGFEVYVIDGFQLSNYRKGVGGRVKTDPSDARLLSRFLRNEGEDLRPWTPPPAVYGKLQSLLRRRAALVTARTAMTQSWANETLLKAAFETFVKSIDRLDQLIQKKIKEVLREAGLQEQVARCQAVEGIGFLTAAALVMAFMRGEFKSSDSYIAFLGMDLRVSDSGQKNGRRRLTKRGCSEIRRLLHNAAMAASRSAAWKELYEQHRNAGKATTQALVILARKLARVAFALMKNQDEYVTKGGKLAC

SEQ ID NO: 355049 - protein, 343 aa, unidentified
MLSVGLDLHKRYSQFEVLDDAGVRRASARLANELGQVAGFFRSLGEPCRVVLEAGWNWGSMYDWLEGIENVVEVQLAHPYGVRAIAAAQVKTDRIDARMLGQLLRVGLIPQAYIPGRETRQLREAVRQRLFLVRVRTMLKNRIHALLDRHHIVPPPASDMFGKRGRNYLSKVELAGCAQDLLRQDLRLLELLNLEIRQAEALLAQTLKGDRRIELLLTIPGLGRLLATVVALEIDRIDRFARPPKLVAYAGLVPSTYSSGGKTSHGGLMKMSNKWLRWALVEAAWIAVRHDPYFRHQFALRCSHKGPKTAIIAVARRLAEVIWYVLTEDRPYQVRSQKGENMH

SEQ ID NO: 355050 - protein, 346 aa, unidentified
MMVTTIGIDPHKATHTAVAIDESETVLGEITLRAARDQTKKLMDWASGLNGDGRLWAVESAGGLGYLLSQQLIAGGEQVVDVPAVLASRVRVLSLGKSDKNDPNDARSIAIAALRQPALAVVQREDHAQVLRMLAKRHLELTSLRTQAVCRLHAVLMVLKPGGMRRRLSAKAASRMLQGMRTLDAVGEQRRLVARAHLGDIRRLDRDIKANKTLIRHAVTVSETTVTDIYGVGPIVAAFLIGYTGDPTRFASADRYAAYNGTAPIEVSSGGKKRHRLSLRGNRRLNHAIHMAAVTQIRFDTPGRVYYNKKQAEGKTKKEALRALKRHISDAVYRRLITDQQQTTTS

SEQ ID NO: 355051 - protein, 346 aa, unidentified
MEHYAGIDVSLECSSVCVVDGNGKIVREGKVASEPAALIGWFSSLGLGLTRIGLEAGPLSQWLYAALKQAELAVELLETRHVHDAFKAMPVKSDRNDARGIAQLMRLGWFRPVHCKSINAQEVRAVLTARKLVQNKLLDVENSLRGILRGFGLKVGKTTGTDFVGRINELVKGHPNLEVIAEALLRVRSALLSEFKAFEKRAGKMSRMDAKARLLMSTPAVGPIISLTYAAAIDDPARFTSSKKAGPHFGLTPKKHQSGETDRSGRISKVGDASVREALYQAAHIMLTKPVKGCSQLKSWAMRIAKRAGMSKAKVALARKLAVIMHRMLKDGVPFNPLAKANAATA

SEQ ID NO: 355052 - protein, 462 aa, unidentified
MAAVMIGVDPHKASHTAVAINAAEEPLGEVRVRASVTQVERLLAWAVAWPERTWAIEGADGTGHLLAQQLLAAGERVLDVQPKLSARVRLLAAGATGKNDPNDARSVAVAALRSPAARAVAADDHAAVLRVWPQAAPGPGPAADPAGVPAARGAAGCCRAASARRSPQARPRSCWPRSRRAARSPRPATSSRPQFVADLRGIDAQMRDTKNKLAVAVRAAGTSLTGLFGVGPVIAAIVIGDVREVSRFPGPDHFAAWNGTAPAGVSSGQRKICRLSRRGNRRVNHAIHMAAVTQIRYRHSPGRAYYDKKRAEGKTGKEALRALKRQISDAIFARLQADVRRVAASANGPGGQPGNDSGSSAAGSHPARRLFGQATPGPATQLMAPATGQPAPPALSRLAALPRERAIGSRTGPSPAAQRRPQRVLDPAALEPTIPMAGKRARQQPKAPAERTPNRARPTRSP

SEQ ID NO: 355053 - protein, 355 aa, unidentified
MNDAKYIGLDVHQATISVAVLDSAGKLVMEAILETKAETILQFIHGLRGSLHVTFEEGTCAAWLHDLLKPHVTRVLVCDPRKNALIKAGNKSDRIDARKLADLLYLNKLNPVYHGETGIRALKEVARSYLALTRDTTRVMNRLKALYRSWAIPCAGQRVYAPRYRSQWLAKISEAGVHRRAEIYYQQLDALRSLREQVRRDLLAEGRKHSAMKLLRQIPSIGPIRAVLLIALMQTPHRFRTKRQLWTYCGLALKTSTSGEYRIVEGQLKRSKKFLAIRGLNQNHNHDLKNIFKGAATRAAAVPGPFQEFHAALVARGMKPTMARLTLERKIAAITLIVWKKGVRFDAQHLKQQAA

SEQ ID NO: 355054 - protein, 337 aa, unidentified
MNSIAHTRQVTVTRIICGVDVSSKTLEARIGHQGAANTFSNNPEGIAALGAFCQAHQAELVAMEATGGYEQQAFVQLSDQGLPVTILNPRAVRQFAQSMGRLEKTDKIDPGMIAWYAEVRKSRPLCLAPPSQQHLRALVTRLRQLTEVRTAQLNQQRLVTDRAVEASFRKMLAFLAKQIGALEQRIAALLDQDPLWRELNQAFRTIKGVADRTVARLMAEMPEIGTLSNKTISKLAGVAPLANDSGQYQGKRGVRGGRPAVREILFIVASVVGRHEPDFIAFQQRLRTAGKPPKVVRIALAHKLLVRLNAKAREARQRLTTLPPDRIPLPGDACKPY

SEQ ID NO: 355055 - protein, 481 aa, unidentified
MIPIRRLPFAPPGPPPMASSIEVINMAQKRKPRRSGKANGQEGIPVLNPNTAGLDIGANEIYAAVPPDRDPEPVKCFGTFTGELHALAAWLHQCGIEAVAMEATGVYWIPVFQVLEASGLQVCLVNPRYFQNVPGRRTDVSDCQWLQRLHSAGLLRGSFRPPQAVCALRSLTRYRDNLIQMASKHILHMQKALDQMNVQLHHVLSDITGLSGLAIIDAILGGARDPKMLAALRDGRVKASEETIIQALTGDYRPEHIFTLKQSLAAYRNCQKLISDCDREIEARLKDFEGRVDQHANPLPPPKVRRKKLFSNEPSFDLRSHLYRIFGVDLTAVPGISVLTAHAILSEVGPDLSKFRSASAFASWLGLCPHNDISGGRILSTKTRRVNNRAALALRMAAYALIRSQSPLGDFFRRMRAKLGAPKAITAGAHKLARIVFHMLSTREAYDDSILSRNQMQLRTRAEARLRAQAKALGYSITAIA

SEQ ID NO: 355056 - protein, 385 aa, unidentified
MGTQTFIPRDYDVFAGLDVDKKSISVTFTDHQGFLKSLNMPYKVEHLVNYVRKHYPDKKVAFAYEAGPTGYALYDGLEAQAYPCLIASPSMIPKAPGQRVKTNRLDSRGISENLRGGQLKGIHVPTPLYRELRHLTQLRDTLVSEMVRMKQRIKSLLLMEGLEFPPAPAGSQWSFLVKKKLRELSCSSTVRFKLDRLLDSLEFDEKQVLKATREIRRFCQADPELSQCIEYLKTLPGIGWIVASKLLARVGDWRQIKNIRQLPAFLGLVPTENSTGERTERGSITHTGDGRLRSKLIQASWSAIRQDSELREFFRSVAKKHPRHLGSRIAIVAVAHKLSVRAAVVLMKQRPYEVRQKVQSAPLTQEETVPQGTTRRLAVPGETNS

SEQ ID NO: 355057 - protein, 340 aa, unidentified
MRIIGCDLHAAQQTIAMLDGDTGEVVERTLTHEGEAVRAFYASIPGPAVVGIEATGSMGWFLRLLEELGIPCRVGHPAAVRKAETRRQKHDRRDADLLLRLLVEDRFPAIWLPSTEQRDLRALLLHRHQWVRMRTRVQQALQAIAMSHGLRRGPTLWSRDGQAALAALPLPPHAAHRRSELVALYQHLAAQVDHLDARVEEAVLPRSAATRLMTHPGVGPVTALATEVFLGDPDRFADGKALASYVGMIPSAYSSGSRQRLGALSKQGNPLLRFLWGEAAMHAVRRDTELQRFYRRKLAQKGLGKARIAAARKLGIRLWIMLRDQIGYEEFCCRSPRRPS

SEQ ID NO: 355058 - protein, 318 aa, unidentified
MAGEKTVPVKRAALEDMVRWARSLGEDRVWAIEDCRHVSGGLERFLLVCGERVVWVPPMLMAGMRRGARERGKSDAIDAVAIARAAIREGIDTLPAAQLAGPELELRLLVDHRERLVALRTGLINDLRWNLHDLWPELEIPSRSIHRSAGWQDRIARRLADAKQTARVRIARDELRRVRDLTRFIDRLEREIASLVAKLAPQLLAEQGCGALTAAKLVGEIAGINRFQTDAKLARMAGVAPIPASSGRTDRHRLDRGATASSTPPCIASRSPKPASTPTPLPTWLASTRRARTEAKRCAASSATSFGASGTSCNRPVR

SEQ ID NO: 355059 - protein, 462 aa, unidentified
MNNGSGVSRGDRNRNARLSPAAGGGSGHERGRRDRPGRSEADAGGDRPRLEGAGQAHVPVQGVGPRAALDWAAERASRAGFGGVTVACEPTGHRWRVLAQLATQRGMAFVCVQPALSSWARKTEDLTTDKTDDKDAVLIARLTAQLRCYLPEPVDEANAAWARLRHLGARREQLLEEHVACVHVIRDMLECVWPAALEAAKWPFRSATWPFRSATWVAAMTVVMRRDGGDLSRTRRLGQARFERAVQAEVTRRGGVRPFQRIVRRVFTALSDDAGVLAHRPAVFERVEWTLSDWEQAWAKLEETEARMTGVLDEVGLRRLVTSIAGLSPVGAAAILAQTGDLHRFTSARAVVKHAGLAPRERMSGTFTGRARLTGAGRPGLRVAAWRAVWGCLQTNKVYAARYRQLTGREHNKLTPTQAQTAVAGAILRQLYAVVVHEQAWDPVIAAQGTQTSRCGITRSTP

SEQ ID NO: 355060 - protein, 408 aa, unidentified
MNQDSGFDIWCGLDVGKTGHHACALDAAGRKVFDKPLPQDQKRLEELFDKLQTHGRVLVIVDQPNTIGALPIAVARSMGIQVAYLPGLAMRRAADLYPGNAKTDARDAFVIADTARTMPHTLRRVDAGEETLAELKVLVGFDEDLAAEATRLSNRIRGLLTQIHPALERVVGPRLTTKQGLAVIEQLGGPQAMAAASKSKLLRVISKAYPRGAQEFADAITTALAEQTVIVAGTAAAEQVLPQLAASLRQTLGQRHALAAQIEQVVDAHPLAEVLTSMPGVGVRTAARILLDIGDASQFPTAGHLAAYAGLAPVTRRSGTSIRGEFPARSGNKHLKRALFLSAFAALRSDPTSKAYYDRKRAQGKKHNAALICLSRRRCDVLFAMLKNREPYRAPTPTREPSPLPLAA

SEQ ID NO: 355061 - protein, 341 aa, unidentified
MVTVSTIGLYLAKNVFQAHGANAGGAVVFRKKLRRDQVLRFFAVQPACIVAMEACASAHYWAREIAKLGHTTRLIAAHYVKPFIKRQKNDAADAEAICEAAQRPTMRFVTIKSEEKQASAVVFRTRDLLVRQRTQVINALRGHLAEYGDVVRHGPAHVAKLIALVQDTRCDLPEAARAILTILVETLQALEAKLKVLDAEIARRAKQDDVARRLMAIPGVGAVVAIAIEALAPPMEVFRAGRDFAAWLGLTPLQRSTGGKQRLGKMSKMGERTLRRLLIIGASSVVRQAVSRGALAGSWLTRMLAKKPRMLVIVALANKMARVVWALMVKGGIYRAPTAAA

SEQ ID NO: 355062 - protein, 348 aa, unidentified
MAHFVGLDVSVKETSVCVVDDAGKVILERQVPTEPDAIIALLTSLGVTYGRIGIEAGPLSQWLVNALTAAELPVICVETRHMKALLTAQQINKTDRNDARGIGQMMRVGLFKPVHVKTLVAQEQRMLLTSRKLLQRKLLDVESDLRGTLRNFGLKVGVVSGGRYEARIRELVVGFPRLAAIVEPLLSVRRVMRQQLAVLHKMLLDTVRDDPVCRRLMTAPGVGAVVALTYRATVDQPQRFVHSRAVGAHVGLTPKRYQSGETDYDGGVSKCGDALLRTMLYEAAQVLLTHGSKWSWLKAWGMRVAQRRGIRRAIVAVARRLAVVLHRMWVDGSEFCWSKDSAAAPTVA

SEQ ID NO: 355063 - protein, 410 aa, unidentified
MKRDKHIYIGLDLHKFQHTAVVVDCWFEKLGEMTFQNKPSIFPSLLEYVNRFLTEGLTPVFGLEDVGGYGRDLALYLIEQGYIVKFVNSSLSNSERNNYAMTQKNDSWDAQCVADVLIRKLPYLPDATPSDIHWIIAQLVGRRNALVKAQTALKNQLHMQLNYHYPSYKDFFSVVDGKTALAFWESYPSPSHLEGETVEKLRTFLLEASSNACSTRKAEQVLSLVQAAGEIKREYQTSRDFIIQSIVRDIRFKKQEIKKVDRELKVTIQTLDMQLETMPGIDTVTSSALIAEIGDIHRFANSDKLARYAGIAPIKMGSGGKETMKKTKQGNRKLYDIFYNLSVQQVQVSKGSKIPRNPVFYAYYNRKLSEGKSKSQALLCIMRRLVRIIYGMMKNKTAYIMPDQHETIAS

SEQ ID NO: 355064 - protein, 310 aa, unidentified
MTVYAGLDVSDKSTHICVVDGDGAVLRRDVVASDPEVLAKWLGKHCPDLTRVVLETGPLSTFLYHGLVERAVPIECICARHAKGVLAARINKSDVHDAEGLAQLARTGWFKRVHMKASATHIDRAALRIRAQLITTRVAMGNQLRGLLKLFGLRLGAARTPGKRRERLIALYQQRPDLEPLFAPLVASMEMIEEQLRASNRLLEERASADPVCNRLMSVPGVGPITALTFTASIEDPHRFARSEDVGAYAGLVPRRSQSGERDVRGYISKAGDPMLRRSLYEAANIMLCRVQRPFALSAMGAAHRRNQGK

SEQ ID NO: 355065 - protein, 430 aa, unidentified
MKSNTQNAKIEAITEKTLVLGIDVGSETHYARAFDYRGIEYSKKPFKFSNTEAGFATFKEWILDLKERHEKDKVVPGMEPTGHYWFNLGKFLQDNEMKPVLVNPHHVKKSKELDDNNPTKNDRKDPKVIAGLVREGRYMIPYLPDGVYADLRTASNIRFQLQAELTRIQNRISRWFNIYFPEYKTVYRKPDAKSGMLILKAAPLPEDILTLGIDGVNQIWRDAKLRAVGKARAKTLIEAAEHSIGSKEGTMSARMEIRMLLEDYESKNMRLQEVMVLIEELVKEIPMAEKLLEIKGVGIRTVSGFLAEVGDISRFNNPKELQKLAGLAVVENSSGKHKGKTTISRRGRKRLRYLLFEVAMSLVAKNPEFRELHNYYTTRRLNPLKKMQSLMAIAAKLIRVFYAMLTKGVDYDPKKMISDIKRPTVYLQAA

SEQ ID NO: 355066 - protein, 416 aa, unidentified
MNAVGIDVSSRKSTVAVLRPLGEVVCLPFDVTHDIAGLASLAEKLKALDGETRVVMEHTGRYYEAVAKALHEAGLFVCAVNPLLIKEYGANSLRRVKTDKADAVKIARYALDNWADLRDFTPMDAIRYDLKTLNRQFQLASKQRTASANNLIALLEQSFPGIRKCFDSPVRSDGTQKWVDFAHSFWHVDCVRKQPFAAFCERYRKWCKLHAYFFKLRNAEEVYALAKRAVVLTPKSKVVKVLVQEAANQLISISRSVEVYRAEMDRLAAMLPEYPVVMAMYGVGKSYGPQLMAEIGDVRRFERKQALVAFAGIDPMPNQSGDKNVRSNKSSKRGSPYLRKTLFNVIRTYLQCAPQDEPVFQFLNLKRAEGKPFYVYMLAAANKFLRRYYAKLRDYFASLDTLQPVAPIPTILKATL

SEQ ID NO: 355067 - protein, 363 aa, unidentified
MFTERTSVGLDVHARSVAAAAIDGVTGEVLQTRLTPSYEHIRSWISDLPGPVAVAYEAGPTGFGLQRALTGAGIRCEVVAPSKLQRPSGDRVKTDARDALHLARLLRLDEITSVSIPSVSQEAARDLVRAREDCRGDLMRARHRLSKLLLRHGIVYYGGRAWTGAHDRWLRTDAAPRLGMPATRMAFEADYDHVLTMQARRGRLDAAIQDMAADSEFTPIVRRVSCLRGVSTLTGLALAVEIGDWNRFTGNTIGSFVGLTPSESSSGSSRAQGPITKTGNTHVRRLLVEAAWHHRPRYHVGLVMRSRWDQDPPAARARGDEGNRRLHGRWVGFLERRKRPTVANVAIARELAGWCWSLAVMED

SEQ ID NO: 355068 - protein, 338 aa, unidentified
MALYAGIDLHSNNSMMVIQDEQDNMVARKRVPNHLPTVVDWLGRYRGELAGVVVESTYNWYWLVDGLMDEGYPVHLANTVAIQPYDGQKHRDDTTDARLLAKLLRMGELPEGYIYPKAQRAIRDLLRKRSQLVRQATMNILSIQNLFARNRGEGISANGAKHLTPEGVEATFTDPNVALAVKSNLKVLHCLLEQILVVETFVAGQVRLRGSYRKLRTVPGIGNILAMTIMLETGDIGRFRDVGNYVSYGRLVGSSHLTNGKRKGSGNTKNGNAYLCWAFIEAANFAIRYDETIRRYYQRKQARTKRIVALKAVAHKLARACYHMIKENARFDITRAFG

SEQ ID NO: 355069 - protein, 337 aa, unidentified
MVYVGVDLHRKSSHVAVLAGDGELLASRRIASQPDEFLRLFGELEAQPVGVAFEATYGWGWFADLLSDVGIPAHMAHPLATKAISSARVKNDRVDAKTLAHLLRTDLLPEAWAAPPEVRDARKLGRTRVSLARISSRLKCQTHALLADEAITPPVTDVFGPGGRRFLQDVRLRPIPQARLDANLRLIDLLGPEIAQADRELRELFRGDPRVARLVPIPGIGFMTAAVVIAEVWDVTRFPSPQHLSSWAGLTPTERSSAEHTRRGHISKQGSRWLRWAMVESASRPHLNDPVLRGFRDRIARRRGGKIAKVALARRLLTLCYYALRDEGGCRAYPVAR

SEQ ID NO: 355070 - protein, 350 aa, unidentified
MIIIGCDYHPGFQQIAFVDSDTGELSEARLGHKEEAEQFYRELSKRGVTVRVGMEASGHARWFERLLNELQFELWIGDAAAVRTKRIRKQKTDRQDAQLLLRLLLEDRFPRIWVPDAENRDLRQLLWHRHRLVQMRTRVMNQLHVVALNEGLRRKKALWRPAGRAELQGLSLAPWASRRRQDLLDLLDRLTPKIQELNGKLEQIVECRPVTRQLSTHPGVGPLTALAFELVIGTPERFGCAKQIASYVGVVPSEESSGDRRRLGHISKQGNVLLRFLLVEAAQVTVRSDPRWRSQFFHLAMRRGRKIAKVAMARKLAIELYWMWRRGWDYDEMQKLGSHAGEPGHRHGVQ

SEQ ID NO: 355071 - protein, 343 aa, unidentified
MQGVTTIGLDIAKSVFQVHGIDAEGKVLVRRQLKRRYVLAFFEKLPPCLVGIEACATSHHWSRQLKALGHTVRLMPPAYVKPYLKRQKNDATDAEAICEAVTRANMRFVETKTPEQQSCLMLHRTRQLFIRQQTSVINAIRAHLAEFGIVAPVGRKGVEQLLAVVADASDQRVPELARACVAALGAHLGRLKAQILEFDRRILAWHRSNATSRRLDAIPGIGPALATALVASVADPKAFRSGRNFSAWIGLVPRQHSSGGKDRLGSISKQGDRYLRSLFTAGALAVIRYAKIHGTQHRPWLTALLARRPTKVAAIALANKIARMAWAMMVTGERYKEPAALAA

SEQ ID NO: 355072 - protein, 358 aa, unidentified
MVTGLKHQKEKRSMDHFAGLDVSVKETSVCIVDETGKIVREVKLASEPDALVAVLTSPSHHFKRIGLEAGPLSQWLYNALAEAGLPVICVETRHMRAVLKAQINKTDRNDARGMAQMMRVGLYRPVHVKTLRSQKLRMLLTHRKLLQSKAIAIDNDLRGTLRNFGLKVGMVGTAKFEARIKELVENLPDLAMLVEPLLVVRRVLREQIGVLHRRLLTIVRDDDVCRRLMTVPGVGPVVALTYRATVDVPARFKNSKAVGAVFGLTPSRHQSGESDRPGSVSRCGDEMMRMMLYEAAQTMLVVSTKWSWLKAWAMKIARHRGMKKAIVALARRLAVIMHRIWVDGTEFRWTREQAPIAT

SEQ ID NO: 355073 - protein, 420 aa, unidentified
MDLLLERCAGVDVGKDEVVACVRTPGPGGKGRRKETRTFPSFTGELEAMADWFAAEGVTEVVMEATGSYWKPVWYVLEERAFELKLVNAQHVKILPGRKSDVLDAEWLAELLEHGLLRGSFVPPAEIRELRDLTRYRKRLVQAHTSECQRIQKTLEDAGIKLDSVASDVLGVSGRAMLHALVAGERDPEVLAELAKGRLRRKIPELRQALRGRFRDHHALLIGLCLEHTAHLEAATATLDGRVDALFAANESEAGVPFERARDHLDTITGVGKRAAECIIAEIGVDMSRFPSAAHLASWAGMAPGNNITGGKRGSGKTTKGDVWLRDILTQCAWAAARTRDTYLSAQFWRLVRRIGKKKAAIAVGHSILVICWHLLTDDCDYDDLGGDYFTRRANPDKQRDRLIGQLHDLGYQVTLKQTA

SEQ ID NO: 355074 - protein, 463 aa, unidentified
MGHEPEAEHNPDAFRNNQLSPPTGMSTRECFGFSHPASIACLTEEEFTLQVLYPRCCGLDVHKKSITGCCLWFDAEGRRQEEIRKFGTHTTELRRLAVWLRQHEVKHVVMEATGSYWRPIWNVLEGEGFEQTLANPQHMKAVPGRKTDPHDAHWIADLFQHGLIAASFVPNQQMRHLRDLTRMRTKVTEDRARVINRIEAVLEDANIKLSSVVTDIMGASAQAMVKGLLRGERDTAQLAELAQGRMRAKRPQLQTALEGNLQPHHVFVLQRLLMQSRFLQQQREAIERQIKRRLDPEMRQAIAFWDSIPGVDEDIATILVAEMGIRSEQFADGAHVASWTAICPGNHESAGKRKSGKMREGNRWLRGALTQAAWAATHTKGSYLSALYRRIAARRGSKRAIVAVAHAILISAYYMWKKKQAYHELGDNFLDTLKPEKTADRLLKRLAKLGYAVTVTGFPSPAA

SEQ ID NO: 355075 - protein, 338 aa, unidentified
MKTYAAIDLHSNNGVLVVTDETDRVLRQKKLANKLELFVAELEPFRATLQGVAVESTFNWYWLVDGLLKHGFPMMLVNTAAIQQYEGLKYTDDPYDARWLAHMLRLGILPTGHIYPREERAVRDLLRKRSSLVQQRTANILSVQNLEQRNRGTKISSREVKKLTEESIGELYDNEDLGLALTTTIKVIEALTEQICCLEKAVLKKARLRDEFKLLLTVWGIGDILGLTIMYEAGDMSRFADAGPFASYCRCVQAQRLSNGKKKGENNRKNGNRYLAWAFVEAAHYAIRYYPEAKRFYDRKAARTLPVVAIKAIAHKLARASYHVLCDQKPFDPKKVFP

SEQ ID NO: 355076 - protein, 318 aa, unidentified
MYLGLDIAKAKIDCCLMHDSKYLHRTFENNQDGFIKLTNWLEKHTTNKIYACCEATGSYSEAIADYLHDTGHKIAVVNPLRIKAFVTSELQNVKTDKQDAKSIAIYCQRNQPELYKPSSPSERELKALTRYLDGLKELLTSHTNRSLVAHHSVKPYIETSIKNTKSEIKVIEKVIQSRIKSDDDLNKQAILLKSITAISDGTIPHILTLFADKQFKTAKQATKYVGLNPIIKQSGNKSTRHLAISKMGDKYIRSALYMPAVVAFRMAVYKPFIKRLKDKGKTNKQIICAMMRKLLVYCFTVLKTGNQFDPKTILNHQS

SEQ ID NO: 355077 - protein, 354 aa, unidentified
MIIIGVDFHPEFQEIASVDTDTGEYQEKHLAHPEEAEQFYRALASVGQMVRVGMEASGHGRWFERLLEELRIELWRGDAEVIRAKRGRKQKTDREDARHIFKLLLKDDFPRIWVPSWENRDLRQLLWHRHRMVQARTRVMNQLQAVALNEGLRCKKKLWRTHGRQQLESFRLAPWASRRRRELLELLDRLNPTIAELSRAVDEEAEKCPEAKRLMTHPGVGALTALAFVLIIGNAERFRCGKQVASYLGLVPLEESSGNRRRLGHITKQGSSIVRFLLVEAAQVTVRRLPDWRTKYVHLMMRRGRKTAKVAMARKLAVRLYWMWRKGWDYEQWKKFGSNVGQPGHRDGVQQNTE

SEQ ID NO: 355078 - protein, 401 aa, unidentified
MNAVGIDISKGKSMIAVVRPFGEVVVSPYEVHHTASELRQLADSLKSLDGETRVVLEHTGRYYEPVAQILNSAGIFVSAVNPLLIKAYGNNSIRKVKTDKADALKIARYGIDNWSELREYTTSDKIREQLKILNRQYSLYTKNKTSLKNNLIALLDQSFPDANSFFNSPVRENGSQKWVDFAASFWHVDCVQNLSSKTFTERFRKWCRRHGYNFNEAKAASIHEKAKELVPTLPKNKSTKILIAEAIRQLNSSAKTVEVLRSEMNRLAAQLPEYPIVMDMFGVGISLGPQLMAEIGDIRRFAQRGSLTAFAGVDPMPNQSGSYERQSNPSSKRGSPYLRKSLFLVMSVLMQKAPVDDPVYQFLYKKRSEGKPYYVYMTAGCNKFLRVYYGRVNAYLAALDS

SEQ ID NO: 355079 - protein, 399 aa, unidentified
MFVGIDWASESHDICVVDPAGKICGRATIAHSQEGFDELTKHLGRWAEQGEILVGIERPEGRLVDRILEAGHPIVLIPTFAMKDLRRRYGVGGAKSDPGDAYVIADVSRTDGHRLRRLEPLSEQTRALRSVVRARGDLVDQRVALGNQLRACLQAYWPGAAVIFADVCSEIALAFVERYPTSDAAARLGEVRLASFLKKAGYSGRRSAAQLLERLRSAPEGLGGVEAEARADSVRAMLRVMRSLNRSIKDLDRAVVAHLGEHPDAEVFTSLPRSGRINAAQMLAEWGDCREAYPCPDAVSMLGGLCPVTHASGKHRDVAFRWACNKRLREAVTTFADNSRHASPWAADIYRRAIARGCDHPHAVRILARAWVRVIWRCWQDRRPYDPALHGAAVLLEAA

SEQ ID NO: 355080 - protein, 400 aa, unidentified
MNDSDEIGVFLGLDVGKSAHHGHGLTPAGKKVFDKQLPNTEPKLRDVFDKLKSKFGTVLVIVDQPASIGALPLTVARDTGCKVAYLPGLAMRRIADLYPGEAKTDAKDAAVIADAARTMPHTLRTLELTDEITAELTVLVGFDQDLAAEATRTSNRIRGLLTQFHPSLERVLGPRLDHQAVTWLLERYGSPAALQKAGRRKLVEVIRPKAPRMAKQLIDDLFDALDEQTVVVPGTGTLDIVIPSLARSLGAVHEQRRATKAQIEALLEDHPLSKVLTSLPGVGVRTAATLLVTVGDGTSFPTAAHLASYAGLAPTTKSSGTSIHGEHAPRGGNRQLKRAMFLSAFAALHDPASRTYYDKCRARGKTHTQALLRLARQRINVLFAMLRDGTFYEPRTPRLA

SEQ ID NO: 355081 - protein, 343 aa, unidentified
METIATIGLDLAKSIFQVHAISASGAVVLRRALRRSNLLNFFRKLPPCLVGMEACASAHFWAREIRACGHEVRMIPPIYVKAYVRRSKTDAADAEAICEAVTRPTMRFVPIKSAEQQAAGLVLKTRDLLVRQRSQTANAFRAHMMEFGIAAAKGMASLEKLAEAIRDPEYHAIPDAARQALLEMVEQIDALSSRIERLDDDIRKCVTEDETARRLTTIPGVGPIIAATVRAVVHDAHGFKTGRNFAAWTGLTPRAHSSGGKERLGSISKRGNEQLRTLLIVGATSIIKLGKRGLKLPDWLAGLVARKPFKVVAVALANKMARIIWALLTKGGVYRKPVPSTAG

SEQ ID NO: 355082 - protein, 365 aa, unidentified
MAEITRAPVARVGVDLSKRVYQVHAVDRAGRVLLARAMSRDRFFVWCAELPAECLVAMEACGGAHHVARRLRLLGLDARLIAGHFVAPYRMAGKRGKNDANDAGAICEAAGRPHMRFVPVKTAEPQGQLAVHRLREGYKEERTALINRIRGLLAEFGLVFPRSPEALRAVLAEVIEDAGNELPGVARLALQRAHLHWIEIELQMAWCDQRIASHVRSDERAKKASTLLGVGPTTASAVVASVGEFKQFANARQFGAWLGLVPSQNSTGGKARLGRITKRGDDYLRTLLIQGAKSAVMSAGKRSDRISQWLVQLKDRVGWQKAVVALANKNARILWAVLTRDVAFDPNHVPQPPAARGGPKLQPAV

SEQ ID NO: 355083 - protein, 402 aa, unidentified
MNAVGIDVSKGKSMVAVMRPFGEVVASPFEVGHTASELKKLAGFLKSLNGETRVIMEYTGRYFQPIAYFLHKEGLFVSVINAILVHDYGARTLRRGKTDKKDAIKLANYALDRWIDLVEYHPEEDVRQTLKTYNRQYNQYMKLKVMLKNNLIALLDQTIPGVNTFFSSPPRQDGHEKWIDFAMKFWHCECITELSEKIFKERYLKWCQKNGYQYNAKKAEYIYVEACGHVNTLPKNDCTKLLVTQAIHQLNTVSETLSVIMGEMRRLSAMLPEYSVVMAMHGVGDSLGPQLMAEIGDVRRFYCKKALVAFAGLDSPPYQSGSFEAQSRSISKRGSPLLRKALFQVMSCILRSSTGEEPVFQYLDKKRSEGKHFYIYMMAGANKFLRIYYARTKEYLDRLEAA

SEQ ID NO: 355084 - protein, 425 aa, unidentified
MSQPKQSLDRECEFAAYVGIDWADKKHAWSLQVATTGKREEGEVEHSPEAVEEWIQGWMVRFPGQLLAVCLEQSRGALLNLLSKYQQLVLFPVHPATVSRFRAAWYPSGAKDDPKDADLLRDLLVHPRERLRRLEPDTVETRTLRFLVEQRRHLVDQRTAPSNRLTSALKQYYPQVLCWFEDPAAPLVTAFLARWPTLDMLQKARPETLLRFFHQHNCRSEELIQERLQQIRKAVPATRDPAVLESGMVQTHWACQMLSLLSQAMADLDQRIQPIAQAHPDYAVFDSLPGAGEVMVPRLIAAFGTKRERFSNASQVQNFSGIAPVRESSGRTEWIHMRWACPKFLRQTFHEWAGHSIAHSSWAQAYYHQQIARGNGHHAAVRSLAAKWIRIVYRCWVNHMPYDERIYLDSLRRHGSPLAAAIPAL

SEQ ID NO: 355085 - protein, 354 aa, unidentified
MFYVGMDIHKRFSQVAVVDESGEIMDQHRLNHTPPEELISYFKQFPKDTQVIMEPTCGWGWLSDGISDLGLEVILAHPLKVRLIAESRIKTDKVDAVVLAQLQRTSFLPQAYLAPKEIRKLRDLFRCRCGLVRMRTTLKLQIHALLDRLGIFHSFSDLFGKTGRTFLNNLELEPPYRENLDRGLRVIDLLNREIKQIEEVIKSRVKEDPQAKHLTTIPGIGFILAYLITSEIGEISRFASAKKLASYCGLVPWVRQSGGFAHYGHLTKVGNTLLRWGLIEAAQVAIRYNPELKVWAEKIRRKKGAGVATCAVARKLVGVVYQLLTQERDYIPGKIKTYRSSRPVHPLVVPPVAG

SEQ ID NO: 355086 - protein, 340 aa, unidentified
MKYVGVDLHKHSISVCVVRVVGGRRKVVVRRQFSNRETAEIRGFFAGLGAFQVVVEATASYEWFFQLIEDLADRLVLAHPKKLRVIAESTHKTDKIDAEILAVFLALDMIPQAYRPTPRVRQHRVLVRHRCWLQRRITSLKCKLRNTLAQYNADVAGLFTRRGQEYLAKLRLESEDRFVVQAWQDHLQHLERQLSDADLRLRQFATTAALSEREARAVLESVPQVGPVTIDVVLSELGDWRRFRSQKAVAAFAGLDPGVRQSARKRQDLHITKEGSRLLRWAMVQAAWRLVGHSPRWQKIYQNIAGNTGSKKKAIVAVARRLLCVMFAVLQSGQAYRLVA

SEQ ID NO: 355087 - protein, 409 aa, unidentified
MSHNIAGIDVHKKLLVVVVTGADDAQNILSSRRFGTGHAALGELRDWLLSLEVKEAVMESTAQYWKPVWLELEPYLKLHLAQAQSNRAPGGRKSDVADAKRLVRRFVAGELYLSFVPDPEQRSWRTVTRARLQLIRERAQLQNQIESLLEEGRIKLSSVISDLLGASGRRILRAMAQGEEDPEALAALASERLKCDEETLKDSLQGSMTIVHQTLLAQHLDRIELIDGQIEQLNRLCAEHMQAHQAAIVRLVEVPGIGPETAQEIIAEIGPAASAFPSGPQLASWVGACPGSHESAGQNKSGHCAKGNRFVRRVLCQAAQAAVKTNGSYIQSTFRRLIVRMGYTKAIWAIAHRLCRIIWKILHQGVQFIEHSAAVNPKAIRRSVNKHLRALRRLGYIIPASVVPSAARE

SEQ ID NO: 355088 - protein, 341 aa, unidentified
MKQEMSILGIDIAKRVFHAVGMDNTGKIVFRKRLSRHDLLPFIAKLPPVLIGLEACGGAHYWARRVRAYGHEVKLMAPQFVKPYVKSNKNDSRDAEAIAEAVTRPTMRFVPTKEVDPQDIQALHRVRERLIGERTALVNEVHGLMHEYGIVIPKGVSKFRQAVVGKLESEKDKLTPLSQEMFWQLVEEFVALEKQLAYYQEKLEALAQSHPECQRLMTIPGIGPLTATALVAAVSDASAFQNGRQFAAWLGLVPRQHTTGGKERLLGISKRGDTYLRKLLVHGARATIRWVGRKTDRRSQWIRHLLERRGKNRTAVAVANKNARIVWALLTSHQDYQPATS

SEQ ID NO: 355089 - protein, 405 aa, unidentified
MKMNAVGVDVSKGKSTVAILRPQGLVVASPYDVSHTGSDLKELATAIKKLHGETRVVMEATGNYYEPIARFLHEQGLFVSVVNPMLISDFGGNTLRRPKTDKKDAVKLALYALTYWLDLKRYEPQEDLRKSLKMLNRQYQFAVKQQTMLNNNLISQLDLTFPGINRLFTSPAKAQDGHLKWVDFVSEFPHCDCVAMLSPGIFKKKYRRWCEKNGYHYRSSKADEIHAFAREAVSAVPASDAITLIIRQAASMLNAALENTTTLHYEMKRIAEMLPEYETVMSMYGVGDKTGPQLMAEIGDPRRFHSRRAITAYFGYDSENDDSGQKVSKSNPITKRGTSALRRTLFLIMIALIQNQPEDNPVYQFLNKKRSEGKHYYCYMTAAANKFLRIYYAKVNEVLNAQPSG

SEQ ID NO: 355090 - protein, 411 aa, unidentified
MENIFPCCAGLDIHKKSVEACVRRLEPTGQMHHQTRHWGTMTRDLLAMADWMAAQGVTHVAMESTGVYWKPIYNILESRFTVLLVNARHLKQVPGRKSDVRDCQWIAQLLQHGLLKGSFIPPRTQRELRDLTRHRTQLVEEKTRTVNRLHKVLEDANIKLASVATDILGVSGRAMLEALMEGQEDPVKLADLAQRQLRGKIPELEKALEGHLTEHHRFLLRLLWKELAQQEELIAELDTKIEEQTRPFANEIERLDAVPGVDRRVAEVVLAEVGSDVKPFPTHSHMASWAGICPGNEESAGKRRRQRITPGNRWLKRTLVQAAWAASHTKNTYLASQYRRLAGRRGKKRALVAVGHSMLVIFYHMLKERTTYKNLGGDFFDRLEPERLTRYYVKRLKDLGHKVTLEPGVAA

SEQ ID NO: 355091 - protein, 387 aa, unidentified
MTVQPQVSPFIPRDYEIFAGLDVDKHSIAVTFTDHTKLLKSLRLPYSSEHWLHYARKHFPGRRLAYVYEAGPTGFGLYDDLRAGGHPCLVVAPSMVPTAPGQRVKTNRLDSRKLSEGLRGGQLRSIHVPWPTYRQLRHLVQLRDTHVRQLTATKCRIKALLLYEGIAFPEAPAGGQWSARVLRQLEALPCAEAVRFKLNHLIGTLHFHFLSAAAVQKQIRRFCQNDPELRQVIGLLTSLPGIGWIVAAHLIARLGDWREITNVRQIAAFLGLVSSEHSTGDQDNRGAITRSGDSRLRNKLIQSAWTTIGKDPELRAFYRRIYQRHPKKVAARKAIVAVARQLTTRIYAVLKQQRPFVLRPDNSSDPMTAEETASPRGRLDPAQNEQK

SEQ ID NO: 355092 - protein, 339 aa, unidentified
MLYVGIDVAKNKHDVTALNVPGKTVLKPLTFSNNKAGFELLDLSLRQLNQDCLIALENTGHYAFNLLNFLHEQGYKVYTYNPLLIKEFAKSLSLRKTKTDKKDAHGIALKLLSDPNREQFQHDNRQVELKILARHIHRLKKKQSDWKVQYTRCLDIIFPELDKIVGKHSEYTYQLLTRYPNPQKRIEAGFDKLIEIKRLTASKIQDILSVAPRSIGTTSPAREFEIIKHYKRLIDKAETCVNDLMAEFNSVITTVTGIGNRLGAVILAEIRNIHAFDNPAQLQAFAGLDSSIYQSGQIDLAGRMIKRGSPHLRWALIQAAKACARFSPAFKAYLKTKLE

SEQ ID NO: 355093 - protein, 379 aa, unidentified
MSTTATAHVSHRTASEVCLFVSFELGEKEWKIAWATSLGEKPRLRTFRARDTKRLLEELEKARNAIGARRVVTCYEAGRDGFWLHRFLHAHGIENRIVDSASIEINRRARRQKTDRLDAEKLLSMLLREALGEADLWSVVNVPGAEDEDARSLQREYRTLVKERTRSANRILGLLASQGLAPDRIDARLPEWLATVRLWDGSALPPGARQRIEREFERWQFTHAQLLAIEKERRDRTQDLEEPGLEKVRRLFALKGIGLGAAWTYGLEFFSWRQFRNGKQVGALAGLTPTPYQSGDSERELGISRAGNRWVRGLSIEIAWGWLRHQPRSALSLWYQQRFARGGPRARKVGIVALARKLLVALWRYVEMGVLPEGAELKA

SEQ ID NO: 355094 - protein, 311 aa, unidentified
MKDDSIGIDISKDHLDAHRLSDGAAARFANSAAGFRALAKWLGADIPARVVYEPTGPYHAAFERRFAGNLALCKVNPLQARRFAQSKGTRAKTDQVDARMLAQMGVALALEPDAPLSQSQRDLKELQIARMALVKDKTRLKNRLQTLILAFTLKQAKARLTLILRQLSDIEAEINACIAQDGATAHKRQILTSIPGIGAVTAATILIECPEVGNMTGKQIASLSGLAPMTRESGKWRGQAYIQGGRKHLRDALYMPALVAARFNPDLKRKYQAMITAGKPPKVALTTLMRKLIELANTLIKNDRKWLPKGA

SEQ ID NO: 355095 - protein, 473 aa, unidentified
MPRSSSEPRKPTTKRRRGLPISAADLPKSLRQVNLNAAGLDVGATQHYVAVPEGRDEVTVRCFGTFTADLHSLADWLKQCGIETIAMESTGVYWIPVFELLEERGFEVKLVEPGRLKSVPGRKTDVLDCQWIQQLHTYGLLQGSFRPEEDICVLRSYMRQRAMLVKYAGQHVQHMQKALMQMNVQLHHAITDITGATGLRIIDAILSGNRDPHELAKLRDGRCKRTEEDIAMALQGNWREEHLFALKQAVELYRFYHRQLTELDERIESCLGAFEDRSEGQKVPPSRRPKAGSNAPAFDMRKLLLQMTGVDLTTIDGLHGHSALELISETGTDMSRWPTEKHFASWLCLCPGSKKTGGKSVSGKTRRNANRAAGILRMAAQSLARANCALGAYYRRMRARLGGPKAITATAHKLAKIVYNMLRYGKKYVDVGVDYYEKQYRERVFKNLAKRAAQFGFALTPALDGPTNHAAPG

SEQ ID NO: 355096 - protein, 343 aa, unidentified
MKLSRVGVDLAKNVYQLHGVDRFGKTIWKRRLKRHQWLKVLLDKTEPGCVIGMEACGSAHHWGRELQSRGYTVKLIPPQFVKPYVKSNKNDARDAEAICEAMSRPNMRFVTVKTVDQQDIQATHRIREEFKIRRTAKANQIRGLVAEYGLVAPKQLSSLRAAIPCWLEDAENGLTHYFRSLLHGLWNDLLTLDDRMCEMDKTIKRLAKDNEDCVRLEQLRGIGPMTSTAMIATVGDARQYHKSRQMAAGIGITPRQHSSGDKHRLLGISKRGDVYLRTLMIHGARSVVTGAKHKDDPLSRWVTEIAKRRHPNVAAVALANKNARMAWAILRNKTDYDPDFAMS

SEQ ID NO: 355097 - protein, 350 aa, unidentified
MIIIGADFHPAYQEIASVNTDTGEYQEKRLAHPQEAEEFYRSLASVGQAVRVGMEASGQGQWFERLLEGLRLELWRGDAEVIRAKRGRKQKTDREDARHILKLLLKDDFPRIWVPSWENRDLRQLLWHRHRMVQARTRVMNQLQAVALKEGLRCKKRLWRANGRQQLESLPLAPWASRRRSELLELLDRLNPTIAELSQAIEREAEKCPEAQRLMTHPGVGALTALAFVLIIGNAERFGCGKQVASYLGLVPLEKSSGSRRRLGHITKQGSSIVRFLLVEAAQVTVRSVPEWRSKYHHLLMRRGRKTAKVAMARKLAIRLYWMWRKGWDYEQWKKFGSYVGQPGNRDGVR

SEQ ID NO: 355098 - protein, 417 aa, unidentified
MTLATTARYTAYIGIDWADRKHDFCLQVAGGDTQESGVLEHTPEAIERWATTLHKRFGGPIAVCLETTKGPLVNALLRYEFFALFPVHAATLAGYRKAFSPSGAKDDPSDARIALDLLLRHPERLQALRPQSSSMRMLTTLVEERRQVGDAIVRITNRLGSVLKLYYPQVLDWFEHRNTIIFCDFLTRWPTVMHARRARATTLQAFFHAHRCARKGLVAERIESIRSSTPLTEDPAIIRPAQLTMQTLVAQLRVLIEAIDDFDEEIAGISKEVPDYELFASLPGAGHIQAPRLLVAFGEDRDRFIDAAQVQCYAGIAPVIERSGNRCWIHWRFACSTFLRQTFVEWAGSTVTRSAWAGVFYRQQRSKGASHGVAIRALAFKWIRILYKMWKTRQPYNEATYLDALRRHGSPLVVPAG

SEQ ID NO: 355099 - protein, 353 aa, unidentified
MKTYYVGMDVHKATIVITVLDANGKVVSQSIIETSTQAVRHFFQSLRGAVHVTFEEGNHAVWLYDVVEPLVKYLVVCNPKHNHLLKQGSKNDRIDARKLADLLRLNALKPVYHGEHGTRTLKELVRCYECVVKDLARVQNRLKALYNSQAIPNRGAELYQQSKRESWIQKQENAGRKLRAELLFRQMDELKVLKRAARKAMIAESRRHEAQSILSQVPELGLVRVAQIIATVGSPFRFRTKRPFWAYLGLAVETRSSADHELTNGRVSRRKVKIETRGLNEDYNRRLKSVFKSAATHACSCGVYKEYYEKLVAGGMRPEMARLSVARKLAAAVLAVWKKGQSFDERMIMSRAA

SEQ ID NO: 355100 - protein, 430 aa, unidentified
MKSNTQNAKIEAITEKTLVLGIDVGSETHYARAFDHRGIEYSKKPFKFSNTEAGFVTFKEWILDLKEKHEKDKVVPGMEPTGHYWFNLEKFLQDNEMKPVLVNPHHVKKSKELDDNNPTKNDRKDPKVIAGLVREGRYMIPYLPDGVYADLRTASNIRFQLQEELTRIQNRISRWFNIYFPEYKTVYGKPDAKSGMLILKQAPLPEDILTLGIDGVNQIWRDAKMRAVGKARAKTLIEAAEHSVGSKEGAVSARMEIRMLLEDYESRNIRLQEVMTLIEELVNQIPMAEKLLGIQGVGIKTVSGFLAEVGDISRFNNPKELQKLAGLALVEKSSGKHKGKTTISRRGRKRLRYLLFEVAMSLVAKNPEFRELHNYYTTRRLNPLKKMQSLMAVAAKLIRVFYAILTKGVDYDPKKMVGDIKRPAVYLPAA

SEQ ID NO: 355101 - protein, 349 aa, unidentified
MKHYAGLDVSLEETTVCIIDEAGRIVKEARVPSEPAALVGFFQALGLRVERIGLEACSLAAWLHEGLVAADLPAVCIETRHAKAAMSAMPNKTDRNDARAIAQIIRTGWFRAVHVKSPASRSWRALLTARRMVLNKLRDVENGVRALLREVGLKLGTPGRKPFAGRVRELTADNPVLAGLAEPLLTIIATMTHELAQLTRQILAIVRDEPVCRRLMGVPGVGPLTALTFRATIDQPSRFRRSRDVGAHLGLTPKRYQSGETDVQGGISRCGDELARTALYEAAHALLIRCQRWSSLRAWGMKVARHRGMARARVAVARKLAVILHRIWVDGSDFRWGQASPAAERLAMV

SEQ ID NO: 355102 - protein, 378 aa, unidentified
MQSIKTWGGIDVSAETLAVCRWRDGLDEHRTFSNDGAGHREIVKFLGKRSRVCIEATGVYHLQVALALHAAGVEVMVVNPRVAKDYARALSNRSKTDQVDAHVLLDFARRMEFHAWEPPSAAALELRELGRRLTELVHARIGETNRLHARTTSSISKGVIADVRQHVRQLETRIKQIERAAIAVLRTDADLREQYELLVAGTGIGKRSAILLLGELAVLDPTMTVRELVAHVGLDPRVYESGTSVEKPTRISKVGNARVRATLYMVALPAIRYDRGARTFFARLVARGKKPMQAIVAVMRNMLHGVWTVMQRRVPFDNSLLFAASLAQAESSDSAVAAPKPEQEQSHPQDRSEAEELRQQLDSVPAEATRRRKKRKAA

SEQ ID NO: 355103 - protein, 350 aa, unidentified
MNILALDLGKYKTVFCDYNSDNGEHEFGKVKTTPQTIHDLIVEKEPQTVVLEVCNIAGWVVDIAQALGKETETANTTHDAWRWKNVKKKNDKEDALKLAKLSAMNQLPTVHIPNKQVREKRALITYRQRLVKYRKGIKNAIRAIFSREGITTVPKGKKAWSKAGLRWLRTHAKPLKEIEDINQLWRGQLHVELETFEAISKSLKKVEDKLNELGACDERIQRLQRIPGVGPRLAETVVAFLDDPNRFENSKQVGCYVGLTPRQYQSGQTEHQGKISGQGNKVLRNLLVEICWVSLRYNPWARDTYKRLLRGSRSRKKIAITALARKLVVKCWVMLRYEQDWRNDIAKNVA

SEQ ID NO: 355104 - protein, 464 aa, unidentified
MAFTLGIDIAVRAEHQAAFAEDGVTLWRGRKFFTRPDDLDRLWTDLALTDPAELTVVLEPTRNAWIVVAEWFRRRGAKVVMVPTTQSADLRKYYSKHTKNDRIDSELLARLPLLHPEGLREYSGQGPADPLRRLVKQRSTMVKRRTAVYARLDALVELLGPAWYDVLGSSYGIAALEFLARYADPHAVIRLGQARLARFLIARSRGAWRDSHAAALVAAARETLELWGPTRMEFAELAEDIGHEAEQALFLTRQIKQIDERIANLYADTDPDGIVASAPGVGSVISAVIAGRIGDPHRFTSLAAIRAYTGLVPKVSQSGVSKVESSITKAGDPLLREMLCTAADQARKIDPQIAAKYQRLMAGDRHHDSAICHLATLLITRIASCMRTGQPYQLRDVDGTPITETEGRTIVKERYRIDARHADNVRHQRMRDHRTQAASQESQKSLSASTSQPATTHPTSSKTP

SEQ ID NO: 355105 - protein, 454 aa, unidentified
MAKKAKKIKTGKGLKLEIVNPHAAGIDVSSTEMQVCVPEDRDFDNNRRFGTFTEDLHYISSWLKACGITTVAMESTGVYWVQLYMILEEDGFDVLLVNAKAIKNIGEKKTDEVDAEWIMLLHSYGLLKASFQPDNRARRIRNLSRHRDNLLKASSREVQHMQKSMELMNIKLVNVLSDILGKSGQDIIQAILAGKRDAKQLAALADPRCKASKETIEKSLVANWDEDLLFMLSQSYNLYQYYQSQMQDCDKKIESIAQEYLAEISTTEPEKEWLRSQKKKAQKNAITIDIEKYAFQMWSVNLMRIPGISDAALLRLTGELGHDFTHKFETYKEFCCWCNLTPNNKISGGKLLSSKIPKRKNPVGQILRASANSLKASKTPLGFYFRRIQAKNGYMAAIVATANKLARILYVMVKTKSEFDESNAKLNEEEMLKKKLINAQRALERIQKQLNMVA

SEQ ID NO: 355106 - protein, 406 aa, unidentified
MKSFIGIDWSEKHHNVCILNESGACLNRFQIPHTQAGFLSLEQQLAQVNKVASDCMVAIETHHNTLVDFLCSRGHSLFILPPNQVKSNRGRQRASRAKDDDSDALLLADILRTDQGRLIPWQEDGDLVQQMRSLLSWIDDLTDSIKRHRNRLRANLLRYYPQPLATFGNMLSQFSLKVVAAYPSSNHLRDLTYRQFVTFSRDQGYYQVGNLPAYYAQLREPMPAAPETIWPALEKQTVYLACLLLTLMEQKKATISETAHLFEQHSDAPIFASLPGAGDLLKPKLLVMFGDHRTRYPKPTFLPAIAGTCPVTVQSGRFHSVRFRWACNRSYRQTAQLFAKSSIRKSVWAAGYFNRAKARGLSNSHAYRCLANRWLNIIWTLWQKRLPYDEAYHLRQVARHRQPVQS

SEQ ID NO: 355107 - protein, 367 aa, unidentified
MKQQTSAASETLTKVKNIIDFSGKSIYVGIDVHQKDYQVAKIYNGICLGNHRMAANEDGLIEHLRSHYPGADFHCVYESCAWGFNLQRRLTAAGMECMVVHAADVSTSDKERKRKTDPVDALKLARNLESRDLKAIHVPDETIQKERNLIRYRSGVVGNINRIKNKIKSLLKFQGIQIPAPFAKNNWSNNFLKWVEEQGSKDELLGDTLLLMLEELRLLRQHLLKVEKKLRALRKGKYAAKAKLATSVAGIGPTTAMLFLLEIGDINRFKGFDALNAFVGFCPDKDSSGETDRDRGITSRRHKKLRTALIEAAWEAIRVDPALMDSYEALTKRMKGTYAIIRIARKLLRRLRAVLLTGIEYQKGMVA

SEQ ID NO: 355108 - protein, 347 aa, unidentified
MRFYTKQHPFYCGIDLHAKTMYVVIVDQLGQVLLKRNVRADAKLFLELIEPYRSDVVVAVECIFTWYWLADLCAKEGIHFVLGHALYMKAIHGGKAKNDKIDAHKIAGLLRGGLLPYAYVYPALMRSTRDLLRRRLHLVRKRAELLSHILNTNSQCNLPDFGGRINYKVNRLGIAERFSDPSVRKSIEVDLQLLTHYDGLISDLELYIVNTAKVHDPDTFHRLKSIPGVGKILAMTILYEIHDIGRFDRVQQFASYSRLVKCSRQSAGKLHGFGGSKIGNVHLKWAFSEAAVSFLSKCAEGRKLIERLRRKHGKAKALSILAHKIGRAVYYMLTQEQAFDINKFVRV

SEQ ID NO: 355109 - protein, 430 aa, unidentified
MSKNNYISVGIDVGSSFSFMSIVDPFGNLVLKPFKIFHNNLDSLNRALLEIKKAEELYSLKSRTFLESTGIYHFPLFCHLMESGFEAFIINPLITHSIKNYGIRKVKNDKLDSIAIAKLGLSDDLKTSVMPTQIVLELRALVRKYYKLIDTRSACVNQLKGDLHVVFPQYLELFSDVTGATSLMILRQYGTPDKILRAHKKTMIEKIAKASRKGTLKATERYEKLVEAAKASKVFGCDIESIYFNISLTLDQIEALDKALNAILQRIQSFVDEHPDESFIQQIHLLDSINGVGFLSAVTIMCEIGDFSIFKSPKQLFAYFGMDPKVNESGKFKGTECPMSKRGSRIARRAIFAVALANIRTKRNGEALNPHLHAYYQKKVLSKPKKVALGAVMHKVCNIIFAVLRDGKSFELRSPEEHRQNYKPQLTLIA

SEQ ID NO: 355110 - protein, 353 aa, unidentified
MSDAVGGVIVGFDCHVDSHVAVALDALGRRLGTASFRTTSRGYQEALAWMATFGPVIAVGVESTGSHGAALARSFAKAGLRVVEVDQPHAHTRSRRGKDDTIDAEAAARKVLSGEVRGAAKDTGGIVESIRQLSVARDGAVKAHTAALSQLGDLVVTSPAPLRETLDRRKSLKGKATLCSRLRPSNEGPDPMRAAKIALRSVARRIRELADEIDRLARELDALVATAAPNTLGRLGLGTHNTAALLIAAGENIDRFRSEASFAHLCGVAPLPASSGRTTRHRLNHGGNRQANRALHMIVIVRLRYCPRTRAYRDRRIQEGRTKPEVIRCLKRYIVRELFRTLRADLGTLAART

SEQ ID NO: 355111 - protein, 347 aa, unidentified
MRFYNRQHRHYCGIDLHVKTMYVCILDAAGQVLVHHNVKSTPAAFLETIAPYREDLVVGAECMFTWYWLADVCAAEGIAFVLGHALAMKAIHGGKAKNDKIDSHKIVSLLRGGLLPQAYVYPAAMRSTRDLLRRRLHLVRKRGQLLAHIQNTRAQYNLAAFERRLAYPANREGVTDRFSDPSVRKSIEVDLALVDTYDGLINDLELTIVREAKRHDADAFHRLRSVPGIGKILALTILYEIQDRTRFDRVQEFASYARLVKGVHQSAGKKLGTGGAKMGNVHLKWAFSEAAVLFLRHTKDGKRLLARIEKKHGKGKALSILAHKIGRAVFYILSRGTVFSMEKFRAA

SEQ ID NO: 355112 - protein, 408 aa, unidentified
MNSLFVGIDVGSKNNVVYLMKPDGSKHSGFSVQNNLGGAKLLSEGIVSALKSMQLSDVVIGLEATSIYGDSLVYALREDGSLGRFQRKIHVLNPKQVRKFKEAYPDLPKNDCVDAFVIADHLRFGRIAKEVYVDDYRYQALRTLTRSRFDVIQNLTREKQRFANYLFLKCSGIAQAKDIQNTSATTIALMEHFESVDDLANADLNELTAFISKAGRGKFADPNATAKAVQAAARGSYRLPKTVNDTVNQAMAVSITSMRALKEQVKTLDNAIEQQFEIIPNTLTSIPGIGKVYSAGIIAEIGDVHRFDSQASVAKFAGLVWTQHQSSEFEAETTHLIKSGNRYLRYYLLEAANSVRRCDSEFQRYYDLKFHEVNRFQHKRALALTARKLVRLVFRLLKDNRLYIPLEG

SEQ ID NO: 355113 - protein, 388 aa, unidentified
MYRILKIGMDVHSTNFTLCAMEPTIGSEDRIFGNITVAPDYKNVILFIESLRMKLGLNDEYSIECGYEAGCLGYTLYHQLTDAGIKCVILAPSTMLSPQGKQIKTDKRDALLIAKCLCYGGYHPVHVPTEEDDAIKEYLRMRDDHKMALKRVKQWINAFVLRHGYLYADNKWTRNHIKWLKNLEFSPMNRRTIDEYMATYEELAAKIERFDKQIEEIASEARYRENTKKLECFLGIRAHTALSLIVETGDFKRFAKGNIYAAFLGLAPGEHSSSTNVNRLGITKAGNSHLRRLLVEAARGICKGAVGYKSKELRARQADQPAEIIGYADKANTRLRSKYYRMIRHGKKKNVAVAAVARELACFVWGMMTGNTGIMSGTGTSVPAVCQG

SEQ ID NO: 355114 - protein, 388 aa, unidentified
MTQAPVSQSVPTMPDYDRTLVLAIELSNESWVLAAQVPGLPRVKAKRTIEPTAEALLAAIQGYRDRAKVAGRQVERGIATCEAGWSGFWLARWLATHGIETHVVQPSSVPVDRRARRAKSDGIDAELLLRALLAWLRGEPRVCSMVPVPAEADEDARRCIRERAELVAERVALVNRIGAVLATLGVGDYSPLLRNRRERPEALRTAQGTPPPPHAHAKISRVLDRLDLVRTQITALEQERDAVLEDEVPDRAGAMIQQLATLRGIGVQSATVLVREAFVREFAHGKALGSCAGLIATPYSSGGTEREQGISKAGNRRLRTVMVELAWLWQRYQPGSAEVSWFRERVSGTGARLRKVMVVALARKLLIALWRFATQGVVPGGAVMKPAS

SEQ ID NO: 355115 - protein, 387 aa, unidentified
MPVAAHRSEAPTTIRTDLGAIFVSLELSQSKWLITSLSPGGGEKMSKHAVATGDVAGMLACFAELKRKAWARTGRCFPIIVIQEAGLDGFWIHRVLEAEGAESYVVDAASIATSRRRRRAKTDRIDGEALVRALLAYKRGEPRVCAMVRVPTPEEEDRRRLSRERHALTNERVRHVNRIKGLLFSQGVSDYEPLRRDRRKQLEERKTGDGRPLPAHLKAQIGRELDRLELLLEQIKAVEAARDAMLSATTVVSPAPAMLLALKGIGPEFAAVLWSEGLSRHFDNRRQVAAYAGLAPTPWQSGSVDHDQGVSKSGNPRLRTTLIQMAWLWVRHQPHAALTLWFKDRVKQNGGRLKKTTIVALARKLLVALWKYVNAGIVIEGAVIKTA

SEQ ID NO: 355116 - protein, 341 aa, unidentified
MKNKSFIGIDISKNVIDVSIFCEETPIKDFSHDVFNNSRKGFGEMCTWLKKNHVVLSNSLFGMEFTGSYSMELEKFLNTRNYQFCMLSTHVVKHYPMGPKDKSDKIDSAKIADFLYRYNGTECVKPYNMPDKTMQRLKALMNERKFLVEQRTCFMNRRQLCITKEDAQLYDGYIKKISRDIENIELEEQKLLATDDSLLSTYKNLLTIPGIGFVNAINVIVITRNFTAFETARQYASYVGVAPHFRTSGTSVKWRPRPSARCDGQAKADLSMAATVVVQYDAELQSFYNRKLGGKQDSDTKRKALNAVKFKLVLRMFAIGKQNREWEPLDSKSSNEKLAIS

SEQ ID NO: 355117 - protein, 340 aa, unidentified
MQITTVGLDLAKSVFQAHGVDETGATVLVKRLHRKQMLPFFSKLPPCLIGMEACGTAHHWARTLAAMGHEVRLIPPSYVKAYVKRGKSDALDAEAICEAVQRPTMRFVPVKTVAQQSILMTHRARSLLVRQRTMVANALRAHLAELGLVANPGIANLAKLAQQALSGESSLPSYARTTLDILIRQILVFADEIAALDQQLLAWHADSEASRRLSAIPGLGIVTATAVAATVTDPEQFRSGRQFAAWLGLTPQQCSTGGKTQLGGISKQGDRYLRRLLVVGATAVIRHTKDKATPLANWIRKLLEKKPFRLVSVALANKLARIAWVVLTRKEAYRAHEMIA

SEQ ID NO: 355118 - protein, 428 aa, unidentified
MAEDTTLTSQTWLVAIDIGKAFHGVLVEGGDGKRQQFRMANHVEDYDRLVVFLRGLPGPARIALEPTGDFHRTLAHRLLREGFSVVSVSSVAGARYREALFNSWDKNDPKDAHVILQLLKHGIVQHYHDPLLAGDHDLQELAKTYHQIVLARKRLADSLLNHYLPLYFPEMGRYWESTRVEWFVAFLEQFPTPAAVQTLPKEAFVRAAWLVVGRKVNKQAKLEELYELAQRSIALPVAVDSVAIETFRLQLAQLRRLAELRQTLEARPHALLKDRADFQRLCSLPGVAAILALVILAEGGDLRRFPHHRQFLKYCGLDLAKCQSGQFRGREMLSKRGNARLRMAFWMAAQRAVRMNENSFRDKYERYTRHDSGNPDVHRKALTAVAAKIARVAYAVVKHDQPYHGYHEHALPSGSIPLKRAVGARATP

SEQ ID NO: 355119 - protein, 314 aa, unidentified
MAKPVTQITLGIDVAKDQLVARNWSDSDAVIDLNNDPKAIRAWLRSFCGPVRIAIEPTSTYHLVCVDEALKLGVDVYLISPRQLAHYREAVGVRNKTDPDDAYLLARYLAHEADQLRLYKPRNRREQLLWGLLKRRGVLVQARQDLQQSLGALKVPAKGLFRELGRVIERLELRFQTLIRELGWWLDYQRCLSIPGIGPVNAAALTAAYHRGEFANADAFIAFLGLDVRLRESGTFKGKRKLTKRGESELRRLLYCAAKPARSLSRFEAHYQRQLDKGLSKTAANIILGRKLARIAFSLIRNQQTFEKYHGLTP

SEQ ID NO: 355120 - protein, 349 aa, unidentified
MSQIKRIGIDTSKSVFTLHCVDGAGKPVLRINLRRAQFVSFFKKQPPTEIAMEACASSHHWARKLTGLGHDVRLIPPQYVKPFVKRSKNDRNDAEAICEAAGRPGMRFVMAKSAEQQAQGMVLKVRETLVRQRTQLVNTVRGHAAEFGVIAAKGIGRISSLLVAIEAEEAIPPAAKEMLALLGEEIDHLDSRLKEIEAKLIVMHRGNAISQLLATIPGIGPIIALTLAIEIDPLAFQSGRHLAAWLGLTPKEHSTGGKQRMGGISRAGHERLRTLLVSGATAVIRHAARPGSKLTTGWLLKLLQRRPRKLVAVALANKMARIAWAIMTSGEVYRRREVPAAAVSVAVVS

SEQ ID NO: 355121 - protein, 412 aa, unidentified
MQDILTAAMGLDVHRDIIVACLIKGQIGFEPETEIRTFSTLIPEMQKLRDWVLETDCRNVAMESTGIYWQPIYEMLEPCFDSEISILVVNARHMKNVPGRKTDMRDAEWIATLLRAGLLKGSFIPAKPIRELRHLTRYRKSVVHDITAQKNRIDKFLQSSGFRFTAFLSDAFGASGRNIIRHLIEHGSIDRTALDKCLKTKTRNRIDEILVALNGSLSVHQRSFLKMIFEHLLALEAHKIAVEDAITEEILKHEAAMNLLCSIPGIDITAAASIIAEIGTDMCSFPDAQHICSWAGLSPGNNESAGKRKSTHINKGNPYLKSMLCEVGWIISGKRTLYLSGWYWRVKQKKGAKRATIALARKLLSLIYTILKTGVPYNEDCFEERRKHSERKRAVRIINELQRLGYTVVAPE

SEQ ID NO: 355122 - protein, 433 aa, unidentified
MNLNRLQVGIDFSRQRADFCLLFPDGQPLVSHRAFANSRPGYQQARQLLLDSLQGYAFDGLDISGEATSYYWFPFFWQLAHDGALEARDLNLFLLNPRWVHWFKKSLPPDDKADSTDPFYIAERTRTRRPTGAWDPQDDWLPLRFYTRLRFHLAQTLTREKNYYLVHLFLLHNTYRRNQPFSDPFGVASQQVLGGEQSLDELLHLPIEELAERLDDWSSGTLQDPLETAQQLQQVARDSFPLEEPLLTPVQHILEVTLQHIRFLENQIEQVEGWITSQIHARHPEALFLESVPGVGLVLAAGIVAEIGNLDRFFETPKWDKKHNRSRHRTLREVEDAVAKLAGLWWPKADSGDFVAEDRRLAKTGNRYLRFYLVQAANGMRRHIPAYTSFYHRKFQEATRHKHKRALILTARKSVGLFVGLLHRKEPYRSKEV

SEQ ID NO: 355123 - protein, 361 aa, unidentified
MDKITRVGVDLAKRVYQVHAVDNAELTVLARPMSPQRFLSWAATLSAGTLVAMESCSGAHHLARRLRLMGLDARLIAAHFIAPFRVQGASGKNDANDAAAICEAASRVRTRCVPVKTPEQQGWQGIHRLREGYKEERTACINRIRGLLAEFGLVFPQSPDALRRVLSEVLEDASNELPGMMRLALQRAQAHWRVLDDEIAWCDQQVKQHVRADQAAARAAQLHGVGELTASALVAAVGDMDQFKSARQFSAWVGLVPSQNSSGGKNRLGRITKRGDDYLRTLLIQVAKSALLAASKRTDRISQWLLQLRDRVGWQKALVALANKNARILWAVLTRKIDFDPEHVPPVPQCKLPALKAPQPA

SEQ ID NO: 355124 - protein, 464 aa, unidentified
MTDKKLWRNRKERKEWARRLQSEDPGLEVVHPHAAGIDVGNGVHYVAVRPDRDPQPVRRFECFTADLHRLADWLRSCGVKTVAMQSTGVYWIPIYEILEERGIQVYLVNARHTKNLPGRKSDVQESQWLLKLHTYGLLNNSFQPPSEIRVLRTYWRQRGEHVRGAATCVQRMQKALTQMNVQLANVISDVSGLTGQTIVRSIVAGEHDPRKLAELSDPRIQASHEEVAKSLEGNWRPELLFVLQQEIAMYDTYQQRIAECDQQLQKHLASFANTIPLQPTEEEPQRKKTKPAKNAPRFELRSELQRITGVDLTRIDGIDVMVAQTLVSEVGLDMSRWKTEAHFSSWLGLCPDNRTSGDKVLARGTRRVVNRAATALRMAAVTLMRSRTYLGAQYRRLRTKLGAPKAITAMAHRLARLVYRMLKYGQRYIDKGAEYYEHRYRQQQIEFLRKKAAKLGLQITLAQT

SEQ ID NO: 355125 - protein, 491 aa, unidentified
MVAEDQGWVPTPMSSLQRNDLSGSGYLSSDLQEAGSLMRRKGSKAITMDAISPMHHNAAGLDIGSEEIWACVPTDRDAQPVQKFGTYTPDLHALANWLKSCGIETVAMESTGIYWIPIYEILEAEGFKAYLVNARHIKNVPGRKSDVKDCQWIQRLHSFGLLNGSFRPEGEICVLRAYLRHRAGLIEHRAAHIQHMQKALLQMNVQLPQVLSDITGVTGMAIIREIVAGNHGPVELARLRDPRCFKAESEIAKALTGNYRAEHLFALKQALALYDAYTEKISECDNEIKEQFSVIKPIHDGDLPPLDTSDKRNTHSKNGPPYDLRAKLYRILGVDLVAISGLNVGTVETIISEIGTDMSRWPSVKHFCSWLGLAPHNDISGGKVLRSRTMKTRNRAGQAFRLAARSVSKTQSEFGAFFRRMRSKKGPQTANLATAHKIARAVYFMLKYRQPFHHITAQAFDERHREREIHRLQKRATILGFTLIEEAVQPV

SEQ ID NO: 355126 - protein, 362 aa, unidentified
MSNPLLVGIDVHRTINAVCVMDGQGQEVAPRFTVHNNRPGTHDFVHRMAQLMLDGGCDALHIAAEATGWYWFHLFLSLSQDPVLNQWPLVLYPVNPRLTATFKKTSVDLDHTDLIDVFVVADRLRLGRDLPAPFHYDDTYGPLRFLTRYRYHLVHTLAREKAYCLALLYLKASEYTRQDLQPFSNVFGAASRAVLKEFAPIEEIAGVPRFHFDQAKVAKFAGFKWRKHQSANFQAEETRLTRTGNRYLRYYFCEAANAVRMRDADYAAYYDRKYHKVRKHQHKRVFSIDDAVGILFLELISQIRRVWRWLVNVSIAMIYVAPTVGQIGARRMGMPMAFRLIFVTIACIALVPKPSAKTRQSM

SEQ ID NO: 355127 - protein, 382 aa, unidentified
MQLINTVDPTIHLAIELSASSWLIAARVPGSEKPHLHRIDGGNTAALLALISSLRARVARRLDAAIGVICCFEAGRDGFWLHRLLTAHGITNYVLEPTSILVNRRARRAKTDRLDAIGMLRVLAAYLRGDRQSCSMVRVPTPEEEDAKRIHRERENLVQERLRIENRIEALLFAQGIRKRPSLRSWERDLANLRTGDGREMPRHLRAELNRLRRRLVTILELIREVEAERDELVVTTPQDRTSRKIVALCRIRGLGENFAAVLTREVFYRSFGNRRQIASYVGITPMPYQSGGMDRDRRISRAGNPRARTTMIQLAWLWLRYQPGSELAEWFRKRVGTLAGRTRRIAIVALARKLLIALWRYVETGVVPAGVEIRTETVVAA

SEQ ID NO: 355128 - protein, 328 aa, unidentified
MKYLGMDVSKDKLDCCLLRDAADTKRKTKVVANNPSGLVTLLGFVEKEGIRPDELHVIMEGTGVYHQLAAETLCDAGMTVSIANPAQVKDFGHGMAVRTKNDTKDSFVLARYGALLKPAPWTPPPPAARQLQAYIAREDAIKKDIEREQNRKEKSVVGRAPEDVLASIDETIEFLNAQLKAIRKKIDSHIDRHPDLKDDMKLLTSIPGVGPETGHHMLSVMHTHQFHSAEQLAAYLGLVPVERQSGTSLHARPRLSKAGPKRMRAALYMPAVSALQWNPHVRALKERLAAKGKTPMAIVGAAMRKLVHLCFGVLRTRKKYSPEHVQPA

SEQ ID NO: 355129 - protein, 397 aa, unidentified
MYIVGIDIAKRKHEAAVIDGEGTVIIKPFSFTNNCSGYNRLLAMLTKAKLPLDEVSFAMEATGHYWLALFTRLQKEGFRVQVINPVQTNSIRSFYIRQAKTDPRDALLIAEVIRFGHFSESTLHPENIYELRELCRGRHAIVSMQADVKRKVVALLDQVFPEYETAFTNLFSDTSMAILQTCPTPKELSEMPLEELCHLIEVSSHKRFRMAKARELQELARNSFGFAMAGDVFSTMIRLYAKHLDFLKQQVREMDRKIAEIMDTLDTPITTITGIGPTLGAYILSEIGDISRFSSAAKLAAYAGIDPTMRQSGEYNGVRNRMSKRGSPYLRHAIWLAASSAVLHDPALKLYFQKKRDEGKPYMASVGHACRKMVSIIYAVMRDNKAYTPCIPNEISA

SEQ ID NO: 355130 - protein, 336 aa, unidentified
MKLYCGIDLHSNNHYVSIIDQDNNRLMEKRLSNDLSKTLTLLVPYKDDLQGIAIESTFNWYWLVDGLMDAGYSVFLVNTTAVKQYEGLKHTDDQYDAYWLAHLMRLGILPTGYIYPKEQRSLRDLMRKRMQLVQCRTAHLISAQAQYWRSTGLRLRSQDIKKCPDNLLSGISDQNLFLSIQSNLQVIALLNKQIEMIEESILLQCKNITEYKQLQTVFGIGKILALTITLETGDIHRFQKVGNYTSYCRCVDSKKTSNGKKKGAGNKKSGNKYLAWAFMEAANYALRFYEPASKFYQRKLSRRNVIVARKALAHKLARASYYVMRDHVQFKPELLF

SEQ ID NO: 355131 - protein, 342 aa, unidentified
MSEAYEGKQIVGIDLHRRRSVLVRMTESGERLETVRISNDAAYLREVMARAGEAPEVVLEATYGWYWAADALAELGATVHLAHPLGVKAFSYRRVKNDERDAADLADLLRMGRLPEAWIAPPATRELRQLVRHRAKLVALRSNVKCQVHAVLAACGVQVPMSDLFGLNGQQLLQQVPLPPAFRARIGSTTRVLECLDFEIEVFTKLVTGRLRDHRGYRAIQAIPGVGAILAAVFVAEIGHVHRFPGPSQLTSWAGLTPRHHESDTTVHRGRITKQGSTLVRWAAVEAVQRISNQHRLGQIRDRVAVRKGRNIGTVAAARELLTLVYYGLRDGHIRCLHQTSA

SEQ ID NO: 355132 - protein, 370 aa, unidentified
MAKRSMFVGMDVHKESIDLSLAEEGRDGEVRHYGVIPGDLEAVAKVVRALRAPHRRLRFVYEAGPCGFGIHRYLTAHGEDCVVVNPSSMPKRSGDRIKTDRRDGDALARLHRAGELTAIYIPTADDEALRDLVRAREDAVGLSTQAKHRLKAFLLRQGRRYPGRAGWTRPYRRWLADLSFPLTPQHIALQEYRDTIDETERRVERLTDQLRQLTPAWRWAPVVDALQALRGVSFVTAVGLVAEVGDIRRFDHPRQLMAFLGLVPSEYSSGPSVRRGAITKAGNPHARRLLAEAAWAYQGIPRLGRQMLYRQEALPPSICAIAWKAQLRLTSRFRKLVARGKAKPKVATAVARELTGFIWAIAQEVPAPPA

SEQ ID NO: 355133 - protein, 426 aa, unidentified
MKNTQNEKISQIKFSTLVVGIDVAKETHYARAFNFRGIELSKLLKFSNTAEGYQRLEEWMQNICQQHSKTDIIVGFEPTGHYWFTLGDYLKNQGHKLAMVSPFHVKRTKELDDNSPTKNDRKDPKTIAMLVKDGRYREVYIPEDVYQELREAVSERDRLVQRMSAISNQITRWLDIHFPEFHTIFKDWRRKAAMQVLRNYPTPDKIVAAGAVKIEETWKLTMKRTAGLKRAQELVKAAEKSIGRKTGLIAAETSLQHLLNEYDLYSQHYQQLEQLMLELLQQVPNAKKLLDIKGVGLVTAATFVGEVGDIRRFQDPRQIQKLAGFNLVENSSGKHKGKTKISRRGRRRLRHGLFMAMITILATNPEFRQLHKKNISRENNPLNKMQSIIALCGKLIRVFYALLRTGTDYSADKMLGDIELGMKAVA

SEQ ID NO: 355134 - protein, 326 aa, unidentified
MKKNFIGIDVSKLKLDVYLHNKLEHKIFTNNEEGYQQMISWLKSLKVSVKSMAVCFEHTGIYSEDLATFLAQKKVCFYLESSINIKYSIGLSRGKSDKIDSRRIAAYIAMYHEKLTPSDIIESDVSKLRKLLSLRSYLEKEIVSLKNRLKNSTKDSGVEFILKMEREMLESKNKHLKELEAEIERLIKSNEEMNKIDQLIQSIKGIGPMTSWTFIATTNNFNYFENARQFACYIGIAPFEKSSGSSIKGKTQTDRRSNRKLNALITMAARSASLYSLEMKEYMERKLKEGKHYNCVLNAIKNKLIARIFAVVKRQSPYVDLKKYAA

SEQ ID NO: 355135 - protein, 311 aa, unidentified
MEADCIAIGIDVSKHRLDFATLGSQQRGSEPNTLLGIAALAKTLAAIGPHRIVLEATGGYERAVARTLFDAGLPVCVINARQIRHFAKALGVTAKTDSIDAEVLARYAAMVCPPLRPMKAENEEEMADLMARRRQLLTMTVMEKNRLQAPSRTQAIRIAAHLRWLEREVARVDRDLDRWIAADPERVETDAILQSTPGVGAVVARTLIADLPELGKLGKRQISALVGLAPFNRDSGAMRGKRKIRGGRASVRGILYMAALTGARFNPVLAAFYKRLCDAGKPKKLALAAVAHKLLIILNAMMRNRSHWAHE

SEQ ID NO: 355136 - protein, 422 aa, unidentified
MLEQSQDDEQIIARVAALDIGKAEVMCCIRVPRDAPAGRRRQEVQAYSTMTRSLLVMADRLRELGVTRVVMEATSDYWKPVFYLLEAHGFDPWLVNAKDVKHLPGRPKTDKLDAVWLCKIAERQMIRPSFIPPPPIRQLRDLTRYRVDLVSARTAEKNRAEKLLEDAQIKLSVVATNIFGVSGRDMMAALIAGERDPRVLAQMARVRLRAKMSQLEEAFHGHFTDHHAFLLAKMLARVDAISADIAEIDERIEAQLRPFADAVTRLQQIPGIGPVAAAVIIAEIGTDMGRFPTAGHLASWARFTPTVKQSAGHNKGNGSTGRGNPYLARILGEAVVAAGRTRTFLGERYRRLARRRGKQKAIVAVGRSMLIITWHLLSSPSTQFADLGPSFYDSRIQPDRKKREHIHQLEALGYKVNLEPAA

SEQ ID NO: 355137 - protein, 355 aa, unidentified
MEWRITVMTIVAEKYAYVIGVDTHARTHTYAITATATGACTGCEAFPVTGAGIKRAIAWIHRNTTGPVLAAVEGTRSYGASLTRALVAENLPVVEAKPPRKKTRRGAGKTDAIDAAAAAASVLGTVLDRLLQPRADGARAAINVLLASRRRVEQQCTANRNALNALVREIDLGLDTRRALTDQQVADISTWRTRPADSVEQKIAREESTDLAKAITAAATRLKQNKTRLGELCEELFPGLQAQSGLGPVTAGIILAAYSHHGRIRNEAAFASLAGASPIQASSGNTVRYRLNRHGDRQLNMALDVIAKTRMRFDDTTKKYVERRTAEGLSYREIKRVLKRYLARSIFRQLEHQFA

SEQ ID NO: 355138 - protein, 407 aa, unidentified
MEVLYPRCAGLDVHARTVTACVRLAAGRDVAYQHRTVETTTRGLLDLADWLAAAQCTHVAMEATGVYWRPVWHVLEPQFTLVLANAMHIKHVPGRKSDMTDAAWIADLLAHGLIRSSFVPPAPIQELRDLTRTRKQLVGEIARHTLRIQKTLEDANLKLTHVVSDILGKSGRAILKALIAGDTDPNRLVDLTTGRLKAPRGQLVDALHGRVTAHHRFMLDLHLTQIQALEATIDKLERHVGEAMVPFQAAVSVLTTMPGLSDTAARVLIAEIGTDMTRFPSPGHLVSWAGLCPRLEVSAGKRHSTRIRHATPWLKTTLLQGAWAATRKKNTYLHAQFLRLKTRRGPKKAIVAVAASMLTAAYFMLRDGVEYRDLGGRHFTERDKHETTKRLIHRLRDLGVVVEVKVA

SEQ ID NO: 355139 - protein, 391 aa, unidentified
MSMYFIGIDISKYKHDCCIISAADQKVVSKVTIKNNKAGFKELLTIIHSLANPADIRIGFEATAHYALNLELFLENSLLTFMEVNPVLISEYKKSKTLRRTKTDSVDCESIARWLMTVEYKPHSKGFYHAYSLKSLTRLRDKLIRQRSFYLVKITNVLDHTFPEFKPFFNERLSKTALYLLENYGSAEKMARMNSASYEKLRSLSRGKFSPQQFLRLKELAANTVGVNNSIFDVELNSLLSLYKSLVKEIDTIEKEINILIEEVHPHYMSVPGIGPLSAAVIYSEYGDISNFTNPGQMLAFAGIEPGINESGTESHGGKMVKRGSSQLRYTLINCCLPLIRFDMTFAAYYAKKRGEGKPHRVAITHVAKKLIRVIYALERQDIDFNAQKLR

SEQ ID NO: 355140 - protein, 339 aa, unidentified
MKTYAGIDLHSSNNYIVVIDKNDKRLFEKRLPNTLEAISTALEQFKKTLTGVVVESTYNWYWLVDGLKDIGYNMHLANPAAIQQYSGLKHADDKWDSFWLAHIFRLGILPEGYIYPKEFRAVRDLLRRRLLYVKQRTTHILSLQSMITRNLGLRMSGNAIKKLKAEDAEELFTDSYLVFTAQQNIKTIEFLKNIIKDIEKKVLKVAELAPEFIKLKTFPGIGKILGLTIMLEVGDIKRFSKVGDYSSYCRCVKSERISNGKKKGENNKKNGNKYLSWAYVEAANFAIRFSPEAQRFYQRKKAKRNGIVAIKALSNKIARASYYVMRDQVDYDAEYLFRK

SEQ ID NO: 355141 - protein, 363 aa, unidentified
MTSVTTTVADCYQYVVGVDTHAATHTYAVVAAHGMVIDRVTFPTTAAGLRRARDWIARRTEGDLGGVLVAAEGTGSYGAVLAETLADAGYRVVEAPTPRRERGRGKTDALDAVLAARSTLTTPLTVLRDRRGGDVQAALQVLTVARDQLNAERVRGINAVTALLRSHDLGLDARRALTTAQITTVAAWRQRDEPLGPATARGEAIRLARRVLVLDDELHGNRQRITELVAARAPQLLELPGVGPVTAAIVLAVWSHPGRIRSEAAFAQIAGTCPIPASSGNTIRHRLNRGGDRRLNRAMTTIVLTRMRTDPATRAYIHRRQRDGKTSREIRRCLKRYTSRQIFRALTAAGRDSQRTPEPLDAT

SEQ ID NO: 355142 - protein, 375 aa, unidentified
MIENSTPRSTRFVGLDVHKATIVVAVAEDGDQQPESWDKIPNDPSAVRKMVKKLGQDGHRLKAVYEAGPTGYGLQRQLADLGVECIVAVPTLIPRAHGRVKTDKRDAILLARLLRRGDLVPVWVPDPTIEALRSLARARYDAKENHQRERQRLNKFLLHWGVRPPAGVRAWTNRHYRWLKEVQLSEPAAQVAFEDYRAFEQLAQERVRRLEQELRTWAEQHPRLALIVAALQILRGIGFLSAATIAVEVGDFRRFAAATSFMHFIGITPSEHSSGESQQRGGITHAGNRYLRHVMVQSAHHSRHQPGVSRELQKRMEDMPKEMIEIALKAQQRLHYRYRSLSRRIGQPKAIVAVARELAGFVWAMGQHMEETLAA

SEQ ID NO: 355143 - protein, 334 aa, unidentified
MENIALIGIDLGKNSFHIHCQDRRGKAVYRKKFTRPKLIEFLATCPATTIAMEACGGSHFMARKLEELGHFPKLISPQFVRPFAKSNKNDFVDAEAICEAASRPSMRFVQPRTESQQAMRALHRVRESLVQDKVKTTNQMHAFLLEFGISVPRGAAVISRLSTLLEDNSLPLYLSQLLLKLQQHYHYLVEQIKDLESQLKRKLDEDEIGQRLLSIPCVGTLTASTISTEIGDGKQYASSRDFAAATGLVPRQYSTGGRTTLLGISKRGNKKIRTLLVQCARVFIQKLEHQSGKLADWVRDLLCRKSNFVVTCALANKLARIAWALTARQQTYVA

SEQ ID NO: 355144 - protein, 336 aa, unidentified
MMSMKSANNELDKHYVHFVGIDVAKKSFVLATSLSPKTKNYDNTAQGIDQAICFIKEEHKQCDNGKTLVVLESTGGLEVPLAKAIHLAGICVMIANPRQTHQFAKSQPLTKTDNKDAKMLAFYAKMMAQRDDLATLLYCPPSQSQELLTALINRRNQFVQMCVAEKNRLEQSHHSQISSIQAHITYLTEQIHELDKQIKTHLDDDNHPDLKQTSSVIQSVKGVGTTTATLLAMLPELGTISHKQLASLVGVAPHPKQSGETKFKGLCQAGRPEVRKALYMATLVATRFDEKIKTFYQRLRANGKPFKVAIVACMHKLLTILNARVRDELQKQVVVR

SEQ ID NO: 355145 - protein, 319 aa, unidentified
MITASAAGIDAGKTYLDIGIEPSRICFRVANAAAGIEDAVTRLQQAGVHKVLLEAIGPFAQPAVTRLVAEGFEVGLINPRRIKAFREAEGKRAKTDRLDASLIARFAVLMTDAPRPVPSANQQALKALATRRRQLVEMIAMEKTRLKQASDPLLCESHRTAIAALTVERRRIDANIDDRLTIDAALARRKVVLTSLPGFGPAIATTLITDMPELGTLDRRAIASLAGLAPHPSQSGTSAGRNQIGGGRPCVRTALYMAGLVASRCNPHFRAEYQSMRSDGKPAKVAIIAIARKLLVLANSLVKNDSLYDPDRADATVIH

SEQ ID NO: 355146 - protein, 414 aa, unidentified
MTASLAGLDVHKRVLMAVVDAGTEGEPAEATPFQNRRFGATTSELLHLRAWLEQHGVQEVVLESTAQYWKPVWLALEGHFRLHLAQAWSNRAPRGKKADFKDAQRLVRRHRAGELTLSFVPEAPQRLMRTLTRRRTQLTKERVRIQNQVESLLEETRIKLSSVVSDLFGASGLRILKALVQGKTDPAELAALADARVQRSSEELADALNGAVSGIHRRLLQQYLDSLELVETQMQELAVMAADAMREHEEAVTRLTQVPGIRVLSAQQVVAEAGPRASAFPSAAQFSSWIGVCPGREESAGENHSSRCAKGNQYLRRVLCQAAQAAVKTKCSFFQQKFRRLLPKLGYNKAIWAIARHLSVVIWKILHEGVSYVERGMPTTPQAAKRRLQRLKKELRALGYSDQLNPLQPEAVMV

SEQ ID NO: 355147 - protein, 395 aa, unidentified
MKLVPIHKRVIGLDVHQAQITACAIIEEGSGETRIERRQFGGFKRDRRELAAWAATLRPDEVVLESTGIYWKSPYAALEAAGIRATVVNARHVKQVPGRKTDIGDAQWLATLARAGLLRGSFVPPAKLRELRLIARQRQKLVGLLSSEKNRMHKVLTDAGVRLGVVVSDLHGQSARAMIKGILQGQAPNEVLALASRRLKASREVLHDALQGELTASHLFVLDELLRHIKELEARIARFDARLLHELASEHNALALLQTLPGVDTIGAAMLLVEIGSDMSIFGNPDRLASWVGICPGNNESAGKRKSGRVRKGNPYVRRLLCEFAHAASRTKSAFHAKFQSLIVRRGHKRAIVALAHKMLRTIFFMLKRGDYYRDSATSYEQLSVQRNASRWIKA

SEQ ID NO: 355148 - protein, 316 aa, unidentified
MSEPVYVGIDVAKASFEVAASGEEQTLSLGNDEAGHAELCQVLVPLAPRLVLLEATGGHERLLALALAAAGLRVSVINPRQARDFARCTGKLAKTDRIDAQVLRGFAALLDAQGHEPRALLDEQQRELTALVTRRRQLVAMLVAERQRLALAHPKAKASILAIMDAIAAQLHDVDGQLREHVQAHHADLAKLLTSVKGVGPTTATTLLAQLPELGHLNRKQITSLVGLAPMNRDSGTLRGQRHIFGGRADVRRVLYVAALVGTRFNPVLKAFYAKLLAAGKPKKVALVACMHKLLIILNAIARTKSPWSHEIAGIA

SEQ ID NO: 355149 - protein, 385 aa, unidentified
MDQVHYSLGLDIDKATFKSCLKVKEDSNKSIVRATKTFKNSLQGFKELDLWMKKHKKPPYAELKIVMEATGVYHEHLAWYLHQLNFQVYIVLPLRAKRYFQSLGKKSKNDEIDAQSLADMGLQQELVQWKPCSKNLLLLRSLTRQLEMLQESRTAFRNQFESATHLANCDKLVIKNLKSLITTIEKDIDGLKTRIHQFIEQDPSLNAKYKLVDPIKGFGMITFATIVAETGGFELFESQKQLVSYAGYDITENQSGKRIGKTRISKQGNTHIRRIMYMAALNMVTYKVAPFCQLYDRVFDRTKIKMKGYVAIQRKLLCMIYAMWKNDSVFDPCYLTKSSSGNHEPKTLFSVGPTGPETKVATGNAMATLDGPPCNQSPEALFSVL

SEQ ID NO: 355150 - protein, 406 aa, unidentified
MLYIGIDVAKRSHVAAAMGDGGEVAVEPFEFRNTQRGFERLLERLARRGVSAEGSLVGMEATGHYWVALFDFLAANGFEVAVINPIQTDAWRRVDTVRPAKTDGIDALLIADLLRCKRFEPSALGDEATEELRQLARYRFELVQELTALKNRATAILDRVFPEYERLFADKFGPTSSALLKECATPADVLAADPEALAGLLAEASRGRLGRERADEVVEAARSSVGVSFGSRALAFELRVLVERMEFTRGQISELEAEIARALSETAGRHLTSIPGVGPALAALIAGEVGDAARFETPSKLVAYAGMDATRRVSGESLDSPGHLSKRGSSYLRWALMQGADRARRFDPYFGECYARKMSQGKHHYVALTAVARKLAGVCLALMKEDRDWSPDPPAGHLPGHLSQKR

SEQ ID NO: 355151 - protein, 348 aa, unidentified
MRFYTEQHQHYCGIDLHARTLYLCILNAEGNVLLHKNLPCDRTRFLEAIEPFREDLVVASECIFNWYWLADLCAEQDIPFVLGHALYMRAIHGAKAKNDRIDALKTASLLRGGLLPMAYVYPAGMRSTRDLLRRRTHFVRKRAQLMAHVQNTFHQYNLPRPPGRLVYKYQRAPIPDAFSDPLLKKSVETDLALCDTYDELIRDLEKTVVRQARVHDPQTLLRLNTIPGIGEILSLTLLYEIHDIGRFASVQRFASYARLVKCEKSSAGKRIGTSGHKIGSVHLKWAFSEAAVSVIRHLPQSQRLHDRLKRKYGKGKALSIFAHKLGRTVYFMLKRNQAFDADRFLANT

SEQ ID NO: 355152 - protein, 422 aa, unidentified
MVTKDTTSFERVIGLDCHPDTFTAAVVRGQTPAQALIGKVFNKVPMAQLQSWAKKHTTAQDLFVLEASGNSFHVVRSLASIQRRALVLESCQLGKLKEAHANNDRISAVRIAKAYLAGTAKTVWVPDLKTQERRDWFHAHEKTIKRTTQMQNRLRSYLSDNGVRLKKGTHLAQPDPVVETLLRQAKAWSVRQWQIIEGLLMELRHADEQRRFWRSAIAQEVLGDPELLKIVRLCGVRDLIAFALGAIIGDIKRFARPGSLVKYIGLNPAFDDSGQGQWHGGISGHGRKDLRSLLIQSAQAILRSKDPLAQWGRRLAARKSSTKLAVAAVARRLAVAVWYLMSGQWSQLQEIDQRLEIKVSRIISQMGTEALKKAGKTRPALRDETYQSLKTGTTYLLDAKKMFTPKPKFERPMTLAEEYGLK

SEQ ID NO: 355153 - protein, 412 aa, unidentified
MLFLGDDWAEDHHDVELVDDQGRILARRRLPEGLGGITRLHALVAEHAPQEWADLDPAEAAAQVTVGIETDRGPWVGALVAAGYTVYGLNPKSVARYRERHSTSGAKSDTADAHLLAEIVRLDRAHHRPVAGDSATGEAVKVTARAHQSMIWDRTRHVLRLRAALRDFFPAALVAFEDLDEPDTLALLAQAPDPDSASRLSRAKIVRALTAANRRDVPARAGKIRQVLTAPELRQPGPIQDAYAAIVTSEVALITVLNTQIERLGQVVAEHFGRHRDADIYTSLPGLGVILGARILGEFGDDPDRYADAKGRKAYAGTAPITRASGTRRVVLARYARNRRLGDALQQWAFCSMRGSAGARAYYQSLRKRGVGHQAALRQLANRWVGILHGCLRDRTFYDENTAWQQHLNTAA

SEQ ID NO: 355154 - protein, 370 aa, unidentified
MKISIGVDLHKTQFTVYLLSEDRKVQDAGVYPTSEKGYRAFLETTCALAEDGYELIAAVESTGNARYFRNKLLSAGIEVKVVNTLKFKVVNESVKKTDKHDARTLAEFLEKDMLPESVLCTQESEDIRRVLKSRSILVKSVVSLKNQVHGLLLGYGIETKRGQLQSKKERQRILNGLEDHDFYGSAAKAVIPLLDTIDHVSVQVKQLEKVLVELVENDEDVELLQTIPGVGLITAATVRAYTDDIERYDSAKKYAANAGLVPWVQNSNMTIHHGHITKRGPVELRTAFVQMVMGMVRMQKKTGSYRIMMKYSAMKKQKGSGKSIIATARKMSTVVYTILKTREPFDPMKMAFRKEYREMQAAAWGAAMVG

SEQ ID NO: 355155 - protein, 354 aa, unidentified
MSENPNSAITVIGVDIGKNSFHVVGLDDRGAIVLRQKWSRGQVEARFANMPACLVGMEACVGAHHLSRRLKAHGHDARLMPAKYVRPYSKGQKNDFRDAEAIAEAVQRPTMKFVATKTADQLDLQALHRVRERLVSQRTGIINQIRAFLLERGIAVRQGQRFLRAELPRILATPSDVLSPRMARVIEDLTGDWRRLDERIEGLSGEIEAIARQESGCERLMSVPGIGPIISSAMVAAIGAGDAFTKGRDFAAWLGLVPRQMSTGDRTILGKISKRGNRYLRLLFVQAAWVVLIKPKSWERHGLKPWIEAAKKRLHHNVLAIALANKLARIAWSVLARGRGFEARKINDAIAQPA

SEQ ID NO: 355156 - protein, 366 aa, unidentified
MRKVMAGMDLHGNNVMVGIVDDQGARLQHRRLACELPEIIEFLAPYKAELESIAVESTFNWYWLVDGLRAAGFTVVLANPAKIDQYSGIKHADDKNDAYFLAELQRLKILPTGYVYDPELRPVRDLFRRRMSLMRQRTTLFLSAKSLHQRTTGRGLELRRLKAMEPEEAAALYTHPANQLIAQIQKEHIDSLDQSIRQIEKAVLKVALQQPYYQRLQTIPGVGIILGLTISMEVGDIARFAGPGQFASYCRTVDAKRISNGKTKGDNNQKCGNKYLAWAFVEAAHGARRFDATCRRWYDRKAGKKCTTVATKALACKLAKAAWYVMAKGTEYQAGKIFPGLTEPKAEEISGEQASASKGVGPNPED

SEQ ID NO: 355157 - protein, 456 aa, unidentified
MELRVAMSGRWSYAALNPDPGKQRGRGQEMACRFSVALSDHGDRFGQATSRVCTINMCAPMGPRIVEWTQRTTTKVSSPLSHGNEEERMIERVHGIDRHKQFSTISVLNRQGEEVQFQGACREFGKYVEGLGPTDVVVLEASTGSFWWADQIEAKGAKCFVVDPRKFRIIKDSWNKTDKQDARNLAKALWVHVVTGEFGIPTVYKPTAVVRDLRKLFAQYCLLNRQIATHKNNAQAIFVENGVELKKEAKSRLWAPESGLEVLKEMNVSAASRVCLELTLQVLWKVAEAKERLAVEILLAGEPLKSQVELLISIKGVTPLIALAFLADVADVRRFRTLRKMNAYLGLVPRASNSGGKSRPGHITRESRKLTRTILTQCVHHVAASSESLDRYYRELREKRGTGRARIAVIRKLCGMMRRMLLSGEQYRWMDRGLYEKKLKQYERVLKRAKEERPAA

SEQ ID NO: 355158 - protein, 421 aa, unidentified
MTPTSHNTFAAFIGIDWADAKHDLCLQAAGTAKRERFQLEHTPEAIDAWVTTLRTRFNGQPVAVCLELDKGPLVSALRKYDFLVLFPINPLTLARYREAFTPSRAKDDPTDAELQLELLLPHRDKLQPLQPQSPTMRALAQLVEHRRRVVGDKVRITNRLTSALKNYFPQVLQWFQDKDTRIFCDFLSRWPTLKAAQLARRSTLETFFRDHHVRTADVLATRLHAIKTATPLTTDEGVIAPNTLLVQTLVSQLRVTLDAIEAFDHAIAQRAQHHPDFPLFQALPGAGPVFASRLLVAFGEQRERYASAAALQKYAGIAPVTERSGKKAWVHWRLQCPKFLRQTFVEWTAESIRHSFWAQVYYQQQRDKGNTHQAAVRALAFKWIRILYRCWQERTPYDESTYLQALTRRGSSLLQNLAKVS

SEQ ID NO: 355159 - protein, 429 aa, unidentified
MRNESTPGARGPVFCGVDTHADSHWLCVLDWRGRKVLSRRFPADAAGYEALAGAIAAAGEPACVAMEGTSSYGAGLTRHLASLGMPVREALSPARAQRRRPGQGKCDESDAERAARAAMSGSKLGTPKSQDGWVDGVRCMLAARSGAVKARTSAINTARSLLTTAPEGLRSRFRGMAGPRLMEELPSVRAEGALGAALGALADLWAAARDAALGMERAIEASLEENCPALLAMYGCGPVSAAKLAVAAGDNPGRLRSEASFAAICGARPIPASSGKTVRHRLNRGGDRQANSALHEIARQRVMRDPETAEYAERARARGKSDREVMRCLKRYVAREAYRALMRPHEVRRPGDASGLVAARRAARVSQVRAASIPGTSEKYISMLERGQRELKPIRRAYEAWVEAGLPLDWDRQAFEAERKMDSKKHLAK

SEQ ID NO: 355160 - protein, 338 aa, unidentified
MFVIGIDPHKGSHSAAVLDRDERLVGELRVRAGRRQRDELVAFASRFEPRCWAIEGATGTGALLAQQLVAIGETVLDVPPTLSARARLLDTARIDKTDAHDARSAAVVALRHSKLRTVVLEDHSVVLRLLAKRHHDLVAHRTRAVCRLHTVLCLLVAGGLPRQLSAARAATELRRIRPTDHIGIERRRLAVKLLTEVRGADRDLVELKARIATAVAASSTTVTDVVGVGPIMAAYLIGYSGDVRRFPTAGHYARYNGTAPIEASSGPRVRHRLNPRGNRQLNHALHIAAVTQVRNDTPGRAYYLRKQAEGKTRKEALRALKRRISDAVYHQLLADTTH

SEQ ID NO: 355161 - protein, 391 aa, unidentified
MVCVGIDVAKDKHDCCILDSDGTVRADCFTIPNNSDGFKRLLQTIQDCTQKSDKIKVGLEATGHYSYNILGFLLDNGLPTYVINPLHTNLYRKSLSLRKTKTDRVDARTIATMLLSDVDLKSYTDTAYHNEELKSLTRYRFDKVRERSKLKQSVSRLVTILFPELEKLVPSLHIASVYALLSEYPGAKQISEIHLTKLTNLLATASKGRYGKEKAIQIREAARVSVGSVMPAKSLELKHTIKLIQELTSEINEIEDSIQQIMDELNPPILSIPGMGVNSAAVILAEIGDFSNFSSPDKILAYAGCSPSTYQSGKLTNCYAHMEKRGSRYLRYALYNATKYVCHWNPVFAEYLAKKRAEGKHYNVALSHATKKLVRLIYALQKSGKTYLTAA

SEQ ID NO: 355162 - protein, 354 aa, unidentified
MLIIGCDYHPGFQQIAYVDTDTGELQERRLVHRQEAEEFYRALQPQQMGVRVGMEASGQARWFERLLAELQFELWIGDAAKIRSKRVRKQKTDRQDAQLILALMLENRFPQIWVASWENRDLRQLLWHRHRMVQMRTRLMNQLQAVALNEGIRRKKGLWREAGRKQLQSVALAPWASQRRHDLLELLDRLSPRIAELSERVEEEARKSPVAQRLMTHPGVGPLTALAFVLILGQAERFACGNQVASYLGLVPEEDSSGEHRRLGHISKQGNSLLRFLLVEAAQVTVRSDSEWRRKYFHLALRRGRKIAKVAMARRLAVRLYWMWRKEWDYGQWKKFSPHAGQPGTGVGVQSNTE

SEQ ID NO: 355163 - protein, 402 aa, unidentified
MNAVGIDVSKGKSMVAIMRPFGEIVSTPFEIKHTTSDINSLVELINSIEGESRIVMEHTGRYYEVLAHQLSEANLFVSAINPKLIKDFDNDSLRKVKSDKADAVKIARYALDKWQNLKQYNVMDELRNQLKTMNRQFGFYMKHKTAMKNNLIGILDQTYPGVNTYFDSPARSDGSQKWVDFASTYWHVDCVRKMSLNAFIDHYQKWCKRKKYNFSQSKAEEIYGKAKELVPVLPKDAITKLIIKQAVGQLNSASTTVESLRTLMNETASKLPEYPVVMAMKGVGISLGPQLMAEIGDVSRFTHKSAITAFAGVDPGVNESGSYEQKSVPTSKRGSSDLRKTLFQVMDVLIKTHPQDDPVYQFLDKKRAQGKPYYVYMTAGANKFLRIYYGRVKEYLSSLPES

SEQ ID NO: 355164 - protein, 343 aa, unidentified
MDKLDTAGVEVSVEVLVVALKSNGQMRASEFPNTPSGHKQLIGYLRRHSQRLRICLESTGLYGLDLALALQTQKGMEIMVANPRSVRHFAEAMMQRSKTDPLDAKLLAEYAERMPFLAWKPPSLPARRLCAMARAIHQLTEMNTMQKNRLHAAASTETTPKIVMTELRRSLAQQQRSIARLLREAIQLIQSDPVLQKRFQLLLGIRGIREMSALQLLGELVLVPADCDVRQWVAYAGLDPRQYKSGNSVEKKVRISKVGNRHLRRALYMPALVAVRHQPHFRAYYQHLRAKGKLKMVALVAVMRKLLHGIYGVFKSLEPFDATKLFSSIAPALEPKITKEIAC

SEQ ID NO: 355165 - protein, 346 aa, unidentified
MTAFAALDVSKRSTSIHIVDEKGTCLWRGKTLTDPDALAVALSPFSNDLTLVGLETGCWTTWLWHELMDRGFPMVCMDARQAHAALSISINKTDANDAQGLAHLLRTGLYREVRVKSWDDMRKRTLLRARATMLRCVLDLANAIRGALRTFGISLPAGSGNGGAKIFERRVIDHLATRADLEVIIGPLLEAWRAGRAQVARHESTIRRIVRNDPRCQLLMTVPGVGFLTAVGYVGAIGDPATFTSGRTVAAWIGLTPRRYQSGAINQQGRISRQGDKLLRSYLYEAAAHLLTRAKTDSALRRWGLKLRERIGFKRANVAVARKLAVILHAMWRRGRPFEAEGSLPA

SEQ ID NO: 355166 - protein, 345 aa, unidentified
MPIVGGLDIHRKQITFDYLDTVTGEVKRGQIAPADREHVRAWLARFAGCEDAAFAVEGCCGWRYVAEELAAAGIAAHLGEPADTAALRGRKRHAKTGKTDARHLRTLLAEGRLPECWIPPAQILEYRALLETYHDLRREHTAWVQRIHAVFFHQGAPPLGEGALRTDQGLAGLRAAAAAHLSPAGQQQVATALDMLAATEAQLGPLRRQLRQAAAHLRGAKVLAERLYGVGPLTALALTCWLAGKDRFSSSRKAVRFTGLDITVHSSDRKGPPGKLSRQGPPVLRWAVYEAGKTHARTAAPDHGYYATVADRKNTKRAALSEARKIVRQACHILTELGDDALTAA

SEQ ID NO: 355167 - protein, 378 aa, unidentified
MRKVALDLGSRKTAFCEVRDGAVVRRGTVTAVESLRSLLGPEQPPSLVAIEACREAWHVHDVLTRWGNEVVMVDTTRSKRLGIGQHGRKTDRIDAEVLARALERGGIPAAHVLSPHRRELRRCLNVRRALVESRAQMVTTARGIAREHGNSLPRCASTHFAINARKQPMDAELRGVLEPLLKLLDTIDSELVGVDAQLADLSAKEPVITLLATTPGVGPIVAASFVSVIDDATRFRSAHHVESYVGLVPSEDSSGGRRRLGAISKKGNKYLRALLVQAAWSVMRSADRADPLRLWADAVAARRTKNVAVIALARRLVGVLWAIWRDGTVYDAALLAGNSSRGARRTAQSVELRAEALEKAGKKLSPKKAPAREVSLPT

SEQ ID NO: 355168 - protein, 341 aa, unidentified
MYYIGLDVHKKTISYCVKDASGQIHREGTIGATRNELDCWVRTLPQPRIMAMEATIFTGWIYDHLLPHAEQVKVAHPLMLRAIAAAKKKNDRIDAGKIADCLRCDFLPECHMASTEIRDRRRTLRYRHLLVRQMVQMKNRISGLLMETGVSHNKQRLHKVGYFGELLSNHEEVHENIRPLLRLSRETIVRCQRTEYALVSSLQRDPLLAERLKRLRTVPGVGPITALTWALEVGDVSRFRSVKQAISYCGLCGEEKSSADKVLRTPISKQRNKHIQRVLVEAAKLAPRQNHELALIHEKEKQKGNRNRATLAVARKMVAYLLAVDRREREFVPAEDRGTAA

SEQ ID NO: 355169 - protein, 367 aa, unidentified
MKKVSTVGAKPSKKISQQKLTVGLDLGDRNSWYCVLDESGQIQLEQRVRSNAKALREVFGQLPHSRIALEVGTHSPWISRLLSELGHEVIVANARKVRLIGESRKKDDRLDAQTLARLARIDPGFLSPVKHRSAQAQADLMMIRARAGLVRARTALVNTVRGLAKSYGERLRGCNVRNMNPEKADGLSPELQSALEPLLAGIEELSEQIREYNERIEKLAQESYPQVALLRQIKGVGTLIALTFLLTLEDPHRFRKSRDVGCYLGLQPGRRNSGQSEPQLHISKEGDPYLRTLLVQGAQHILGPFGVDCDLRRWGLKLAERGGRNGKKRAIVATARKLAVLLHHLWVSGEVYEPLHNSRRTAVAAVA

SEQ ID NO: 355170 - protein, 470 aa, unidentified
MNDNREAGRRRTKGSRQRTSPGLLERIQPDAAGIDCGAEYHYVAVPPDRDPEPVRPFRTFTADLERLADWLAACGVKTVAMESTGVYWIPLYELLEARGFQVVLVNARDVRNVPGRKSDVADSEWLRELHSVGLLRASFRPAGEIAALRAYLRHRETLVHGAATHIQRMQKALVQMNLQLHTVIADRTGVTGQRIVRDILAGVRDPHALAAHRDHRCRASADVIAASLTGHYRAEHLFALRQNFEAYEFLKRQIDACDAAIDAHLTTLAERQAPPPHTLPTPRRTRKPRDNDPRFEIRAPLFRLTGTDLTQIDAIGPSTALQLIGEIGTDMSRWRSEKHFTSWLTLAPHNKVSGGRLLSSKTPPSANRAAAILRRCAMSLGRTATALGAYYRRLAYRVGKPKAITATARKLAILVYRVLRGDLVYRDPGALAYEQLHRARTLRGLRKRANQLGFGLLNLETGEVLDAAVS

SEQ ID NO: 355171 - protein, 321 aa, unidentified
MEADSSVRSFVGIDVAKKHWDVYLAPAGRALRYSADQAGLAQLLAALQPHAPCLIVVEASGGFERRLAADLLEAGYTVARVNPRQVRDFARGLGRLAKTDRIDAETLARFAEQVRPRPWEKQPENRALIEDLVGRRRQLVQMQGVEKTRLHQVAQGPVRKSVAHMLDLLRAQIDELDAELARLIEDDDDWNERAKRLATVPGVGAVTSRTLVAEVPELGKLNRQAIAALIGVAPLNRDSGEFRGRRMIWGGRASVRAALYMATLTARTFNPVIRRFAERLEAAGKPFKLVMTACMRKLLVILNSMLRDRTDWNPKLLPQSS

SEQ ID NO: 355172 - protein, 317 aa, unidentified
MNTSKIQIPVNIGVDVGKANLDIALHPSGEFYSIPNSEAHIQRFVKILKGYSIERIVVEATGRYEHALVQACDQASLPIIVVNPTSVRRYAQAIGVLAKTDRIDAQVIAKYAATLKPEFKPIPDKTSQKIKDLLVRRSQLLEMSTMEKNRLQILPKTLHRSIKSLLKMLQSQVETITRQIDQEVAKVDHWRIKAEILTSVPGVGKVLTYTLLSELPELGSLNRKEIAALVGVAPINRDSGKLNGKRRIRGGRHRVRTVMFMAMLSSIQCNPVFKRFYEHLKAQGKLPKVALIACMRKMIVVLNTMIKNQEPWRENMA

SEQ ID NO: 355173 - protein, 313 aa, unidentified
MTDHNIGVDISKSHLDAFRLEDGAAQRFDNSAMGFRALTKWLGKAPVARIVFEPTGPYHKAFEAKLGETFPLVKVNPLQAHRFAEAHGTRAKTDAVDARMLARMGVAFDLVPQVPCSKEILVLRDLHVARTGLIKDRTRLRNRAQTQDIAVLKRQTKARLAQVERHVVELDAEIAALIAAGQTTARNRDILCSMPGIGTVTAAAMLTLMPEIGTLERKQVASLAGLAPITRQSASRRLKTIACQPMGQWQGKAFIGGGRKPLRDALYMAALVAMRCNPDLKAKYEQLRAAGKPAKVAIAAVMRKLIEMANAPS

SEQ ID NO: 355174 - protein, 316 aa, unidentified
MQDLTTIPTSFIGCDVGKATIVVFDSRNASITSLPNDPEALAAFATTLDPSSLVICEATGGYEASLIAALVTAERPVHRADARKVKAFIRSFGTLGKSDTIDAQALARYGKERHPCLTRWQPHEHQRDQLRLLVATRRELIQQRTACANRLKAPGAAPVAPRLQRLLKATDDEIAGLQADIDALIQRHQPLKATLKVLRGITGFGPVVAATVTALMPELGTIGRRQAAALAGLAPHPRQSGSIDRYRNTRGGRPEIKQILFMAGLAAIRHDPTIKAFYQRLCANGKKPIVALVAVMRKLIVIANAKVRQALYSQLS

SEQ ID NO: 355175 - protein, 323 aa, unidentified
MQNHVIGIDVSKKTLDICAIFNGKIKKKAFTNTESGFKNLTAWVSKLELVNPHVCMESTGCYSEAVAEFLYKNEFKISVVNPMPIRAFRMSKMIRQKTDKTDSEVIAQFCLQNKPILWSPKPRENKELHEIKVRIDFLKKEHNRLINSLEKEYINESVKKSINEEIEFIKKQIKTLENEVKKIVKGNEKLKKQFDLLTSIKGVGAKTSLTILADMPDVDSFKDAKQYASFTGVTPSHFLSGTSVNGGSHISKIGSKKIRKVLYMCALVVKNRNKHFEKFVQKLEKKGKSAKVIIVAIMRKLMHLFFGMLKKNEKFDENLAFGD

SEQ ID NO: 355176 - protein, 394 aa, unidentified
MTATRCLDCTAPRQPKLYVAFELGWSEWKLAFAPAPGVPARLRRVPARDLEMLRREIAKAKQRFGLPEDAPVLSCYEAGRDGFWLHRCLLREGILNVVVDSASIEVSRRARRAKSDRLDAAKLLSQLLRYHGGEARVWSVVVVPSEAAEDQRQLHRELMSLKEERTEHVNRIKGLLAGCGLALATVGPKFLHQLAALRTWDGQPVPCELHQRLQREYARWQLVAAQIGELEQQRLQRIRHNPTQEIKKVRQLLQVSGVGVNTAWLLVHELFGWRRFANRRQLGALAGLAPSPYQSGDRNHEQGISKAGNPRLRAMLVEISWGWLRWQPRSRLSRWFHDRFGRGTSRYKRVGIVALARKLLVALWRYVEKGEIPEGVELVDWEAKLKGRRVALGD

SEQ ID NO: 355177 - protein, 342 aa, unidentified
MQVTTIGLDIAKNVFQVHGIDAAEKVVLRKQLRRSQVLAFFKALPPCLVGMEACATAHYWGRELTKLGHQVRLMPAKDVKAYVKRNKNDAADAEAICEAVRRPTMRFVQVKSAEQQSQLMLHRTRDLLMRQRTQVINALRAHLGELGITAAQGKAGLTELLAIIAGSADERLPTEAHASLMVLAAELQAMRTLIASIEKRIIAHHRSDEASKRLRSIPGIGLVGATAIVATITDPKAFRSGRDLAAWIGLVPRQDSTGGKQKLGPISKQGDRYLRRILVVGAHAVLKLARQKPEKYPWLTQLLARKPFKVVAVALANKMARIAWALLVKGGPYRARALVAAA

SEQ ID NO: 355178 - protein, 399 aa, unidentified
MYQASYKLRIKENKFSEGGKTKMVQSQMIQAEDNTKKHRMYIAFELSNNNWKLAFCDGFKHREKTISARYLNLLQAEIEKARKHFGMEEGVEIYSCYEAGRDGFWLHRYLESCGIKNVVVDSASIEVNRRYRRVKTDRVDAGKLLQMLVRDIAGERKVWSVVRVPSIEQEDARRTNRERDRLLKERTGHINRMKSLLILHGIRMKISKHFKEDIDRVKLWDGSTLPENIKNELRREYDRYTTVNGQLEAVQKEQEKKQTADDRISQQIEALKKLKSIGSVSSRHLILEYFGWRQFKNVKEVGAASGLAPTPYSSGSSQLEQGISKAGNYRVRKVMIELGWLWLRYQSNSKLSNWFIKRFAFGGKRMRRIGIVALARKLLVALWKYLEKGIIPEGATLKA

SEQ ID NO: 355179 - protein, 310 aa, unidentified
MGGINAAIDVGKHKLDIALGSNGALFSELNQANAIARLARRLAKLGCARVLIEGGSYQNVLVGALRAAELPVVIINPRRVREFAKSIGRLAKTDHIDARVLADYGERIQPPVRELPDEQNQALRGRWVRREQLIEMLGMEENRLEHAPKALHRSLKAHVAYLRKQIKQADHDLDRTVRNSALWDQYELLSSVPGVGRILSVALLSDLPELGRLSRREIAALAGVAPFNCDSGTSSGQRKIQGGRKRLRRVLYSATVASVRCNPVLRLFYLRLRGTGKPAKVALVASMHKLLLILNAMLKTKTVWRRPCPA

SEQ ID NO: 355180 - protein, 411 aa, unidentified
MRRVIGMDLHRTFAEVVVWEDGRLRHAGRVDMTRSGLEGFAHTLRADDEVVIEATGNAMAVSHLLRPHVARVVIANPLQVKAIAHSHVKTDKIDAGVLANLYAAGFLPEVWTPDAATERLRRLVARRNQVVRHRTRLKNETHAILHAHLIPPCPHADLFSRVGRAWLERQALPDDEHAAVRRHLRELDTLGEDLAVLDRAIGETTVDSPVVRRLLTVTGINVTVAAGLAAAIGDVRRFSSPQKLVSYFGLNPRVRQSGLGLAQHGRISKAGRSHARAMLVEAAWAAAKAPGPLHAFFVRVRARRGHQIAAVATARKLAVLCWHLLTKEADYLWARPALVANKVRGLELQAGQPQKKGNQRGPAYAYNVKALRDQEMEIARRAETAYERAVAHWTPRPPKAVRGRLKPARLE

SEQ ID NO: 355181 - protein, 368 aa, unidentified
MDYNTVVGLDVHKATIVAAVLPPRTNRPARTFTIENVPKAVERMVQSLSAKGPVKFVYEAGPCGYITQRQIAQLGQECVLIAPGLIPKRPADRVKTDRRDAENLARLYRAGELTEVRIPTHEEESARDLIRAREDAMADRLRARHRLSRFLLRQGRVFRETRSWSLAHRAWLKKQQFEWTPLQQTFEGYMRTLEDADAQMQAYDQQLNDLAQQEAYRIPVSYLRCLKGIDTLSALTLIVEAQDFRRFERAAAFMGFTGLVSSESSSGERIRRGAITKAGNAHIRRILVEAAWGNRNGGSTSPELFYRRRSCPAEVTRIARKAQLRLHRKYWRMVSRGKPHCVALAATARELAGFVWSIARHFPTRATA

SEQ ID NO: 355182 - protein, 347 aa, unidentified
MIIIGCDFHTRTEQIAMLDTETGELVEKKLEHENGEAKKFYEGLKEPALVGIESTGYTHWFAEMLAELGHQLVVGEAGKIRKMESRKQKHDRRDAEHILNLLVRGDFPKIWLPSAEERDVRVLVEHRHQLVQLRTRAKNGLQAMALNYGVRRRSRLWSAAGREELQKIPLREGMARRREDLLRMVQQLDTWVKELDQRIEQEVARREDARRLMTHPGVGPLTALETVLVIGPVERFPDAQHFTSYVGLIPREDSSAGRQRFGHLTKQGNRLLRFLLVEAAQTASRFDPGLRRTYRRLAFRKGAALAKVAVARKLAIHLYIMLKNKIDYAEFCRRGSHAGMLGDVALV

SEQ ID NO: 355183 - protein, 346 aa, unidentified
MSQYVGLDVSVKEVSICVVNGEGDVLARGTVPTDPDRIAKFITEYAASAERVVHESGILAIWLTRELDKRGVPIICIDARLAHKALSGRINKTDRGDAEGLAHLARTGWFTPVHIRSAASERVRVLIGTRERLIRMRKDLEAHVRGVLKTFGIRMAPIQRSNLRGGFRDQLSRAGQSDLAIELMADAFNPIHRSLCAAAEAIDDELREIARGSDLANRLMTVPGVGPVVALAYIATLDDEARFKRATDVGAFLGLTPRRYQSGDTDWSGRISKCGDRDLRRLLYSAGFTLISQVRRFSPLRAWGVRLSERKGIRHAAVAAARKIAVIMLRIWRDGTTFQWVKEVRA

SEQ ID NO: 355184 - protein, 471 aa, unidentified
MNTTPTRAKRRREVRTTSKRKVPLPLQLQRINLNAAGIDIGSEEHWAAVPPGRDPEGQDVRHFRAFTGDLCALADWLKRCEIETVAMESTGVYWIALYELLVERGFEVLLVDARRVKNVPGRKTDVLDCQWLQELHTYGLLRGAFRPADQICVLRSYVRQRSMLVAYASHHIQHMQKALEQMNLKLAHVVSDITGVTGMGIIKAILSGERDPVKLAKLRDPRCKSSEATVARALQGHYREEHLFALKQAVELIEFYQQQITVCDRQIEVCLQQFDARSTEAPLTARPRKRRRTGISFDARSYLYRITGVDLTQIDSIEANTALTVIGEIGLDMSRWATEKHFGSWLGLAPGSKVSGGKRLSGRTQPSANRAAAALRVAAQSLNQSQSALGAYFRRLKARLGAPKALTAAAYKLARVLYRMLKYGAGYVDQGEAAYEERYRDRLLRNLKRRAAELGFQITPVSSGLGQPVLT

SEQ ID NO: 355185 - protein, 339 aa, unidentified
MKAKKWIGIDIHKRQFTVCIITARKKIQTVYERTSDGIGEFLKEVDAKTMIGIESTTWTWDLVKKLRKKAKDVLILNTLELKGLMDRYKKTDKSDAEKIGIIVRRFEKGELSLCHMRKEKEAVVQGMLNQREHWVRMKIMTKNQFRSMMEYWGMELPQGYFKDLEKDSEWLSSSELDENLQKALMRSLGLITEYEDHISFVNEKIKEILADNESYQVLQRKITGIGPTTAAYLVAKIGDIERFENPKKLTAYLGFAPRVKESDGKGHNGPISKNATKGFLRVMVQAAWASVRFNKNMNEYYKRLKQRRGSSRAIIAVARKLIVAVFYEYKKSLMQRLDF

SEQ ID NO: 355186 - protein, 363 aa, unidentified
MFICFVHRIIKSIKFVISKLESFDKNSIIIDPPSTAHYGDNLVRYLVAEFCQVCVLNPIKTCQMRKNNVRKTKTDKLDTFVIAKTLMMQDDLRFIGFYDLDMMDLKALGRFRQKTIKQRTRLKIQLTTYVDQVFPEIQYFFKSGLHQPAVYALLKEAPSPNEIASMHMTHLANLLKVNSHGHFTKEQAKELRVLAQKSVGANDSAISIQITQTIQQIELLDSQLEKIEAEMTDIMKFNDSVIMTIPGIGYINGGMILGEIGDIHRFSNPNKLLAFAGLDPSVYQSGNFQAKTTRMSKRGSRVLRYALVNAAWNVVRNNATFKAYYDAKRAEGRSHYNALGHCAGKLVRVIWKMLTDEVEFNLE

SEQ ID NO: 355187 - protein, 349 aa, unidentified
MNRLKNSRYTLFIGIDVSKLTLDVAILKCDSFVQHYQIGNNTTAIITLLEELTSKHKMVLSKAVFGMEHTGIYCMPILDVLLKRTANIVLQDAGHLKKSMGTIRGKDDKSDALRIAAYLIKNRDHLVLLNAKRKVLDDLGRLSTLRDRMVSVRHALSVPLKEEKRFNPGAFSETLNSICADSLTALENDLKKLEIHVESIWKNDERLNKLMNLITSVPGVGPITAIRILVSTNEFITINNPRKFACYCGVAPFNYSSGTSIKGRTKTSKIANRKLKSLIHICAVSAKRFVPEISTYYERKTAEGKHKMSVMNAIRFKIIGRIFSCVNRSEPYRENYVPANLKTIKNTIT

SEQ ID NO: 355188 - protein, 345 aa, unidentified
MSNNIHFSCICGIDIAKKVMQVFKVTSDGVVTNPSVSRKDFLEHFRNIPPALIGMEACATSQHWGRELQGLGHTVKLLSPKAVKPYVKGLKNDRNDAEGIYRALIMGVREVSIKSTAVRDLSLLQTMRAKRQRDKVATINHIRGILAEYGLVMGKSVRAFLSNAGTLIARLKESETTSQLVISELEKLLKEVKEIVSRIEELESSIKKIASENKNYDLFRSAPGVGPITAAMMVVLLCNPTVFKNGRDFAAYLGLAPMSFGSGGRNQVTGIPSKYRCHNEARSLLVQCAHSITRLKYKSDWVASILSRKPKKVAIIAIANKLARQLWVMAKKGDKFEKRLVLAAV

SEQ ID NO: 355189 - protein, 412 aa, unidentified
MDVYCGIDWAEDHHDISVVDRDGQLLARRRISDDAAGLAALLGLLAEHGDNPGDLIPVAIETPRGLLTACLRATGRKVYPINPMSVARYRDRHSVAGRKSDHGDSFVLANVLRTDMHAHRPLPADTELAQAIAVLARAQQDAVWDRTTAHNKLRSCLREYFPGFLAAFADARGGITRPEARIILAAAPTPADAATLTLTQLRGLLKKAGRIRGLDTEATRLRDAFRVPQMRQLPLVEDAMGRQALALLGQLDAACAAADGLEQAATQSFNLHPDAGIITSFPGLGALTGARVLAEIGDDRSRFQDAKGLKAYAGAAPITRASGKTKSVTHRRVKNNRLNAAGYSWAFSALTASPGARARYDRRRDDGDRHAAAQRNLFGRLLGCLHHCLTTGQRYGETIAFPAIGKELPQAA

SEQ ID NO: 355190 - protein, 354 aa, unidentified
MKKECNTVSFKNQVIYVGIDIHKNSWQVSIRHCRHQLANFSMNPDALKLAEHLRRNYPEAEYRSVYEAGFCGFEIHRSLCGLGILNIVINPADVPTSGKERANKNDSLDSRKLARELENGSLEGIYIPQEDNLVLRNLTRRETQLTGNITRVKNRIKSHLYFNGLKFRSWAGSSLKIMEADAVKRHDFALCSLLRELRFLRLEKLQVVRDEKECLKFLNREKTQVNLQSIPGIGFRTAVVLQSELWDLKRFPDKDHLKSYVGLAPRLVGSGEHEEVKSAGNRKKKQLHYLLIESAWRAVRFNLEYRARYGLQIAKGTNPQRAITIIAKKLLMSIHAVWTQDRNFKVLLPRTSKF

SEQ ID NO: 355191 - protein, 343 aa, unidentified
MEKITTIGFDLAKSIFQVHAVTGDGKVAVRRSLRRSQVLDFFRSLEPCLIGIEACGTAHYWANAIGEFGHTVRLMPPAYVKAYVKRNKTDAADAEAICEAVTRPTMRFVPVKSAEEQSAGMVLKTRELLVRQRSQMSNAMRSHMAELGIIAATGMPSIAKLVVIVRDEEDHRLPPSARAALLEMAEQIEILTERIEKLDCKIVTAVKADDAARRLTTIPGVGPIIAATVRASVPDPAGFRTGRDLAAWIGITPRANSSGGKERLGKISKRGNKQLRTLLVVGATSILKQARRGAKLPAWIASVLERRPYKVAAVALANKIARTIWALLVKGGTYQAPTIMTKA

SEQ ID NO: 355192 - protein, 421 aa, unidentified
MNNQVIQSTSKKQIEFEQIIDRGCGIDVHKDIIVATIKGTGLYEETKTYNAFTESIEQMRDWLLKNRITHIAMESTGVYWKPIYNILEGHFEILLVNARHIKNVPGRKTDKKDSKWIAKLLLSGLLKGSFIPPVEIRELRDLTRYKRKIIQQIASEKNRIQKLLEDANIKLSSVVSNMSGVTAVRIIDSMIAGEEDIDKLVDMKHGKMQVSEKDLAAALKGNLTEHHKFMLQTIKSSIQDKESLIEKIDSRIEKHLKENELELDAELLTTIPGVGKDGAAYIIAEIGTNMAQFPSEQHLASWAGMSPGNNESAGKKKSSRITHGDKNLKPILVQCAWAASRTKKTYLRSKYDSLIVRRGKKRAIIAIGHKILIAAYFILKNKIAYKELGAEFLQNRQKNKQINRYFKKLKELGVEIKTNVA

SEQ ID NO: 355193 - protein, 340 aa, unidentified
MKITTIGLDISKTIFHMFAVNQAGKLVKNRVIKRADLLSVFAQLESTLIVIEACGGANHWAREFIKLGHQVKLIAPQYVVPYRRKNKNDFNDAEAIAEAAQRPNMTFVPIKSVEQEDIQMVLRMRKRHVKTMVAINNQVRGFLAEYGLCAAKGKTALAARLPEFIDDESNELSTFARESFRELYADFVAAQEKVEFYTKKINVYTRNNPICKRVKSVIGVGPMTAAELYASIGDGKMFHNGRHFAAWCGLTQRQNSSGGKTMLSGITKKGNPHLRSSLIHGARAALQYVDGKDDKLSRWAYELKCRKHSNVACVALANKLARIAWSVIANEEDYRLEYAA

SEQ ID NO: 355194 - protein, 276 aa, unidentified
MEVTTIGLDLAKNVFQVHGITEGEEVVFNRPLRRAQLLPFFSKIERCLIGMEACSSAHYWARELTALGHEVRLIPPIYVKPHVKRGKSDAIDAAAICEAVTRPTMRFVAIKTVEQQALLSLHRARDLLVRQRTQLINGLRGMVAEFGVCIARGLARVIGFAEDILAGEVLDLPEIANEVIYNMCEHLMAQHARIRWYEDRLKQVAKDDARVRLLRTTPGVGAMTASAIIASIGDGHQFSNGREFAAWLGLTPANKSSGGKEKLGRIEAKFLGSDLI

SEQ ID NO: 355195 - protein, 350 aa, unidentified
MMVIVGIDAHKRTHTAVAIDEAGRKLGEKRTTSTTTEANLELLRWADAFGKERRFAVEDCRHLSRRLEADMLAAGEELVRVPPKLMAHARDAARTYGKSDPIDALAVARAAWREPSLPRACLDGPSRDLRLLVDHREDLVRERTSQVNRLRWHLHELDPSWDPAPRSLVRFKHLDALGARLDGLGGTVAWVARDLVARIRELTVAANELERRIVEQVSRLAPALLGLAGVGGLTAAKIVAEVADVRRFHPKDAFARHNGTAPLPVWSGNLVRHRLSRTGNRQLNAAIHRIAVTQMRIHDGAKLYLGRRIAMGNTKTEAIRALKRQLSDVVYRTLMTDAVSTQVARFGEAA

SEQ ID NO: 355196 - protein, 428 aa, unidentified
MADRANATPGCNLVAIDVGRYSNAVLIEATSGKRHRFKMANTAADFGRLLGFLRGLPGSCRVGLEPTGDYHRPIAHRLLSAGFEVMSINSVALSRYREAIFNSWDKNDPKDAGVILEMLRRGAVQRYVDPMVAGTHDLQELAKTYYQVSRARTKVQHSLINHGLPLYFPEMHRYWATTRNEWFVRFLLQFPTPAHVRSLSCAQFVEAAWHVVGRKVNKRAKLEEIWEVAGSTAALPHALDSLAVETFRITLRRYQELNALRGELEQRAERALEANADFAHLKTLPGIGAVIAMTILAEGGDLRRFGHHRQFLKYCGFDLAKNQSGTQRGKEQLSKRGNARLRLAFWLAAVAAVHMRENSFRAKYERYIRTAPEDPDLRRKALTAVAAKMARVAYGMIKKNQPYRQFFEQSLPSGSIPLSAAVGAYATP

SEQ ID NO: 355197 - protein, 320 aa, unidentified
MAMTVLQSIIGVDVAKAEVVVCHIETDELKIVPNNKTELRAWLKSLPVDSAIAIEATNIYHLDTVNLAHGMGHKVYVIDGYRLNHYRKSTGGRAKTDASDARLLARYLKNEQADLRAWNPPPKIYTKLQSLLRRRAALVKMRVGLSQSWAGEPLLKASSKNVSACLARHERLIEKRILDAVTEAGLLHQIKRCQAVEGIGFLTAVALTMAFQRGEFESADAYIAFLGMDLRVSDSGQMSGRRSLSKKGDSEIRRLLHNAASAGIKSNAWKPLYEGYLGRGLKTTQALVIIARKLARIAFSLMKNLSEYQSKAVLGASPQP

SEQ ID NO: 355198 - protein, 347 aa, unidentified
MRFYTTQHRYSCGIDLHARSMYVCILDQGGAVLVHRNVSTNPEAFLRVVAPYRDDLVVAVECLFTWYWLADLCAREGIPFVLGHALYMKAIHGGKAKNDKIDAHKIAVLLRGGMLPMAYVYPAEMRATRDLLRRRCHLMRKRAELLAHIQNTNSQYCLPPFGKKIAYKANRTGVAARFVDPSVRKSIEIDLALIAHYDALLTDVELAITRTAKVHDVNAFYRLRSVPGIGKILALVILYEIHDIARFPTVQHFASYARLVKCSKASAGKRLGTSGAKIGNAHLKWAFSEAAVLFLRQNPPAQRFVEQLATKYGKAKALSILAHKLGRAVYYMLQRKEAFDVAKFFNS

SEQ ID NO: 355199 - protein, 352 aa, unidentified
MLAELVDHVIGIDPDRDWITAAVVDAKTTGVVATAKFAANSDGYDEAIEWADTHTTAGDRSWAVEGSGSYGRGLAAALSRVGEWVSEFDRPHQRPTKDGAKTELDAVRAAREVLGRHKLHTPRSHDGHREALRVHTVTRAGVVRARTAAINELKALVLTSPDELRSDLRGLTTPALIKRCAAFRTTTKRPIAEQCVRDTIRVIARRVQHFNDEIEVHDVAMKQLVDEAAPQLVAQPGVGYATAAMFIIAWSHPGRCRSEAAYARLAGVAPLPANSGQSQDRHRLNRYGDRKLNRACHMVTLVRMHHHEPTKAYIARRRAEGKTDHEIRCCLKRYIARNVWRLLEHQSPRITA

SEQ ID NO: 355200 - protein, 370 aa, unidentified
MQSSIIMSQDLKKRTSQKTESEFLKYSVGTDMGKDQFDACISVIDREQNVKPIAQHKFNNTPRGFMEFIEWQVRKCKLPIPVVFAMEATGVYYERLAWYLHRKGLSVSVVLPNKARRYLQSIGLKSKNDKIDAVGLAQMAAEQRLSTWRAPDETIIQLRDITRQRESLQVTRTRINNQLSSYSCGEFVNPAIVKNYQKIITLLDEQIKATEKMINENISSNSKLKERVDNILEIKGISRITVATVVAETGGFEMFMNQKQLVSYGGYDVVENQSGKHVGRTKISKKGNAHIRRILHMPALNVVRYGEPVFCNLYTRVYGRTKIKMKAYVAVQRELLCLIYTLWKKNEKYDRNYHEHPVLPSRSSSFRLAC

SEQ ID NO: 355201 - protein, 350 aa, unidentified
MSQLIRIGMDTSKKVFQLHGVDADERVVLSRKLSRHQMIRFFTNLAPTVIGIEACGASHHWARTLGALGHEVRLMAPQLVKPYVRRSKNDAADAEALCEAMSRPTMRFVPVKTVEQQAALMLVGMRERLIGRRTQLANSIRGYAAEFGVTAPAGLSRVAPFLQKIASEETLPPLARDLFAQMAEEYEVLMEQIRELDKKLATWHRSQEVSRRLSGIPGIGPLAAALLLMKAPDPHLFRSGRDFAAWIGLTPRDHSSGGKVRHGGITRAGDSRLRSTLVVGATTVLRHVRQNGQSRLATPWLLSLLSRKKPKLAAVALANRMARIAWKLMTSGETYRKPVDAVALAAAAAC

SEQ ID NO: 355202 - protein, 323 aa, unidentified
MTCVIGIDIAKHTFDIAKPLERDKYRTKAKVANTPEGFKQFDQWLEKHAEPHCWVLMEATSVYHEALATHLHQQGYQVCVINPARIAKYAQSELRRVKTDKTDAKLIARYAQRHLEELRPWEPEPESIRQLRGLVRRLADLKELAQMERNRLDVSAESAQASIRIHLEHLDGQIALINTAISDHIDNDPDLREQKRLMKSIDGVSDGTTATLLAELGSPLRFDSARQLAAFCGLNPRLQESGIYRGKSTISRTGSGRLRAALYMPALSAMAYNPVIKAMKVRLAERGKTGRLAVCAAMRKLLHIIYGVLKSGQPFDPIRALAR

SEQ ID NO: 355203 - protein, 373 aa, unidentified
MAAQIDTNLNLNIAGADLHVDNIYVTYDRLDRSVITKVFQYEREDLIRLAEELLSNAVKKVFVESTGSYYFPFALTLESRGIEVYIFNAFKTKNHDIDKRDDLDSAWLYALGKTGKVKASRPIDANMIALREAVRLRFKVADMIAASKKRIEAMLWRFGFIAKGVSKRLDGRRFREALKNALKGRVSKKFKNCSLIVWIAERARSGFQGFDLILNELSELEHLIKRREWLDERIRELAEPYRDQIKVLMSIPGIKFTLAVAILSEIGDINRFPSARHLVSYAGLRPTLRQSGKKRRHGKTSKKSNSRLRRFMYLAATAAMRSKDHRVRAFVARLRARGKHYKVIAVALARKLLYIAWFLLVRGECWRSVTPIR

SEQ ID NO: 355204 - protein, 354 aa, unidentified
MSQNPNIAVAVVGIDIGKNSFHVVGLDQRGAIVLRQKWSRGQVEARFANMPPCLIGMEACVGAHHLSRRLKALGHDARLMPAKYVRPYSKGQKNDFRDAEAIAEAVQRPTMKFVATKTTDQLDLQALHRVRERLVSQRTGIINQIRAFLLERGVAVRQGLRFLRAELPRILATPPDVLSPRMVRVIEGLAGDWRRLDERIESLSGEIEAIARQDAGCERLMSVPGIGPIISSAMVAAIGTGDGFSKGRDFAAWLGLVPKQISTGDRTILGKISKRGNRYLRVLFVQAAWVVLIKPKTWERHGLKPWIEAAKKRLHRNVLAIALANKLARIAWSVLARGRAFEVRKVDEAAAQPA

SEQ ID NO: 355205 - protein, 352 aa, unidentified
MLIIGCDFHPGFQQVAIFDNQTGEYQEKRLSHREEAEQFYRALRGQSVRVGMEACGHYPWFERLLAELRFELWLGDAGKIRAMVVRKQKTDRRDAEHLQVLLREERFPRIWVPTLEERDARQLLVDRHKQVQARTRTKNQLHALALSQGVQRKRKLWTECGRAELEKLELLPYAASRRQRLLETLDRLEAEIAALNRQVEEEVKQRPQAMRLMTHPGVGPVTALAMVLTLGPAQRFASARKVGSYFGLIPSERSSGGRQQLGHISQQGSSFLRFLLVEAGQSAARYDAELGRFYRRLAMRKHRALAKVAVARKLATRLYLMLREDWNYAQLCRAVVQVSPSHSVDGRQKPAA

SEQ ID NO: 355206 - protein, 375 aa, unidentified
MAKNTRFVGLDVHAETISVAVAEGRNQVRSLGTIANRPEAVRRLLGKLGKLSELRVCYEAGPTGYALYWQLTQLGVQCEVIAPSLVPMKSGDRIKTDRRDAERLARSYRAGDLTAVWVPDSKHEALRDLVRAREATKEDQLRAKHRLLKYLLRYGQRPADDGRSWTAAWWQWVRALKLPHPEQNTTLLELILEVDHQGQRVERFDAAIDQAVDAAPEQLRAIVDALQALRGVAKVTAVTLATEFGCFSRFEKAGQVMSYTGMVPSEHSSGPKTRRGAITKTGNSHLRRVLVESAWHYRHQPKLCKRQKELQSSLSPQVAAIAWSAQQRLHRRYWALQNKSKPSAKIVTALARELAGFVWAIGVETERALKLGKAA

SEQ ID NO: 355207 - protein, 312 aa, unidentified
MAMLSFCGIDVSKDRLDVVVLPEGWFFSVSNDTAGWAELVVRLRPLTVSAIGLEPSGGYERGIIRALLAAGMSVRRINPNKLRQFARARGVLAKNDRLDARLIAEYVAIMPTRVVQRDAAVERLAEIVTMRRQLCDEHVAAENQAAHLEDAMLRRLSKRRQMRLEADIRLLDKRLAEMVAANVALAQRYELLTSMPGVGPVLAFTLIALLPELGKMTRKQIAALVGLAPYDFDSGKLKGHRSIYGGRMPVRNVLYMAALSASRYSPALKTFHKRLAAADKKSKVIIVAVMRKMITTLNAMLRDSAAWQPRTA

SEQ ID NO: 355208 - protein, 350 aa, unidentified
MVVGIDVHKHTHAAALIDDRGGQVAALSITNSPKGYRQLIDWLVDHDAASAVVGVESPGSYGRCLVTALCGAGFEVLQVPAWRTHRERHHRGPGKTDPGDALSIAHVVLRHRDELGPAQEPELVRALGMLELQRRRFVRDRTQAIQRLRSDWTQHDPVAEAAVLRCDRQRELRQLKRIRLGDSLTQRTAARCIRELANDIEELNHKIAALDAEIADLLAEHDNPFEDLLGAGTNLAATIIAQAGDVRRFRNASAFARFCGAAPIPCGSGQTSGRHRLHRGGNRQLNAALYRIAIVQQRHHPQAKAYLARKIAEGKTAREAIRCLKRHLANVVYRRLLTWANTTPAFTNLT

SEQ ID NO: 355209 - protein, 407 aa, unidentified
MDLLKTVFGIDVSSRKSNVCIMVNGQKVNDYAISNDMVGFNQLLDDLKQVTKPQIIFEATGVYSRRLQAFLDMHELRYVMMNPLEAKRKTKDDLHQNKTDKLDALYLAKLQSEHPQRLAYVQSKEYQELMANNRIYEQASHDLITNKNRLHKAVQLTFPEIEHLLANPRGKNYWSIALRFPHPDIVLETKETDIIDFLKGLSGIGKKRANDITQSLIRLAKVACPAVKKNSAHIRGLKMAINNILSAEEECQTALQEMAKLAPKRDLEILTSIPGIGENTALRIISELGDIRRFNNPSQLNAFVGVDPQVYESGNLTAHLSISKRGTAIGRKVLYLAINQIQSAKKAGNPCHIADYYEKRKRSSETASHKKAAIASIHKLLRTIFALIKNDQLYSYDVAKHNQRLLS

SEQ ID NO: 355210 - protein, 409 aa, unidentified
MEVLITHGAGVDVHQATVVATVRVSDDRGGRRSVTETFGTMTADLLAMREWLQAYGVTHVALESTGVYWKPVYYVLEDGFTLLLINMQDLKRVPGRKTDVKDSEWLAQLLECGLLKPSFVPPPPIRELRDLTRYRVQQLRDRTQEVNRLCKVLEDAGVKLTSVLTEVMGVSGRAMVRARGEGTTDPTVLADLARGKLRQKLPLLQRALQGRFGRHHAFLIEQIFAKIDFLDDTLGRLTAEIESRLAPFEAMLTHLDTIPGVDRIGAISIVAETGGDMSRFPSAGHLCSWGAMCPGQNESAGKRHSGKTRKGNRYLRRTLIQAALGATHKNGSALQSRYHRVKRHRGHKKAVVAVGHQILEIAFYVMRDGVSYDELGGDYFDRRHAERAVRRHVRQLEALGFQVTIEKAA

SEQ ID NO: 355211 - protein, 402 aa, unidentified
MYFCGIDWSESTNALAIVDPAGALVEDTTITHSAQDFQRLLIVLETLPVPRDQILIGIETPHHALVDWLLDREYSVYALPPKVVDRARDRYRSSRAWTDAHDAYVIADLLRTDHHRFRPLAPGSDLARKIGFLSQARQQTRDRNSQVTQQLRSALQRYYPTLLAYWRDLDRPSVVTLLEQYPTGAALQQADADEILATLKAHGVHQPRFHEKVLALRKTPPVPVHPVVREVGVQHVQGLVAELRVLRQQLTAYTQALEDCLAQHPDTAIFASLPMTGTILTAGLLGHFGDNRERFPTVGEVRAHAGTAPVTQQSGGACRVCFRFACDTRFRDCLHQLAFVSLRQADWAQAYYADHRDQGKNHPHALRCLANVWLKIIHAMWRDHTRYDPERLQADRHRNQAA

SEQ ID NO: 355212 - protein, 394 aa, unidentified
MPRCHDLSRSFVALDQGSTLIAVIEMSRMSWLVGALVPGLERDPLKKLEPDAAGLLALLHRWRDAAEQAGGQVRRIAVAYEAGRDGFWLARWLKDQGIECYVIHASSIAVSREHRRAKTDRLDAALLKRAFLGWLRGEKDHCRMAAIPTVAEEDARCPHREREVLVAERTRLINRLKSALVRFDLSTLALGRATSPRRLEQWLSEHGHALPPHELARFRRGIARLRLIGTQIAEIEADRLARIGSQRDPMAVDGKAVERVRALASWKGLGLPTADLIDCEVLCRNLPDRRAVARYGGLTGAPDESGAKRREKGLAKAGNARVRHAMIQFAWRFLMFQKDSALAKWYRLRTEHAGKTMRKVMIVALARKLLIALWRFATTGMVPQGVVLSAPAQP

SEQ ID NO: 355213 - protein, 359 aa, unidentified
MCQSGGVEAPLKEASVSQVTTIGLDIAKNVFHAHGADERGAMVFSRKLTRAKLLEFFAGQPACVIALEACSGAHHWGRELRTMGHEVRLIPPSYVKPFVKRSKNDAVDAEAICEAAQRPGMRFVAVKSEDQQAAGLVFRTRDLIVRQRTQLINAIRGHLAEYGWVAPRGRAHMAMLADLLEGDEITSTLPEAARPMFTLMVELLGDLDARIATLDREIARRVKDDEDARRLMTIPGIGPIAATAILALAPPAETFRKGRDFAAWLGLTPRQHSTGGKQRLRGISRMGERTIRRLLIIGGSSMVRQASRFGAPAGSWLERMMARKPRMLISVALANKMARMVWALLTKKEDYRAPAAVAA

SEQ ID NO: 355214 - protein, 366 aa, unidentified
MYKRQAFHNLLQKLDGEIRIVMEATGIYHLPILIFFHNKGYFVSVINPFAMKKYAKDNSIRGAKTDKLDSIMIANYGIEKWFKLQRYEGDEEIYAELKLLGRRYRYYMELHVKALQELTHILDYVMPGIKKLFSSWNEANGKDKLSDFVERFWHFDLITSMSLETFTDEYLVWAKEKKYHRSRSKAETVYELASSGIPTLPSSTPSTKMLVQEAISVLRTVDSSLSLIVTRMQVLAKSLPEYSTVREMGGVGDVLAVKLIAEIGDVRRLHSAKALIAWAGIDPPPYESGQFIGSKRKITKRGSSTLRKIGYEVMRVLKSHPAPKDDAVYNYILKKEGEGKSKKHAKIAGLNKFLRIYYARVIAVYQ

SEQ ID NO: 355215 - protein, 408 aa, unidentified
MVTPIVKRCAGLDVHKMVVMVTVLLEQEDGSIAEETREFGTFRKHRRQMCRWLKGHEVELAVMESTGIFWKSIFTSLEEAGINTYVVNARYVKKVPGRKTDVSDSQWLATLGRLGLLKPSFIPPKDLRELRLITRHRVKLQGMLAAQTNRLHKVLDDAGIRLGGVVSDINGLSARALIEGLIDGKAPGEIVPHVRGRLKEKIPQLLDALDEPLGERHRFLLQSIAQHLCYLEQEIDNLDKYLFAAMIPYQRQWEILQTIPGVDAVSAAMLLVEIGVDMTCFGRAERLASWAGMCPGNNESAGKRKGGRIRKGNWALRRLLCEISNAANKTKSQFRGQYQGLVIRRGHKRAIIAVGHKVLRVVYAMLKSLQPYRDPEIDYTGIVVQRNAPRWLAALKKYGFLPDMIKAA

SEQ ID NO: 355216 - protein, 351 aa, unidentified
MIIIGCDFHTRYQQIAMADDETGELLLERRLDHESGEAQAFYRSLQGPVRVGIEATGPIHWFERLLAELGHELWIGDSAKIRASEVRKQKTDERDARLILDLLLAKRFPKIWVPTPTERDLRQLLWHRHKLVCLRTMLGNQLHFLAMSQGLCRKRKLFTKKGRADLAGLALGPWTRRRREELLKLLDQLDPAIAELDRAVLEEAQRRDDAVLLMTHPGIGPVTSLAFVLAIGPVSRFPRSKKIASYLGLNPSEESSGGRQRLGAISKQGNTMVRWLLIEAVYPAVRKDLALRQDYQRLKFRRGHAVAKVAIARKLAVRMYWMLRSGAAYAQLVRRQGSPGATLVNASSSLG

SEQ ID NO: 355217 - protein, 315 aa, unidentified
MDERTQTIVGIDVSKEQLDVHLLPSGEHFTMPRDDAGLKTLSKRLAKQALQVVAMEATGGLEGPVAAALHAAGLPVRVVNPRQVRDLARGLGMLAKTDAIDAAMIARFAEAAKLTGAPVPDAEAQHLAALVARRRQLLGMATAENNRLQQTADKRIRRSIQRLLRSIEAELEDVDRDIANAIEASPLWCDLAKLLDAQPGIGSVTAQTCIAELPELGRVSNKKIASLVGLAPHARDSGTMRGKRTIWGGRAKVRSALYMAALSATRCDPILKEFYRRLLARGKLPMVALVACMRKLLVHLNAIAAKYYAQLEQIA

SEQ ID NO: 355218 - protein, 354 aa, unidentified
MSKVKTLSFAGETICVGLDAHKTNWKIHSRMGNVDLAAFCQDPNPSVLNNYFKRNYPGAKVRVVYEAGFCGFGIQRSLRQLGVECIVVNAADVPSSDKERKRKDDKRDARKLSRELAEGNLKAIYVPSVEMEQARSLIRQRYRLVQDQTRCKNRIKHMLMFNGIGLNRDKERWSNQYVKALEEVQCGSVALREALNLALEQYKQIRLILKQAEQAIRNMAIQSPFAQVQQYLQSIGGIGLINGMVIQTEIQDMHRFKTLNQLCDYAGFVPDISSSDQKKIVKGITYRCNEFLRKAIIESSWMLIRHDPAMLMKYTEYRKRMSKNKAIIRIGKHLLARIRYVWNNQKQYENGIVM

SEQ ID NO: 355219 - protein, 400 aa, unidentified
MLSIGIDVSKGKSTVCGMKPGGEIVYTPFEIQHTREGMSELVSLLHNSGEEVRVVLESTGSYHCPVVAALLENGIFVSVVNSLRMKRFCSQSIRKVKTDRIDAMQIALYGLAYWQELQPTRLPEDTYRELQLLARQYYQMTSMLIKAKVDFNAICDQVLPGMQELMSDHAGRHKLSDFVLRYHHTTHILEMGETRFRKDYCKWAEKKGYRNRERMAALIFATAQNGIPVLPNAPSTQIVITEAIRVLRTVEASRDAILTQMQALAKTLPEYSLVREMPCIGDTLAPRLIAEIGDVRRFHSKRALIAYAGIDAPPYQSGKFRANNRHISKRGNRYLRKTGYEVMQSYVMHKPANDPIFTFIEKKRSEGKCGKLAMVAGLNKFLRIYYGKVTELYRSLPAIE

SEQ ID NO: 355220 - protein, 317 aa, unidentified
MEVSSMFVGIDVSKATLDIAIRPSGERESVSNNESGIKALITRLAEVHPALIVLEATGGVEHQLTRALVSAELPVVVVNPRQVRDFAKATGQLAKTDAIDAMVLARFAEAVRPAVRPLPDETLLELRALIVRRRQLTEMIVAEKNRLGTVSKTVTKRIAAHIRWLQAELGRADKDLDQSIRRSPIWQENQDLLRSVPAIGPVVSRTLLAELPELGQLNRKQIAALAGVAPLNRDSGTLRGRRVIWGGRATVRATLYMAALVASRRNPVIAAFYKRLRAAGKTPKLALVACMRKLLTILNSMIKHRTRWSENTPLQTT

SEQ ID NO: 355221 - protein, 347 aa, unidentified
MLYVGVDVGKRKCRTAMMNQEGKITREFDFDNDSEGISRLSSMLTMDDRVVMESTGAYWLDLYNHLDELHIPVVLANPLQTKAIAHGRIKSDKVDARILAHLLRADLIPECYVPPKEMRDIRSLVRHRLSIVKLRTMTKNKIHALVDRNGLKHEFSDLFGKSGVQWLKSLELSGLDRLMLDNHLTHLESLNTQVERVDAEITARATLDQDVRLLLSLTGVSVYTALLIKSEVGSIDRFPSYKKLVSWAGLAPSLHQSGSVEYHGNITRQGSRMLRWIMVESARVASVHDARLRVFYERVKQRRGDQKAVVALACKMLKIIWFMLTKKEKYQSANEKGYVKKLNSLDA

SEQ ID NO: 355222 - protein, 337 aa, unidentified
MEYFAGLDISMAETQICVVAQSGAVIHKAKVPSTPADIAAELAQLPTCRRIVFETGRMAPMLYHGLRQLGLPVICVESRQAYQALKLLATHKTDHNDARGLAHLARTGFFKPVHVKSLPAHAVRSLIIARKKLVGQRVTLENQIRGLAVVFGVRLPRALSSDFIRQALQASDGISGLSAAMQGLVAARAAVLAAIIAIDADIRRMVRASDACRRLMSIPGVGQLTALAFTAAVDDPDRFRRSRDIGAYLGLVPRRHQSGEIDYSGSISKCGDRRLRTLLYEAANVMLTRYKGPLKLKDWAVTIARRSTMRKARIALARRLAIIMHAMLRHGTEFKPA

SEQ ID NO: 355223 - protein, 347 aa, unidentified
MLHAGLDLGRRKLHVCLLSDQGEHLDQLAVPPDVDSLRTLARQIDEVHGEPVCAVVESMTGARLVHDTLEQEGWSVEIADAQKVKGLAPLTCKTDKIDSLVLATLSQRDLVPAIWLPDPHIREERELARFRLHLVKHRSMLKHRIHSTLINFGRPCPVTDLFGVEGRRLLERLEVPEPWRGNVTAAVALIDDLERQIAETNRRLRAGHADHPYIRLLVSAPGIGWVLAFTIAAEIGEIERFSSPEKLTGYTGLCPRVKQSGDADRRGPLTKHGPRYLRWALIEATMHALKHPAYSERYQRNKRRLGKQRGAKIAQIDVARRLAHAIWHMLTRNQKFAPRGAALRLAA

SEQ ID NO: 355224 - protein, 372 aa, unidentified
MTSIIYIGMDVHTTNYTLCCYTVDSDDAFAVVNVKPDYHEILKYMERVRSTRGGNCDFICGYEAGCLGYSLYHQLAKHGVACIILAPSTMPQQKGKSIKTDKRDAKNIAKCLAFNLYSPVYVPTAEDDAIKEYIRMRDDVKADLKRTKQQIISFCTRHGFHYEGKSRWTQAYFKWLDSLVFENALYKETLQEYLALYYTLDEKIAVYDARIEELAHQKRYEENVRKLCCFKGVSTHTALSLLVEVGDFHRFRTAQHFSAYLGLVPGESSSGEKVIHTNITKAGNSHLRTLLVESANSYSRGVVGKKSKVMKDKQGGNSPEIIAYADKANERLHRKFYKIAIRSKKNVAKTAIARELSCFVWGMMTNHISRAV

SEQ ID NO: 355225 - protein, 360 aa, unidentified
MAKARTLVGLDVHATKIVAAVLDAETGQLQTFSMSGETAKVAAFCAGLPRPVRVAYEAGPTGYGLARELAKRGVECVVAAPSKIPRASGDRVKTDRRDAEHLVRLLLAGKLHAVRVPGDEEEALRDLVRARDAVRMDLMRCRHRLSKLLLRHGIRFDDGHAWTERHRQWLATVALEWPAAQATMLDARGAIDALAHRRDGLEREIVAMLPSSPWTVQVARLRCLRGIDTLSAVGLCAEIGDFERFARAEQLMSYVGLVPSESTTGQQRRLGSITKTGSGHARRLLVEASWHYRSRPSIGRALTDRQADQPQEAIAVAWSAQRRLHRTWTRLEARAKRRTIIAVAAARELVGFAWSITQIE

SEQ ID NO: 355226 - protein, 318 aa, unidentified
MSTKNVSSEVVVGIDVSKDKVDVCILSGEQVKYFSYHQDSYDKMANIIARHKPRVVVLEPSGGYERGVLAELRLKHLPVSLVNPAKSRNFARAIGYTAKTDKLDAQLLARYGHDLRPEPMVLSDSGFDELKELAVRRRQLIKMQVMETNRYQQTFSARARRSVQDSIEHIERLLAELDDSLDSCIGQDEDLSRKHEILTSIKGVGPQTARVLIVHMPELGTLSKGQAASLAGLAPFNRDSGMWRGQRTIKGGRLVVRCALYMATISAIRYNPIIRTCYNRLKNAGKPFKVAAVACMRKLIIIANACLRKNQTFTQITA

SEQ ID NO: 355227 - protein, 353 aa, unidentified
MQVIGDRPEAASAIRTNLGAIFVSLELSQSTWLITSLLPGSSEKMSKHVVHGGDIAGLLERFARLQEKARARTGRNFPIIVIHEAGLDGFWIDRALKNEGIESHVVDPASVATSRRRRRAKTDKIDGEALVRTLLAYKRGEPRVCAMVKAPTPEEEDRRRLCRERKVLITERVKHVNRLKGLLFSQGVCGYEPLRRNRRRRLDELRTGDGRPLPKHLKAQISRELDRLELLLEQIKVVETERDALLAAQQIAAPTSAAMLLAIKGIGPDFAAILWSEGLFRHFDNRRQIASYAGLAPTPWKSGSIDREQGVSKAGNPRLRTTLIQLAWLWLRHQPQSALALWFKERVVRWRPS

SEQ ID NO: 355228 - protein, 364 aa, unidentified
MQLQGNTHNPKVYIGLDIHKKSWSVSIQTDLFFHKTYSMPSKPNDLFEYVDKTFTGHDIHMVYEAGGCGFHTARFFLNLGWDVLVVNPADIKRGDKERYQKTDSIDSKNLSNFLKRGDLKGIHIPTEEQEQFLSLARHRSQVTKKLRQTKCHIKSMLLYHGVEIPEEFDKPNWTVAFLDWLDSIKFSTTSGTLSLQGKLRMYKFVKAEYLEIANQMRAYCRKEHKNDYNLLRSIPGIGGYLASVIIAECGDIRRFNTEGQFASFIGLVPGIYNSGGSENCLGITPRSRGQLRSYLIEAAWIAIRKDPEMQAYYRKHQGKNVKNIIVKVAHKMSRRILSVIKTETPYQVNKNTILEEQLLIRYFL

SEQ ID NO: 355229 - protein, 398 aa, unidentified
MTESSDYESVQVFIGVDVGKDTHHAVAINRSGKRLFDKALPNDENKLRSLISDLKQHGQILLVVDQPATIGALPVAVARSEGVLVGYLPGLAMRRIADLHAGEAKTDARDAAIIAEAARTLPHALRTLKLADEQIAELSMLCGFDDDLAAQTTQASNRIRGLLTQIHPALERVLGPRLDHPAVLDLLQRYPSPEKLASLGEKKLAAQLCKLAPRLGKRLAADIAQALAEQTVVVPGTNAAAVVLPRLALQLITLCKQRDEVALEVEQRVLAHPLYPVLTSMPGVGVRTAARLLTEVACRAFASATHLAAYAGLAPVTRRSGSSIRGEHPSRRGNKALKRALFLSAFAALRDPLSRAYYTRKMSQGKRHNQALIALARRRCDVLFAMMRDGTFYTPQAS

SEQ ID NO: 355230 - protein, 343 aa, unidentified
MRKYAALDVSMEQTAICVVDESGKKIIEGKVQTDPDTVTTWLAEKAGSLEKVGMETGPLAVWLWNELRARGLSIVCLDARHASAALAMMPNKTDRHDAAGLAQIVRTGWYKEVRIKSHAAYVVRALLSARDALVGIRGKIENEIRGLLKTFGVMFGRKVGGFTRRAEEIVAGELAASPEIKRIIEALLEARRAILDRIKLLDSRVRSVAKANATARLFMTAPGVGAVTALSVASAYDDPARFSRSSSAGAYLGLTPRRYESGEISRNGRISKRGSKLTRKHLFEAANALLTRVGKFSSLKAWGLRLAKIAGFKKAKVAVARKLAVILHAMWRNRTPFRWSAAV

SEQ ID NO: 355231 - protein, 402 aa, unidentified
MQVDDIDVFIGIDVGKSEHWATALTTAGECLHDRPLPNDEARLREVYEHLGEHGRLLVVVDQPATIGALAVAVAQDMGITVGYLPGLSMRRIADLSPGSAKTDQRDAAVIASAARTMPHTLRSITSSDEDAAALSMLTGFDLNLARQVNQVSNRIRGLYTQIHPALEGVLGPWLEHDSVLEVIATWPTPAALRKAGRARIDAKLKANGCRRHAAWAQAIVEALSKQTVTVAGTDAAGVVLPHLARQLIALHTQRADIAAQVEALVEAHPLYPVLTSMPGVGVRTAAVFLAGTLGKTFTTGAHLASYAGLAPVTRRSGSSIRGEHVSHGGNKRLKQAMFLSAFASLRTDPVSRAYYERKRAQGKRHNQAILALAHRRILTLHAMIRNGTLYNPQPAQPLTTTA

SEQ ID NO: 355232 - protein, 425 aa, unidentified
MWADGVYFNARIEGERSCILVIIGAKYNGEKDNMKCLPRLRVRGFDGYRLTTYNTQEADDMNSVRYIGMDVDKQKIAVTVLADNERESSFESVIANEPAKIVRFFQRQKSECENVVATYEAGFCGFELYRQLVDMGVACLVAAPGLIPRKPGDRVKTDRRDARKLAKDLRNDELTGVFVPTREDEQVRDYLRLSEDFKSDLRKAKQRLQHFLLRHGQHYDGKTKWSQRHKEWLRSVKLESPLANETLSEYLCQIVDLEEKIRRIAERIESIGGESRYAEKVKKLKAFKGVETLTALSLIVEIGDFRRFSRAEQFMAFLGLVPSEHSSGSHRRMGSITKAGNSHLRRLFVEAAWHYRSYHATSKRLIARRQGVAAQLITYANRAGRRLNKKFLRLVFAGKPSQVAATAVARELAGFLWGALVDKVA

SEQ ID NO: 355233 - protein, 364 aa, unidentified
MMSDQHVHVIAGVDTHGQTHHAAVIDSLGRHLADREFPATGSGYRQLLSWLGGHGTVQAVGVEGTGAYGAELSRVLARAGLPVVEVDRPDRKTRRMKGKSDPIDAYAAATAVASGRATGVPKTRDGIVEAVRALRVPRRSAVKARTQAINQARQLVITAPEELRAQLRGLPARELAVVCARFRPSDLASPLGATKAALRILSRRILALSEEIADLDVELKALTAQTAPTLMNRMGVGPDVAGQLLATAGDNPDRLRSEAAFAHLCGVAPIPASSGRRDRHRLNRGGDRAANHALHTIALSRMRWDERTRSYVDRRTAQGLSKKDIMRCLKRHIAREIYHALINDLQARDPATKAPTTADLAKAA

SEQ ID NO: 355234 - protein, 338 aa, unidentified
MELYAGIDLHSNNSVVTVLDEQDRTVYAKRLPNDLGSIVVALRACAGEVRGVAVESTFNWYWLVDGLQAAGFTVHLVNTAAVKQYDGLKHGGDFSDARHLAHLLRLGILPVGYIYPREERAVRDLLRKRSQLVRQRSTQILSIENLIARNLGVRASGNEVKRWDAKCIDAMELLDEQKQAVKANLVVMNCIDGQVVQLERRILAKAKLRKDFKALKTVSGIGEILALTIALETGDIGRFAGPGNFASYARMVDSRRESNGKKKGEGNAKCGNKHLAWAFIEAAHFAVRYDAAIKRWYQKKCASSLSVVAIKAVAHKLARACYHVIKDGTPFDAAKAFG

SEQ ID NO: 355235 - protein, 444 aa, unidentified
MVCSGMILIHEVADAPVIMGISKPAGLKSPCGEVKIVNPLFVGIDVSSRSNVAYLMKPDGSKHSSFSVQNNLGGAKMLSERIVSALSSMRLSDVVIGLEATSIYGNNLVYALREDGSLSRFQRKIHVLNPKQVKKFKEAYPDLPKNDFVDAFVIADHLRFGRIAKEVYMDDYRYQALRTLTRARFDVIQNLTREKQRFANYLFLKCSGIAQEKDIQNTSATTIALMEHFETVDDLANTDLDELTDFIAQAGRGRFVDPDATARAVRAAAKGSYRLPKTVNDTVNQAMSVSIASMRALKEQVKVLDKAIEQQFEIIPNTLTSIPGIGKVYSAGIIAEIGDIHRFDSQASVAKFAGLVWTQHQSGEFEAEHSRMIKSGNRYLRYYLLEAANSVRRCDSEFRRYYDLKYHEVNKYQHKRALALTARKLVRLVFRLLKDNRLYLPPEG

SEQ ID NO: 355236 - protein, 352 aa, unidentified
MAERTERVIVGIDTHKTFHTIAVIGETGQEIEVRDFPADNAGYKNALAWAGSFGEVLRAGIEGVGCYGAGVFIFFRECGIEVYDVYKSDKQQRRRRGKNNELDAFEAAAAALSLKRCVTAKEKGELLQSLQLLKTTYEQAVKQRTASINALKADIVKLPDEMRRSLEGLSSDELVKTCSSFRVSKDALSLEAGAKKALRSLAKRIQGLKQEAKELDLEIKRYARMLAPNTMALPGVAHHGATTFLCAAGQNIGRFKNESSFSMLCGTSPIPASTGDKHHFRLNRGGDRKANCALHTMALTRMKNCEKTQAYISKKMSENKTKKDAVRCLKRYLSREVFWSLKADIAALALSA

SEQ ID NO: 355237 - protein, 383 aa, unidentified
MNDAKYIGLDVHQATTTAAVRDATGNLVMEAVLETKTETILQFFRGLRGSLHVIFEEGTWSAWLHDLLKPHVARVVVSDPRKNALLKDGNKNDRIDARKLSELLYLNRFTPVYHGEHGLRTLKELARSYLTITKDLTRVMGRIKAIYRGWGIPCAGQQVYAPGHRAEWLAKLSEAGVHRRAEIYYQQFDGLAPIRQQARRELLVEGRKHAAVKLLRQIPSIGPIRAALLVALLQTPNRFRTKRQLWAYVGLALRTYTSGEYRFEHGQLKRSKKVLAIRGLNRNHNHDLKNIFKGAATWAAGNTGPFQNFYEACVARGMKPHLARLTLARKIAAITLLVWKNMPTPRLCRLRNRRPRLRGAHGASRVGIIRGFLGKPIACHRVV

SEQ ID NO: 355238 - protein, 372 aa, unidentified
MNYNTVYVGMDVHKESFTLCSCRYEDEKASHYQRTPASYKNVLRYLAFLRTIYGEDTRFVCGYEAGCLGYSLYHQLENFNVECVILAPTTMLEQRSKRRIKTDKRDAEIIARSLAQHNYSPVHIPTETDNQTKEFIRMRDDHKAELKKIKQQILSFCLRQGYQYDGSGNWTAKHVKWLRSLKPAGLYKEILDEYLLTYTILTDKLNRLDQRIEELASKEEYKESVSKLTCFLGIKTHTALSVIVEVGDFQRFVSARKFAGYLGLVPGQHSSGDDRNGLGITKAGNTHVRRLLVESAQSYTRGKIGYKSRVLRSRQAGNSPQVINYADRANERLRRRYYKMVLKDGKKYNIAKTAIARELACFIWGMMTDNIY

SEQ ID NO: 355239 - protein, 310 aa, unidentified
MLTGIFVGIDVAKATLDVAVTDRPAQTFAQDEAGLRALVQYLHPLRPALIVLEATGGYETAAVSALALAALPVAVVNPRQVRDFAKATGVLAKTDRIDARVLARFAEAVRPEPRPLPTAEAKELDEYLSRRRQLVDMLTMEKNRQSIATTERMKKSLKKHIDWLEEALRRANDDIDKAIRNSPAWREQEDLLRSVPGIGPVSARTMLAELPELGRLNRKKIAALVGVAPLNRDSGTLQGSRTCWGGRASVRQVLYMAAVTAVRCNPVIRRTYAALRTRGKKHKVALVACMRKLLTILTAMVRDQRRWSPS

SEQ ID NO: 355240 - protein, 331 aa, unidentified
MKIIRVGVDLAKNVFQVHGVDRNEQPVWKRKLKRDEWIKVLLEKIEPGCEIGMEACGGAHHWARKLEALGYTVKLIAPQFVKPYVKSNKNDAKDAEAICEAMSRPNMRFVSIKSVEQQDVQAVHRVRAGLMEQRIAKANQIRGLVSEYGLVAPLQVSHLRAAIPEWLEDAENGLTSRFRRLLNGLWSDLQSLDLRLKEMDQEIAEIAAANPVAQRLQQLRGVGPMVATALLATVGDASQFKNGRQMAVSLGLTPKQSSSGGKEKLLAQIPRLKSSRPVSAGFLFFPRRAMGCRSRYCPVAKVQTRRRVHGTADCADFCGFRASQYARINAW

SEQ ID NO: 355241 - protein, 410 aa, unidentified
MRVIGLDVHRNFAQVAILDGGLVKDHGRFVMDREAVLAFANKVLTKEDDIVLEATGNTAIIVRLLRPFVRRVVIANPLQVRAIAWAKVKTDKIDAATLARLHAAQFLPEVWMPPEDVELQRRIIAERTQLVGQITRLKNRIQSILHANLIPKETGHIFSTRGRARLEALPLPADQMRMALRHHDEIGRLATELAVVDRDLAQHALADPNVKRLMTIGGVDAIVAASVLAAIGDISRFSSPEKLVSYLGLNPSVHQSGDHPAYHGHITHQGRGHARGMLVEAAWSIASSQGPLSAFFHRISVKRCKSIAAIATARKLAVLIWHMLTKRQDYVWTRPALLQYKMRRLELMAGHASRRGGNKPGSARDYSVKAIRDQERARLASAEQDYRGFVAGWRERPPAQTGPTSKAKAC

SEQ ID NO: 355242 - protein, 476 aa, unidentified
MVVPNEEPKKPTKPKKPAKPRKSRERSLPVPVPASAAALQVINPDAAGIDVHSDMHMVCVPADRDANPVRQFGANTADLQEVVAWLKKCRIKTVALESTGVYWIPLFELLESEGFEVYLVEPGQLSRCGARPKTDVLDAQWIQRLHSYGLLRASFRPPDSVLALRAYWRQRQMQVRYAASHVQHMQKAVEQMNVKLPEVVSDITGVTGMSIIGAILGGERDPVKLAQLRDERCQHSEEQIALALQGTWRPEHLFELRQAYELYQFHHRQISECDQQVEAELANFPNRAGEKTRTIRPRKHGRKSNDVRFEAAGPLFKALGVDLTLIEGIDVATALVILGEIGVDVSRFPTEKHFASWLRLCPPQNESNKTNRRHGHRKATNRVTIALRMCARSVGQTMAPLGLFYRRIRSRIGGLGAVKATAHKLACLVYRMLKYGQEYVTQSMEEYEAKVKANMLKALKRKAAAMGFELSPLPTQ

SEQ ID NO: 355243 - protein, 445 aa, unidentified
MDGRAKGEGKVEPAEKMKSSEHSSEAWLLQRAFGGLDWASQKHNVVLVDAGGKILEKFEIQHSASGWQQFRQRLEPYGSIPTAIETNQGAAVEQLVEAGMEVYPVNPKSAKAYRERKAPSGVKDDWLDAWSLADACRLDGLNWKALRPEDPLIKELRLLCRDEVGLIEQRTSFINQLRHALAEYYPTALEAFEDWGSLSAWMFVQRFPTAQALKAAGKRRWEKFLHSRHLWRSESGPRRMELFAQATQMCGSPAVANAKSQLALSLISMLFALEKQLGIYRQRIEEELFARHPDHDLFGSLPGAGPKIAPRLLSEIGDDRARFDNGPEALQCLAGTAPVTVRTGKAKTNPPRWPCHQRWAANTNLRHALHLFAEHTLSRCVWAQIYYRHHRDKGRTHSDCLRRLAQRWVKIIYRMWMDRTPYDPMLHHQNQLKHGSWVLQLNPPK

SEQ ID NO: 355244 - protein, 419 aa, unidentified
MSFKILKFNCCGLDVHKTWIYACIGITDSNNRTEYKQARFSSFTKGLNELCDWLAKYNCKDVCMESTGKYWIPVFNILEKHQIWVTLSHPKYTKPMKGNKTDRKDAKWICDLYMCGMVSPSFIPPADIRELRDLVRYRYKLTCMITGEKNRAQNCLTVSNLKLDDVFSDVFGKSARSITEQILQHPGETFDVAPFIHGRCKTPIEEIQAAIDGAISKEQAVKLRQCLDHIDELQKHISEVEQEILRLSDKYEAALNLIRTIPGFDKNPITAIQVLSEIGGDMSVFPTAKHLVSWAGCCPRNDKSARKIKSTRISRAGSYFKPVLVQVANALIKSKKHSEFTTRYKRIKARRGHKKAIIAICRMILTAIWHILTDLKPYTPEGFLESRPVKEEKILSTSQALNLLRQRGYVIKDEPLPAS

SEQ ID NO: 355245 - protein, 354 aa, unidentified
MTSTKYIGMDVHKESISIAVRNAAGKIVMECVIETKANMILQCIDGLRGDLHVTFEEGTSAAWLYDLLKPHVTELIVCDPRKNASMREDDQNDKIDARRLAELLRIDHLSPVYHGEHGLRTLKELVRSYLTVTKDLVRVKTRLKAIYRSWAIPCSGKEVYAACHRAEWLEKIKEPGVRRRAEFYYQQLDALRVLRQGVRRELLAESKKQKAWKRLCQIPAIGPIRAAALLGILQTPHRFRTKRPLWKYSGLAIETCSSADHRSVNGQLQRSKKNSVRGLNRNCNHDLKNLFKGAAVVASSKPGPFQEFYTALLAKGMRPEMARLTLARKIATIVLIVWKKGVCFDAHHLKPQTA

SEQ ID NO: 355246 - protein, 341 aa, unidentified
MICVGIDVAKDKHDCFISNSDGVVLFDAFTIPNSREGFETLFRKIESVSDDPSKVKVGLEATKHYSYNLLGFLLDKGLTTFIINPLHTNLYRKSLSLRQTKTDKADAHTITSMLMSDVNLKSYSDTSYHNEELKSLTRYRFDKVKERAKLKTSVSRLVNILFPELEKLVPTLHMASVYALLSEFLSAAETASAHLTRLTHLLEDVSKGRYGKDTAILFREAAKTSIGSHIPAKALELKHTIMFIHELSAEIDEIETEIRRIMDEDIHSPIFTILGISYRMGAMIIAEIGDFSRFDTPGKILAYAGLSPSDYQSGELDGSYACSFTSGSILAYKLADFAAID

SEQ ID NO: 355247 - protein, 395 aa, unidentified
MFNKSITHVVMETAVGKAAERSEAGFPTAAGDRSNVSGSSETATEQDRRRFLETSPNSCQSRSRRYAASSSYPQERDHSMDGSITSFVGIDIAKRSLDVCLLPEGKHLSLSYDTAGLKQLFSWLPEAGSCLIVVEATGGYQRRVVAQLADAGHRVAVVNPRQVRDFAKGLGILAKTDRLDAQVIARFGQHVRPRTLAKTHEKQDELAQLVTRRRQLIELRTAENNRMETLVSKPVRKSVQQVVDLLNKQLKRIEKEILALLESDDEWKDKGEIIQSAPGIGPVTTATLLAELPELGLLNRQEISALVGLAPFNRDSGRFHGKRSIWGGRASVRSALYMAALTARRCNPVIRSFAQRLEAQGKPYKVIMTACMRKLLVILNTLVKTNSPWNPDYAQ

SEQ ID NO: 355248 - protein, 448 aa, unidentified
MIKKELRAYTWRELETNGKFAKNDKLSFITDDMLIAGCDIGSETHYIRAIDIRGRELSSGAFEFSNTSEGFANAKAWVLALAAKNDKKQIVLGLEPTGHYWFALAAWMISNGISVVQVNPYAVKQSKEIEDNSQLKDDRKDPKLIANLVKDGNYGMPYLPEKVYADMRRLSMFRDQLTEDRIRNINRLHRELKIYFPEYMDAFGKIDGAFTLEVLKISAIPSDITALGAEGIKNIWHNVKLRGRGYSRANEIVSYAEKSVGLTDGTDAGREAVKWYAEQILRLDEQIAEIESALHEKCREIPYAENILAINGVGENILAGILAEMGDISRFDDVKEIQKLSGMGLVACSSGKHKGQTKISHRGRKRLRYWLFQAAKSAVSHADEFKQLHEYYTTRSNNPLKKMQSLVVIACKILRVIYTILKTGTTYDPQKLLKDIKHPEASQAPMAA

SEQ ID NO: 355249 - protein, 418 aa, unidentified
MASGHVNRANRSYEGGASSYAAGRPKLEDLVMLQTVASVKPSAVDYERTLVLAIESSNKSWVLAAQVPGLPYTKVKCTVNPKAEGLLAAIAGYRSRAAATGRSIERVIAVYEAGWSGFWLARWLMRRGVEVYVIQPSSVPVDRRMRRAKSDGIDAELLLRTLLAWLRGEPRVCSMVPVPDEADEDARRCVRERTELISERIGLSNRIGAVLATLGVSDYNPLLRNRNRRLAELRTGLGEPLPRNAHAKIERLLARLELVLAQIAELERERDAVVETEASDKASKMIQQLTSLRGIGVQSATVLVREAFVRCFANGKALGSYAGLASSPYSSGGIDREQGIGKAGNRRVRTVMVELAWLWTRYQPAAAQVCWFRDRVRSTGRRVRKIMVVALARKLLIALWRFIIDGVVPEGAVLKAAT

SEQ ID NO: 355250 - protein, 327 aa, unidentified
MQEKLIIGIDVSKQTLDIYLKPSNVHFKLSNDAAGFKNFKRKMKSLVSENVLILMEHTGYYSLRLEKFLALNGVSFCKIPALEIKRSLGVIRGKSDKIDARRIAEYGWLRRELLAPNAVSDDDIRQLRSLLNFRSKLVADRSGYMTRLKEMIATGASARRDLQSNCQQQIITVLTQSIKKIEAEIQELIKSNLGLQRNYQLLKSIKGVGMIVAAYMIAFTENFQKFKNARKFNCYAGLAPFAYESGTSIKGRSRVSHLANKHAKTLLNLAAASAIRHDQELKEYYQRRTSEGMKGMSCLNIIRSKIVARIFAVVKRQTPYEPLRSAA

SEQ ID NO: 355251 - protein, 346 aa, unidentified
MKIIGCDFHPSFQQIAMLDLETGELVRRRLMHASGEAEQFYRGLRGERVKVGIEASGNTRWFERLLGELGHELVMGDAARIRAMVVRRQKTDARDAEHLLQLLEREQFPQIWIPSAVERDLRQLVLHRQKLVQMRTRVKNQLQHVALNEGLQKKRQLWTVKGRRWLEDLSLPQWTERRRADLLKLLDELNATIAELSQAVEERAHQDERVRLLMTHPGVGPITGLAFVLVVGNVNRFERSKKLASYLGLIPSEESSGSRRRLGAISKQGNTLLRTLLVEAGQSASRCDPELRRAYQRLCHKKQNTGIGKVMVARKLAVRLYWMLKNQQPYQPARMQSSPSHSVSAA

SEQ ID NO: 355252 - protein, 557 aa, unidentified
MFIVGIDIAKRSHEAIIIAEDGQVVRKAFSFRNNCTGYNLLLEQVRRLTLVKSQIVFAMESTAHYWLALYARLLKDGYAVMVLNPIQSHSLRELYIRKAKTDARDSLIIADLVRFGRCKASNVPQDKILALRELCRSRAYLVDMAADLKRKLIALLDRIFPEYESLFDSVFSKASIAVLSKYSTPQKVKNANLRKLTDLLMESSNGHFGEWKAHQLKEAACSSFGIDDSGGVYSTLLGMFLEQILSLTAQADSLEKQISVFFQEFNNPLTSIPGVGTVLAATILSEIGDITRFSSADKLLAYAGLDPSVKQSGEFKSNQNRMSKRGSPYLRRAIWLASTVAVHRDPMFQTYYEKKISEGLHYMNVIGHVSRKMTAVIFAVLRDGQPYQPIFANYRLTELHHFHSARKGLGSLHPFPIYPLYTRAVILSLDKPIADCFLFRPRKRLKKHRKALYKTPTQHAQSPTISAVIFILTVSFHSCFGHSPTNGSRSLSLPKASTHSPSPAKSHTAAHRGKQGVFSCMAKQRQGQFLSLPLLIFYAMYMRIVHRKACLHLTHEL

SEQ ID NO: 355253 - protein, 353 aa, unidentified
MNDTTSIAWLGLDAHSKNCVLGQLDDHGTEVKSWSFATQPQQLIKRIKDIPATDKRLMLEESNLARWISQLLKPHVQQIVVCDARRNRLISQDHHKHDQRDAFALARLLRLNEFKPVWQPTEDQRVLFKRIAKAYENAVQRQTRLKLQLKSLFQHWGLFPAGASVYSQPGRVAWLKQLPYDPLRAQALLLYELLDQALAGQAQFRRLMCQTGRQFPEIQRLSTTPGVGLVGSHLFVAYIQDPKRFGKFSRLSRYCRLGIRDRTSDNKPLGYEQLDRQGIGTLKAISYRAYLQAAKRRTGPVWDCYQLSLRQTGSTTHARLNTQRKILLTLWTLWLTGREFDPKQFFRAQPIDV

SEQ ID NO: 355254 - protein, 324 aa, unidentified
MIDGILGIDVCKNTLDVSISSYTKVRTKSFTNSPDGWRHLLDWLIAQKIQRVHACLESTGRYSLGIACALYEADHVVSIINPAQIRDFVRTKLGRNKTDGVDASHIREYCELFKPSPWAPPSEAHRRLGELQTIRSGIIAGLTEWKNRKNSGIVDAEAQALADATISHFTSQLGAVDKAIALTIDNDCDLQSKRDLLLSISGVGETLAGVVLAELPGPDVLRSSAEVVAYAGLNPRRHQSGTCIDRATRISKIGNAVLRAALYMPALSAMRYNSAIVALVTRLKSRGRLKPKQIVVAAMRKLLVLCFGVLKTGRPFDAAIAMGG

SEQ ID NO: 355255 - protein, 388 aa, unidentified
MEWSGGTARAMHHPTTCMITNSIDGVRESEKSTGPAKAATVLSEIFLGIDTSAAKHVVTRLIPGEGPKPAEAMSTEPLVAKVAKWVNAGVAVHCVYEAGPTGFALYRRLIKTGATCLVVRPKRLEQHQRRRKNDPQDSRLLAEQLAAHHFGYSRLLVPVRVPTEQEELNRLAVRERETINRARHQILNSAKGRALALGYPLPKQWWRPRVWPKIKDSFPPELARLLERTAQTAAAMKLQLTAAEAELKATAPAAPVGVGQVTAAVLEREVCSWDRFPSERKLSSFFGLCPCEDSSAERHHLGAIDKHGSPRLRFWCQEAAWRLFKHQPDYHVIIWARRKMAGANSHRMKQIAVAVARRFLVDWWKVRTGQTTFAALGLRCAESTATTR

SEQ ID NO: 355256 - protein, 404 aa, unidentified
MFYCGIDIAKYKHEASVIDATGVALLDSISFPNSKEGCEKLLALYRRQGISKDDLLIGMEATGHYWLSVYGYLLDQGFEVKVINPIQSEAFRRMYIRQTKNDRKDSFIIAQIMRFGQFSATELAEEAVVALRQLSRYRLALVDTCGDCKRRIISLLDQVFPEYNRLFSDTFGATSKEVLAKYPTPEDLLAVSPEKLANMLEKVSHGRFGKEKAKQLKAAASTSFGVSFAKQSFALQIRQLIEQLEFLEGQIEELEEQISLLLKQTESHITTIPGIGDTLGAIILGEIGDIHRFDAPNKLVAFAGLDVRVSQSGEFIGTRQKISKRGSPYLRRAIWLAASRAAFCDPILSEYYQSLRARGKHHLTAIGAVSRKLCNIIFAILSENRPYETVPPREIRQTSAPFTM

SEQ ID NO: 355257 - protein, 357 aa, unidentified
MNYGVYCGVDFHARQQTICCLTTEDGVIATYELKHDNKEAVRNFYVQLPGPVLVGLEAGGYSLWFEQLLEELGHEIWLGDASEIRRCARRRQKNDRRDAALMLDLLVRGEFPRIHRQAPLSREILRMLRYRHRLVKIRTIIKNCLQAVAIQSGLALKSQLFTEAGMQQLTSLAMSPVMQCQREQWLQLLPVLEQRISACEKWLSQQAAADQRVRRLRTHPGLGLLTSLAVVHTLDPVARFPNQRKVAAYGGFDPCEDSSADRKRYLGISKAGSKLLRFLLIEAGQAAVKEDAELKRFYRRLQQRRNKPKAKVAVARKLLIRSYILLRDEIDYAEFQRRAVAARLARENARLPCLSSD

SEQ ID NO: 355258 - protein, 318 aa, unidentified
MSKSITVAAGIDTSKDKLDVAIHGCAEQLQVGNDAAGHRSLLAWLRRKRVTRVGIEASGGYERAVVAELRRAGFVVIVFQPIQVRAYAMFRLQRAKNDKIDAALIAACTAAGEDKIRPAPDARFAAFAEHLTLIEQIEEDAARYKTRRDTFLDKTNLQLIESEIVRLQAWRRRELKRLREAIYAHADLKQRFRLIHSVVGIGGRTALALLVRLPEIGLLTRGQAAALVGLAPYDDDSGRMTGQRHIAGGRKRLRKSLYAAAMPAAFHWNPALIALYGRLTADGKTHKQALVACARKLVIYANTVVARGTPWSNRTAIA

SEQ ID NO: 355259 - protein, 392 aa, unidentified
MVVSVGIDVSKDKHDCFIVSSEGEVLADAFIIPNTMDGFHYLLQRIRHCTAPQDKIKVGLEATGHYSYNLLGFLLDNGLTTYVLNPLRTNLYRKSLSLRKTKTDRVDARTIASMLLSDAGLKPYTDTAYHNEELKSLTRYRFDKVKERAKLKSSIARLVCILFPELEKLVPSLHIASVYALLEEFPGAKQVANTHLTRLKALLETASNGHYKRDMALEIRNAAKNSIGSQMPAKSLELQHTIRLIRELNREIDEIEEQIQSIMDELHSPITTIPGLGFRMAAMILAEVGDFTRFDSPDKLLAYAGMSPSTYQSGQLKNCYPHMEKRGSRYLRYALYNATKYVCHWDSAFADYLAKKRAEGKHYNIAISHAAKKLIRLIFAMEKSRQPYCSAA

SEQ ID NO: 355260 - protein, 343 aa, unidentified
MSIVGGLDIHRKQITFDYVDTETGEVRRGQICPADRAHLAKWLARFAGQDAHFALEGCTGWRYVAEEIIAAGLTPHLADPAEAAHLRGPKRRAKTDRADARHQRVLLEQGRLPGCWVPPSHVLECRALLETYLDLREQRTGWVQRIHAVLFHHGAPHIAGQQLGTAEGAAALRAAAAHCSPAGQLQLAIAAQMLLVYDERLHQVRRQLLDRARHTRGAAELTARLYGVGPVTGLALTCWLGGAGRFSSSRKAVRFAGLDITVYSSDGKRSPGRLSRQGPEVLRWCLYEAGKAHARASAPDHAYYAQVKERIDGKRAALSEARKIIRQAAHILAELGDDALTAC

SEQ ID NO: 355261 - protein, 349 aa, unidentified
MDHVGMDLGKKESQIAIITAAGELIEKRIRTERERLIGYFKDRPKAKILMESSTISEWVAQLLEELGHEVIVADPNYAPMYAQRSRRVKTDKRDARALAEACVLGAFRPAHRTSAEQRHVRSLLGVRESLVRTRARWLVLTQATLSREGVSVATGSAKCFSARVEKLELPEPLGGEIAPLLTLLEPVNAQIEELDERISALAQRDERVARLMTVPQVGTLTAASFVATLDEAGRFKGAHQVEAYLGLVPREWSSSEVQRRGHITKAGNSRTRWLLVETAWRITTHRARPDTQALRSWADRIARRRGKRIAVVALARKLSGLMYAILRDGSVYDAGKLGSPQPAEAERAA

SEQ ID NO: 355262 - protein, 345 aa, unidentified
MNITTVGIDLAKNVFQVHGVDARGKVVLRRQLRREQVARFFVKLPPCLIGMEACASSHHWGRTLERFGHAVRLMAPQFVKPYVKTNKNDAADAEAICEAVSRQNMRFVPIKSIEQQAILSVHRVWQGFVKARTAQANQIRGLLGEFGLVIPKGICHVAERVPGLLEDASNELPLALRQLIDRLTSHLKDLDQQVRELERQIIAWHRGSELSRKLEKIPGIGPLAATALVASIADPRSFKNGRQVSAWLGLVPRQNSSGGKSTLLGISKRGDVYLRTLLIHGARSVILMAKRQTENKNVWLAKLLNRRHPNIAAVALANKNVRTVWALLAHGRDFKPDYVPVRATA

SEQ ID NO: 355263 - protein, 399 aa, unidentified
MLDDGSQPVKLFGVDNNQLGAEVLVERVYSIAKEHCVSDILIGTEATSMYDWHLLEYLAESKLALEFNLKLYRFNAKWIKNFKKSLAPRGKTDPIDSFAIAERLRMGRLPKEYVPDVKYQPLRKLTRFRYHLMQQITREKDFFLANLFLKASAYSSVKPFGSTFSATSLAVINDFFSVDELAAMPIEELTEFILEKGKSHFSKPDEIVDNLKRVARESYRLKPELTPTVNLILASTFNNIHCYKEQVKLVDSAIAENLKAFKHTLESISGIGPVYAAGILAEIGDVHRFPNDSALAQFTGLTWPKHQSGKFQAEETRMSHTGNQYLRYYLVEAANSVKRCDATYKAFYEKKYKEATKHHHKRALVLTARKLVRLVWTLLTRQTLYQPGYCSFEDLSKIG

SEQ ID NO: 355264 - protein, 322 aa, unidentified
MSQPNPLCVGIDVSKATLDIAASSDVAQFTVSNDSDGFNAIITGLRRHSVALVLMEATGGLEVAVACSRQAEGFEVAVVNPRQARDFARAMGYLAKTDRIDARVLTQMAEVINRHPERKRFIRALPDAERQALAAMVVRRRQLIAMLVAERNRLYPSHPQNKKSINTIIKALEDELARLEKDMNSHIRNHFKEIAERLSSIKGVGTMTVSAMLAEIPELGALSRREISALIGVAPVNRDSGTMRGRRTIFGGRAGVRSALYMAALVATRFNPVIKTFYVRLLAAGKAKKVALVACMRKLLTILNAMLRKNEEWDESYHHVAP

SEQ ID NO: 355265 - protein, 421 aa, unidentified
MRAFGLDVHRDFCEVAVAEEGRVRSAGRIPTRVPSLELFAESLVPGDVVAVEATGGTDKIVSVLEGHGVRVVVANTRKLKSITEAKAKTDRLDARTLARLLVSGLLDEVWTPDERTRTLRRLTNRRERLVRARTRAKNEAHGVLARNLCERPPVTDCFGKGGRRWLARLELPVDERLTLDGCLRQVDFLDDEIAALDSEIARSALAWPEVLRLMTVPGVNVQTAATFMAAIGDIGRFSSPGKLVSYLGLDPRVRQSGSTPARHGRISKAGASEPRHMLGEVAWKVMLTPGPLRAFFERIRARRGPQVAATATARKLAVLFWHLLSREQDYAFARPAMTRHKIRRLELLAGAPPQKGRKGIAGGKSKAVFEAERELSRQAEAAYRRLVSDWRSAGPAKTGAGATPGRASSRPSKGKAARQTP

SEQ ID NO: 355266 - protein, 319 aa, unidentified
MNDSITAFVGIDVAKDSLEVHLRPSGERFTLSHDAQGLEELLQRLPARGACLIVVEATGGYQRCLVATLLDAGHRVAVVNPRQVRDFAKALGILAKTDAIDAEVLARFAEQVRPRTSEKARKNQDELEQLVARRRQLVELRTAEHNRLETITVKAVHKSIRHVLGMLDKQITRIEKDILRLIESDDDWNHQVRLLTSVPGVGLVTATSLLAELPELGLLNRQEIAALVGLAPFNRDSGTFRGKRAIRGGRSAVRSTLYMAALSARTHNPTLRPFTHQLEAEGKPFKVAITACMRKLLVILNTMVKNQTHWNPQINPSTP

SEQ ID NO: 355267 - protein, 350 aa, unidentified
MPRKFDTAVVTIGIDPGKNTLHLVGLDARGEIVLREKVARTKIVSRLANVPPCLIGIEAGMGTHYVTRELLALDHDVRQVPPVYAKPFRQTHKNDFRDAHAVAEAVQRPTTRCVPPKTDEQLDLQALHRVRYRLVGQRTAIINQMRCFLLEHGITVRQRLHWLRHALPDILAQRTDVLSPRMVRILEDLAQDWRRLDDRIEAVSGEIEALSKTTEPCRHLMTIPGIGPIISSAVVAAIGNGTAFACGRDFSAWLGLVPKQISTGDRTILGRITKRGNRYLRMLFMQAARVVLLRPRNWMKHGFGPWLTAAAQRLHHNVLATALANKLARIAWSVLVQHREYEARLSVAAT

SEQ ID NO: 355268 - protein, 338 aa, unidentified
MRLYGAIDLHSNNNVTVLIDEQDQVVYQKRLPNELAVITEQLSGYRDRLQGIVVESTYNWYWLVDGLMEHGHRVHLANTAAIQQYEGLKYTDDTSDARWLAHILRLGVLPQGYIYPKEERAVRDLLRKRSQMVRQRTTNLLSIQNLITRNTGSSLNGNRIKILNAQEVDELFANADLALAVKANLALMNCADEQIHLLERTVSERIKLRAEFCFLKTVPGIGQTLALTIMLETGEIKRFSTVGDFASYCRCVGSQKLSNGKKKGQGNTKNGNKYLAWAFVEAANFAIRYCSRIKSFYQRKKAKSHGVLALKAVAHKLCRACYYIMKDQVPFDVTKAFA

SEQ ID NO: 355269 - protein, 326 aa, unidentified
MEHELHYIGIDTAKEKLDVDVLRPDGRHRTKKFANTTKGHDELVSWLKGHKIDHAHICIEATGTYMEPVAECLYDAGYIVSVINPALGKAFAQSEGLRNKTDTVDARMLAEFCRQKRPAAWEAPHPLERALRALVVRHQALTDMHTQELNRTETAREVQRPSIDAHLLWLEAELKRLEKQIKDLTDDDPDMKHRRKLLESIPGIGEKTSAVLLAYIGLKDRFAHARQFAAFAGLTPRRYESGSSVRGASRMSKAGHVSLRRALYMPAMVATSKTEWGRAFRDRLAANGKKGKVILGAMMRKLAQVAYRVLKSGVPFDASRHNPVAA

SEQ ID NO: 355270 - protein, 467 aa, unidentified
MSKPSQSPKRKSPRRKEIPQDIPKVDVLKQININAAGLDIGDGEIYAAVPEGRDKESVRVFGTFTVDLHNLADWLEACEVTTVAMESTGIYWVPTYEILEERGFELYLVNASHIKNVTGKKTDILDCQWIQQLHTYGLLRASFRPNEDIAALRSLVRHRGNLIRSATSEIQHMQKALQLMNLKLTKVVSDITGLTGMCIIRDIVSGVHDPEMLAKHRDPRCAKGQDEIAMSLQGHYKEEHLFELQQALEAYDFYQGQIQRCDERIEEVYNAFEPQVDIDERPLPLSRKKRRKPVHNEPAFDLRSYLYQIAGVDLTEIDGVNVMTAQVVLSEIGTDMSKWATVKHFTSWLGLCPHNDKTGGKVIRTHTHKTQNRAAAALRIAASTLSNSHTALGGYYRRMRAKLGSPEAVTATAHKLARIIYAMLKKQTEYQDPGEGYYEEQARQRAIKNLKRKANQLGFQLVGECVI

SEQ ID NO: 355271 - protein, 340 aa, unidentified
MNATTYGLDVAKLVFQMYWVDAQSGEITNRRFRRDELLVFLAQRSAGRVALEACGSAHWWARKIKALGHEVVLLHPKFIRPFVQTNKTDAADARAIWTAVQQPEMRTVAPKSEDQQAMLGLHRMRSLLIKFRTMQVNQLRGLLYEFGASFRTGRVAGLNEIRTRMAELEDTLPGTMISSLQDQLKRIDSIEQDIDQLENKISVWHKQEAACQAIAAIPGIGKLSATALVAAIGDASTFRSGREFASFIGLVPRQSGTGGKVWLGGISKRGDPYLRTLLIHGARSVMCHTKVPGDWQKAIQERRPGNVVAVALANKMARTVWAILAHGSTYDKHHVSIKPA

SEQ ID NO: 355272 - protein, 339 aa, unidentified
MKTYGAIDLHSNNNVIVVIDEQDKILLKRKVPNDLGAVLDALSMVREPICGIAVESTYNWYWLVDGLQEAGYCVELVNTSAVKQYEGLKYGNDESDAFHLAHILRLGILPTGYIYPKEERAVRDLLRRRLQLVHYQTAQLLSIQNQLTRNTGQQFSANAVKKLTSSDIKHRLDDENIQQAILSNLTVFNVLRTTIKSIEKKVLEQIELKPAFQKLLRIPGIGIILAMTIMLETGDITRFAKVGNYASYCRCVNSKRMSNNKQKGQGNRKNGNKYLSWAYIEAANYAVRFNNLAKQYYQKKTAKTKRVVALKAISHKLARACYYVIKNQEEFDNQRLFCR

SEQ ID NO: 355273 - protein, 338 aa, unidentified
MTYHAGIDVSLEQCSICVVDDRGRVYREAKVASEPEALIAWFGKLDVEVSRIGLEAGPLSQWLHAAMTGAGLPAKLLETRHVRAAFKAMPVKTDRKDANGISQLMRLDWFRPVHCKSLPAQQVRALLTARRLLQAKLHDVEMSLRGILRGFGLKVGKTTHRRFGYRVRELVDGHAMLTALADALLAAHAVLLREFQALDKRAHQLARRHPGVRLLMTVPGVGPIIALTFLAAIDDPARFSSSKQVGAHFGLTPKKWESGEISYTGRITKIGDKDVRTALYQAAHIILTRPVRAGQLKRWGMAVAKRAGQQKAKVALARKLAVLMHRMLADGTPFVAGK

SEQ ID NO: 355274 - protein, 447 aa, unidentified
MALDVVTKTDKTPVLGRMLSKYVGRKTSRIENGITKARNHSRQRGNIMRVVFGIDVSKASSEVAILVNGEKVHGYTIPNDAIGFNRLLGDLKTVHQPEIVFEATGVYSRRLQAFFEDNSYAYTRLNPLESKKQLDSLRVRKTDKIDAEKLAMSQFILNRKPSYVQEALYQELRDLSRFYQNLTEDIVCAKNRLHKVLQVTFPELENILSAPTGEQYWNLVITFPCNSFVLESDDATLTATIRQSTAKRISEKRVTYLVDKLTKLANQSYCAVKKNSPVIEEVKYYARELLRLSEHRQGVLEEMVTLAQSLPEYEILLSIPGIAETTATSIIGELGDIRRFHSANQINAFIGIDLRHYESGNFLAKEHITKRGNPYARKILFKCIHNIASASHTNPCHIADFYEKRKRQSQVTSTKPHTIASIHRLIRTMYYLITHNKLYDYTSTQNR

SEQ ID NO: 355275 - protein, 358 aa, unidentified
MATMSWVGLDVHARSTEAAALDVASGELTRRRFGGGTEPVVAWLAELPQPVSACYEAGPTGYGLYRAAREAGIAMQVIAPSKTPRAAGARVKSDRKDAELLVRLLMAGALTQVTVPSPEAEAARDLARARDQLRGDLMRARHRVSKLLLRHGRVYEGGAWTQAHGRWLAGQRFTHEATELAYLDGLAAVTGLVARREALDRQLGQLARGEAFWPTVARLCCFRGIDTLSAFALHLEVRDWERFAHAPQLAAWLGLTPSLCQSGESSSQGAITKTGSAYARRLLVEAAKHYVRPPRIGATLRARQQGQPDHVLQTAWRAQHRLFRVQTRLRGRGKPANVATVAAARELACFLWSAVNAG

SEQ ID NO: 355276 - protein, 298 aa, unidentified
MGRRCIGLDVHREFAQVAVWEDGLVRHAGQIALTDETLRIFADSLGPEDEVAVEATCNTQAIVRLIEPRVARVVVSNPQKTRAIAEAKVKTDKVDAEVLCQLLAADYLPSVWVADHATQALRRQVSRRAHIVRQRTRLKNQVQSILHRNLIPRCPAADLFGIKGRCWLANQPLPADEEFAIEALLRQLDFHGQELRIIDAALGRVALGSPEVKRLMTIPGVDATVALSIVAAIGDFRRFRSPEQVVSYLGLNPRVKQSGGQPASHGRIYQAGTRARPRDARRGRVGGVQDPGPAARVL

SEQ ID NO: 355277 - protein, 311 aa, unidentified
MNKNPHSIHYVAIDVAKATLQVQDDRRAFTLDNEPKGHRKLLSYLKTCENPLVVFEASGGYERGLLEFLHKAALPLAMVNPARVRDFARSEGVRAKTDPIDGKMILAFAKSKALRPMEAPSEACLKLAALLDRRSHLVEQLAREKNRLQNSETFIHRSIKRMIKILEKEILALDKAIDQLISSNPGFKSRSQIIQSVKGVGKVTAWTLLAYLSEMEELNRNRLVALAGIAPFNRDSGKLSLKRTIQGGRAKVRKCLYMAAHTAATCNPVIAAYVKGLRDRGKPYKCAIVAAMRKLLIHIQSLIKNAKLSPC

SEQ ID NO: 355278 - protein, 333 aa, unidentified
MGFEPVPSKEGSWMMAQNDLIVVGIDVAKDKVDACIRSLSLRQSCPSPPEGQRKLIAWLRKHRVGKAVMEASGGYERSWAKALREAGIEVRIVDPKRVRSFAKSAGRLAKNDAIDADMIAWFAETFGEAPGQTYDAAREELQKLVNARRELLDIQTKIQNRDEHVAPMPVQKMHARLLKKVATELARLEAAIAATIKATPHFAERAEIIESVPGLAGTTAANLIAGMPELGQVSNKIAPALLGAAPYDDDSGRRRGERHIKGGRRKVRNAFFMPCLGAATQHNPVLKVFYQRLLAKGKEKKVALIACMRKLIVILNTMIARGEKWDATRYVLS

SEQ ID NO: 355279 - protein, 400 aa, unidentified
MLSIGIDVSKGKSTVCGMKPGGEIVYTPFEVQHTREGMSELVSLLRGSGEEVRVVLESTGSYHCPVVAALLENGIFVSVVNSLRMKRFCSQSIRRVKTDQIDAMQIALYGLAYWQELQPTRLPENTYRELQLLARQYYQMTSMLIKAKVDFNAICDQVLPGMQELMSDHAGRHKLSDFVLRYRHTTHILKMGETRFRKDYCKWAEKKGYRNHERMAALIFATAQNGIPVLPDAPSTQIVITEAIRVLHTVEASRDAILTQMQALAKTLPEYSLVREMPCIGDTLAPRLIAEIGDVRRFHSKRALIAYAGIDAPPYQSGKFSANNRHISKRGNRYLRKTGYEVMQSYVMHKPANDPIFTFIEKKRGEGKSGKLAMVAGLNKFLRVYYGKVTELYRSLPAIE

SEQ ID NO: 355280 - protein, 447 aa, unidentified
MADERDGFPVLRRDVAGIDVGSEEHWVCAPARTGDGREVERFPATTPGLERLIAWLQDRGVTAVALESTGVYWIVPHEMLEHVGFEVRLVDTRELRRVPGRPKSDRRDCEWLQRLFSVGLLRGAFRPPDTVCLLRTLVRDRATLIAERADWLRRMQKALDQMNVRVHRAVADLDGATGIAIVRAIVGGERDPQRLAALRDYRCRKTEAEIAEQLTGHWRTDHLFSLQQGLKMYDAITDRVADYEREILQQLAAMAQTDDTSPPPTNVNKARMIKNRGEEPLRQALYRISGVDLTTIDALGVETVNVILSEYGPDLSRFPTEKQFIAHLRLAPHQAISGGKPVRNQKKPHRRSARVTMALRMAATSLRRSRSALGAYYRRIAQRLGADVAVFATARKLAQWVYRLLRWGQPYVDEGAAVYEKRYRQARIKGLAANAKNLGYALVSVEA

SEQ ID NO: 355281 - protein, 412 aa, unidentified
MQTLVERGCGLDVHQATVVACLLMVGKDGKVQKQIRTFGTATRELLSLRTWLLSESCSHVAMESTGVYWKPVYAILEGPFQIVVANAQHVKKVPGRKTDVKDAEWIADLLCHGLLRSSFVPPQPIRELRDLTRYRRKLVEAQAGERNRLLKLLESANIKLASVATDVFGRSGRLMLRALIEAKTTPQEMAELAKKKLRSKIPELELALEGRVEEHHRFLLKLQLDRLERVESDVAVLEQRLQNKLKPYAEELARLDQIPGVDWTLAAVIIAELGVDMSVFPSVSQLASWAGVCPGNNESAGKRKSSRIPKGNVYLKTALVEAANAAARTKGSYLRDKFYRLKARRGYKRAAVAIAHKILVSIYHMLSQNVCYSDLGDLYLDNLNKHHLTRNLVHRLERLGYSVTLALQQNAA

SEQ ID NO: 355282 - protein, 343 aa, unidentified
MQTITTVGLDIAKSVFQVHGVDAGGQVIVRRQLKRRYVLTFFQKLSPCLVGIEACASSHHWSRELQALGHTVRLIPPAYVKPYVKRQKNDAADAEAICEAVTRANMRFVPTKTPEQQSGLVLHRARHLFIRQQTAVINAIRAHLAEFGIVAPVGRHGVEELLNVAADPNDRRVPEMARACLLAFGAQLRRIKEQILEFDRLIRAWHRSNEMSMRLDEAPGVGPVLATALVAAVADPKSFRSGRNFSAWIGIVPKQHSSGGKNRLGNISKQGDRYLRGLFVAGALAVIRYAKIHGTKHRPWLTALLARRPTKVAAIALANKIARMVWAMMARGERYKEPVALAR

SEQ ID NO: 355283 - protein, 345 aa, unidentified
MEITTIGLDLAKNVYQVHAINGAGEVVVRKTIRRAQVLRFFERLDPCLVGIEACGTSHYWAREISTFGHEVRLMPPAYVKPYVKRGKTDASDAEAICEAVSRPTMRYVAIKSCEQQAALTIHRTRDLFVKQRTQLVNMIRGLLAEFGIEIRRGITHALSLAERIAAGDMPGIPALAAKMIASLAGQILDLEARLREIERELLAWHRSSEIARRLATIPGVGTVCATAFAASVTDPHQFRSGRQFAAWLGLTPLQHSSGGKERLGRISKMGDKYLRRLLVVGMTSLVRRAKYKPDAVDRWLTDLLSRKPARVVTVALANKAARVIWAIMARGGTYRAPQPAGAAVA

SEQ ID NO: 355284 - protein, 433 aa, unidentified
MTPVPYDLIIGLDRADQKADLCLLDTTTGQRRIVTLDTAPEALCEWLAQLRQQHPAARVGLCLEQPAVHLIPFLEAYAWITLHPINPITLQKYREAFVTSRAKDDTKDAEFLADLLLNHHAQLPVWAPQDSPTRAVQQLVAHRRAVVDERTALSNRLIALLKQYFPQALTLCGDDLWRPLATAFLLKWPSLSAVQKAKPATVKAFYYLHGSRSATLLEQRLALLAKAVPVTDETAVIGSFVLRVQLLARELQAVVRTIAEFDRQIAAAYAAHPDHGIFASLPGAGPVLGPRLLASLGADRERFAASAAQLQCYTGVAPVTKRSGGSQRIHRRYCCPKFHRQSFHEYAKESVLWSRWAGAFYLQQRSKGCAHHTAVRALAFKWQRVIWRCWQDRRPYAEARYEAALRKSGSPIVALFDRVELGKSPWKNPAKKS

SEQ ID NO: 355285 - protein, 340 aa, unidentified
MEKAMKFYLGMDVSKLWIDITVMRVVNHEKQPVITERFDNDAAGMKAMGKWLKKHQVSFDDNSLLVIENTGVYHRLVWEYCSTHGLPLYIGNATHIKWSFGIARGKNDKIDSQRLCAYAFKNADELKATPILNPVFLKLKDLMTARSRLLAQKNSIKVYLGELKLSNSKETQMILEQAHKAALEGIKESIKTVEKQIHQMVRENAAIKNNYDLLLSVPGIGHLTAVYIICCTNNFICKITGKQLASYAGVAPFGNSSGTSIKGRDKVHKMANKDLKKLLHMGAISVITHCPEFKDYYERKVKEGKHEQSVINAVRSKIALRAVAVINNQAPYVDNYKKAA

SEQ ID NO: 355286 - protein, 340 aa, unidentified
MYYLGIDHHKRYSQVAVVDEKGTVRSNGKIANEKKAFTLLKEYYKEPCRAVIEAGRNWGMMYDLLEELDIKTIVGHPLKIRAIADAKIKSDSIDAKTLAHLLRADLIPQVHVPPKEVREQKNLLRHRLWLVRLQTMTKNRIHQLIDRNHVKRPKVKNIFGVAGRTFLKGLNLSLIDQKLLKDHLELLDTLHDHIRKTEVWIKKELKNNHLMDILITLPGFGKVLSALAALEIDNINRFRTQAKFASYSALIPSTFASGGKVYHGDLIPGGNRWLKYVFIEAAWVSIRTSTYCRFYFEKMKDRKNSNVAIVALARRLSEIAYRCLKEKRAYEERPYMPYTR

SEQ ID NO: 355287 - protein, 310 aa, unidentified
MNDTVGIDISKATLDVFRLSDGRREQFSNDAAGLKKLRTWLGKTPVRVIYEPTGPYHRDLEQALTATSHGLVKVNPTRARRFAQATGQTAKTDRVDAELLARMGAVLNLEASPARSEALMEIKELHVARVGLIKDRTACRNRLGTARCKVIVSQLNARYRQIKAQIAQIDAELVRYVKADPELARRYEILLSIPGIGQVAAIALIVEMPELGSMNAKEVASLAGLAPITRQSGLWKGKARISGGRQTIRTMLFMPALIATRFNAPLRQVHESLIGAGKPWKVSITAVMRKLVILANALVRDDRTWAEARA

SEQ ID NO: 355288 - protein, 355 aa, unidentified
MIGEKYIGLDVHQATISVAVMDSKGKVVMESILETQAATILEFFAGLRGTLWVTFEEGTWAAWLYDLLKPHVAKLVVCNPRKNALLKHGNKSDKIDARKLADLLRLNDLEPVYHGETGVRMLRELARSYLTIVKDLSRVMNRLKALYRSWAIPCAGRDVYYTRHRSEWLGKIPEAGTRRRAEQLYQQLDMLQHLRQQARRELLAESRKHTITAKLRQIPSLGPIRSALAVALIQTPHRFRTKRQLWTYSGLGLETRDSGEYHYVQGQLRRRKKQVSIRGLNKDHNHDLKGLFKAAATRASVQPGPFQDFYQRSLAKGIKPTMARLTLARKIAAITLTLWKKGENFDADKLKSQAA

SEQ ID NO: 355289 - protein, 489 aa, unidentified
MPQLNKNATIKWPTESKGVGRSKSRRDRRSSADPTEGLQVGNPNAAAIDIGCSEHWVAVPAGRTERPTQRFGCCTAELNRLADWLKECGVDTVVMEATGNYWVVLYDILEERKLNPVVVNPRYAKNMSGKKGDICDCEWMQKLHTYGLFSNSFRPTQEIRVLRAYLRQRETLVGAAAQEIQHMQKALTEMNVQLANVISDISGETGLRIIDAVLGGERAAGVLAKLKGPRIMASLVTLERSLEGHWKEEELFRLEQARLSYAHFQEQLQQCQQRIEQQMQTIQGRVPLQDQGRAPRTMSAADKAAEPVPGQGDGRKSKSFDLGVELKRVLGVDLTQIDGVGPVAAQVILSEVGTDMSRWRTEKHFASWLGLCPDHRISGGKILGRATRPVVSRARNALRLCAYTLTHSKSWLGAKYRRLKHKLGAPKAIVAMAHHLARLIYRMIKNGQDYVDKGMEVYEAKYRENRIKWLKKQAKELNLELHEMQALAS

SEQ ID NO: 355290 - protein, 430 aa, unidentified
MDLKDRIRVEEFRQLRKEIRGSEKHLIVGIDVAKDKHHAFIGTATGDALLKRLVFENNIEGFEKWLTFSEAMKVRYGFEKAIFGFEPTANYHKPLGEYLVKRDFSVVLVSGAAVKNNREMMDGRWDKNDTKDPANIADLIRQGKFMYYDHPVLPMRDLRNLLSLKGRLKRQEHGLKVRVRNHLLAQYFPEMDRHYAQWEQGGLSIVNWCLSPSAITNMDYKQFECLIAPDTQRVNLSRQERLKAIWQEAAESIGCEVGEALQFEAQMMVEGLKELRKAIKSTDEKIKEVCLHFPEYSYLRTIPGFGPDVSSKVLGAIGNPFRFDNENQVLKLAGWDLSAKRSGKKSETVTPVISKKGKAELRYALYQAAFIASTKNQYFVMYYTNKLRGREREKGIKTKMRVKLAAKLLVIAWTLMKKEEPFNPDYLKID

SEQ ID NO: 355291 - protein, 419 aa, unidentified
MSFKIFKFNCCGLDVHKTWIYACIGITDSNNRTEYKQARFSSFSKGLHQLCVWLAKYNCNDVCMESTGKYWIPVFNILEQHKIRVTLSHPKYTKPMKGNKTDRKDAKWICDLYMCGMVKPSFIPPADIRELRDLVRYRFKLTCMITGEKNRAQNCLTVSNLKLDDVFSDVFGKSSRSITEQILQHPGEKFDVSPFVDSRCKTPIEEIQAAVDGNISKEQDVKLRQCLDHIDELQKHISEVEQEILRLSDKYEAALNLIRTVPGFDKNPMTAIQVLSEIGGDMPVFPTAKHLVSWAGCCPRNDKSDRKIKSTRISCTGSYFKPVLVQIANALIKSKKHFEFTTRYKRIKTRRGHKKAIIARCRMILTAIWHILTDLKPYTSDGFLESRPVKKEKVLTTSQALNLLRQRGYLIKDEPSPVS

SEQ ID NO: 355292 - protein, 347 aa, unidentified
MKRIAVDLAKSVYQVTESVRSGQVVQRKRLNREAFRRYIQEQTESVEWVMEACGTAHYWGRLAQSLGHRVRLLHPRYVRPYRRRNKTDRNDCDAMLEAARCNDIHPVPVKSHDQQQLQQLHGLRETWKKSRTQRINLLRGILREAGIEAPTSTVAFIRAANELVDQPEVASLSRLLHIVLAEINLYEQCMVECEQQLKRWHADDDIVRKLDEVSGIGLLTASALTAAVGKPERFSNGRQLSAWLGMTPREFSSGYRRKLGHISRQGNVYVRTLLIHGSRAALLAAQRCQSRTPEKLTQLQRWAVETAARIGHNKAAVALANKLVRICWAVWCHERRFNGNWQSVKPA

SEQ ID NO: 355293 - protein, 409 aa, unidentified
MRIIGMDIHRVFAEAVMLEDGEIKRLGRIGMTRDQLEDFARTLLPTDHVVVEATGNATAVTEILAPHVARVAVANPLQVHLIAKAKIKTDAIDARVLAKLYAAGFLPEVWIPDAATLARRRQVTRRRQLVRQRVRLKSIVQSVLHANLIPPCPFAGLFGGKGRAWLRAQYLPDDEREAVDRHIEEYDRLSEALKGVERDIARAALADPNVTRLMTIPGIDMVVAVGLMAAIGRIDRFDGPDKLVAYIGLNPSVHQSGTGPAHHGRITKRGRSDARHLLVEAAWQTVRGPGPLHAFYERVRAKRGNHIAAVAVARKLAVIIWHLLTKGEDYSWVRPSLHAKKIRDLELRAGHPPRRGQKGASYDYNIAQRRRDERNLAQQAEGAYRRMTSGWRRTGPRSEPTGATNEERQ

SEQ ID NO: 355294 - protein, 338 aa, unidentified
MAIVMGLDQHRAQITAEWIDTDTGEVSRARVAPALRPDVRRFVKRFAGQRLEVALEATTGWRFVVEELRAIGADVHLAEPAETAARRGNKKRAKTDRADARHLRELLMIGRLPESWIPPEHLLDLRARVRLRHTLVDQRGEWQQRIQAALYHHGFPQRNGLLTAENRTWLEGLPLPESAQQQVAVALVMIDALDAQSAPITRQLRLYARRQPGCRALMKHYGIGELTAVTILAELGDARRFSSSRHAVRYAGLDITVHQSDQRRAAGHLSRQGPPALRWALFEAAQAARRPGSPDRPYYDQAAERLGGNRACLALARNLLKRSFHTLRELGDEAMQPA

SEQ ID NO: 355295 - protein, 347 aa, unidentified
MTLTIVDEARAITGGVDTHADTHMAAALDPIGGLLGVQEFPATPAGYGRLLAWLQGFGAVHLAGIEGTGSYGAGLARHIAAAGIRVVEVDRSDRQDRRRKGKSDPLDAVSAARAALSGRAAGAPRGRDGQVEAIRALMVAKRTARAERTQTICQARSLIITGPDDIRIRFTGQPPAGLVAELAALRPRPGSMVRYHTLLSLRELGRRAQFLDDQLTRLEDLIVPLVTARAPGLLALYGVGPDTAATLLIAAGDHPGRLRSEAAWAHLCASAPIPASSGKVTRHRLNRGGDRQANHALWRIVITRMSSHPPTRAYVARRSEEGLSKPEIIRCLKRYVARETYRSLRAG

SEQ ID NO: 355296 - protein, 356 aa, unidentified
MRKHSNKRTTRKAAQPRWSVGLDLGNRTSRYAIVDEDGELIAEGECRNTPAGLAKVFAEMPPSRVALETGSQSGWIARELTKLGHEALVANARELRGIWGATRKNDRRDALKLARYARMDPALLHPTRVRSEQAQLELSQLRVRDALVRARTLLVNAARGLSKTHGERLAKTSTKSFAVRAAADLKPELAAVLEPLFREVAALSEQIAAADRAARQAAERNPSAARLMTVPGVGPLTALTFVHTLEDPGRFRHSREVGAYLGLTPRQAQSGSSDPQLPISKAGDVRLRRLLVQCAHRILGPFGLDSSLRRWALLLASRGGAAGRKRAITALARKLAVVLHRLWTSGDRWRPFPAEA

SEQ ID NO: 355297 - protein, 430 aa, unidentified
MKSNTQNAKIEAITEKTLVLGIDVGSETHYARAFDYRGIEYSKKPFKFSNTEAGFVTFKEWILDLKERHEKDKVVPGMEPTGHYWFNLGKFLQDNEMKPVLVNPHHVKKSKELDDNNPTKNDRKDPKVIAGLVREGRYMIPYLPDGVYADLRTASNIRFQLQAELTRIQNRISRWFNIYFPEYKTVYGKPDAKSGILILKAAPLPEDILTLGIDGVNQIWRDAKLRAVGKARAKTLIEAAEHSVGSKEGAVSARMEIRMLLEDYESRNMRLQEVMVLIEELVKGIPMAEKLLEIKGVGIRTVSGFLAEVGDISRFNNPKELQKLAGLALVENSSGKHKGGTTISRRGRKRLRYLLFEAAMSLVAKNPEFRELHNYYTTRRRNPLKKMQSLMAVATKLIRVFYAMLTKGVDYDPKKMVSDIRRPEAYLQAA

SEQ ID NO: 355298 - protein, 321 aa, unidentified
MTDENDQIIYQKRLRNELELILEKLEPFKDNIQGIVVESTYNWYWLVDGLIEAGYTVHLAHITGIQQYSGLKYTDDNHDARWLAHMLRIGVLMEGYIYPKKDRAIRDLLRKRSQMVKQKVSQMLAMVGLFSRNTGKSVNANYIRKLTEDEIDKIFSDSNLAFAMKSNLAVMRCTETQIEYLEQQVLQQGKLKPEFKQLKTASGIGNILALTIMLETGDIRRFSKAGNYSSYCRSVEGKKISNGKKKGKGNSKNGNKYLAWAFMEAANFAIRYNPKIKQFYQRKMGQTNKISAINAVGHKLSRACYYMMRDQVPFDVDKAFV

SEQ ID NO: 355299 - protein, 392 aa, unidentified
MTTPATCNVPESTTAGTLFVAFELSEKTWKLGFTTGHGQKPRERTVTARHQERVLEEIAHAKRRLGLPDTAPVVSGYEAGREGFWLHRFVQGHGITNQVVDSSAIEVNRRRRRAKSDGLDVRKLLSMLMRYAQGERQVWQVVTVPSVEAEDQRHLHRDLETLKQERASTTNRIKGLLSSQGIRVTSLRNLPEQLEALRLWDGSPIPPGLRRRVLRVYAHHTFLSEQIAAVEAERRAQLQASTDANIDKVRQLMQLKGIGINGAWLVVRAFFGWRAFKNRREVGGVAGFTPTPYQSGESAREQGITKSGNRHVRWMTTELAWSWLRFQPDSALSVWFRERFGGGGKRLRRIGMVAVARQLLIALWRFLETGVFPVGAELKGQAGHDGLCTSAD

SEQ ID NO: 355300 - protein, 389 aa, unidentified
MIYLGIDVSKFKHNCYLTDEDNFDKGCHFEIKNSREGFEYLLKKLSNFDKDKIRIGLESTGHYHLNLSRFLLDLNFNIHFFNPYQTSLYRKADSFRNTKTDKVDAFFITKLLRATDSNPIHNELYHNYELKSLTRYKSSLKNDRVKLKNTIVGHLDLLFPELCEVCNDVFCKYILEVLKEYPSADKIAKANLTRLSNVIKKASKGSHSKEKAIEIRNAARRSIGIDSSAVSFRLVQDIKSFEFLCKQIKEVNKEIKPLLDCLDSPIMSIPGVGIEIGPSLIAEIGNIENFENPSKLLAYAGLDPSISQSGTMYSNYSSMSKRGSSYLRDALFLAAFLICQNEETFRQYYEKKKNEGKHHYVALTHVARKLTRVIFHLLNTNQKFVSQTP

SEQ ID NO: 355301 - protein, 413 aa, unidentified
MEVLYPHCAGLDVHKDTVVVCVRHMVNGTVSREVRTFKTTTKELLALSEWLATEGCTHIAMEATGVYWKPVWHILNDGDFALVLANAAHVKNVPGRKTDVNDATWLADLLAHGLIRGSFVPDQQTQEMRDLLRTRKQLVREASRHIQRLQKTLEDANIKLDSVISDVMGLSGRRMIEALIAGQSDPEELAQLAHRRIKASPEELREALRGRLTRHHRFLLSLHLQQIDAIDAAIGAIDQEVDAQIEPFRTTVHLLTTIPGVDELSACVILAEIGRDMSRFPTAGHLISWAGLCPRNDESAGKRRSTRMRKGAAWLKTTLVQCAAAAARKKASYLQALFHRLRARRGAKKADQIEQGHRFALQGMDNVLVIDDVAVFAAWLRAPPAQAHQRRRAEKAFQPIVVKPHPQAMADQP

SEQ ID NO: 355302 - protein, 347 aa, unidentified
MMIIGCDFHTRMQQISMVDTETGEVTERQLDYEDDEARSFYAGLKEPALVGIESTSYTRWFAEMLAELGHELAVGDAAKIRARETRKQKHDRRDAELIRNLLVKGDFPRIWLPSAEERDVRVLVEHRHQLVQLRTRAMNGLQAVALSYGLRLRHRLWTKSGQEKLQKLPLREGPGRRRADLLKLVAQINTWVKELDQRLAEEVGRRSDAQLLRTHPGVGDLTALTTVLVLGPVQRFPDARHVTSYAGVIPAEESSGRRQRFGHLTKQGNRLLRFLLVEAGQIACRFDPSLQRLYRRLVFRKGTAIAKVAVARKLLIRLYIMLRDKIDYQEFCRRGSHAGMLGDVALV

SEQ ID NO: 355303 - protein, 318 aa, unidentified
MLNESFVGIDVSKDWLDVGWEPAQQSERLAHEEVAMVGLCERLTQERPCLIVLEATGGLETHLASALAAAGLPVAVVNPRQVRDYARACGRLAKTDRIDALVLAAFARAIRPQVRAPKDDETLELGALLARRRQLIDMRVQEKLRLERASPVQRDSIKEHIAWLTERIARLDTDLTHRLRASSLWRDKEDLLKAIPGVGTITRVTLIALLPELGKLNRREIAALVGLAPFNRDSGQHRGERVIWGGRAQVRRVLYMASIAAIRSNPVIRVFYQHLRAQGKPGKVALVACMRKLLTIMNAMLKHNTPWNPSTLDLEHSC

SEQ ID NO: 355304 - protein, 316 aa, unidentified
MNTKTNQSINVGVDTGKYQLDIYIRPLDIYFTVENNEKGIKEAVKTIKKYNPDRIVIEATGRLEMPFIIACAEANLPFTIANPVHVKRFAGALGQRAKTDKLDAQLIAHYSEAIQPKLSKLKPDTMQAMSDLVTRRNQLLNMQTMEKNRLQIMPKELAMTIKPVLTLFKNQIVKIEDKIVKLIESCPEYQAKNMILLSMKGIGKIAAASLISNLPELGYINSKQASALIGVAPMNRDSGRYKGQRKIQGGRPQVRTVLYMAMMSAMQSNPVFKATYQRLLAAGKPKKVAIIACIRKMIVILNSMLRDGVMWEAPKV

SEQ ID NO: 355305 - protein, 445 aa, unidentified
MSDRSGLSRGDRNRNARLARLRQLLPPGHAIVGIDLADDKQAAVVTDHDSRVLARRRVTARAWELRDLLDWALDRARGAGFASVTVACEPTGHRWRVLDQLAAERGLALVCVQPLLVYRAREGEDLTWDKSDPKDAVIIARLAAGLHCYEPERADAVWARLRHLGARRSKLIGDATAEVNQVRDLLECAWPAVLGAAGVPFRSASWRAALAVALDRCAGELARVRRMGPARFEAAVRRELPRWGARRPCLRIVRAVFAALADPAGVTAHRPGALERAHLALGDWRDTRARLADAEARMVAIVDDLGLTGLVTTIAGLTPVGAAAILAETGDLARFASPRSLVKHAGLCPRDNASGGYQGKTSISGRGRPALRVAAWRAVWAALPNNPVMAARFAHLTTREHNRLARQQARTACAAALLRWIHVVITRRIAWDPAIAGRTPLRQAA

SEQ ID NO: 355306 - protein, 340 aa, unidentified
MQAITIGLDIAKNVFQVHGEDARAGAVLSKRMGRASVERFFAQLPSAVVGMEACGSAHHWARVLGSLGHEVRLMPAAYVKPYVKRNKTDARDAAAICEAVQRPSMRFVAVKSVEQQCERALHRARDLLVRQRTQLMNATRAMLAEMGIVAAQGLKGFAHLRSLVEQGDAAIPALLLPSLSALVRQWHALDSEAAGLEREIVARARTDARARRLMTIPGVGPLTAHAVVAAIGDGRQFACARDFAAWVGLTPRQSSSGEKHSSLGITRAGDTGLRRLLTLGAASHLRQMRARPDKAGPWVTGILARRPMKVAVVAQAAKTARIAWAVLTSGEEYWARSVAA

SEQ ID NO: 355307 - protein, 453 aa, unidentified
MGKVKAKPAKPKNVVEMPVVNPRAAGIDISDKEHVIAVPEGADEKRVRKFGTMSCDLQEIALWLQHCGITTVAMESTGVYWKPLFSVLVRNGFEVYLVNASHVKNVTGRKSDENDAMWIQKLHSCGLLKSSYLPDDEQEALRTLVRYRRALVQDSSRFVNRMQKSMELMNIKFHTVISDITGKSGKAVVEAILNGERNAENFLPYIDRRVKADRETIVKSLEGNWREEHLFMLKESYEMYQTYRLRIESCDREIEKHLQHYESLRKEGVMEEKKELQPNKKAKDKNHPRFNVRGYLQRIHSVDVLGIYGLSDIGGLELLAETGTDLSKWENENHFVSWFNLCPNNKISGGKLISSTLLKKKPNPASLALQRAANAVAKSNHWLGDYFRRMKAKGGNKYAVIATANKIARIYYKMVRYKQEFNPLALEVYQQKYKQAKIAYLERKLSQLKKDAA

SEQ ID NO: 355308 - protein, 366 aa, unidentified
MKKISTVQVFGNEIFKEQQLTIGVDLGDRWSFYCVLDEAGKILLEQKVATTPEAMKQAFAKIPRSLVALETGTHSPWVSRLLTELGHEVLVAHAQKVQLITKSNRKDDRHDARTLARLARIDPELLGPVQHRSAKAQIHLTVIRARAELVSARTALVNAARGLVKSYGERLPKCGTQRVSRELAAELSKELRDVLEPLLKEIESLNEGIKEYDERMEKIAKEVYPEVSLLKQVKGVGTQIALTYVLTIEDPHRFAKSREVGCFLGLKPGRRDSGESKPQKGISKAGDRYLRTMMVQGAHYILGPFGEDSDLRRWGLKLAERGGKNAKKRAVVAVARKLAVLLHRLWVSGEVYEPLRNSQKAMRAVA

SEQ ID NO: 355309 - protein, 497 aa, unidentified
MPNKSTIYSRCNPQLLKLFERAGHPAKVLCVALDYAKAQHTALICNGVGDLLKPSFAIENTAPGAAQLLREVRACAQSRKVRGEHVFFGGEDYPSFAENFVRQLRQEQFLVVRVNAWEAKQQRDNFQASSDALDLLGIARCCLHRRGQPVRDLPQAYPNLRIATRDRDKLVRMRTAVSNRIHSYVDRLFPGFLSAAKSGLEPFGRASLELMEDRFSPAQLRRRPRQSLAQWLGRRGVTQAPEKADQLKQLAQQVLPPAPEQVVMLQQTLAQLVGLYRNLEQSIGRIDREVAYWLARTPGAWLTSIPGFGITLAAGWTAELGPPSQWHSVRQLCSYCGVVPKSKQTGGPDKEPVVGAVGQRCNKRLKNVVLQAAEKVIQYGPEELRQTAQQLEARGAHTAFALAKRLVRLGKYLATTGTVYRPKALMDPATPPATLAAHYQSVWEKLLPKWKAKADLREVFAPEHPLGQWRKMVQDLYALELRLPQQRAAQQSSAVTP

SEQ ID NO: 355310 - protein, 350 aa, unidentified
MIIVGCDYHPGFQQIAYVNTDTGELGEERLEHKEQAEQFYQDLRTGGMRVRVGMEASGHARWFERLLNDLQFELWIGDAAAVRTKRVRKQKTDRQDAQLLLQLLMEERFPRIWVPDAENRDLRQLLWHRHRWVQMRTRVMNQLHVVALNEGVRRKKALWRSAGRAQLESLALAPWARRRRQDLLELLDQLTPKILELTRGLEEVVEKRPVARRLQTHPGVGPLTALAFELVIGTPERFQCAKQIASYVGLVPSEESSGDRRRLGHISKQGNALLRFLLVEAAQVTVRSQPEWRSQFFHLAMRRGRKIAKVAMARKLAVGLYWMWRRGWGYEEMQKLGSHAGEPGNRHGVQ

SEQ ID NO: 355311 - protein, 412 aa, unidentified
MQIIHACCCGIDVHAKTLVVCLIKNGAKTIRTFSTMTDDLLTLLDWLSEEGCTHVAMESTGVYWRPVYNILEGNVEVMLVNAHHLKKVPGRKTDVRDCEWIADCLRHGLLTASFIPPPEIRELRELTRYRTSLAGELTRIANRIQKVIESGNVKLGQVASDALGKSGRAMLAALARGETDTERMANMAHTTLKHKKTELRRSLEGRLTDAQRWVLSDLLQRYEETERAIKRVTERIDEEVRSSRDPFVGEAIELADELPGIGKQLAQNVLAEIGVRMAVFPSARHLSSWAGISPGNNESAGKRKSGKTTKGSPYLRRALVEAAWAASHTKSSYLSAQYHRLASRIGKKRALVAVAHSILVILYHLLSKREHYCDLGLHYLDQRNRDAIRNHLVRRLQTLGYTVTTQEVPAAA

SEQ ID NO: 355312 - protein, 317 aa, unidentified
MDTSNNQNEINVGVDTGKHQLDIFIRPLGIAFTVPNDNSGISKAIKELKKHGPTRIVIEATGRLEQEFTLACAKAHLPFVVANPIHVKRFAGAIGQLAKTDTLDARLIAHYAEAIKPDLSQLKPEILQLMSDLLARRRQLLTMQTMEKNRLQIMPKSITSSIKPMLTLLKNQLAKVDEKLSKLIDSCDHYRTRSAIIQSMPGVGQVVAISLISNMPELGYLTNKQAAALIGVAPINRESGSYQGQRRIRGGRPQIRTVMYMAMMSGIQCNPVFKDLYQRLIASGKAKKTALIACVRKMVVILNSMVRDGVFWSPKPA

SEQ ID NO: 355313 - protein, 348 aa, unidentified
MNYYAGIDVSLECSSVCVVDASGKIVREGKVASEPEALIAWFGSLGLPIERIGLEAGPLSQWLCAAMREAGLAVELLETRHVRDAFKAMSVKTDRNDARNIAQLMRLGWFRPVHCKSIEAQEGRAVLSARKLLQSKLLDVENSLRGILRDFGLKVGKTTDRTFGGRVSELVAGHPALEVVAQALLAAHAVLLREFNILDKRVVMMARSYPPSKLLMTTPAVGPVVSLTYAFAIDDPKRFKSSKAAGSHFGLTPKKYQSGQTDITGRITKVGDASVREALYQAAHIMLTKPVKNCSALKSWAMRIAKRAGMRKAKVALARKLAVILHRMLADGQPFNPAAKATTMTAAA

SEQ ID NO: 355314 - protein, 383 aa, unidentified
MRTVCGLDVHKDSVYLCILSSTGEIYEKKFGVLTTELIEMRDLMLSHHVLEVGMESTSVYWVPIWRVLEPHFKLKLINPYFIKQLPGHKSDVKDAQWIAECMLKDLVNGSFVPPERIQQLRQYDRRIYDLDDEIIRKLAKLDAAVQRCNIRLSNYVSNTDSVSYKAVIDKICEGVTDPNVLVEEIHGRIINHHGKETIIASLTGSITECDIDIMRQLKAEIDLAEQHKQECMDKMLAICENEYSTQLHNLQTIPGVKMRAATSLIAEIGTDMSHFETANHLASWSGLKPRNDQSNKTIKSRRITYGNRYLRRTIIQCSWGASRTKNCFFSRFSYHQTQVRKKNRMKVQVAIARKMLICAWHILKDGVSYKDFNNIIEASVTNG

SEQ ID NO: 355315 - protein, 346 aa, unidentified
MTEYFIALDVHCAFSEIAVVTGKGKFVRRDHCETTIPALVERIRGVARPRRLTFEEGPLADWLARSLRAHVNELVVCEPRRNHWIARDGDKDDAIDAGKLADLFRGGYLKAVHQSESLERSLLKQQVSLYHDRVAERVRQGNQLAALFRRHGTFVRPLDLCGDDQWHFCVHRLPQVASLRHGVERVRQVYLLMLKQEDSLREELVGLAQNEEPVRRFVELPGFSWIRGVTFYAYLDTPWRFRSKSALWRYAGIGLERRHSGQGPMRTRLCRQGHRRLKDLLLGAAKTAISQNENPFADKYNFWTQEEGIPAPNARRNVARALAATLWSLWKTGQRYDPQRVISPLR

SEQ ID NO: 355316 - protein, 337 aa, unidentified
MTIIRIGLDTAKQVFQVHGVDENEEPVLRRQLRRSAMEMFFAKLAPTRIGLEACGASHHWARVLRGLGHEVVLLPAQYIKPYVKRGKNDAIDAAAICEAMSRPEMRFVAVKSAEQQGALMLLKVRDLLVKQRTMLVNAIRGHAAEFGLVAAKGPVKVAELVQRAHAEAAGVPGLALDMLSLLSGQLDALEVKLKAIETRLMALHRQNPMSQCLVTQPGIGPIGAISFALKVSDPRGFRSGRHFAAWLGLTPKENSSGGRHRPGRISRQGDPGLRKLLVLGATAVIRFATAGRASPWLVNLLARRPKKLAAVALANKMARTLWAMMVSGELYRRPQQA

SEQ ID NO: 355317 - protein, 361 aa, unidentified
MKNEVQSNKKDFKGQNIFVGIDVHLRQWTVTVLTESGFMKKFSQPSGAQSLFDHLTKNYPGGTYHAVYESGFCGYSACYALRELGIDCQIVHAADVPTTQKEKVTKSDPVDAEKLARSLRNGDLAKHLIYIPSPESLDDRSLLRVRKVIQREICRYKSQIKHMLYNNGVQYPEHFKDRRSHWTRRFVKWIQEEVVMLSPTRASLDILLGEYLHVRQSLLAVNRRLRALSRTGLYRERYENLISAPGIGCITAMTLLVETVDINRFPNQKKWRSYLGFVPVMQRSDEHEVVGEKTFRGNKHLGPLIIEAAWIAVTKDTELAATYGRHCHNGLKPQEAIVRVAADLAARIYAILKQNKKYVCR

SEQ ID NO: 355318 - protein, 320 aa, unidentified
MLSFCGIDVSKDRLDVMVLPDEYSSSVPNDPAGWAILVEQLRGFSITAIGIEASGGYERGAVRSLQAAGMPVRQVNPFKLRQFAKASGVLAKNDPLDARMIASFVGIMPTRPAQRTTPAAEQLVEMLAVRRQLSAEKTAAENASRLLEDLMLQRLSRRRIARLAADFELLDKRLVESVATDATLAHRYRLLTSMPGVGPVLACTLIALLPELGGMSRKQVAALVGVAPYAFESGTLKGRRCIWGGRANVRQVLYMAAMSASNWNPVLKLFHDRLKGAGKLPKVVIVAVMRKMITTLNAMVRDDLAWADRLSGRHSVTTAR

SEQ ID NO: 355319 - protein, 375 aa, unidentified
MSTTATRMDEDTKTLYVAFELGEKDWKLAMSPRLGTSPRLRSLRARDTTKLLEILGKQCERSAATQIVSCYEAGRDGFWLHRFLLAHQIENRIVDSASIEVRRRARRVKTDRLDAQKLLTMLHREALGEKDLWSVVHVPALEDEDARSLQREYRTLVKERSRSVNRIKGLLASQGLVVPRMDARFLDWLAGAQLWDGSKLPPGVRARIEREYARWRFTHDQVLALDKERRDRTKDLSNAKLEKVRALFALRGIGLGAAWTWGLEFFSWRDFRNGKEVGSLAGLAPTPYQSGASEHELGISRAGNRWVRGLAIEIAWGWLRHQPESALTHWYNERFARGGPRARKIGIVALARKLLVALWRYVETGALPEGAVLKA

SEQ ID NO: 355320 - protein, 349 aa, unidentified
MIARSDAACFVGIDLHKDTLTACTIVAKDREMAYRKISCVAREKVREFLAGLPRPSVVAIETVGFYRWLWTEAEPIVDQVVLADARGCRALAGRRIKTDREDALNVAELLMTGRLPMAWAPPSNIQRVRNLTRHRVGLSRDHAKTLHRVKSIMNRLNRPGPARMDAAGLQRYLLASVDRIEADDLTVLWQHQRRLVEVEQDRSAIDRRIIELMRADEFRRLRAILESIPGVGLVVSATAIAEIGDFSRFPDGKAIGRYAGLTPTGYASADKNRLGRICKTGSPDLRWALQQAAWTAIRCDAGFKKTWLKIAKTAGKKAAAVAIARKILVLMWTLVRKDEPYKAREPVAA

SEQ ID NO: 355321 - protein, 425 aa, unidentified
MNDDVMIAVDPHKASNTAAVLDPVTKTVIEAARFANTFDGYAQLTAFAARWSQRRWAVEGCYGAGRSLAQRLAADGEAVLDVPAKLAARVRVYSRGHGRKTDKDDAVSVGLAALDGTGVFPVTPDDATVSLRLLCDRREELTAQRTQAVCRLHRLLAELTPGGMRRELSANKAQALLARIRPADDVAAVRVRIARDHLADIRALDARIKYLGGQIAGLVDASGTGLTGLFGVGPVIAGRILAEVGEVARFATKDAFASYNGTAPIDASSGEQVRHRLSRAGNRRINHALHMMAVVQIRYPDTPGRRYYERKRREGKTPKEAPRCLKRRLSDLVYHQLLADRHGTIGTCGSPTTQRPTRSTSTSPASRSHQAAPPCRPPRRPAPADSSRWTGKTAASSASRSSTPAPASTPTSSTKPKTTAKTAAT

SEQ ID NO: 355322 - protein, 402 aa, unidentified
MNCVGIDVSKGKSMIAVMRPFGEVVVSPFEVRHTANELSELAGLLKSLDGETRVVMESTGNYHAPVAWLLHDAGLYVSVVNAMLVHDYGNNSLRRAKTDKKDAVKLANYGLDHWLTLPRYIPEEDTRLMLKICYRQYQQYSKVQTMLKNNLISLLDTTFPDANRLFTSPPRADGSEKWVDFVAAFWHCECVCGLSKKAFTTKYQKWCRKHSYNFSEDKALDIYVSACGRFGVMPKTKTAKLLVEQAISQLQATSAALAALKQEMQSLAASLPEYPVVMGMFGVGPTLGPQLIAEIGDVRRFHSKKALVAFAGIDAPPYQSGQIDVRSRSISKRGSASLRRTLFLVMSVILQCAPIDEPVYQFMDKKRSEGKPYRVYMMASANKFLRIYYASVKAYLESLEHD

SEQ ID NO: 355323 - protein, 356 aa, unidentified
MSEPTYVGVDVSKARLDVAVVPSGESFSVSNDDAGVEELVGRIGRLDPALVLLEATGGLERRALARMVTAQLRAMAIDPRNVRDFARSLGKLAKTDRLDAVILARFGQAIRPEWRPMADEQTQQLHEHLTRRRQLVEMITAEKNRLLSVDHSRIRKQIKATIAWLEKQLSINEYDLDQAIKETPVWREKADLLKSVPGVGRVTAGTLLALLPELGTLTRRQIASLAGVAPFNRDSGTLRGQRSIWGGRAAVRSVLYMAALVATRHNAALASMYQRLLAAGKRKKVALVACMRKLLTILNAILRTRSPWRLSEITPLTRKTATPRLRGEGTGMTPARQLRPRASDVEAVTRWSEAAG

SEQ ID NO: 355324 - protein, 418 aa, unidentified
MQYAPVTSLPAAPAGGVTAGIDWAHADHAVCVIDDTGKVLTRHTVEHTAAGLSELLRTLTKAGVVEVAIERGDGPVVETLLGAGLTVVVISPNQLKNLRSRYRATGNKDDRFDAYVLADTLRTDRARLRPLQPDSPATRTLRATVRARRDLVAHRVAVTNQLRAHLEHALPCAIGLFTELDSPISLAFLARFDCQDRADWLSPKRLTAWLTGVGYSGRKDPRDLHARLVSAPRGATADEGAALAHTTRAFHAVLTSLLTQIKALSEQIAEQLALHTDGHIFTSLPRSGTVRAARLLAEIGDCRSRFPDPQALICLAGAAPATRQSGKHKTITFRWAVNKQLRDAVCDFAADSRRANPWAADLYDRATARGKDHPHATRILARAWLYVIWHCWQDHATYDPAKHGALQRLLNQDQQPAA

SEQ ID NO: 355325 - protein, 391 aa, unidentified
MVYVGIDVAKDKHDCFITGTGGEVLCDVFVISNNMDGFNDLFHKIRAASESFGNVKVGLEATGHYSYNLLGFLIDKGFAPFVINPLHSTLFRKSLSLRKTKTDKVDARTIAAMLASDMDFKPYSDTAYHNEELKSLVRYRFDKVKERAKLKSSISRLVNILFPELEKLVPTLHMASVYTLLEEYPGAHHVANAHLTRLKNLLYDASKGRYGDDVAVLFRDNARRSIGSRMPAKSLELQHTIKFIGEFDVAIDEIESRIKAIMDEIASPILTIPGISYRMGAMILAEIGDISRFDSSDKILAYAGLSPSTYQSGQLTSCYSHMEKRGSRYLRYAIFNAARFVCHWEPTFATYLAKKRAEGKHYNVAVSHAAKKLVRLIYALEKSRQPFVSVA

SEQ ID NO: 355326 - protein, 447 aa, unidentified
MPDASSSRRRRARLKVVNPRSAGIDIGSRFHVVAIPTELDDEPVRKFLSFTSDLQRMVEWLLALNITTVAMESTGIYWVPLYEILVAHGIEVFLVNARHAKNVPGRKTDINDAQWLQQLHSYGLVRASFQPDPCIARLRAYFRQRDVLVRYRSSHQQHIQKALMQMNLQLHHVVKDITGLTARRIIDAILSGERDPKTLAALRDRRCKESVETIAAALEGNYQEEHLFELKVAVEMFDVYSAKIQECELAGQSVLQELAGDDCIEPKRQASDWRITGNGFSFNPQELIKSVAGHDLLALPGLGPATVITLISECGLDMTRWPSAKHFVSWLGLSPQNKISGGRVLSSRTRQGTTRAGSAFWMAAVPLSRTSTALGAFQRRLSARVGKSKALIATARKLAILYYKTIRYGMEFEEHGDLAYQQASRERQIHGLEKRARALGYQLVATG

SEQ ID NO: 355327 - protein, 340 aa, unidentified
MKRYIGVDLHRRVFTCCVRLESGRQFLSEWRLQQLPQFVKKLRATDEVAVEVTSNTRLFHDAVTSHVARVAVVDPHQFRVISQSVKKTDPNDARNLALYLAKGLLPEVRMKEKEQAQVASLTQTRDRLVKLRTALKNKVNNLLSARGIELKKEELSGEKGLTRVLAMDVEELTHFELQVLVDQIRSLNHSIAELEKVIDREGKKLQGHGNLTSIKGIGSLGASILLSVIGDVRDFPDEGRLASYFGIVPRIHNSNETERSGHITKRGSKLGRTALVQCALIAKRYSPYLGNYYERIRSRRGTGRAIIALARKLLGIIYHTLKNNWVFQDFPNFVLREAAA

SEQ ID NO: 355328 - protein, 339 aa, unidentified
MNSMAVGVDIAKHVFQVHYVDQESGEIVNKPLKRAKFLEHFANRTPCLIGMEACGGAHHWARQLTKMGHEVRLMPAEFVKAFNIRNKNDAADARAIWLAVQQPGKPVAVKSEMQQAMLALHRLREQLVKFRTMQSNGLRGLLTEYGEVMSKGRAKLDKEIPAALERIAERLPAVLIDTLREQWNGLAKLDGQIAEIERRMREWKKADAAVKAVSEIPGVGLLTATAAVAMMGDPKAFSSGREFAAWAGLVPKQTGTGGKVNLHGISKRGDTYLRTLLIHGARSVLSHAKEPGPWVEQMKKRRPPNVVIVALANKMARTIWAVLAHGRPYRKDYVSVKPA

SEQ ID NO: 355329 - protein, 405 aa, unidentified
MRVVGIDVSRAVAEIAYLEHGRVHPGGRVGVERCSLERFAKGLLRPTDHVVLEATGNTAAIAETLKPFVSRVVVANPLQVRLIAEARIKTDKIDAAVLAQLYASGFLPEVWIADERTQALRRQVARRSQIVRQRTRLKNEIHSVLATHLIPRCPATDLFGKKGRAWLSEQPLPLDERVGIEQRLHELDRLAEDLVVIDRALGTEVLQDPNLKRLLTITGVNSTIAIGLLAAIGEISRFASPQKLVSYFGLNPRVRQSGEQPAQHGRITKIGRSHARAMLVEAAWAAAKAPGPLRSFFLRIRGRRGMQIAAVATARKLATIVWYVLTEQEDFAWARPSLVAMKERHLQLQAGLPARRGQRGIAADYSVRALRDRERAMVERAERAYTRFVDRWKPHGPKRRPVGSA

SEQ ID NO: 355330 - protein, 357 aa, unidentified
MKYIGCDFHPSFQQIAMLDLETGELVERRLLHASGEAKAFYEALKGPVVVGFEASGNTHWFESLLTRLGHELWMGDASRIRREDLRKQKHDRRDARVILQLMVDKRFPKVWIPTVEERDLRQLLMHRHQLVRMRTRVKNQLQHIAMNQGVQRKYKLWTEAGLKVLRELELEPWTRLRRDTLLEMLEELEQKIRPLEQAVAGEVEARPAAQRLATHPGVGPVIALATVLTMGEVKRFANSRSWVSYLGLNPRERSSGEKRRMGGISKQGSPFLRFLLVQGAASAARGDKDLARMYARLKARKHHGVAKVAVARKLAVRLYWMARTQKPYPEVVRMQGSQSHLVAEVMAVRLNRPPASR

SEQ ID NO: 355331 - protein, 428 aa, unidentified
MNKDEFSRIEQFNQFKVDIRGSSQHLIVGIDVAKDKHHAFMGSARGESLLRRLIFENNISGFGKLLTQSEAIRVKNALQCTVFGLEPTGNYHKPLAEYLIRCMHNVVLVSGVATKRNRELLDGRWDKHDTKCAANIADLISQGKCLFYETPSPQIRQLRELMSLRRRLKKEQHSLKMRIRNNLLAKYFPELDRFYKQCESQSLDIIREFLNPSEIAGMEFDQFYKTLPARKGKIIQLKRLAKIHHLACESVGCEMGEANEFEAHMLVDMLRTVGKRIEETKDLIEEISLDFTEYSLLLTIPGFGPYISALVLATIGNPYRFANRKQVLKMAGYDLNAVRSGKKSDTVVPKISKRGNAALRYGLYQAAFVASTHNLVFMQYYTKLLQGREREQGIKTKMRVKIAAKMLVVAWTLMKKNKSFNSDCLKNE

SEQ ID NO: 355332 - protein, 349 aa, unidentified
MKYRTINSEFYCGVDVHPKRSHLCILDNTGKKYLNRNMVNNFDNFKEILNPFLPNVVVGCESTYSYYWLADGCHEHRIPFYLGHALYMKAISQNKQKNDKLDAKTIAELLRTNFFPEAYPYPRLMRPTRDLLRRRHRLVRIRAEAYSHIQMVAHQYAIDGIGSEQVKNKNYRDRLIDIFKTENLLSMITSDLDVIDSFSPIIAKLEKEIKDNAIHHNPEDFLILQTTPGVGDMLSLIVLYETHDIQRFPKHQNYASYSRVVRCSQTSNGKITGKKNNNMGNPYLKWAFNSIIISAQQSSERIKKHYQRLESRYGKSNARARIAHKFNTAIYYMLKNSQPFNEKRFVQGK

SEQ ID NO: 355333 - protein, 387 aa, unidentified
MSKYTAATSTIHGSEQPTLMMALELGETGWLLGFASGFGQKPLRRKVASRDQSGLLRQVAWARERLGLSDDARVVTCYEAGRDGFWLHRFLEAQGFVSLVVDSSSIEVNRKKRRAKTDRVDLVALLDLLARHLAGSAKPVWSVVRVPSLEAEDRRHLYRELRLAKKDRTRVSHRMKGLLANHGQTLNLRKDLRVQIEAMGQWNGAPLPPGLRSRLIRYAGEYAFFTERITELEAERRRILREERDPALDKVLQLYCLKAVGMESAWMCGTEFFGWRDFQNGKQVGSMAGLTPTPFDSGSRAREQGIGKDGSRWIRGGAIELAWGWLRFQPQSELSQWYDRRFGSGGKRLRKIGIVALARKLLIALWRFLETGVVPEGALLKTDLRLR

SEQ ID NO: 355334 - protein, 480 aa, unidentified
MNVKTRRTKKQVNVENQAINLLSKEELNKKIEVVEKELRSYTWRELETNGKFAKNDKLSFITDDMLIVGCDIGSENHYIRAIDVRGRELSRGAFEFSNTSEGFENAKAWVLALAAKHDKKQIVLGLEPTGHYWFALAAWMISNGISVVQVNPYAVKQSKEIEDNSQLKDDRKDPKLIANLVKDGNYGMPYLPEKVYADMRRLSMFRDQLTEDRIRNINRLHRELKIYFPEYMDAFGKIDGAFTLQVLKVSAIPSDITALGAEGIKNIWYNVKLRGRGYSRANEIVSYAEKSVGLTDGTDAGREAVKWYAEQILKLDEQLAVVESTLHEKCREIPCAENILEIKGVGENILAGILAEMGDISRFDDVKEIQKLSGMGLVACSSGKHKGQTKISHRGRKRLRYWLFQAAKSAVSHADEFKQLHEYYTTRTNNPLKKMQSLVVIACKILRVIYTILKTGTTYDPQKLLKDIKRPTASQAPMAA

SEQ ID NO: 355335 - protein, 385 aa, unidentified
MTQLQSSSTIIPRDYDIFVGLDVDKKRMAATCVDHYTLQKSLSLPYSGKQLLNYTSKHFPGKRIAFVYEAGPTGYGLHDELTAAQHPCLIVTPAMVPRAPGKRVKTNRLDSKKLACELRGGNLIGIHVPTQSYRELRQLVQLRDTQTAQVKATKCRIKSLLLFEGIPFPESHERWTVAALKALETLPCNATVRFKLDQLLEALQFHYLMAAKVQKEVRRFCDQDPTLRQSIRFLRSLPGVGSITATHAVARLGDPSLIKNDRQIAGFLGLASSEHSTGEKENRGEITRIGDQRLRNKLVQCAWVAIKKDPELRAFYRRIYARHPQKVAARKAIVAVARKLTTRIYAVLKEQRPYEIREDFTTAPLTVEETVGLRERLDMAQNDEP

SEQ ID NO: 355336 - protein, 431 aa, unidentified
MPGGNQEKLMSQNQPEIQYAAFVSIDWADQKHVWSLQEANSRTREHGEVGHMPEAIEAWIAQMSQRFAGRPIAVAVEQSRGALVFMLSKYEQLHIFPVPPAMTANLRKAFYSSGAKTDPADTDLLQDVLQMHREKLRRLSPDTEATRLIQNLVEERRKLVDEKTAQSNRLEAHLKIYFPQIPQWFGDVDSPLVCALLERWSALEALQKARPDTLRSFFRKHHCRKEELIESRIKAIGEAMPALKDRAVVEAQLAVVKVLVQVIQVLHQGIEDFNRQIQEAAEAHPDFFIFESLPGAGAVMAPRLLAAFGSQRERYRNAAEVQTLSGIAPVTESSGKSSWIHFRFACSKFVRQSFHEWAALSITQSQWARAYYELQCRRGKRHHAAVRALAFKWIRIIFRCWKERVAYDEKVYLAALAQHNSPLLAATKIAL

SEQ ID NO: 355337 - protein, 417 aa, unidentified
MKVVHQICCGVDVHKSFIVATIIKTEGLMPQYTKKRFSTFNNDILRFKQWLLENNCRDVCMESTGKYWIPVYNLLDGEINVVVASPKWVKAVKGNKDDTKDSKWIGDLFRLGLVPGSFIPPKPIRVLREYTRYRYKLVSCKSSEKNRFQNSMTVCNVALDSVVSDMFGVSASKITDYLIESDDFDPEHVISLLHGRMKPKADAIIESIQGYQLSKAQKYRMSVINSHLGFVEKSIEKLNAKLDTLVEPYESHIALLCTVPGISRQSAITIISEIGVDMSVFSNSKKFCCWAGLTPGNNESAGKKKSVRITRAGVYLKPALVQVAHAAVKAKDSPYYKNKYERISKRRGKKRAIIAIARMILTAIFNMFSTGEVWNPTDLFKVDMPCALQERQKKKAIRNAFILLQREGLIDDSQIPA

SEQ ID NO: 355338 - protein, 526 aa, unidentified
MGSKRPTKKSRSKTAEFLQKPRGVIHPRVQKVGPEHFGIVCVDCAKARSKWMLTDFYGKILVPPTEVSHNRVELDHAVAQVRAAMTQHGILDSLVAVERTGRYHHPIKNVFAKGGFETRLVPPYATKQFRQPANPDNKTDDNDLAAIQRAAVNGFALLESTPPESWRQLQLSIRHRRDLVEKASALACQIREHLDAAMPGYAACFDKLWDSNVAFRLVRQFGSAAALLEQGLTGLCQFLRAQLVRFQRRTLDTVLAWAKNAAAPDLAADLHRQIALDYEDDRQRKNQQISTLERDIARRLVQTPYVLLMSFPGINVVSAADFAGEMGPIDNYANAKCITGRAGLFPARYQSDRVDHANGPLVRRANRSLRAAILGIADNLILCNAHFRLRAAGWKAMGKDPRHSHVKVAMRFCRIAFHMVAGRQVFHHPSPRERGYILDKLLAFHLEHQTPWKDILPDLHHAIDQIPRKEHAAEAQPLADRMRTNRNARKGAKQGPQLLADILAIVLARLEVHRLSSTPSEELDLP

SEQ ID NO: 355339 - protein, 350 aa, unidentified
MEEYIAFDSHKRYTWVEHWEVNTGKTRQYRLEHAPGAIRQALAGCSPGTAVAIEATANWYWITDEIEQAQCVPQLVHPRKAKLMMGQINKSDKLDTHGMNVLQRNGTLPTVWIPPGALRELRELTRTRVVLVAQRTRWKNRITATLAKWGLPPSEYSDPYGKKARQELEQRLERLPEQTRWATRQMLLQLDSLSTQIKEFEKRLEELMEVTPTMQWLATLPGVGVILSATMALEIGDIRRFLSAERLASYSGTVPRVHSSGDRTRYGRTRPDVNRYLKWAFAEAANSTAVNYRRFPERHVSQLYGRLRARKGHNKAVGAVARHLAEAAFHVLSRQQAYRDPATAGRTTEV

SEQ ID NO: 355340 - protein, 362 aa, unidentified
MRIIGCDLHARQQTLAMLDTTTGVVLEATLKHEGDNVREFYSSLPSPVRVGIEATGSMQWFLNLLEELGIECLVGHPAQIRAAEPRKQKNDRRDADLILKLLAENRFPAIWLPSKELQDLRSLLRHRHQWVRMRTRIQNALQSIALANGLRRGTALWSHDGQSRIASLSLAPHTAYRRSELQAMYEKFEVEIEKLNQRVEQQACQRPGARLLMTHPGVGPITALATEVFLGNPARFADSKALASYVGMIPREYSSGGRQRLGGLSKQGNPLLRFLWGEAGAHAARKDPELQRFYRRKLVQKGLGKASVAVARKLGIRLWIMLRDQIEYNEFCRRRQKQQKSSDACAGMPETPYGARSHRPVD

SEQ ID NO: 355341 - protein, 340 aa, unidentified
MNVTTIGIDLAKSVFQLHGIDAGGGVIFRKKLRRSAVLNFLRDLPPCLIGLEACATAHFWAREIGALGHEVRLIPPAYVKPYVKRQKNDAADAEAICEAVTRPNMRFVPVKSVARQGVLMLHRTRDLLMRQRTMTLNAVRAHLAEFGLITAQGPHKILTLIRAIRAGKVPGLPEIAGAALESLATQLDNLAGEIRRLERQLMAWHRADETSQRLETIPGVGIITATALAASVPDPSVFKTGRQFAAFLGLVPRQNSSGGKDRLGRISKMGDGYLRRLLVVGATSVVRRAGGNTSATGAWVRSLLERKPARLATVAVANKTARIAWAVLARGETYRAPMTA

SEQ ID NO: 355342 - protein, 403 aa, unidentified
MNSVGIDISKGRSTVAVMRPFGEVVISPFEVRHTDSELSELARQLKSLDGETRVVMEATGNYHTPVAKLLHDAGLYVSVVNAKLVHGYGNNDLRRVKTDKKDSVKLANYGLDRWLTLTRYVPEEDTRLLLKNCYRQYRQYSKVQTVLKNNLISLLDTVFPNVNRLFSSPIRGDGSEKWVDFVAEFWHCRCVSEKSQKAFTNKYQRWCRKHGYNFSEAKAHTIHADACGHIDVIPKSETTKLLVEQAVAQLRATSAALAALKHEMQALASMLPEYPVVMDMFGVGPTLGPQLMAEIGDVRRFYSKKALVAYAGLDAPPNDSGDVTGRHKSMSKVGASSLRRTLFLVMSVYLQTAPLDEPVYQFMDRKRAEGKPYRVYMMASANKFLRIYYATVKAYLESLEHTA

SEQ ID NO: 355343 - protein, 340 aa, unidentified
MPLSGGIDLHANNSVVVLLHEQDQVIYQKRFPNHLPTILEPLSRHHREIEGVVVESTYNWYWLVDGLMEVGYRVHLANPAAIQQYSGLKYTDDHSDARWLAHLLRLGVLPEGYIYPKGERAVRDLLRKRAHLVRQHTANVLSVQNIMARNTGARCSVKRMQALTKQDLTTLLAEEAQVLAVTSSLVVLDCLRQQIKTLEKTIHTGLHHTPAYEQLLTVPGIGTILAQTIRLETGAISRFPTVGHYASYCRCVDSTKISNGKRKGTGNVKNGNPYLAWAYMEAAQFALRFQPAAQRFYQRKLAQSRNNTILARKAVAHKLARACYYIMRDLVPFEAAKAFG

SEQ ID NO: 355344 - protein, 425 aa, unidentified
MNYKQNEKINQVKESTLVVGIDIGSTTQYARAFDWRGIELGKVFPFSNSREGFESFKAWMQHLQDKYRKSDVIVGIEPTGHYWFDLGAYLEDEGILLVMVNPYAVKQTKELDDNSQSKNDRKDPKVIAKLVTEGRYSAPYTPDGVYADLRIMVANRKRLIREMTQIKNRFARWFAIYFPEYTDVFGDYEAQSSMLLLKKVCTPEAIVELGAEKINQIWRDAKLRAVGMKKATTLCETAKRSIGLKKGSSAARYEMKLLLEDYEYKKAQLDAVMEEIEKLCRKIPESEQMLAIKGIGVITVAGFLAEVGDVRRFESPRQIQKLAGLSLRENSSGKHKGQTTISKRGRSKLRAVLFNAAIPLIAKNPEFKSLHEYYTTRANNPLKKKQSVIAISCKLIRVFYAILANGVTYDAQKMLSDIHRQPQAA

SEQ ID NO: 355345 - protein, 385 aa, unidentified
MSQLNDLSRSLTSLEQDNAIIAVIEMSQSSWLVAGIVPGIERHPLKKLEPNEAELLRLLMRWRAEATKMGCTITRIAVAYEAGRDGFWLARWLRAHDIETYVIHPTSVAVSREHRRAKTDRLDTGLLKRVFIGWLRGEPDHCHMVKIPTLAEEDAKRPNREREGLVRERTRIVNRMKSCLARFGVRSFKPTLRKAPERLATLVTPEGVPLPANTLLELRRDMARLRFIMDQIKEVEEARGQRLGQAPQEKSHAMVRLLARVIGVGIETADMLVHEILSRSLRDRRAVARYAGLTGAPDESGSRRQEKGLAKAGNARVRRGMIQLAWRFLLFQKDSALAQWYRTRTESAGKKRKTMIVALARKLLIALWRLVTIGEVPTGVVLRAA

SEQ ID NO: 355346 - protein, 350 aa, unidentified
MQGRGTRREQDSGKEVAVKAARLAGIDVGARHLKIEIEDARDARCALEVPNTPAGHRRLIRRLTQGGRRVRVALEASGIYSLDLALALHRAPRFEVMVVNPRAARDFAKAFLLRSKTDAIDAWVLLEFVRRMPFVNWQPPRDAALALRAFARRIAALVKIRSQEKNRLHATEHCRELPAAIRNDIEVNLRHLDRRIQRLEEQAVDVVWADPALRHDLVLLTSIRGIVRSSALQILAELRVLPDDLSPRQWAAHAGLDPRAFESGDSVAKPARISRVGNRYLRAALYMPALVASQHEPHVKAFYDQLLARGKKPKQALAAVMRKLLHSIHGMLRSGTDFDGERFLALPQGT

SEQ ID NO: 355347 - protein, 424 aa, unidentified
MKVTFQTCCGVDVHKSFLVATIIKTTGGIEPSYQKRRFSTFNNSILEFKKWLLENECLYVCMESTGKYWIPVFNLLEDEINVTIANPKWVKAVKGNKAHTKDSKWIGDLFRLGLVRGSYIPCKKIRILREFTRYRYKLVSCRSSEKNRYQNALTVCNVALDSVVSDVFGKSSTSIIDYLLEQSGTSIDHEVIASKLLKRLKAKEDAVIESIEGYQMTDSQKYRMHLVRAHMDYITAAINDVDSEIESLIASDPDYENAVELLCTIPGVKYDSAITIISEIGIDMSQFCSSKRLCCWAGLTPGSNESAGKKKSVRITRAGVYLKPALVQCAHAAVKSDKSPYYKKKYESLVERRGKKRAIIAIARMILTAIFQMLTTGETWNPCDLYKIDMPEALLEKQKQKAIKQAQKLLIREGLLPPTEPIAS

SEQ ID NO: 355348 - protein, 361 aa, unidentified
MSKMHAVRGRREPDATLVHNTGGEHGAPPVVLMTRTVARAGCRARICKDGEMDKIFVGIDVSKDRLDVHIQPSAEAFAVARDENGIKELIRRLQGVSPTLVVLEATGGLQVKVAGALAAAGLPVAVVNPRQVRDFARATGQLAKTDRLDAKIIALFAAAVQPEPRSLPDEAAELLRALIARRRELIELRVAERNRLRQGAPAWVQRDLERSIAALTKRIEAIDAEIENSVKGSPIWHVQEDLLRTVPGVGKTVSRTLIAELPELGKLTRRQIAALVGVAPFARDSGIFRGRRMITGGRPGVRAMLYMAAVSATRCNPIISAMYKRLTAAGKPAKVALTACMRKLLVILNAIARDQRPWQKA

SEQ ID NO: 355349 - protein, 354 aa, unidentified
MEVLYPRCAGLDLGKDALVACVRIHGREVQQECRTFGMTTRELLALSGWLTGYGITPVAMEATGTYWKAVWHLLEPAFALVLANAAHVKGVPGRKSDVNDAMWIADLLAHGLIRGSFVPPEPIQDVRDLTRTRKQLVREIAQHTQRIQKTLDIANLKITGLISDVLGVTGRSILRALIAGETDPVRLADLARGTLKAKRAALIEALTGRVTAHHRRLLKLHLHLIEQLEAAVAEIDQQLGETLAPFREAVTRLDGVPGINTIAAQAILGEIGLDMTRFPTHEHLVSWACLCRRLDDSAGKRKSTRTRKGACWLKTVLVQCAWAAVRTKDSYLRAQFLRLRARRGPKKAIVAVAA

SEQ ID NO: 355350 - protein, 304 aa, unidentified
MFGIGIDVSKATLDVAVHGEQFRQFSNDKRGFVRLIRWLKTWPIKQVVLEASGGYERAALDVLHAAGLPMVRINPARARRFAQGTGRAAKTDRLDATVLAQMAHLLPLTRYVPPAPWQQRLAEFAQCRRQLVQMRVSEMQRLRRLVDPDLIAMKQRHIAQLSDDLKQLDKAIAEQLEGQPGWKNIGALKGVGPILISTLACELPELGSLGSKAIASLVGLAPMNRESGTWQGQRRISGGRAVVREALYMAALTAIRYEPRLRAFCAGLKAKGKASKVALVAVMRKMLVILNARKRDAEVALSCP

SEQ ID NO: 355351 - protein, 447 aa, unidentified
MEITYTHCAGLDVHKRTGVACTLVPGAGGEILKEVRTFSTMTGELLKMGDWLKSQRVTHVAMESTGEYWKPVYNLLEDGFTILVVNAQHIKNVPGRKTDVKDAEWIADLLRHGLLRGSFIPPLPQRDLRDLTRQRTKLVQQRASVVNRLQKVLEWANLKLAAVVTDVTGASARKMLQALSEGSCDVEQLAGLAKGRLRRKLPELQQALTGQIRPHHRFLIASHLTHLDFLEEQIAVFDEQITAHIVQMPLAEPTSPAPPVFDQATEDSTESTSCDPPVPLSWEKAVALLDTIPGVGQQTAELLLAEIGCDMSRFQSFAHLAKWAKLCPGNHESGGKRYSGRTGQGNSWLRTGLIQAAHAAVRCKNTFFQAVYQRLVKRRGKYKAIVAIAHKILKVAYHVMCQQQPYHDLGADYLDQMRPEKVLNRLCRRIKQLGYQVKLEPTPSGAG

SEQ ID NO: 355352 - protein, 420 aa, unidentified
MVYLERGYNLKELPWSKTVSNSFLFKEACMILVGVDVAKDKHDCYIMTSEGEVLFKSFTIANNMEGFNQLYEKILSVIDNFDNVKIGLEATGHYSYNILGYLLDKGLTPYVINPLHSNLYRKSLSLRKTKTDKVDSRIIASMLMSDVSLKPYSNTLYHNEELKSLTRYRFTKVQERAKLKISISRLVTILFPELEKLVPTLQMNSIYALLYEFPSAHAISKAHLTRLTNLLNTTSKGHYTKDKAVLIREAAKNSIGSNMPAKSLELKHTIKLIKELTSEINEIEEEIKIIMNKINSPILTIPGIGLSTGAQILAEIGDFKNFSSPDKLLAFAGLSPSTYQSGNMYSSNTKMEKRGSKYLRFALFNAAIYVSYWEPTFSQYLKKKRVEGKHYYVAISHVVKKLVRVIFHLEKTNERYSTVV

SEQ ID NO: 355353 - protein, 338 aa, unidentified
MRLCGAIDLHSNNNVTVLIDEQDRVIYQTRLPNDLPTIVQQLSGYQSSLEGIVVESTYNWYWLVDGLMERGHRVHLANTAAIQQYSGLKYTDDDSDARWLAHLLRLGVLPQGYIYPKEQRPVRDLLRKRSQLVRYRTANLLSIQNLFTRNTGQSMSANCIKALQVEDIDGIVPANDLALAIKANLSVMRSAEEQVEVLEQTVTGRVKLRPEFRFLKSVPGIGPILALTIILETGDICRSSTVGNFASYCRCVGSQKLSNGKRKGSGNSKNGNKYLSWAFVEAANFAIRFSPKIRSFYQRKKAKSHRVVAIKAVAHKLCRACYYIMKDQVPFDITKAFA

SEQ ID NO: 355354 - protein, 328 aa, unidentified
MNIIGIDVSKNKLDCALINGSNHAKFKFKVVSNSEDGFIALIDWLSKHIKSTVPEYHFVMEATGVYHERCAEWLFNTDSKVSVVNPAHIKYYGKSLGVRSKNDKKDSVVLARYGLTQKPIAWEPEAPEIRILKALASRLDAIEKDILREKNRHEKSSINPCSDSVLDSIKMILAVLNEEKTNLERLIDLHINQYEYLQHNYALLLTIPGVGPVVSRYMLIVIGSRTFKSASQCAAYIGLVPIQNESGSSLRGRSRLSKAGNPVIRAKLYMAAISALQHNPDIKIQNQRLLKNGKSKMSALCAAMRKLVHICFGVIKHQRPYQVQANLI

SEQ ID NO: 355355 - protein, 375 aa, unidentified
MNKIIRIGMDTSKSVFQLHGVDAAEQPVLRKKLRRRDVLAFFAKLEPTRIGMEACGGAHYWGRALRALGHEVVLLPPQYVKPYVQRNKNDAADADAICEAMSRPRMRFVLVKSAAQEAVQMLMGMRVRLVGCRTQLTNAIRGHAAEFGVVAAKGLDKIEPLLARIAADPTVPDLAKDLFALQDQEYARLKAEIRQIEAKLMAWHRNNELSRRLAEIPAIGPIGACLLAIKVTDPQAFRSGRDLAAWIGLTPKDHSTAGKRRLGVITRAGDETMRWVLVAGATAVIQQVCKGRGNPSPWLLDLVRRKPPKLAAVALANKTARIAWKLMVSGERYDPAAAIQPRERRRAPHNGGCAQRRSRVPCPTTGGTVHATLEA

SEQ ID NO: 355356 - protein, 361 aa, unidentified
MVQSMSLVGLDVHASQTHAAVLDLSTGELRGVKLRMAPGQVVEFLATLPGPVRAVYEAGPTGFGLARSAVARGIDVRVVAAGKVPRASGDRVKTDKRDAERLARLLAAGELRFAFIPSVADEHFRDVIRAIEDCRGDLMRARHRLSKMLLRREIRWTGPGSTWTVTHMRWLRSLRFDDPCSQAVFVDYLSGVEMLVARRTALIAALERVIPDSRHAATIAALRCFRGIDTLSAAGLCAEVGDWQRFRPKQLSGFLGIVPSEHTSDAKRRQGSITKAGSGHARRLLVEAAHHYRHRPAVGDGLARRQHGQDPRAIEISWRAQRRLHQRWQVLAGQRRKPAGVVAIACARELAAFCWEAATLS

SEQ ID NO: 355357 - protein, 274 aa, unidentified
MQVTTIGLGLAKNVFQVHGITEDEEVAFNRPLRRAQLLPFFSKLDPCLIGMEACSSAHHWARELTAFGHEVRLIPPIYVKPYVKRGKSDAIDAEAICETVTRPTMRFVAIKTGEQQALLSLHCARSLLVRQRTQLINSLRGMVAEFGVYTAKGLAQIVGFAEDILTGEVLDLPDIAHEVIHNLCEHLMALHTRIRWYENRLKLVAKEDTRVRLLRTIPGVGAVTASAIVASIGDGHQFRNGREFAAWLGLTPANKSSGGKERLGRITKMGDQYL

SEQ ID NO: 355358 - protein, 347 aa, unidentified
MHNPEVRSGEVAGLDVSAQELVVMVRRDGRTEASRSFPNTTQGHQDLRRYLTQARERVRVCMESTGMYGLDAALALQADSRIEIMVANPRAVKDFARALMQRSKTDPLDAWVLLEYAARMPFQPWTPPPAEALQITALARRIHALTQEMTMEKNRLHAVAASATTLRVIVQDLRRSIASLEAAIAKLSRAAHKILAASPALERRFRWLQSTPGIGEVSALQLLGELVLIPAHCDVRQWVAYAGLDPRHHESGTSVHQKAHISKVGNRHIRRALYMPALTAVRFAPSLRAFYLHLQARGKCKMVALVAVMRKLLHAIFGMFKHDAPFDDSKVCPALSLVAPAEVAHAA

SEQ ID NO: 355359 - protein, 436 aa, unidentified
MRGCRCSMIMGFTKPIEHSNLTTKEGDFMNPLYVGIDVSSKSNVVYFMLPDGNKHSNFSVANSQDGSVQLVKRICSALNSQSLDTVLIGLESTSVYGDNLVYFLREDASLASFNRKIHVLNPKQVKKFKDAYNDLPKNDYVDSFVIADCLRFGRINKEVYIGDYHYKALQNLTRARYFAVCSLTKEKQRFINVLFKKYSTMTQEKVFSDTFSTTALAVYDKFESAEALAYMDLQELTAFIMKKGKNRFPDPDAVAKAIQKAARSSYRLPKTVNDSVNQVLSISITSIKALEAQIKEFDKAISAQMELLQNVLISIPGIGPVYSAGIMAEIGDINRFENQAQLAKYAGLAWTQHQSGDFEAQNTRLIRSGNRFLKYYLCEAAFSLVRCDKEYKAFYHQKYKEVNRYQHKRALALTARKFVRLVFTLLKDNRLYRPAE

SEQ ID NO: 355360 - protein, 421 aa, unidentified
MSSMTAIAERANLPELPEEARVVGIDTHKHTHHVAILDHLGRPVADRQFPTTSSGYSQLVDFIHDHGPIDQVGVEGTGSYGAGVARELAKSGLRVVEVTRQNRQARRLRGKSDPIDAHQAALAVLAGTDTSVPKSSNGHVESMRILMSERRSAAKARTQTMNQIHALLITAPDSVRADYRALAGDKLISTLARSRPPAVGGTGPVVVARQSLKRLAARHRMFQGEIDEIEKQLDTLIRLINPMLFSLNGVGPFTAATLLVAAGDNPERLASKASFAALAGVAPIPASSGQRTRHRLSRGGNRQANNALHRIVLLRMRHREPRTMAYLTRRRAEGLTDRDIVRCLKRHIANEVYAALLNPGTGNLAGAKLRERRQRAGIPITMLAATLGVPYQQLRRLEIGTRTDPDLDHRATLALDQLEAA

SEQ ID NO: 355361 - protein, 394 aa, unidentified
MKNVLFAGIDVSKDSFDIAIINKNKKIVMQSKFEMNSKGFNDLSENIAKLQYDELLFVMESTGVYHLNLYLHLIDNNHKAAVVNPILIYNFARSISLRKTKTDKKDAETIADFALSNQQKIDFSNKEDNSIRNISRERDNLAQNVAKLKTEIKNVLHVLFPELTKHTNIFTKTMLKLLLKAPGCIPILNLKPQQITRFFNNTRGNKIQISAKELKTLAKESIGIKDVYLENVLICKIKRLLFITEQIKDMNNLLKMFVKENLQQDFEIITSINGIGDTTAEKFLIEIADINNFKSHKQLRAYIGTDPSIKQSGSSININGRISKRGNAYLRKTIWQMAVGVIRCCKQFQDYFNKKISEGKKYKQAVIAVANKLIKTLYAMLMNKTYFKVNIKPN

SEQ ID NO: 355362 - protein, 344 aa, unidentified
MTYYAALDVSLRSVNLCVIDDQGEIKAETKLASEVEDIACYLHGLDYIVSSVGLEAGTLTQYLTYGLQSAGFEVICMESRQVKAALSAMRNKTDKHDARGIAQILRSGWYSRVHVKSLESHHIRLLLSSRKAVLSKCVDLENEIRGLFKVFGIKLPPKLGHGAFDAAVRDTIEADAALAHALLPLLEARLYLYHTFRELDNRTRKMANRDVVCQRLMSAPGVGFITSLTYKAGVDDPSRFKRSRTVAAHFGLTPRRCQSGEIDNPGHISRAGDPDVRCALYTAANAMLTRSSRWSSLKAWGMQIAKTRGHRRAVVAVARKLAVILHRMWIDDTQFQWGTEEVRS

SEQ ID NO: 355363 - protein, 342 aa, unidentified
MEIRTIGIDLGKTVFHFVGVNARGEVVVRKKGSRTQLLRFTSNLPKCLIGMEACGGSHFLGRALREQGHDVRLMPAQYVKPYVKTNKNDYIDAEACAEAVTRPSMRFVPIKTDDQLDLQSLHRVRERWVGRRTSVINQIRGLLLERGITIRKGRHHIEESLPGILEDPDNKLSGALRVLLTQLRLEMQYLHRQVEESDKLIVRIAGELEPCTRLVAIPGIGPITATATIAAIGNGAAFKKGRGFAAWLGVVPGEHSTGGKQTLTGTKRRGNKYLRKLFVQGAHSVLLQRTKQSAGLSTWLAQLTTRKRAQVATVALANKMARMAWAVLYKGEAYRPPQVIAA

SEQ ID NO: 355364 - protein, 345 aa, unidentified
MKRVIAGMDLHSNNVVIGVMDTDGKRVASRKVDCDLKAVARFLAPFKKRLQEIAVESTYNWYWLVDGLRALKYPVVLANPAGMEQYRGVKHADDTHDAFFIAELLRLKILPTGYLYDPQLRPVRDLLRRRLLFVQQRTALILSFKSLYARTTGRELALGRLKTLEIKGAEELYDHPANQLIAGMQIQQIEQLTRSIEEIEKAVLACARELPCHSKLMTLPGVGRILGMTITMEVGDVKRFAEPGHFASYCRTVEAKRISNSKKKGENNSKCGNRYLAWAFVEAANFARRYDAQCRKWFDRKAATTRKVIATKALACKLAKAAWHLMAEGADYDPRRMFGQPMTTK

SEQ ID NO: 355365 - protein, 344 aa, unidentified
MKGTMIGVDLAKNVFQIHGASMTGQVKFRKKLTRHQFRQFMVAQAPVILVMEACGSANYWAREMVGLGHEVKLIAPQYVRPFVKRQKNDMADAEAIVIAAQRPEMRFVEPKSEDQQARAVLFRARERLVHQRTDLANALRSVLYEYGYTVPQGIRQLKRIELILDEPNSGLPMLVREECRDLMTQIVEKTARIEAKTKKVKKLAEQTDTARQLQTMPGVGPLTALAIEAFAPEMTSFRRGRDFGAWLGLVPRQHSSGGKERLGRVSKAGQADIRRLLIIGAMSRLNRMGRKSIPEGSWLAQMLSRKPRMLVAIALANKMARAIWAMLTKNEDYRDPIFAKAAAE

SEQ ID NO: 355366 - protein, 348 aa, unidentified
MADVITTVDTETGEFTEKTLSHEGNAVREFYGALEGPVVVGIEATGAMQWFLELLEELSIECRVGHPAKIRAAETRKQKHDRRDARLVLDLLVMEDRFPQIWMPSTEQRDLRTLLRDRHQWVKMRARLQHTLQAIALNHALRQGHALWSAAGQSALRALPLPPYTGQRRNELLGLYTQLQKRIQELDQEVEAQARQRPQARRLLTHPGVGPVTALATEVFLGDPKRFTTGNQVASYIGMIPCEHTSGKRQRLGKLTKEGNSLLRYLWTEATLHAVRKDPELKRFYRRKLIQKGMGKARIAAARKLGIRLWIMMRDQIDYQEFCRRGKLRQSGEAHAGMPDFNGGPAPQ

SEQ ID NO: 355367 - protein, 312 aa, unidentified
MEAKFVGIDVSKATLDVDCLPVSTARQFSNDAGGIAALVEWLLGSGVERIVVEATGGYEIAVASALAAAGLPVVVVNPKRVRDFAKAQGVLAKSDRLDARVLALFGERIAPPVRALPQPAQRDLTELLDRRHQLVSMRAQEQARLATVLPVARGDVEQHIAWLDQRIRKHETVLLKRLRANEIWDAKVKLLDSVPGIGPVNLFTLVGRLPELGTLNRQQIAALVGVAPFNDDSGKRRGQRYIRGGRAEVRCALYMATLTAKRCNPAIAQMFERLIAKGKPFKVAMTACMRKLLTILNAILKSTQPWENRLAT

SEQ ID NO: 355368 - protein, 408 aa, unidentified
MLYIGVDLSDKFFDSCITNSFGDVLDRNRFDMNHDGFCSFLKLIQEHQTDSQECIIGLENPRSGLVDFLAQHGYTVVLTNPNAISSYRKSRTPSNAKSDEADAQLIADYVREHHKSLRRIQMPDETMRELSLLLEDRDRLIQQRIRFSNQLTSTLKEYFPQALDAFGSIDNKCTIKFLKRVDTFAQVKALSTKKLEQLLKECGIYRKDSKERFYQAIKKPVYHISQAVVKTKVRLKNAIIAHLDLLVQQIQEYERQIQSLMDDSPDGHIFRSLPGADYILGAKLLVLYSTRDFTDASEAQQLFGTVPYTAMSGQSRFVGFRRGANKLGRNTFQQFARCSIQSSLWANKQYAKRRNQGKSSNHAFRCLANTWVKITFAMWSNKASYDEAKHLASITNHLINQPAFVNRD

SEQ ID NO: 355369 - protein, 402 aa, unidentified
MNAVGIDVSKGKSMVSIMRPFGEIVSAPFEIKHTASGINSLVELINSVEGESRIVMEHTGRYYEVLAHQLSEANLFVSAINPKLIKDFDNDSLRKVKSDKADAVKIARYTLDKWQNLKQYNVMDELRNQLKTMNRQFGFYIKHKTAMKNNLIGILDQTYPGVNTYFDSPARSDGSQKWVDFASTYWHVDCVRKMSLNAFIDHYQNWCKRKKYNFSQSKAEEIYGKAKELVPVLPKDDITKLIIKQAVNQLNIASATVESLRTLMNETASQLPEYPVVMAMKGVGTSLGPQLMAEIGDVSRFTHKGAITAFAGVDPGVNESGSYEQKNVPTSKRGSSNLRKTLFQVMDALIKTHPQDDPVYQFIDKKRAQGKPYYVYMTAGANKFLRIYYGRVKEYLSSLPES

SEQ ID NO: 355370 - protein, 354 aa, unidentified
MAEGLKNAIAVIGIDIGKNSFHVVGLDECGAIVLRQKWSRGQVETRFANMPPCLIGMEACVGAHHLSRKLNALGHDARLMPARYVRPYSKGQKNDFRDAEAIAEAVQRPTMKFVATKSADQLDLQGLHRVRERLVSQRTGIINQIRAFLLERGVAVRQGLRFLRNELPGILAAPSDALSPRMVHILEDLAGDWRQLDERVEGLSKEIETIARRDAGCDRLISVPGIGPIISSAIVAAIGAGDVFSKGRDFAAWLGLVPRQISTGDRTILGKISKRGNRYLRVLFVQAAWVVLIKPKSWERHGLKSWIEAARKRLHHNVLAIALANKLARIAWSVLAHGRSFEASKLAAAVIQPA

SEQ ID NO: 355371 - protein, 404 aa, unidentified
MDARPSTVPRHAGVDWSWDRQAVCVIDRDGTVLDRFDVAHRADALRRMTDRLHRLDVHRVAIERPDGPVVQVLLGAGLDVVVISPRQVRAFRLRHGTAGNKDDRFDAFVLADALRTDGHRMDPLVPDRDDTRSLRALVRARKDLIEHRIALSNQLLANLQHAFPGAVGLFAQLDSPISLTFLERFPTADKADWLSERRLEAWLRSVGYCGRQTATELIEHLRQAPAGLRGDAGFGHGIVTVQLVGALREVRGRIEELDRRVAEALALHPDGGIFRSFPRAGTNRAALLLAEIGDCRSRYPDESSLAAAAGVAPSTRASGKRRSVSFRRGCDKQLRGALIDFAQDSVRASAWAKEIYDRARARGCRHPHAVRILARAWVRVIWRCWTDGVPYDPSSHGGLTRLVT

SEQ ID NO: 355372 - protein, 377 aa, unidentified
MKAPSTRPAAVLGLDVGKSSHWACLIDRDGEVLASAPVRNREAELDALFASAPAGTLVVVDQFRNIGSLAVRRARAAGLGVAHLPGLAASRAAGLFAGEAKTDERDAAVIARTALGVPDSLSGIPGRGEALEAARALSSQRDHVVACATRDKNRLRAVLLESCPALEAAVDLSDRRWLELLAGFGGAWGIARSGAGGPRAEAAGEAAAASTAPPPALVEAENRQVRFLAARISEALDEAGALEAETAALLEGDETYACLLTVPGIGPRTAAQLAVSVDIGRFPDHDHLASYCGIAPRVRSSGTSVRSVRASRRGDARLKSLLIFSCNSLVRSSGRYGEYYRACRARGMGHGRALKAVARKRLRAIYAVMRDRVPYRE

SEQ ID NO: 355373 - protein, 355 aa, unidentified
MNQEKYIGMDVHQATISVAVLDSSGKLIMECLVETKAATILEFIAGLRGTLSVTFEEGTSAAWLHDLLKPHVSHLVVCDPRRNALLKDGSKSDRIDARKLAELLHANKLHAVYHGEHGVRTLKELGRCYLTIRKDLTRVMSRIKALYRSWAIPCRGTTVYAVRHRAEWLAKIPEPGVRLRAERLYQQLDLLQPVRQEARRDLLVESHKHHAVKLLRQIPSIGPIRAALLVALLPTPHRFRSKRQLWAYSGFAVEIHDSGEYRFVRGKLVRNRERITVRGLNPNHNHDLKNLFKGAALSASTRPGPLYDFYVALVEKGMRPTMARLTLARKMAAITLTIWKKGVEFDAKQLQRQAA

SEQ ID NO: 355374 - protein, 343 aa, unidentified
MKITPVRIGMDTAKSVFQLHGVDANEEVVVRRQFRRSEMIRYFEKLPPAVVAIESCGSSHHWARLLTSFGHDVKLIPPQYVKPYVKRGKNDAADAEALCEAVTRPSMRFVPVKSKEQQAACMLMTVRERLVSVKSQLSNAFRSYAAEFGIVGAAGRQNVNTLIHQVLNDDTLPELARDLFRFQAKEYAAVEARLEEIETKLMKWHRANEASRRIATIPGIGPIGAAMLSMIAPPAESFRSGRDFAAWIGLTPRDHSTGGRMRHGGITKAGDAALRSVLVVGATALLRHIRSGRHKPTPWIAALLERKPPKLVAVALANKFARIAWRLMVSGGIYSRPSENMPA

SEQ ID NO: 355375 - protein, 414 aa, unidentified
MDIVHSHCAGLDVHKKTVVAAIIVLDPKGGLHKETRSFGTMTIDLLALSDWLMEHGVTHVAMESTGEYWKPVFNILENNFEVLLVNAQHIKAVPGHKTDVKDSEWIAELLRHGLLRASFVPSLGQRELRELTRYRSTFVKERATLVNRLQKVLESANIKLASVATDVMGVSGRAMLEALIEGNAGPEEMAELAKGRLREKRELLAKALQGRVKFHHRFVLTELLCQIDGLNETIARFDEQIQEYCRPFEEVVELLDTIPGVARETAEIIVAEIGTDMSRFPSADHLASWAGVAPGNNESAGKRRTGKTTQGNHALGVALNHAANAASHTKNTYLSAQYHRLASRRGKKRSIVALEHSILIIAYHIIQRKEPYSELGGDYFDRRRPEATTQRLVKRLEHLGFQVSLQQMPASVAI

SEQ ID NO: 355376 - protein, 402 aa, unidentified
MAYDFVIGMDVGKYFHHACVLDPQGRQVLSKRINQHEGSLRKLFGKFLANDAEVLVVVDQPNNIGRLTVAVAQAMGADVRYLPGLAMRQLSRIHVGNSKTDVRDAYVIAHAGLNLPDALRSVDRVEEIFLQLKVLNGIDEDLARAYTRLINQMRSALVGTYPAFEHVLRGQMIHRKWILHLLAKYGGPTKIRRVGKARLTAFARGHRARNPEPVIDAMLAALHGQTVSIAGAEYAELGVAMSAKDALAKLEHRKEIEAQVLELIQDIPQTEILLSMPGIGPRSAAQILMTVGDMSDFPNAAHLASYAGLTPQTNQSGTSIMSNSPNRAGNKKLKNALWQSSFASIRFHERSRQFYERKRKEGKRHNAAVVALARRRLNVLFAMMRSGELYRDIPTAQEAAAA

SEQ ID NO: 355377 - protein, 411 aa, unidentified
MNPVIGLDVAKGESQVQAYLERKKPYKKSFKVKHDLDGLASLLDFIKELEDISGERPPLVLESTGHYHTPVVQYFEDKGYLIIIVNPLISYKAKSSSLRKVKTDIIDANHLCELYYKEDLEPYKKRGIQLTNLRHLTRQHDNVTGMFVQTKLQFQAVLDQVFPEYTNVFGDLYSDVSLKILHAFPTSEDILKANIEVLATKIKEFCNSRSLEWANKQAEKLMTAAAQNPFQKALYSSLSLSLDMYINMLFEYKKHLSMLENEIDALANSIEESKIIRSIPGIGEKIAATIVSEIGEIERFNHPKKLVAFAGIDPSVFESGTFKGTYNRITKRGSSRLRQALYMAVKCAIRDCRKQKTTDEILPRNKKLRAFYDKKREEGKPFRVAVIACANKLLHWIYALLKSKTAFQDLA

SEQ ID NO: 355378 - protein, 413 aa, unidentified
MTQRPPQVWAGIDVGKRHHWITVVDADGDPLWNRKVINSEPDILTVFGEVMDAADHVTWALDLVDGPAALLLGTLANHGQSPRYVTGSKFAAFKKSFSGQGKSDLKDSYVIAEFARCLRRQTVPVPAPPRITKELTLILSHRNGLSAERTRTINRMRAMLTSIFPELERSFDFARSDGPLVLLSGYQTPAAIRRMGESRLTAWLAKRGVRKAATIAEKAVAAAKEQDSAISGENLAAELVAELAQKITQMNVRLKELESKIKEILSQHSQAPIVLSMPGFGELLAAELLAAIGDISRFPSAGRLAVASGMAPVSRDSGSNTGNRQRPTQYSRPLQRAFFLSSQSACLTTGTWEREMYLRKYQGYMHDRGRHKKAVIAVARQRVSIMWAMLRDGRVYEREYNPREKAADEAQAA

SEQ ID NO: 355379 - protein, 344 aa, unidentified
MLYVGLDLSRKRLDFDARLGGGELVERGAVPPDADGLAGLVRRLGDAQVLAVIESMNGARYVHDHLEREGWDVRIADAVKAKGLAPLACKTDKIDAWVLAELARLNLVPEIWLPDPAVRGERERARFRLHLVKHRSALKNRIHSILIAHGVASPSSDLFGMSGRRMLERLSLPEPWRSTTAASLALIDTLDEEIERCERELRSLGADHRYVPLLMTCPGIAWILAFTIASEIGDIARFPTPVKLVGYSGLTPRVEQSGESDRRGPLRKNGPDHLRWALVEAAHSASRHALYRPILERNRDRHGRKRGTKIAALTIARKLAEAIWYMLTRNQPFAPAGATRPLAA

SEQ ID NO: 355380 - protein, 430 aa, unidentified
MAAYCGIDWAEGHHDIALVSDEGKLIARAAAHRRRAGHAESLDGLAEFTAMLDAAGDSPEAPIPVAIETPRGLLVAVLRASGRPIYPINPLAVARYRERTSVSGKKSDHVDAMALANILRTDAHLHRMLPGDSALARLITVLARAYQDGVWRRTKLVQELTARLREYYPGFLAAFAVGVGRRMSTTQLASGDARAVLAIAPSPAEGLKVYRARVEAARRLGGRQRRAGTLAASIVAALRVPQLRQDPVVEQAMRTEALALLGVLDAICASVDHLAAELIDAFAQHPDYEIVTSFPGLADISGAIVLAEIGDDRGRFHDDRALQAFAGSAPVTRASGKSRTVTRRRTKNNRLASVGYSWAFGAAARPSPPREHYPRRRERGDGHAAALRHLFNRMLGQLHHCLQTGQAYDPIKAFPHAAAAHHEPLSEAAA

SEQ ID NO: 355381 - protein, 330 aa, unidentified
MKQVNQVGVDVDSEELVCAMQRDGQRLPLARFANTVGGHTKFIRWVTKSARPARVCLEATGIYSLEFALALHRAKGIEVMVVNPRAIKDFARACMQRAKTDAVGAGGILEYLERMPFTAWQPPAPEILELQAINRRIDQLHTELTREKNRRHAAQFAGASAEAIAHDIEVNIHHLERRIARMQESGLQLVRRVPALVTKLAHLVSTKGIGEVSAMRLLAELLVLPDDLAAPQWVAHAGLDPRPYESGTSVHRPRRITKVGNRHLRAALYMPALVAIQHEPNVKAFYNKLVTAGKKPMQAVIAVMRKLLHAIWGMLKHDQDFDGNKFFRTA

SEQ ID NO: 355382 - protein, 350 aa, unidentified
MLIIGCDFHSRFQQIAMVDTETGELIERRLDHSNGEAQKFYAGLQKPVRVGMEATGYAQWFERMLAKLGYELWIGDAAEIRAAMVRKQKTDSRDALHILDLLLANRFPRIWIPSPGERDLRQLLRHRHKMVCLRTSVRNQLQALALGQGVYRKRKLWAAGGRTELEGLALDPWASRRRQELLDILDRLDPCLAELDRAVAKEAEQRPATGCLMEQPGVGPVTALMFVLTIGPVERFRRSKQVVSYLGLNPRESSSGGRQRLGAISKQGNSMARFLLVEAAQTASRYDEELRRDYQRLKFRRGTAVAKVAIARKLAVRLYWKLRKHNSLVPPTRMQGSPEHPVVGASLSGN

SEQ ID NO: 355383 - protein, 357 aa, unidentified
MGKKEFKFCGDWTKIACYCGLDIHKHEVSAAIYGTDESHHEFLKSTIFATTSEGLEQFWNFSKKYHPKGFAMEATGIYHHVVYKFLQRKRSMVSWPFKILVVNPADAAGLPGRQKHDRLDAEMLAKYLAKGLLKNGKVIIEVLEDLKALFRMAFRLEKDRTALKNRIKKTLDRAGIRPRFFNLNHQWTREFLQRFIDQSETLGSFMTRILDEERPEGHFHAALKKNLRHFLPYFDFSLTPVQRALVRQDLAELNYKTGRKALLSVEIDQVILNHPALGKHANDLASIPGISPFSAAWILAEIGNIHQFSTVRKFRAYCGCCPRIVSSGGKVYSAHLTRHSLECLFADLILQCSSSRL

SEQ ID NO: 355384 - protein, 376 aa, unidentified
MREKLRFLGMDVHAETISVAIAEANGEVRSLGTIANREDSIRKFIRKLGTPEQLRACYEAGPTGFVLYWQLTQLGVDCAVIAPTLVPKKPGDRVKTDRRDALKLARSHRSGDLTAVWVPDEDSEALRDLVRQREAAKQDQLRARHRLTKFLLRTGQRPPLGLKAWTERYMRWLAQVGYTQPAQEVTRLDCMNEVEHMSARVKRLEEAILEVVKLAPQPMQDVIRGLQALRGVAHISAVTIASELGNISSRFQSARKLMGYCGVFPSEDSSGNRVRRGGITKAGNAHLRRIVVESAWCYRHLPRVGEKLRKRHEGVPPAIIEIAWKAQNRLHKRYMKLSMAGKDQRKIMTAVARELLGFIWAIAIKAEASCRQPIAA

SEQ ID NO: 355385 - protein, 338 aa, unidentified
MVYGAIDLHMRQSQIRIVDEAGVVQRDQRVPTTRERLTQAFLGHGRMRILLETGTESEWVAQALEAAGHEVIVADPNYAPMYGEVTRRIKTDRRDAVALAEANRRGWYRAAHRTSAAQRDTKQILRSRRFLVQARSGAVSLLRSLLRQSGYRLGTGSCDTVPARVARLPLPTALAETLAPLGRQIATLTTEIHAMDARLQTRTASDAIVARLRSVPGIGLIVATTFRAFVDRHERFGHGGQVSAAIGLVPREDSSAERRHRGHITKAGPRELRSLLIQAAWVCWRHGGSGTLRAWADRVAARRGRRIAVVALARRLSRVLFALWRDATTFDGRTLATT

SEQ ID NO: 355386 - protein, 469 aa, unidentified
MRDRAGRGRGQGGTGQRQRRGLERINANAAGIDVGCNEHYVAVPPGRDAEERDVRSFRSFTCDLEQLSEWLRLCGVTTVAMESTGVYWIPLYDLLESKGFEVLLVDPRGLKRAPGRKSDVLDCQWLQELHTFGLLAGAFRPKEQTAALRAYARQRAMLIAYASDHIQHMQKALTQMNVKLRSVITDITGVTGQAIIRAILDGERDPRALASLRHEACHNDEATIADALEGTWREEHLFSLRQAFELYQTYQEKIAACDAAIEAHMGRMDDRSGGTTLKPPRRGKRRKNQPHFDLRGHLYRIAGVDLTRIEGLDALTVLKVISEVGTEMTPWPTRKHFTSWLGVCPGSTITGGKKLSSRTKPSANRAAEALRVAAQSLHQSRSWLGAFLRRKAAQKDMPTAITATARKLAELIYTLLKRGTEYVTRTQDQYEMMHRQRMLAGMARSARRFGYVLVPKDAVLLTPEPAPAQ

SEQ ID NO: 355387 - protein, 344 aa, unidentified
MNNSTIIGVDLAKDVFQVCVYTNNKVLSNNEMTPQAFTSWIANQTPTIVIFEACATSNYWKRLVSQFGHEARLISPQLVSRIRQHQKTDKNDALAIIQSSLLPNINFIGGKTLQQQQLQSILRMRELAVKQKTALKNQLKSLLLEFNLRCSKGHGGLKNAVYTALEDAENGFSDIFRHALAQAWEFYVAINELVSSYDESLKKLTKSLPECNKLTQLEGVGLINAVNLYMTIECEGERAFKSGRNVSACIGLTPVQHSSGGKIKLGSIGKKVRNSALRSQLITGAFTFVNSIDKRPAKTEKELWLKKLIERRGKKCAAVALANKTVRTAFSMLQNNTNYCSVAL

SEQ ID NO: 355388 - protein, 364 aa, unidentified
MKRKVYVGMDVHKETIQIAYLTSNSKEILKEQQIKHNEVQIKKFIKKLKTEWNEIYCCYEAGVTGYPLYRYLKSLGVNCILVAPGKIPRQNTDKIKTDKRDAIKLARLMRSGELESIHVPSEEDEAVRDYLRSRDSLRLDLGRNRQRLMKFLLRKDIKYSTTKYWTVSHYKWLNNLHFNNEILQETFNDYYSRVRVQEENLKSMDKKIQEIAESEPYREKVGILRCFRGVDYLTAMFLLCEVNDFKRFKTAGSFMSFLGLVPGEYSSGSKRKQTGITKTGSPRLRRILTEAAWQHRFPGTGSKIITARRSGQPALVVALAEKASLRLHKKFRNLQLRGKTPQVMITAVSRELSGFLWAAMNLVA

SEQ ID NO: 355389 - protein, 345 aa, unidentified
MKILKQVLGIDVAQKELVVSLGRMHEDLTAEIYAGKVFANTEKGFSALLEWVERSTDSNLPVRFVMEATGVYHESFAYFLDERLRQVSIVLPNKINHYFKTLDVKTVTDYTAAEAIARFGLERKLTVWKRPNAVFKNLKQLTRERDQIVDARTVTKNQLHAESCEAEPSKNTIKRLNALIAFLDKQEKEIMQEITAVVKKDQRASDTIKLLTSIPGVGVLTAAIVLAETNGFELIRNKRQLTSYAGLDVREKQSGTSIKGKPRISKRGNRYLRKAMHLPALSAIQCNERFKTVFARLVSRHGIKMKAAVAVQRKMLELMYILYKTNTRFDAEFTRGIKKEKQLLQ

SEQ ID NO: 355390 - protein, 387 aa, unidentified
MNYCGIDVSKRNHTAVVIDDKGQVVQAAFTVSNDREGLEKLESMLCAYRDQLLIGLESTGHYWVSLYDVLSHGGYVLSVVNPLQVHAYRHMDIRKRKTERVDALSIAGFMRFASPSPTKLQLPAMLQLRELSRFRFRLTQQIGDCKRKIISILDRVFPEYEKLFSSVFLQTSRQLLQEAVTAEEFAELDLTELGVTLSTNSRGRFGREKAEQIQSAARRSVGVSFLTDAIRIEMRCLLEQIDLLEQQRKDVDAKIEEMMAQIPQYITTIPGIGLVTGAMLVAEIGDIQRFEGPEKLVAYAGIDASVKESGDSKSDRMHMSKRGSHYLRYALWQAAVASLMHNQEMAAFYHKKRTEGKPYGVAVGAVCRKLLGRVYIVLKQQRPYVIR

SEQ ID NO: 355391 - protein, 326 aa, unidentified
MSKKELDLCLRSNGKDILYDVIPNDLSSIKSWLTRTFEKFFLSEDSLVVCAEHTGQYTYPLVCATKSIGVYLCLEDAAKIKYCHGIPRGKNDKIDACRIAMYAERYNDCLQPYTASELIIQKLKNLSTERSMLVADRAKYQSQLKDQVDYMEHSIYIAKCNRVEGIINTFTDYIAQIDLEIKELINQAPVIAHQMDLLMSVDGVGERVALKMIMETDAFTSFTDPRKFCCHAGVVPFVYVSGSSQRSKNRVSNRADKSIKHLLHMAALSVSQVKNSPLKKYYDRKVEEGKNKMSVLNAVRAKLVTIMFAVIRTDAFFSRNYQNSLA

SEQ ID NO: 355392 - protein, 455 aa, unidentified
MPQRTTGDRPELKPVNVSAAAIDIGSKMHMAAVNPDCTDIPVRAFGTFTQDLHDLADWFSACGVTSVAMESTGVYWIPAYEILEQRGFEVILVNARYAKNVPGRKTDVSDAAWLRQLHSYGLLRGSFRPDAEIATLRAYLRQRERLVEYAAAHIQHMQKALMEMNLQLHHVVSDITGATGMRIIRAIVAGERNPDVLATYRDVRCHSSTETIRAALVGNDRHEHVFALSQSLELYDVYQAKMLDCDRKLEVLIAALGNKGAKPVGTLSKPRIKTKQINTPTFDVRTALYGVLGVDLTEIHGLGPSLALKLIGECGTDLRAWPSAKHFTSWLCLAPGNKISGGKVLSSRTRRSSSRAAALLRLAATTVGQSDTALGAFYRRLSLRAGKSKAVTATARKIAVLFYNTLRHGMSYRDPGADQYEQQYRSRVLANLQRRAKSLGFVLQAIPTDTNPAVS

SEQ ID NO: 355393 - protein, 459 aa, unidentified
MGMTLGIDLACRAAHVASLAGPDGALVWRGRSFFTRPADLEKLWRDVDCVPAELTVVMEPTRNAWIPVAAWFRRRGAKVVLVPTTQSADLRAYYSKHTKNDRLDSAILARLPLLHPEGLREHVGDGPADPLRRVVKQRSSIAKRRSAIFHRLDAQLELLGPAWYDALGTDYGKATLQFLAHYADPATVIRLGQARLARFLQRYSHGHWREGKAAELIAAAKESLQLWDTDGMDFAELAADIAVEAEQAMMLTAQLADLDERIANLYAEADPAGIIRSAPGVGPVIAGIIAGRLGDPHRFTSLAAVRSYSGLVPKINQSGKAEHVGGLTKAGDPLLREAMWMAAEQARKLDPQLAAKYKRLMDSERHHGTAVCHIATTLLTRIATSWRNNEPYQIRDLNGTPLTQDEGKRIVQEQYQVKKNPKKQYKRATNHKAGREPQESPSAPTSRPATTKPTSPRAA

SEQ ID NO: 355394 - protein, 383 aa, unidentified
MHQTHRSVVRPPGRHVPSPSRSGRETTITTIAHPAPARVTVGVDTHKDVHVASAKDALGRRLATTRVPTTPAGYRQLLAWAHGLGEVEAFGVEGTSSYGAGLSRFLRGHGQRVLEVNRPDRQARRRNGKSDPVDAEAAARAVQAGEATVAPKAGTGTVEMVRALRTARQTAIKARTQAINAMKALLVTAPAELREQLRKLPVRRLVAAAAGLDPGKLSTPTAAAKLALRTLAARHLALDAEIAMLDTELDRLTAKAAPGLRALFAVGPENAGVLLLAAGDNPDRLRSEAAFSMLCGSSPIEASSGKTVRHRLNRGGDRQANAALHRIVIVRLRWHQPTRDYLARRTAEGMSKREIIRCLKRYVAREVFAALKQMDPNGTTIAA

SEQ ID NO: 355395 - protein, 400 aa, unidentified
MLSIGIDVSKGKSTVCGMKPGGEIVYAPFEVQHTREGMSELVSLLRSSGEEVRAVLESTDSYHCPVVSALLENGIFVSVINSLRMKRFCSQSIRKVKTDRIDAMQIALYGLAYWQELQPARLPEDTYRELQLLARQYYQMTSMLIKAKVDFNAICDQVLPGMQELMNDHAGRHKLSDFVLRYHHTTHILEMGETRFRKDYCKWAEKKGYRNCERMAALIFATAQNGIPVLPNAPSTQIVITEAIRVLHTVEASRDAILTQMQALAKTLPEYSLVREMPCIGDTLAPRLIAEIGDVRRFHSKRALIAYAGIDAPPYQSGKFCANNRHISKRGNRYLRKTGYEVMQSYVMHKPANDPIFTFIEKKRSEGKCGKLAMVAGLNKFLRIYYGKVTELYRSLPAIE

SEQ ID NO: 355396 - protein, 422 aa, unidentified
MRYMGKRRNRVCGADIHNELIVATIQCSDDTTLREEFGTTRSELERFKAWVISNGCEQVAFEATGAYWFPVYDVLSPSIDTVVGNPWMIKGLPKDKSDDHDSKSIASFCLNGQIKRSRVFSTDDRDLRTMTRARSGYVKTRTQFRNRIHKYLALRGIKLRSGIRGIFGKSGRHVLNGLVDGESTDTILDGIPSGRIRKKREIIKDGISIGFDDTTKLLVKDALEVLDNLETRIERMSREILRRTLNKSKNLAIVMSVPGISFVSGSQILSEIGDYRDFSTPEQLARWCGLTPGLNESAGKKRPCGITKQGSKHLRTILVEVAQVISRMKHNRFTGFFNRIMARKNRNVAIIALARKLICIIYHLLINQELFNPGLKKTTKSKSKRNAQAQESSMEDQLQDSVAAIVDAYYRINAKSVSKGGG

SEQ ID NO: 355397 - protein, 509 aa, unidentified
MELLMMQMDDRPVYYAGIDLALRAKNVVAVLDERGRRLGRPVAFGRTHDEFQAMFQAVTQRVPQGFGLVWGCEATGAAWRLITACLIREKQAVSLENPAAIAALRDVDSRFFKNDRVDARTIGELVCLRVSRGKPLCPPPSPQLQAMRTLTRRIEGMKNELSSAKTRFTAYLCDTLLPSLSPAAHEWSGPTLLRVLDKFADPRDIASKPLARFINSAIKAGGARTSRVALATLHQAATESLRSYGDTGLDYSTYALILRDTILQVNQLQARIVTLQGQLDSLLDKTRTHSQVECGLSVPGVGDDTLNVLMALCGPPGQWPAFKAIKQFAGTVPVLDESGNSRSTPRMSKLGEPILRKVIFQIGNVARRYDAEFAADYYHQMVSKGKGHTAACISAGLKALNALRAVLRDHRPYQPRDPRTGLPITKQESRQLAQANYSVPGAIRTARKKHKRGTDAPAKHTSKETAQAGHAQVKDMPKHSHRRAVNLPCAVPTVTIDHLSPARKALDDR

SEQ ID NO: 355398 - protein, 345 aa, unidentified
MDHFAGLDVSVKATSVCIVDDAGKVVREVKVTSEPEALLAVLKNPAYHFKRIGLEAGPLSQWLYSALAEAELPVVCVETRHMQAVLKAQINKTDRNDARGIAQMMRVGLYRPVHVKTLRSQKLRMLLTHRKLLQSKAIAIENDLRGTLRNFGLKVGMVGTVKFEARIKELVENLPDLAVLVEPLLVVRRVLREQIEILHRRLLTIVRDDEVCRRLMTVPGVGPVVALTYRATVDVPARFRKSKSVGAVFGLTCSKYQSGEIDRSGRISRCGDEMMRVMLYEAAQAMLTRTNKWSWLKAWAMKIARHRGMKKAIVALARRLAVIMHRIWVDGTEFRWTREQAGAAA

SEQ ID NO: 355399 - protein, 362 aa, unidentified
MKGPIVSIDVSKGKSDYQAFKDLNVKYTGSRSIKHNKEGFDEIVNLVREMEKKLETEVCVVYEATGVYHRVLKKVLEDNNIKQFIINPLLSAKTRKNDSLRSPKTDKLDPKSIAKTYYSHSLHNSHKQETIYHELRELSRYYEDILVHIRKDKVAFRAQLDIVFPGYDTLYDDLYGPVALAIIEKYPHPEMLQKKKINTVSKVIQNKTCHRQAVSDTMADKAIEYSKTIYSGCDKDDIEVLILQRFIKKLNEDMAEAERTIGEMIKLAQELPDFNIIKSIPGIGDNLAARIIAELGDMTRFKKKNELVAFAGLDPRISESGQNDGDHMHITKKGNKRLRCLLYLAVTCGTMSRKRTHKIDKF

SEQ ID NO: 355400 - protein, 401 aa, unidentified
MPTMRDNVQRVKRFRELKATLRTNRQRLLVGLDIAQAEHLVQVRHAHTRIVGPTLTIPNTTRGFTHLWARLQQAQRATGCREIVCGLEPTGTYHQAVAAFLEAQGATVVLISGSVAYWNRRTQDGTWDKDDRKDAANCAELLEQGKVLFYSQPAGPLAELRQLVRCLRRARAELASCKARWRTTLRPALGPMGEPLPNRLRAELPAVLQAWEVAAPGRPALPKGRLPLGLATACADLGAQVTAVQARIGAIERACTPLAERLPAYALLRTIPGIGPTVGAILLAEIGDIAWFTQFSQLRKLAGLDIVRVQSGKFAGQARISKCGRSLLRWALYQAALGQARTIAGRARLAALKAKRHGDRYAGFKATVELAAKVLRVVWGVWRSGTPYDPLRAGGLRRQPR

SEQ ID NO: 355401 - protein, 386 aa, unidentified
MEGETFTPRDYDVFAGLDVDKKSIAATFSSQQGFIRSLHMPYSIDYLLNHVRKHFGDQKVAFVYEAGPTGYGLYDGLVAQGYRCLVAAPSMIPRAPGQRVKTNRLDSRGLSESLRGGQLKSIHVPSPIYRELRHLTQLRDTVVREAAAHKQRIKALLLLEGIGFPSATAGRQWTLRVKAQLRKLRCSRTVRFKLDQLLDSLEFCEKQVVSSTKEIRRFCKEDVELFQSIEYLMSIPGIGWIVASQLLARMGDWREIDNVRQLGSFLGLVPTENSTGDSVDRGSITRAGDGRLRSKMIQAAWSAIRQDGELREFYRSVCQRNPRGKGARIAIVAVARKLSTRIYAVLKKQRPYIVRKQVHSAPLTQEETSPQGTTRRCAEPGETDNS

SEQ ID NO: 355402 - protein, 331 aa, unidentified
MEQRKTIIGIDVSKKTLDIFIKTLDVHLQISNNSEGFKKLLAVLKASKLKLEDCFFVLEYTGGYEYRLVQFCQSKQISYVRISGLAIKRSMGMVRGKNDKIDARRIAEFGDEKQSKLEAETASLDGIMRLKRLLSQRDAFVNDRKAHQNRYNEIQYMMDLPDSDPMLKRYRKIADELQKLIDKTEDEIRKLIKANDAFQFNFDLITSIKGIGEVNAWTMIAYTENFTSFDNARQFGAYIGVVPYPYTSGTSIKGKSRTSKMANQHIKALLDMAAKAAINHDRETNLYYERRIAAGKHHMGVMNEIKFKLVRIMFAVVGKQQTYVDKYKNIA

SEQ ID NO: 355403 - protein, 311 aa, unidentified
MEHSRFVGIAISKDHLDVHVRPTGDSFRVRDDDAGLVTLVAHLRPLAPVVLVLEATGGYEVTVAATLASAALPVAVVNPRQVRDFARATGQLAKTDTLDARVLALFAEAVRPAARPVPDAQAAALGELIARRRQLVDMLGAEHNRRRLLRDRRLQRHLEAHIAWLEEALRRLDHDLTTLIRSTPVWRETDDLLRSVPGIGPVTAGTLIADLPELGRLDRRRIAALAGLAPIARDSGAFRGRRMIMGGRAHIRRVLYMATLTAITHNPVIRAFHQRRVAAGRPGKVALTAAMRKLLTILNAMLRDRRPWHPA

SEQ ID NO: 355404 - protein, 409 aa, unidentified
MEIVITRCAGLDVHKATVVATVRVPGEDGRRRVVTETFGTMTPDLIALREWLQAFGVTHVALESTGVYWKPVYYVLEDACELLLINMQALKHVPGKKTDVKDSEWLAQLLECGLLRSSFVPPPPIRELRDLTRYRVQQTRDRSQEVNRLHKVLEDAGVKVTSVLTEVMGVSGRAMVEALVAGTTDPVVLADLARGKLRKKLPALQRALVGRFRPVHAFLLEQILAKIDYLDEALDRLTAEIDRRVAPFEPMLTALDTIPGINRVSAISLVAETGGDMAHFPSAAHLCSWAGMCPGHNESAGKRRSGKTRNANPYLRTTLIQAGLAASHKKDSALRARYIRVKSHRGHKKAVVATGHQILEIAYYVMRDGVTYRELGADYFQQRNRERAVRRHVRQLEALGYLVTVQPAA

SEQ ID NO: 355405 - protein, 417 aa, unidentified
MSLTPEPVVPVIAGRVCAGIDWASIDHAVCILDGQGAVLERFFVVHDAAGLKTLVRRLLKAGVEEVGIERSDGPVVDALLQAELAVLVIAPGQLKNLRSRYGSAGNKDDRFDAYVLADVARTDRARLRPLVRDSAATTAMRTTVRARRDLVEHRVAAANQLRAHLQLVFPAAAGLFAAIDSAINLTFLERFTTQTHADWLSPTRLASWLSKSAYSGRTSAAVLHTRLLAAPRGTTGTDAEVHALTTKAYIALLRTLNTQIGALEDNLATQLTSHPDTHIFASLPRVKTLRTARLLAEIGDARGRFPTADSLAALAGVAPSTRQSGKVKTVTFRWGANKQLRDALCDFAGDSRHDNPWAADLYTRAIARGHDHPHAVRILGRAWAHIIWACWHNNLSYDPSQHRALQNILANTTAQAA

SEQ ID NO: 355406 - protein, 343 aa, unidentified
MKVTRVGLDIAKEVFEVHGVNEHGKAELRRQLRRARVLEFFANLEPCLIGMETGSGAHYWARELQKLGHTVRLMAPRFVKPYRKNDKSDRNDAEAICEAVGRSNMRFVAVKSEEQQVVLSLHRLHAGLKSERDAMANRLRGLLAEFGIVLPKGAARLRGGLPAVISQRRLPVLMNQVLADGLKRLRELDDQVNQQERQIRALALQSESARRLMEARGIGPMTATAAVATIGDAKLFKNGRAVTAWLGMVPRHSGTGGKIWMGPITGKGDTYLRTLFVQGARSVMNTTRGKNDPLSLWVERLRARRGDNIAAVALAAKNARMVWAMLARGEAYRPPQAAHGAAA

SEQ ID NO: 355407 - protein, 313 aa, unidentified
MAQEGLVVGIDVAKGWLDVAVLETGENFRVDNDPPGWALLIKQLSGRPVWAIGIEPSGGYERGAKSALRKAGLTVRNVNPHKLRHYARALGRLAKNDRIDAQVIARFTSQLPTRAMRCDPLLDQLAELIIARRQLSEDKVSLANQLEQVRDPAVRRIFARRLRAIEADILLLAKRLAKLVASHPDLAAKDRLIQSFCGAGPVLSHTLLALAPEIAEASRREVAALIGLAPYDHDTGVFRGRRCIWGGRAEVRRVVYMAALTASRSNPVIKAFHERLRAAGKPPKVALIAVARKIVTILGAMLRNNQQWSPQPV

SEQ ID NO: 355408 - protein, 287 aa, unidentified
MVSVERTPEGIARLGCICAEHGVGLVVMEATGGLEKLPFGLLWEAGLACAVVNPRQVRRFAEAMGYLEKTDDIDAGVIARFAQTKDLVGQIPATPSQERLRALVTRLRQLTELKVAQGNQRRLLTDPAALGSIDEMLALIRRQVRGFETAIAELLGADPVWRALDQAFREIKGVADRTVANIMAQMPEIGTYSNKAIAKLTGLAPLARDSGKRFGKRAIYGGRSDVRSILFVVAGVVARHEPDFIAFRQRLLDAGKPKKVVRVALAHKLIVRLNAKARDARIAIASA

SEQ ID NO: 355409 - protein, 452 aa, unidentified
MSNKKVALEIVNPHAAGIDVGSRSHYVAIGQSAEDVKEFGVYAEDLKELADWLLENNIETVAMESTGTYWQNLFATLQQAGLKVILVNGKFTKNIQGKKTDVKDCQWLQKLHSIGLLTGSFLPDHATEQLRTYCRHRSSLIDTAADTTRRMQKYLRLLNLRLDIVVKDITGLTGLAIIEAICKGETNAEALSSHRHGNCRKSKEEIEKSLQSNGRQDYLFALQQEFEMYKMLQKKITECDAAINNLLIEQISNDENKKRLKAEKKVHKRINKNAPKNIDINQLAYQHFNGIDLMNIEGVSHNTVIALMSEVGYDGIKKFEAAKQFTSWLRVSPNNKISGGKILSNRIAKGSNRLKIALRNAANAIGNLKDTHLSNFFKRVCFRRGRPAAISATARKLAVVIWNMIVKGIPYQPPTTYEFLDQKRKRKVQEMKKLIHKFDIKTHELGLQLIRL

SEQ ID NO: 355410 - protein, 485 aa, unidentified
MKHKNIFSRQNQTILKLFEQAGHPRKVLCVVLDYAKLTHTALCCNGTGKVLKNPFPVKNNPDGLELLLETVGTLCRKHQIDREHVFFGGEDCGTFTLNMIYNLRTQGFLVVGVNAADAAKQRENHQASTDKLDLLGIANMLINKRGSLAGGNIGAQRALRSLTRHRKQQVKWKTATSNRIHQLVDQLFPGFLDERNSAVPPFSEASLYLMEERFSSRQFARRQDKVLLRQLKGRGLQHAEKAVIRLKTYAREVLAHPEELSGLLQTSLASEVRLYRCLLENIGQVNRESARQLARTPAAMLTTIRGIGITLAAGVSAEIGPLHTQPSLRRLCSYAGIVPRLKQTGGPEKTAVIGRVSRRSNRILKDYVVQCGNHLGLHGPADLLEDHRRRSANGQHADFGMARRFLRIAMRLMRTGEAYVPPELQSGATMDELREYYLQLWPKLLDKWVKAKAAEPAFASENPLGQWRNMIQEMYGIKLPLPAQK

SEQ ID NO: 355411 - protein, 420 aa, unidentified
MKVVYPTCCGVDVHKTFLVATIIKTTNGVQPSYQKKRFSTFNSDIRHFKQWLLDNSCFDVCMESTGKYWIPVFNLLEDRIHVTIANPKWVKAVKGNKDDTKDSKWIGDLFRLGLVPGSFIPCREIRILREYTRYRFKLTCCKRSEKNRFQNAFTVCNVALDAVVTDMFGKSASSITDYLITSDEFDPETCKSFLQKSLKKKADAVVESIEGYQMTPSQKERMLMVRSHLDFVQQSIDSLGSKLDELIAPYENAVSLLCTIPGVDRSSAITIISEIGTDMTQFNSSRRLCCWAGLTPGNNESAGKKKSVRITRAGVYLKPALVQCAHAAVKSTATPYYKNKCERLAKRRGKKRAIIAIARMILTAVYQMLSTGETWNPCDLYKTDMPQQMQDKQKAKAVKQALKLLISEGLISPESAPTAV

SEQ ID NO: 355412 - protein, 421 aa, unidentified
MQEQASQFAAFIGIDWADRKHDVCLQVPGAARPEASVLEHRPKVIDAWARQLRERFGGRPIAVCLELAQGPIVSALLEYDFFVIFPVNPSTLAKYRRAFVPSGAKDDPTDAALALELLRCHPEKLVPLRRESDDMRALRRLVEARRDLVQDRVRVTNRLTYTLKDYFPQIVEWFRDKETDVFAAFLERWPSLQAAQRARRDTLVAFFHAHSVRRATVIEKRVYEIQTERPLTTDAAVIEPALAVVATLLPQLRALTAGIARLDADIANRCDALPDFRLFADLPGAGPVYSSRLLAAFGERRERFTDAAAIQKCVGIAPVTERSGNKHWVHWRWACSTFLRQTFVEWAASSIMHSFWARAFYDSHRAKRSSHNATIRALAFKWIRILFRCWVDRTPYNESRYLAALQKRQSPLLKFAAAQPS

SEQ ID NO: 355413 - protein, 430 aa, unidentified
MKSNTQNAKIEAITEKTLVLGIDVGSETHYARAFDYRGIEYSKKPFKFSNTEAGFVTFKEWILDLKERHEKDKVVLGMEPTGHYWFNLGKFLQDNEMKPVLVNPHHVKKSKELDDNNPTKNDRKDPKVIAGLVREGRYMIPYLPDGVYADLRTASNIRFQLQAELTRIQNRISRWFNIYFPEYKTVYGKPDAKSGILILKAAPLPEDILTLGIDGVNQIWRDAKLRAVGKARAKTLIEAAEHSVGSKEGAVAARMEIRMLLEDYESRNIRLQEVMTLIEGLVKQIPMAEKLLEIKGVGIRTVSGFLAEVGDISRFNNPKELQKLAGLALVENSSGKHKGETTISRRGRKRLRYLLFEVAMSLVAKNPEFRELHNYYTTRRLNPLKKMQSLMAIAAKLIRVFYVMLTKGVNYDPKKMVNDIKRPAVYLQTA

SEQ ID NO: 355414 - protein, 430 aa, unidentified
MGLIVPTTRHPEREDQPLPYEWFVGIDWGSQQHQVSVLDRDRRRVGERVVDHDGASLARLADWLWTLSAGQPQRGAVAIEVPRGAMVEGLLERGFHLFALHPKQLDRFRDRHRVAGAKDDRRDAFVLADSVRTDQPSFRRVHLDAPQLLLLRELSRAEETLLEEFRRSANRLREQLHRLYPQMLQLCSAADEPWLGDLIDLVPTPAHAALLSEEQVQRVLKAHRIRRVTGTEVLTCLQMQALPVAPGAAEAAQAHCQLLLPCLRVLAEQLQAWSQQVSALLSTLAEELGEGESPSDVAIVLSLPGVGRKMTAWLFAEAAQPLAERDYQMLRTHSGVAPVTKQSGKRRVVVMRRGCNPRLRHALYHMARVAMQRDAHFNSVYTTLRAKGQRHGQALRHIGDRLLRILVAMLRHRTCYDASRIRREPVVQMG

SEQ ID NO: 355415 - protein, 341 aa, unidentified
MKKNLFFIGLDIAEADFAASIYQTPGQPIVTKEAIPNDPEGFDLLLLWLKEHHIDKTNSRICMEATGVYSQAIAYYLLFQDFPVSVEPPLKVKRAFDPVGHKTDPVDSKQIAEYAYRFQDELTSWQPKDEILEKIRQLLSVREQFTKQKVALKNAIQAYSKQRIQVALIKKAHQETLAQIEKQIARIDKELAKLIKQDPEILQKANHLKSIPGYGMLLAAHLLVITENFTRIQQSKRLASFVGIVPYQHQSGTSVFKRAKIRHFGPGPSRKLLRLAAQSVATHDVTFRRYYLRKLAQGKAKALVLNNIANKLLKVACAMVRNNTRYIKEHRSIHPMYLKSA

SEQ ID NO: 355416 - protein, 347 aa, unidentified
MRFYTRQHVHYCGIDLHARSLYLCILDQKGQTLVHRKLPCERELLLKTLSPYRKDLVVAVECLFCWYWVADLCNEQGFEFVLGHALYMKAIHGGKTKNDRLDSYKIAALLRGGNLPYAYVYPRQMRATRDLLRRRLFFARKRGELLAHIQNTNTQYNLPPLDERAGKTKDRGAIIEHFDDDTVQMSIASDVALLDSYDEVIRDMELYLIHEVRKDHNREFYLLRSIPGIGEILSLTLLYEIHDLSRFPRVQDFLSYARLVKGAHESDGKKKKRTGGKMGNVHLKWAFSEAAALFLRGNSVGQKYFARLEKKHGKGKALSILAAKLGRAVYYMLLRNKPFELQRFVAA

SEQ ID NO: 355417 - protein, 346 aa, unidentified
MLHAGLDLSRTRLDFHLLDQAGVTVEIGTAPPDGDGLRGLTRRVARFGEPVRAAIESMTGARFVHDQLELAGWEVEIADAAKVKWLAPLACKTDRIDAWVLAELSRREFVPAIWLPDPTVRAERERARFRLHLVRHRSSLKQRVHANLLTHGVPCPVSDLFGTRGRELLARLCLPEPWASDVEASLRLIDELDHEIDTCEAELRRLGADHRYVPLLTTIPGIAWVLAYTIAAEIGDITRFASPTKLAGYSGLCPRVYQSGDSDRRGPLSKNGPRYLRWALIEATTHASHHPAYRERYQRTKLRLGKQRGPKVAQVDLARRLAEAIWHMLTTNRPFAPAGAPAPMTA

SEQ ID NO: 355418 - protein, 342 aa, unidentified
MQITTIGLDIAKHVFQVHGIDANEKVVIRKQLRRSQVLALFKALPPCLIGMEACATAHYWARELTKLGHQVQLMPAKDVKAYVKRNKNDAADAEAICEAVRRPTMRFVQIKSAEQQGRLMLHRARDLLMRQRTQLINALPAHMAELGIVAAQGREGVKELLKIIASEQDARLPVDAHASLVVLAAGASGTADDDWIDREADRGAAPLERSKQAAQEHPGIGIVGATAIAATVPDPKAFRSGRDFAAWIGLVPRQDSTGGKQKLGPISKQGDQYLRRILVVGAHAVLKRARQQPEKYLWLTRLLARKPFRVVAVALANKMARIAWALLAKGGTYRVPVLAAAA

SEQ ID NO: 355419 - protein, 426 aa, unidentified
MTEDVSRYKQFCQFRSTIRSATDTLIVGIDIAKDRHHAFFGTPLGKTLWRRLIFDNNKAGYDKLITQVNRLCAQYKLSRIVFGLEPTGNYHKPLASWLSQKEFMVVFVSGKAVSDNRDLLNGRWDKNDTKDSANVADLVGRGKCQFYDNPGLEIMALRNLLSLRKRLKKEEHSLRMRIRNSLLAKFFPEMDRHWGSSLEENFAIIKWYLDPQKIAATDFDTFVRHVTKTDRGIRQTRRLKTIHDAAGISVGMPVTPSDRFEAKMLVEKLGQVRTMMSETMAQIEKISSRLQGDKLLQSIPGFGPYIAALVLSVIGNPFRFNNRKQVIRLSGFDLNASRSGKTSNSAVPVISKRGNGDLRYALYQAAKIATYHNEHFRRIYHRMLKGREAERGIRTKMRVKLAAKMLVIAWTLLKKNEVFDPSYLSS

SEQ ID NO: 355420 - protein, 348 aa, unidentified
MLADQLDYVIGVDPHRDTHALAIVDVCTGGIALETSVAASSSGYKRALELAERHAPGRRAFAIEGTGSFGAGLTRFLTSHDERVLEVGRLRRERRSGGKTDALDAVRAARSVLAQTRPAEPRAGGKREALRALMAAREGAVNAKRAGLCQLRDLLITTPEPLRSELRPLTRAQLLRRLAAVRPARHRDVELRGALQALRTVARRVQHLTAEERELAREIETLTRALAPQLLEQPGVGPLAAAQLVISWSHRGRIRSEAAFARLAGCAPIPASSGQTIRYRLDRSGDRQLNRALHMILVTRRRAHPPTIAYINRRIQEGKSRREATRCLKRYLARSLYRLLEHGPPLAA

SEQ ID NO: 355421 - protein, 379 aa, unidentified
MNEIVMGLDQHRAQITAEWIDTTTGELSRARIAPADRAGGRRFLARFRGRRLEVALEATTGWRFLVEELRRIGAEVHLAEPAETAARRGNKKRAKNDRADARHLRELLQAGRLPESWIPPDHILDLRARVRLRHTLIEQHTEWQQRIQSVLYHHGCPQRRRLMEGDGRQWLASQPLPETAREQITVGLAMIDALDVQLAPLTKELCAWARRQAGCKALIDAYYGIGELCAVTVIAELGDCRRFANSRDAVRYGGLDVTVYQSDRHRAPGHLSRQGPPALRWALYEAAQVARRPGSPDRGYYEQAAERLGGNRACLALARKLLKRCYHTLRELGDDALTPPPVEQPQPGPGSAATRRASSGSPRPTNPPATHDAAGALAA

SEQ ID NO: 355422 - protein, 347 aa, unidentified
MGHYAGIDVSLECSSVCVVDASGKIVREGKVASEPVTLITWLGSLGVNLERIGLEAGPLSQWLYGALRETGLAVELLETRHVKTALSTMPAKTDRNDARGIAQLMRLGWFRPVHCKSMAAQEVRALLTARKLVQSKLYDIEMSLRGILRGFGLKVGPTTSQSFAARINHLVDGQTSLEAVAAALLSLHAVALREFKSLEKSVRQISRADARVRLLMSTPGVGPLVALTYVAAIDDPARFTSSKSVGAYFGLTPKKYQSGETDVSGRISKMGDGSVRTALYEAAHVILTRPIKGGALKSWAMKLARRAGMMKAKVALARKLAVVMHRMWIDAIKFDTDKASGCVRVAA

SEQ ID NO: 355423 - protein, 360 aa, unidentified
MAKAKTLVGLDVHATKIVAAVLDAETGELQTFQMSGESEKTAGFCAGLPAPVRAAYEAGPTGYGLARELSKRRVECVVAAPSKIPRASGDRVKTDRRDAEHLVRLLLAGKLHPVRVPGPEEEALRDLVRAREAVRVDLMRSRHRLSKLLLRHGIRFDDGRAWTERHRAWLVEIVLDWPAAQATLLDVRGAIDALCHRRDGLEREILGLLPACPWAVQIGRLRCLRGVDTLTAVGLCSEIGDFERFAKAEQLMSYIGLVPCEATTGQQRRLGSITKTGSGHARRLLVEAAWHYRSRPNIGRALTDRQQHQPPEAIAVAWSAQRRLHRTWTRLEARAKRRTIIAVAAARELAGFAWAITQIE

SEQ ID NO: 355424 - protein, 345 aa, unidentified
MMVIGIDAHKRSHTAVSVDDMGRQGFVKTVGTTTQDHLRLLKWAVGLAGERLWAIEDCRHLTRRLERDLVAAGESVVRVSPKLMARVRDSARSYGKSDPIDDLAVARAALREPDLPTARLDGIEREIRLLVDHREDLVAERTRIIARLRWHLHELDPSWTAPTKLERHSAFDKVKAHLSGHNDGAMVRRLALRLVEHLRLLTDEIDELTAEITVRVTRIAPSLLAIVGCGALSAAKIVGETAHAGRFRSKDAYARHNGTAPLPVWSSNKQRHRLSRTGNRQLNAALHRIALTQARCYQPARELLERRKNGGDGGMEGLRVLKRRLSDVVYRAMLTDETVPLRRTA

SEQ ID NO: 355425 - protein, 370 aa, unidentified
MRIIGCDLHARQQTLAMLDTETGEVVNLTLMHEGNNVREFYSKLPRPVLVGIEATGSMHWFLNLMEELGIECRVGHPAQIRAAEPRKQKHDRRDADLILKLLAQNRFPAIWLPSKELLDLRVLLLHRHQWVRMRVRMQNALQAIALANGLRRGPALWSYDGQAKIAFLPLLPHAAYRRSALQAMYKNMQSEIENLTRRVAEQAGNRCGARLLMTHPGVGPVTALATEVFLGDPQRFTDSKTLASYVGIIPREYSSGEHQRLGGVTKQGSPLLRFLWGEAGAHAARRDPELKRFYRRKLVQKGLGKARVAVARKLGIRLWIMLRDEIDYQEFCRRGQIQQKTVRPVVGMPETGNGAKSHRPSDEATRLPES

SEQ ID NO: 355426 - protein, 474 aa, unidentified
MVCASPLISWTGGASITPNGAKEQQCSGSTFLSFLFNEVPHAGGKPRENLMEVMHERVAGLDVHKETVVACVRIVAGGKVSRECRTFETTTAGLEALLAWLTQSGCTHVAMEATGVYWKPVWNILSDGKFEMILANAAHIKNVPGRKTDVNDATWIADLAAFGLIAGSFVPEEKIQELRSLMRTRKQLLREQTRHVQRIQKTLEEANIKLGSVISNIVGVSGRRIIEAIIVGVRNPQKLAKLADRRIKASPKALYEALHGRLTGHHRFMLQLHLGQYDALASSIEQIDAQVETAIRTKIDDEAASGQPPFHSLTGLLCTIPGIASLAATSILSEIGSDMSRFATDGHLISWAGLCPGQNESAGKRKSSRLRKGAPWLKTLLVQCAWAAVKKKDSYYKAQFNRLKSRGGPKKAICAVAASMLTAVYHMLKNGVEHQDLGAGYFDRRPATQKAKRLVAQLAKLGFKAELNPLAEAA

SEQ ID NO: 355427 - protein, 367 aa, unidentified
MGNDNIVWIGMDTDAKKNQVALYRGWETQPAAEWEAGMDEKGIKRLIERLKREEGEVQCVYEAGPCGYELYRKLRKAGIGCDVIAPSLTPKKASDRVKTNRRDARNLGRLYRAGELTVIGVPDEKQEALRDLTRAREDVREDLTRRQHRLNRFLARQGCHYQDGEKWTQKHWAWIRKIRLEDSNAETVREESIRAVEQSQEQLKTYDAKIEENAGKPEYAKKVERYQTLRGVKTVTAMTIVAEVWDMRRYGRAPQFMGSTGLVSSERSTGDHERRGKITKTGNAHLRRVLVEAAWHYRHRPIAGQAIKKRRQGQPEAVVSIAERADQRLNRKFRRMVDRYNKKPVIAAVAVARELAGFIWAIGQLQD

SEQ ID NO: 355428 - protein, 411 aa, unidentified
MNPVIGLDVAKGESQVQAYLERKKPYKKSFKVKHDLDGLASLLDFIKEVEDISGERPPLVMESTGHYHTPVVQYFEDKGYLIIIVNPLISYKTKSSSLRKVKTDIVDANHLCELYYKEDLEPYKKRGIQLANLRHLTRQHDNITGMFVQTKLQFQAVLDQVFPEYSNVFGDLYSNVSLKILQTYPTSEDILSANNEVLTTKIKEFCNSRSLQWANQQAEKLMTAAAQNPFQQALYSSLALSLDMYINMIFEYKKHLSLLENEIDALAKSIEESKIIQSIPGIGEKIAATIISEIGEIERFNHPKKLVAFAGLDPSIFESGTFKGTYNRITKRGSSRLRQTLYMAVKCAIRDCRKQKTTDEILPRNKKLRAFYDKKREEGKPFRVAVIACANKLLHWIYALLKNKTSFQDIA

SEQ ID NO: 355429 - protein, 354 aa, unidentified
MTEILKSMIAAIGIDIGKNSFHVVGLDGRGAVALRQKWSRGQLEARLANMPACLIGMEACVGAHHLSRRLRLLGHDARLMPAKYVRAYSKGQKNDFRDAEAIAEAVQRPTMKFVATKTADQLDLQALHRVRERLVSQRTGVINQIRAFLLERGIAVRQGRHFLRAELPGILATGCEVLSGRMVHLIADLAGDWRRLDERIEGLSGEIAALARQDAGCERLMSVPGIGPIISSAMVAAIGAGDTFTKGRDFAAWLGLVPKQFSTGDRTVLGKISKRGNRYLRALFVQAAWVVLIRSKNWERYGLKPWIEAAKRRLHRNVLAIALANKLARIAWSVLAHGRSFAAGKLVEAASLPA

SEQ ID NO: 355430 - protein, 444 aa, unidentified
MFIGIDVGKFKNSISIIDTEGNPIIKKGLSIENDYYGFARLEEQIDLVINNYGFTYDDCIAGVESTGHYWFNLRDYLKDIGIETVMIKTDSVKHRRALEEGQKGKNDTLDARVIASCLRNGNYVYIRENERELRALQKLTRMRNDISDELVALKNKIHRCIDICNPVFFKIFENLNSKTGVALIKLYPSPEDIINVDLDNIKRELGKILDKPNMRMVSLYKEECEIWSRLIKEPSYAEKVEMIAYIDKFLLQNESKEHLDKQIKEIAKNIIPLYSEFEKIRGIPLIQLISVLSEIGDIRNFKNTRAILAFLGLSLKGNASGKYVGERRINKAGSRIVRKHLFNIMDSLVKHNEYFRIAYCYYKSYNHKNPTKKRSMQIAVMCKFVRVMYGMLKHNTNFDYKEMLKGYYFGDCNMKVFKEEFEGEKRTKKIENYKLGYSIFINYS

SEQ ID NO: 355431 - protein, 465 aa, unidentified
MSCLPGVVGASPPLPAERLIPSWQEPLKVVGGVDPHADTIHVAVITMTGKAVADREFATTADGYRSATAFLTATGAVVRVGVEGAASYGAGFTRALKTAGIDVVDVDRPARFDRRRAGKSDRLDAYHAARAVLAGRSNPVKGPAIEGVRALHLARRSVVKAQTAAMNQMIAILVMAPDAVRARYRRLHGDRLAIALTRSRGASDPISADTLLALKALADRYRQLAVQVDALTARLDHAVRQASPALRAAFGVGPDTAAQLLITAGSNPERLYSERCFAALCGSAPVQASSGKIQRHRLSRGGDRAANSALHRIALVRMANHRPTRAYVARQTANGRSKPEIIRMLKRAIAREIYRPPHPSRRCAQLRRPPRRQASQEHHRHPRRPALRRLARRHLPARARAAPRRRPRPAIPNLARGRLIIEGSAVGANQAEAQAGSRCSAPQTNDPDRAEHRPTITTGGNLDTQ

SEQ ID NO: 355432 - protein, 443 aa, unidentified
MKPLPVLDPKAAAIDVGSEQLHVSIAGDIPKVFGTFTADLEVLREGFKAQGVRTVAMEATGVYWLYLYEVLEAAGLAVVVVNGRHVQNVPGRKTDMSDCQWLATLHAHGLLRGGFVPPADIRRLQDYQRLRGDHLIGAASQVQKMQQALERMNVKFHDVISDLTGVSGLKVVRAILDGEREPARLLALCDVQIQQKKAKAVRESLRGCWKQEQLFALRQALELWETFQQKIADCDRPLEAQLRELAGPEPTDGVAGGAELKLAPAKRPGKNAPVIEKFQALLARLCGGRDATQIPGLSVYLVLQLISEVGRDMSCWPSEKHFTSWLGLAGGRKQSGKRKGSVKAHRNRAGRLFCAAARALAQSVDKALGGFYRRLRGRVGGLAANVALARKLAEMFYRLLRYGMEYVEKGLKDYETKVLLGEARLLRKLARRQGFELIPAAAK

SEQ ID NO: 355433 - protein, 344 aa, unidentified
MEPMIIRQSVGIDVAKDDFKVCYGSINVKMEHSIIAESSFDNSLKGMEQLVIWLSTVLNSSDDLYIIMEATGIYHERLCYFLHSQGFQVSVMPSGRVKKYAESLQQRSKTDLLDAKMLCVLGLERSVDLWEPAREVLQDLKNLSRERGQLVKEQSALKCKLHALEYSFGVHEKVVSRLKSRLELIAVQIKEVESEMHEVVVGDEELSTKTSQLTSIPGISFISAMVVIAETRGFQGIKSAKQLTSYTGYDVVHRESGLYKGKTSISKRGNSHIRSALHMPSLTAVRCNPTLKPFYQRLKAKKAKPIIGLVAVQRKLLCLMFTLWKTDAFYDPNYEKSAEALASA

SEQ ID NO: 355434 - protein, 391 aa, unidentified
MTILVGIDVAKDKHDCFIMNSEGEVLAKSFTILNNKEGFDFLYKKIQSVSSSDKVKVGLEATGHYSYNIIGFLLNKDLATFILNPLHTNLYRKSLSLRKTKTDKIDSKTIAMMLLSDVSLKSYSDISYHNEDLKSLTRYRFSKVEERAKLKTSLSRLAQILFPELEKLVPTLHMTSIYQLLEEFPSASAIASAHLTRLTKLLSKASKGHYNRETAIKIREAAKNSIGSNMPAKSLELKHTIKLIRALTIDIGEIEAEISKMMDMIASPITTIPGIGRNMGAMIISEIGDFSRFSSPDKILAYAGFSPSIYQSGKLDNCYAHMEKRGSRYLRYALFHAAKLVCHWDKTFADYLAKKRAEGKHYYVAISHAVKKLVRVIFHIEKTKQAFLKAS

SEQ ID NO: 355435 - protein, 475 aa, unidentified
MSRKTSSQTDSVALPMLVHETLYIGVDVGKKAHVAGFLSSTLLTRHQRFEHCPALAFDNSREGFRSLIDRIRTYVPFTQVQAVLEVTGHYHRALLQYLQEVDIPVYVMHVQKRQEGLLKTDKRDALGLANMLYNQLEKGIQVGDPLQAVRRLIPATAAATELRGMVRHRYELIAESTQRKNKLTAICDELFPEFTRLLRDPNLPTALALRKRFSTPAELAVATFGELREARGRTCSVSDAKLRELQRLAAQSIGRKEPARVRGLVVEQKQLIGELDLIAEHITELDTEIIHVVEDSREGKVLTSIPGIGPLAAATLIALIGNIANFERAAQLKSYVGWVPKVAQSGTTLDWTRLSPRGVRQMKQTMYLIVWRAIQWDAEWKEMYERLIARKCRSDERTRRLVGREKVIGGLAGQMTSVIYALLKKDHEVLFHLAPGAKPPEPQLYDPETHRRHRLEHYQSPTREKVPQIIQLPSP

SEQ ID NO: 355436 - protein, 391 aa, unidentified
MTILVGIDVAKDKHDCFIMNSEGEVLAKSFTILNNKEGFDFLYKKIQSVSSSDKIKVGLEATGHYSYNIIGFLLNKDLATFILNPLHTNLYRKSLSLRKTKTDKIDSKTIAMMLLSDVSLKSYSDISYHNEDLKSLTRYRFSKVEERAKLKTSLSRLAQILFPELEKLVPTLHMTSIYQLLEEFPSASAIASAHLTRLTKLLSKASKGHYNRETAIKIREAAKNSVGSNMPAKSLELKHTIKLIRALTIDIGEIEAEISKMMDKIASPITTIPGIGRNMGAMIISEIGDFSRFSSPDKILAYAGFSPSIYQSGKLDNCYAHMEKRGSRYLRYALFHAAKLVCHWDKTFADYLAKKRAEGKHYYVAISHAVKKLVRVIFHIEKTKQAFLKAS

SEQ ID NO: 355437 - protein, 375 aa, unidentified
MKEFSKYVGLDTHKDTIAVAISDAQGGKARYFGEIKNTPEAIRQMVKQLCPDGELISFCYEAGPCGYDVYRQLNRLGHHCDVVAPSLIPTKPGERVKTDRRDSEKLSRLNRAGELTSVWVPNQEQEAMRDLTRAREDMKTLERMSKQRLNAFLLRYGRNYSQGKSRWTQAHSRWLEGLKFDIEVQQIVFQEYVEAVKQSQARVAGLIKEMEKALKGWVLAPVVEALMALRGVKLITAMTIMAELGDITRFDSPRQLMSFLGLVPSETSSGKSRRQGGITKTGNGHVRRVLIESGWCYRFPARKTAHLQRRAEQCSDAVQAIAWKGQKRLCGRYKHLMGRGKLKVQVCTAVARELVGFIWAIACEVMNKKSPSVYS

SEQ ID NO: 355438 - protein, 337 aa, unidentified
MKLYSAADLHSNNHFLSIIDEQDKRILEKRLPNDLSVTLKTLEPYRADITGIAVESTFNWYWLVDGLMEAGYPVMLVNTSKVKQYEGLKHTDDKHDAFWLAHLMRLGILPTGYIYPKEQRAVRDLLRERRRLVQQRATHILSTQSTVWRHTAVRLPSKAILGTNKMPWPKLANDNVTLGVGAHRAAIKTLSTHIARIEDTVTKALKPMPEYKSLLSVPGIGAVIAWTIVLETGELKRFENVGHFASYCRCVDSKKTSNGKKKGEGNIKNGNPYLAWAFFEAAHFAIQYLPAAKRFYEKKAAQRHPILAMKALSHKIARACYYVMRDQAPFDEKRLFA

SEQ ID NO: 355439 - protein, 335 aa, unidentified
MVDTETGEITKRRLEHGNGDARAFYAALPGPARVGMEATMNAQWFERLLQEYHHELWVGDAAQIRAAAVRKQKTDDRDALHILDLLMRDKFPRIWIPSPENRDLRQMLRHRHKLVRIRTSVQNQLHALAMSQGLCRKAKLWTKAGREELERLQLDPWASRRRQELLQLFDQLNPQIDKLDKVVIQEAERRPAAVQLMTQQGVGPVTALAFVLTIGPVERFPTSKKLVSYLGLNPSENSSGGRQRLGAISKQGNSLMRHLLSEAAQTAVKFDPELRRDYLRLKFRRGISGVAIVAIARKLAVRLYWKLREAAQPNTAARMQGSPTSPMVEESPSRI

SEQ ID NO: 355440 - protein, 377 aa, unidentified
MAGTEPHAWETGLMDNITYVGLDVHKATVSVAVAESGRGGEVRHVGVFANRPEILLKLAARLSKGGHRLSFCYEAGPCGYGLHRLLTGCGHECVVVAPSLIPVKVGDRVKTDRRDGLMLAKLHRAGELTPIWIPDAAHEAMRDLVRARATAGRVLSKARQHLQSFLLRHDQIYRGVRAWTLAYRRWLTTVRFAHPAQQIVLQDYIHAVQDAEARLERLTRQIEELLPNWSMAPVVTALQAMRGVALVVAVTVVAEVGDFRRFANARQLMAYLGLVPSEHSSGASVRRGGITKAGNMLARRVLIEGAWTYRMPARVSRKLHDRNEKRSPTIRDIAWKGQIRLCSRYRRLAAAGKPKVVVTTAIAREMVGFIWAIARIA

SEQ ID NO: 355441 - protein, 524 aa, unidentified
MPGWAPRGMKIYGGRNIFAASEGMVCLQAMAGLRAMSNWCREPEEEMATDAQGHHKLLLRAREGESFDRWASDQPITVRRWQMLRTIYRRVAGLDVHKKTVVATRMRMTEDDRVVWETKTFGTTTPDLLELHDWLLEWSSTHVAIESTGDFWKPVYNVLEGTFELLVVNAKHVKHVPGRKTDATDSEWLAELMMHGLLKASFIPPEPQRALRDMTRYRTTLVQERARVVNRVQKLLEGANIKLSSVATDIMGVSARAMLDEIVAGQADTTLLAELAKGRMRTKIPELEKALTGKVKAHHRFLLAKQLAHVDFLDEQIEEISAEIGRHMAEMGGPSRPGADAGGGEKPTEGEQPLPPLTWEEAVALLDTIPGVNRRAAEVILAEIGLDMSRFPTADHLASWAGLAPGNHESGGKRYSGRRTKGNRSLSSMMTEAAQAASRSKDTFLSARYHRLAARRGKKRAIGAVAHSMIVMIWHILTSRQPYRELGGNYFDERKKESKVNYYLRRLEQLTGAAVTLGFQPAAA

SEQ ID NO: 355442 - protein, 355 aa, unidentified
MSQEKYIGMDVHAATISAAVKNAEGKLLMECVLETKAATILEFIQGLRGTLALTFEEGTLAAWLHDLLKPHVSRLVVCDPRKNALMRDGNQNDQADARNLAELLRTNQVKAVYHGKHGTRALKELGRSYLTLTKDSTRVMNRIKSVYRSWAIPCAGTSVYSRRHRAEWLAKLVEPGVRMRAEHLYQQLDSLEPVRQAARRELLRESRKHAAVKLLRQIPSIGPIRSALLVALLQTPHRFRTKRQLWAYSGFAVQTYDSGEYRFVRGKLQRNRERITVRGLNHNHNHDVKNLLKGAAISAIERPGPLQDFYAGLVEKGIRPSMARLTLARKIAAITLIMWKKGVSFDPQQLQRQAA

SEQ ID NO: 355443 - protein, 415 aa, unidentified
MVERCAGLDVHRDNVVATTRVPGQGRRRFEQQTETFKATLPGLAELAAWLAAAGVTLVGMEATGVYWKTVFQALEDRFECWLLNAHHLRNVPGRKTDVKDSEWICQLVQHGLVRPSFVPPPEIRRLRDLTRLRTAQNNERTRTIQRLEKVLQDAGIKISSVASTSYSKSARAMLEALLSGVTDPEQLAELAKARMRNKIPQLREALQSRFTIEHHGVMVAQLLAHIDTLDTELQHLTERIELALCPHAHIIELLSTIPGVQAQAAQVLIAECGLDMSVFPTVGHFASWAGACPGHHQSASRRKSGRTRPGPSWLTSQLTECARAAVRTKETYLASHFAQLRGRRGEQKAIGAIRHDLLVAYYHIVRDQVPYRDLGPNWQRKRYSVEHRAKRLQRQLEALGYTVTLEQTEATEQVA

SEQ ID NO: 355444 - protein, 417 aa, unidentified
MKKHSKSSQRSETTLKRTKVRGPVQRDAKEVMAEVLGKLTGKLDTPAVSTRVKEKRRGKTVRPNLDRLTVGVDLGDRWSQYCILGLEGETLAEGQLRTTQEDVREFFQALTVARVVMEVGTHSAWVQDVITESGHEVLVANPRLMEGSKRRKRKSDRIDAHKLARLGRVDPQSLYPIRHRSREVRQDLVVLRARDALVSVRTELINTARGLVKSMGTRLPGCSSPSFADKVKDAIPDEVREALLPLVQLVETVNDCIAKYDQKIEELGREKYGHTTLLRQVKGVGPITSLAYVLTLEDPQRFSSSREVGPYLGLVPKQEDSGDSQPQLGISKTGDRMLRRLLVGSSQYMLGAFGPDSDLRRYGLRLCERGGKNAKKRAVVAVARKLAVLLHHLWVTGDVYEPLHHPGAETRTAPVAA

SEQ ID NO: 355445 - protein, 393 aa, unidentified
MEINYLCGIDVSKSSFSIAVKDGSFIIKDRLFEMNRSGFSKFEQLIRGFKPNIRIGMESTGIYHKNLSNFLKDSGYNTVEIDPYEMWRFFKFTNSKPTTTDRKSAKTIAEFLEFTKDAFNHKEEPYEDERYSLRHFVREKERIVQDIAKTKTEIRRVLGLVFPEIEKYDSIFSKEILTLLSRFPSSRSICAITYQEFIEQADSILNKGRGRQAKICLKEIYRLACNSIASEFGVYEELLKIKINRLFFLFKEKEDITSLIDQIADKFFKREIEILTSIKGIGRESAIYFMAEIIDIKRFVHKGRLIGFCGLDPIIKQSGQFKARLRISKKGNSHARRIAWIMARCVKKSNPYFREYYLKKRREGKSYKEAIIATSTKLLRTIYALLWENRCFK

SEQ ID NO: 355446 - protein, 349 aa, unidentified
MRFYTKQHPFYCGIDLHARLLAVCIVDQAGAVVLQTQIAADKQLLLQTLAPYRPDVVVAVECLFAWYWVADLCAAEKIPFVLGHALYMKAIHGGKAKNDDIDAEKIARLLKGGNIPVAYVYPKGLRETRDLLRRRMYFVHQRAALITHVQIVNAQYNLPEFSKKLIYAKNRAELKIAERFDNPQLRKSVEVDLALIDVLDERIAEVELHLERTAKVEDPQTFHLLKTIGGVGKILGLTLLYEIHDIRRFPDVGEFLSYARLVRCRHESAGKKLGSGGHKIGNAHLKWAFSEAVCLLVRHYPAVKIWQARHEKKHGKKKTLGILAARLGRTVYHMLRKREAFDVKRFLGQ

SEQ ID NO: 355447 - protein, 367 aa, unidentified
MKKVSTVATKQSRNISRQKLTIGLDLGDRNSWYCVLDEAGTIQLEQRVRTTAKALQEVFGAMPRSRIALEIGTHSPGISRLLSDLGHEVIVANARKVRLIGQSRKKDDRLDAQTLARLARIDPELLYPVKHRSAEAQADLMMIRARAGLVRARTGLVNTARGLAKSYGERLRGCNVRDMDPEKAENLSPELQRALEPLLATIEELSERIVEYNDRIEALAQASYPQVELLKQIKGVGTLIALTFLLTLEDSHRFGKSRDVGGYLGLQPGRRKSGESEPQLHISKEGDPYLRTLLVQGAQHILGPFGMDCDLRRWGLKLAERGGRNSKKRAIVATARKLAVLLHHLWVSGEVYEPLHNSSRVTVAAAA

SEQ ID NO: 355448 - protein, 346 aa, unidentified
MIGIDIGKNSFHVVGHDQRGAIVLRQKWSRGQVEARLASLSPCLIGMEACVGAHHLSRKLQLLGHNARLMPAKYVRPYSKGQKNDFRDAEAIAEAVQRPTMKFVATNTTDQLDLQALHRVRERLVSQRTGVINQIRAFLLERGIAVRQGLRFLRVELPGILATRTDVLSPRMSRVIEELAGDWRRLDARIEGLSGEIETLAHHDQHCERLMTVPGIGPIISSAMVAAIGTGDVFPKGRDFGAWLGLVPKQVSTGDRTIFGSTSKRGNRYLRALFVQAAWVVLVKLGPKQWERYGLKSWIEAAKRRLHYNVLAIALANKLARIAWAVLNKGRAFTCVKTDAMASRPT

SEQ ID NO: 355449 - protein, 320 aa, unidentified
MNQVSTDIGVDVSKDELVVATYGQEQVVCLANRPAAIQRWLKELPPGCRIGMEATSTYHLQLAERAYAAGHCVYVFNPRQVARYLGSLRQRGKTDLLDARGIARFVHNETDQAYPFVPPTAEQRGIASLVRRRHLLVKQRVALLQSSHGEPWLQQALQPLLAEYRKLLSTLDVELERLLVQAPRLAEQRRLLQSIMGIGPLVSIALSQHLSQTDYRRSDALVAAFGLDPRPRESGCYQGSRKLSKQGHPEYRRLLYLAAQGACRAGLWQSERAAWLARGLSKTAVNCIIARKLLRIAFAVWRSGIPFDRNRIGQQACGRT

SEQ ID NO: 355450 - protein, 348 aa, unidentified
MTTVADQFEHVVGIDTHARTHTYCLVESRTGGIIDTATFPTTSAGTNRALSWIARRSQGTTTLAAIEGTSSYGAGIAAALVASGFEVTEIRPIARPSRARTGKSDPIDAEAAARSVIREDLDKLAQPRRTGDRTALRVLLAARALVDQQRTANRNALTALVRSIDLSVDARKPLTDAQIATIAAWRTNRDDATTRVFREEARRLARAVLEQTEVLRENHRQLGQLTEALAPGLQAVPGVGAVTGAILVAAYSHHGRVRSEAAFAALGGIAPLPASSGNTTRHRLSRSGDRQLNRAVDVVVRTRLSYDPATREYASRRRAEGLSNREIRRCLKRYVCRALYRELRTRMT

SEQ ID NO: 355451 - protein, 421 aa, unidentified
MLILYQRCAAVDIGKDVIAVAVRLPGDGAEHRQTIKQTFKTFYGVLKHAARWLTAQQVTHVAMEATGIYSMPVYHALIEHGQFEKVLVCNAGHVRNVPGRKTDLSDAEWLVHLLECGLLRGSFIPPAQIKAARDVIRYRTKLTESRTSELQRLGNVLQDAGIKVDSVASTITTRSVRAMVEALIDGERRPVLLAELAKGRMRARIPDLQRALEGRFDDHHALMCRLHLDHLDHLEEMIARLDTQIQDMMQPFRAQRELLTTIAGIGPFAAAAIISEAGADIGETFPSAGHFASWIGVCPGNHESAGKRHSGKPRKGNQHLQHVLVECAWAASRTPGYLQSLYRWHVRKFGGSRNPTAKNKAIVAVAHKLAIIIWHVLATGKPYTDLGADYLDRRIDPAKETRRLIARLQALGHTVTIEPAA

SEQ ID NO: 355452 - protein, 413 aa, unidentified
MEVVVACCAGLDVHQASVVACVNRTGRDGRSHKEVRTFGTMREDLIALREWLKQAGVTLVAMESTGVYWKPVFEMLEGLCDVIVANARHIKNVPGRKTDVKDCEWISDLARHGLISRGFVPPREIRDLRELNRYRRKLAQVQTAERNRLIKLLETAGIKLAGVVSDVLGVSGRAMIQALIEGQATPEAMAALAHGRLRASKMDLARALAAPLKPHQRFMARAQLARIKQAELELERIDAELLRMAAPYRRHVELLMSIPGVNWINAITIITEIGIDMRAFHSAAHLASWAGLCPGNNESAGKQRSGKVRKGNVVLKTTLVNAAIAGSGSRGHKGTFLAEKFRRLAARRGKMKAAVAIAHKILVAVWHMLSTGTFYQDLGAGFLDRLDRTRNARHLVRRLTNMGFQVQLTQTAA

SEQ ID NO: 355453 - protein, 477 aa, unidentified
MVGPDDGGVDHLNLGWGRPAFVQGIKDQLPQSGQRPATELAVHARPLAELLGKIAPLRAGPGNPEYAVQNLPVIGCRPITASPDRNYELLEKRPFGVTHEQSRQDSLLSKAILMMWTPPTPQLRVLCLERVELGRSIEMHIQTIGLDLAKSVFQAHGVDDACNTVLAKKLHRKQMIPFFSKLAPCLIGVEACGAAHYWARTLIAMGHEILIMPPSYVKGYVKRGKSDALDAEAICEAVQRPTMRFVPVKTVEQQGILMAHRTRALLVRQRTMAANALRAHLAEFGFVANPGVANLVKLADQAFTDEVLPAYAHRALEILIRRMAELTEEIGELDQELRTWHEGSDVSRRLATIPGIGVITASAIAATVTDPDQFQSGRQFAAWLGLTPQQQSTGGKTRLGGISKQGDRYSRRLLVVGATAVMRHAKRKPTPLTDWVSRLLEKKPFRLVSVALANKLARIAWTLLKRGQIYRPYGLSA

SEQ ID NO: 355454 - protein, 409 aa, unidentified
MSEETPEVVYVGLDWAAVVHAVCVMNAAGKVLAQFTIEHTADGIATLIRRLAKHGDPESVQIGIERPNGRLVDLLLEAGHPVIPVSPNAIKTWRESEVLSGAKSDAGDAMVIAEYLRLRHHRLHPVQPYSGETKALRTVVRTRDDIVEMRVRATNQLSALLDDFWPSAKAIFADVESPISLAFLRRYPTAAAAAHLGEKRMTAFLTKHGYSGRRPASELLARLRRAPAGSKDPVLVEAVHDAVLALVTVLEALNTAGKNLDRSVVAHLGEHPDAAVFTSLPRSGQINAAQVLAEWGDSRAAYAGPDAVAALAGVTPVTKESGKQRAVHFRWACNKRFRKAITTFADNSRHESPWAAHIYAQARARGHDHPHAIRILARAWIRVIYRCWHTSQPYDANLHGGAQRLPIAA

SEQ ID NO: 355455 - protein, 485 aa, unidentified
MAKVKLSAFDRLRLGARLNRKERRDVEQRLSATDPGLEIVNRDAAGIDVGNESHYVAVPRGRDAQPVREFGSWTAALVEMAQWLMGCGIRTVVMQSTGVYWIAVHDVLQKHGLEVNLVDARGTKNVPGRKSDVQECQWLMRLHTYGLLRSCFLPTPEIHGIRTMWRLRDQHVKDAARCIQHMQKSLIAMNVQLHNALSDISGRSGQAIIRALLAGQRDAKTLAALRDPRCMASEEEIVHSLQGVWKADVLFELQQAVDAYDFYRQQMAKCDEQLKQYMALLPARKVETVVSSAEPAATTDRSKTSRPRKPRKPKGNQPAFDLEAELERILGVNATTIDGINVITVQTVLAEVGPDLSAWKTEAHWSSWLNLAPKRDVSGGRVIRHIREHRTNRAGNAFRMAAQTLLHSHSYLGARCRYLRAKLGGLKAVKAMARVLACLYYRLVTKGQRWVDQGIEEFNRRSEQRELAVLQRKAHKHGMQLVPTS

SEQ ID NO: 355456 - protein, 387 aa, unidentified
MQASAPRPEQAAIHVNLAAIFVSLELSRSTWLTTSLSPGGGEKMSKHPIRSGDVAGLLNQLARLQAKAQARTGKTFPVIVIQEAGLEGFWLHRVLEKEGIESHVVDAASILTSRRRRRAKTDRIDGEALLRTLLAYKRGEPRVCAMVRAPTPQEEDRRRLCRERKTLVAERVEHVNRIKGLLFAQGISDYEPLHRDRRQRLEELTTGDGRPLPVHLKAQIGRELDRLELLLVQLKEVEAERDALLAPVGDAAPAPAAALAGLRGIGPEFAAVLWLECLFRPFGNRRQVAAYAGLAPTPWQSGSVQHEQGVSKSGNPRLRTTMIQLAWLWLRHQPTSELSLWFQDRVKRDGGRGKKTTIVALARKLLVALWKYATSGVVIEGAVMKAA

SEQ ID NO: 355457 - protein, 418 aa, unidentified
MSEEYAVLIGLDWADQKHDLCWLETDTGKVSTLVLEHRPEKINEWASDLIARHPGRRFAICLEQSRGAVVYALMGYAEVDIYPVNPAALSDYRKAFRPSGAKDDPSDAGLLLDFLRRHRETLKLWQPDTEQTRLLRSLCEDRRKAVDLRTTLCNSLRSKLKEYYPQALKLIGDDLFHELCCAFLTKWPSFDVLASVRLETIRRFYYAHHCRSEQQIVERLELIANSRPLTTDRAVIHAGSLWVETITGQIRALNRSVDCYDKHIGDLFKTHPDRFIFESFPGAGKQLAPRLVAAFGTDRNRYESATNVATYFGIAPVIERSGKQMWIRWRWHCPKFLRQSAVEFACKSIGFSVWANVYYKEQIKRGKGHQAAVRALAFKWIRILFRCWQDRTPYDEGKYLAALERHGSWIAAALKTAA

SEQ ID NO: 355458 - protein, 454 aa, unidentified
MTSTGTVHSPTTIQARAGIDCAIVANHQCELIEYRNDGTTRTTRKTIPSTAAGMNELTRFLAAVDVAVDVVAEPTSLTWVGIQAAVGAAGGRFYLIGTRHSSRLRAAVAGKNKSDVIDAHLLAKALDLFDLEPLVVADVGSEAIKRSALSRGDARVHYDQCWRRLRSYVAATVPDIDKILAGSRTRTLAVLGRWPDLRALARAHRSTIAAVLRQHSYCSGRQEQIADQLRSAAAAWVSILEDYYDLDFWRSKVAGMLADIDQAADRFDRYTEQLDGLWHAFYGPDDLLLSVPGTGPITAATIRGWLGDGSRFARPEDFASYCGLTPSNWSSGTMEHKHRAISKEGPSALRMAVFLAANAARTSDPQLARVYHRLMVDKGQHHNKAVCAVARKLAERIWIVVHRNAPYEYRDDDGAILDITQARAIVRERYQVPAEVRARHRNHTTAQRRARLAA

SEQ ID NO: 355459 - protein, 352 aa, unidentified
MIIIGVDFHPEFQQIASVDADTGEFQEKRLGHREEAETFYRALASHKVRVGMEASGHARWFERLLAELQIELWIGDAAEIRTRRVRKQKTDRQDAQLILKLMLKDDFPQIWVPSWENRDLRQLLWHRHRMVQARTRIMNQLQAVALNEGLRCKKRLWREHGRQQLEAFRLAPWASRRRRDLLELMDRLNPTIAELSQAIEQEVEKCPEARRLMTHPGVGALTALAFVLILGKAERFGSGKRVASYLGLVPLEDSSGNRRRLGHITKQGSSMMRFLLVEAAQVTVRSVPEWRSKYLHLMMRRGRKTAKVAMARKLAVRLYWMMRKGWDYEQWKKFGSHAGQPGNRDGVQSNTE

SEQ ID NO: 355460 - protein, 368 aa, unidentified
MKQQTSAATETKIKGRNIIDFTGKTIYVGIDVHEKDYQVAKVFDGICLGNHRKAANHQMLIDHLNSRYPGATFKCVYESCAWGFTLQRALNSAGIECIVVHAADVSSSDKEKKRKTDKVDALKLARNLASGDLTGIHVPDEDLQKERNLIRFRKKLVGDLNRSKNRLKSLLKYQGIKIPEHLEKKNNWSYNFMNWVEQEANKDVLLKDTLLLMLEEIKLLRQLLLKTERALRKLMKERHNEKATLLMTAPGIGRTIAMQFVLEVGDIKRFHSFDALNDLIGFCPDTDSSGDMQRDRGITSRRHKQLRSALIEAAWTAIRIDPALMDAYQKLTKRMQGKYAIIRIARKLLRRMRTMLLTGQPYQIGVAA

SEQ ID NO: 355461 - protein, 344 aa, unidentified
MSTVACYVGLDYHQDAVQVCVLDAAGRQLLNRSCANDWREIAGAAASVGVVKRAAVEACCGAADLSEELSARAGWHVDLAHPGYVERMKRSPDKTDYTDGRMLADLTRVGYLPKVWLASAYERDLRGLVNHRQSLVDQRRAAKLRVGAVLREHRAKPPKSGAKPPSRWTRAWVAWAASAPQLSGHARWVVAELLGEVAHLDGKVLAADARLRGATADDPKLERLMNEPGVGEVTAWVLRAYVGRFDRFASGKQLSRYCGLSPCNASSGARRADAGLVRGCNKLLRATLIQAAHRLVRTEPRWRTLAGSMRARGKPPCLIAAAIANRWLRGLYHEMKPLGLAAAA

SEQ ID NO: 355462 - protein, 411 aa, unidentified
MRVHHNVCCGIDVHKKSVTACLMWGPADREPEFEIRRFGTMTRDLRKLAEWLKQAGCEATTMESTGSYWKPVWNVLEGQIPNLILANAQHVRALPGEKMDRKDGKRLAGLTRHGQVRPSYVPPRAIVELRDLTRYRSKLLLAGSSERNRIQKLLEDANIKLGSVLSDMFGVSGQKMLQALVKQDVVDVGQVAQLAHWSLKPKMEAIQQALEGKLTDHHRFLIDVSLQHMRFIEEQLIRLDAEIQRRLQPYREQYELLQTIPGIKETGAARILSEIGPDMSPFPDGDHLSSWGGVCPGNNESAGKKFQSKIRKGNVHLLTALTECAWAATKKKDCHFRNKYYRLKSRRGSQRAIVAISHAMLKCIYVVLSQRQPYREPKPTSLTDAQKQRKVSSLSRQLRALGYDVQIQKAA

SEQ ID NO: 355463 - protein, 439 aa, unidentified
MSRRAYRATGVNEVNWEQIAHGKDGLDVTLGVDVGKFDMLVVCRWADERFERPWRVKNPQEIPTLAALAKQVQADRNLVVAMESSGTYGDTLRQALTDNGIEIQRVGGKAAHDYAEVFDGVPSQHDGKDAAVVAELAALGKGRPWPYEAADSWEEELTYWVEEMVIQRQLVTCWQGRLEGLVARHWPEAFQVLKLSSGTLLRMLKRYGSPQALAADPQAPRQLARWGGALLSAKKIDQLLAGARSSVGVRLGPWQQRQIQECAEKALAARRQSNQAQRRLRQLAVGHQVLQAQGKVVGIPTACVLWVCTGDPRKFDSAAAYRKAMGLNLVERSSGTYQGQLRISKRGHARTRQWLYFAAMRLVQKRGVRPWYEAKKARDAGDARRLLVAVMRKLAVALYHVGVRNEEFQPRRLFGRIGKHRGRGAQRAIAVAEPSKIQG

SEQ ID NO: 355464 - protein, 407 aa, unidentified
MEVVYRCCCGIDVHKKVIVACLVNGGEQELREFGTTTSEIKSLANWLTESGCEMIAMESTGVFWKPLYNLFELMDLNAMVVNAAHMKALPGRKTDVKDAEWIADLLRHGLLKASYIPSREQRELREITRYRKSLTEERCREVNRLQKILEGANIKLDSVVKDITGKSARKLLQRIIDDNIPDSEEVSKLVHGRMRPKLDQIVASIEGITTPLQRKLLAQIIDHIDDLNRRIGELDKLVQEYMTEYEAAIEAIDEIPGIARRSAEVILAEIGLDMGRFPSAAHLCSWAGVCPGNYQSAGRRKHGKTTKGNSALKTILTQCAKSARTAKNSYFSAQYQRIAARRGKNRATLAVAHSILIAIYHILKNKTAFQDLGSDYYDSFNRDRKINSYLKRLKALGWEPDAIPSSA

SEQ ID NO: 355465 - protein, 345 aa, unidentified
MNKLIAATPAKIFCGIDVSARSLAVALIEPEHCVSQREFANSASGHKALVGWLGKHNALVRVTLEATGIYSLDLALALDAAAQIEVAVLNPKLANRFAQTLCRSKTDKADAVVLAEYSQRMPFTAWQRPGVDQLRLRTLGRHIASLVVEQANLKNRLHNAESTATVPRAVLLDLRQAQAGLLRRLAKMRREAIKQVQAEAQLRQRFALLVSIPGIAEISALQILSELVLLAPGMTVRQWVAFSGLDPVHHVSGTSIHKPSHISRAGNRHLRHALYMPTLSAARYDPHMRAFYLALRERHKTGLQALMAVERKLLHAIYGIFKSGHPYDGKLLFPNIRLEVESIAG

SEQ ID NO: 355466 - protein, 360 aa, unidentified
MNNHKYVALDVDSANIVAGVYNSKGQALMQCCVKMNAGAVREFFKLLSGTVHVTFEEGTQAAWLYELINPLVAEVIVCNPRENKLMKAGNKSDRIDVAKMAKLLRLGELRPVYQGPAAAQGLKQLVHGYEALVGDSTRVMNRLKAIYRGRGLSCKGEAVYEAEERQQWLAKLKTVELRQRADNLYAQLDCLLQLRAEVEKEVCRAARRHEAYKWIRSTPGLGPIRTAQILATVITPHRFRGKRQFWPYCGLAVVTRSSSDYEWVDESSRRKRKPIQTWGLNQNHNRTMKAVFKAAALSALGRNPEFREYYQRLCKQGMRPEMAQLTVARKLAAIVLILWKKGERYNSEKLKQAAPGTGQK

SEQ ID NO: 355467 - protein, 403 aa, unidentified
MQHVIAFDVSMGKSYMVIYNAQKQCIFESEINHSKPDFEELRKRIDQLMNENKKSPHIVFEATGVYSRQLERFMQDNKFEYFLLNPLEAKLQCDSLRIHKTDRSDAHQLALTHFTASRREKTGTDNLFYQLKSLSRFYSELDDELSLIRSRMHKVIQLTFPELEQIFTTKSDLFLNFVQLFPHPDFVQNLSKTVMKNQIRKNTNKSISISIAEKKAMEVLEAARYSYPAVRQDDVLCEQLKSYAKRYQELLHQKEQCITKMVRLAESRTEYPIILSFPGIGPNTAIRLLAEIGDITRFENNKQLNAFAGIDIRRFQSGKTFFKDKINKRGNKHLRKLLFLIIQNMIKLRRYGQNHIVEYYDKLKTQPYNKCHKVASIACVNKLLKLLFYLITHNIHYDYRLTA

SEQ ID NO: 355468 - protein, 338 aa, unidentified
MSILYVGIDLAKSVFAVHGVNEAGKPELVRPNVARAKLVELIAALPPCEVGMEACTGAHHWARLFMSHGHTVKLMAPKFVAPYRLSGKRGKNDAADAAAICEAMQRPNMRFVPIKSVEQQARLMVHRARQGFVEQRTATLNRIRGLLSELGIVMPLKAATVRREAALALEDLPGRANLVIGDLLSEVHRLDERIEQYERQIVQMAREDERARQLMRLSGVGETTATALIAMIGNGHEFKSGRQLSAWLGLVPGQYSSGGKTRLGRITKAGDPYLRSLLVMGARAVLNAAKGKNDSISCWAVQLAERRGYWRAIVAIAAKNVRMAWAVLSRGERFVMPT

SEQ ID NO: 355469 - protein, 342 aa, unidentified
MTFVGCDLHTRMQQVAVLDTGTGAVSERRLDHDGMAVEEFYAALPRPVTVGIESTGYAVWFHALMQRLGHTLLVGDAAKMRAMVVRKTKTDRRDALHSLDLLRHDRFPTIWVPDPATRDLRALLTHRMRLVRIRTMVKNGLQAIALNSRLAWGSKLLRQAGLVQLQALALPPHTARRRDQSLELLAGLNTQIRELDDAITTAALAHPDAPRLITHPGVGALTALTTIVVLGPVTRFHDSKQVVSYVGLAPALNASADKYHLGHITKQGSPLLRFALGQAAAHAARMDPDLKRTYGALVHRRGRPKAKVAVTRKLLVRLFIMLRDQIDYDEFCRRGRSAPASA

SEQ ID NO: 355470 - protein, 412 aa, unidentified
MAVFCGIDWAEPHHDVALVDGEGTLVAKRRISDDAAGFTALVQLLADAGDTEDQRIPVAIETNRGLLVACLRATGRQVFTINPMAVSRYRDRYSVSRKKSDAGDALVLANILRTDLAAHRPLPSDSPLAQAIAVLARAQQDAVWDRTTAHNKLRSVLREYYPAILDAFADKRGGLLRSEARTLLAAAPTPHAAAELSTAKLRALLTRAGLQRNIDPEAHRLREILQREYLHHPQLVEEAFGRQALALLHQLDAACASAEDLAAAAAEQFDRHPDAEIITSQPGLGSLTGARILAEIGDDRTRFTDARSLKAYAGSAPVTRASGKAITVLHRRVKNQRLAATGYIWAFAALTASPGARAHYDRRKATGDRHIAAQRNLFNRLIGILHHCLQTRQRYDETTAFAATAIPTAAVA

SEQ ID NO: 355471 - protein, 359 aa, unidentified
MTGVPIVADTYQFVVGVDTHAATHHYAIIDARTGGIVDHGEFPTHTKGLLRAAAWITRRTGEPTGGDLDRVLVSVEGTRSYGAPITALLAQAGYRVVDAPSPKRERGTGKNDHIDALVAARGSLHKRLDQLADARAGETSTTLQILLTARDMMTSERTRAVNALNALLRTHGLGIDARKKVNRPTIRTIAAWRTRKSDTLAIATARAEATRLATRILALDVEADTNEHTLLKLIETTHPSLLDLPGVGPTTAAIVLTAWSHPGRVRDEAAFAKLGGVSPLEVASGNRHEHRLNRTGDRQLNRALHTIANSRMRHDKRTRDYVARRTEQGLSKRRIRRCLKRYIAREIYRHLTTQGVDKP

SEQ ID NO: 355472 - protein, 371 aa, unidentified
MTNVIHIGIDVHKDSYSLCSYSFATKQSFGQTKIASKDSLVIKYVQRLQKEQPNSEVLCGYEAGPTGFGLYRELEKTGIACVLMAPTSLPKAPGNRVKNDRLDAQELAQHLAWGTYSAVHIPTSEDEAVKDYTRMRNARVLALKKAKQNLLSFLLRTGRTFTEGKSYWTLMHFSWLRKQEFVDPLAQETFNEYLQEVLDQQDKVDRYESQIEEIANREEYREKVSKLRCFRGIETHTALSLVAEIGDFSRFVTPEQFSSFLGLVPSEESSGQRERRGGITKAGNTRLRLLLIEGANSTLRSKVYGQKSKRLLARQRGNDPAVIAYADRANKRLHQVYSRLTSHGVHSNKATVAVARELSCFIWGMMNDRIE

SEQ ID NO: 355473 - protein, 337 aa, unidentified
MVFVGLDAHQGLYVATILDPANERVKQFKVKSSLDKFIVTLRKHLHDRPCRICFEASCDYGHLYDRLKEVAQQVVVAHPGKLRLIYADKRKNDKIDAFKLAKLLYAELVPQVHVPDEVVRSWRRTIELRTTLVHKRTRAKVSQRALLRGCGISMPKKLWSKAGLAWLSTVTLPTPADALHRDLLLDELEHFDGQIKRATRYLDGVGSQHPGVWLLRTIPGVGPRTSEAVMAYIDRPHRFRRNNQIGAYFGLVPCQDQSAGRNRLGHITREGPATVRALLVEAAWWGVRHDPTLKAYFEKRCGKNGARKKIAIVATAHYLARVMLAMLKSGEVWRPAA

SEQ ID NO: 355474 - protein, 386 aa, unidentified
MIYIGIDISKYKHDCFICNDTGEVIVDNLSFENTKKGFQQFLDLLKPYDNGNVRIGLEATGHYGLNLKLFLEKNNYTFMEFNPLLVKEFKKSLSLRRTKTDKVDAVVICQKLMSVPYKPNSKLFYHKYSIKSLSRLRETLVKQRSKYMVQLTNVLDIVFPEFKPFFNNRFSSTSLYLLNKYGNAEKIANMRDFDTPNKLSKGSFTYSKFAKLKELAKNTIGESNDFFEIELQTLISLYNEIDSKINSIDKQISTIIKELNPPTLSIPGIGELTTAVIISEYGDFNRFSNADKLLSFAGLEPGIYQSGTILTNGKMVKRGSGYLRYSLMNIANVVIRYNPIFYDFYLKKRSEGKTHRVALSHVCKKLLRVIYKLETQNIQFDPSLLK

SEQ ID NO: 355475 - protein, 351 aa, unidentified
MTHQTATEGITTIGIDLGKNTFHLIGMDARGRIVLRRKVSRGQLQSCLANLPACLIGLEACAGAHHVGHQLAALCHDVRLLPAQYVKPFLKGHKNDYRDAEAIAEAAQRPTMRPVPLKTAEQLDLQALHRVRQRLIGQRTAVINQIRGFLLECGIPVRQGPAGLREALPAILAQRTDVLSPRMIHLIEDLAVDWRGLDDRIETLTRDITTLARQDAGCRRLMGIPGVGVITASAMVAAIGTGAAFAKGRDFAAWLGLVPKQISTGDRTILGGLSKRGNRYLRTLFVSGAQALLQRPHHWQGHRFGRWILTAAPRLHRNVLAAALANKLARMAWSVLYRERGYEAEFTTHMP

SEQ ID NO: 355476 - protein, 425 aa, unidentified
MNDDVLIAVDPHEASNTAAVLDPVTKMVIEVARFANTVDGYGQLTTFAARWELRRWAVEGCYGAGRSLAQRLVADGEIVLDVPAKLAARVRVYSRGHGRKTDKDDAVSVGLAALDGTGILPVTSDDATVSLRLLCDRREELTAQRTQAVCRLHRLLAELTPGGMRRELSANKAQALLALIRPADDVGRVRVHIARDHLADIRALDARIKYIGGQIAALVTASGTGLTALFGIGPVIAGRILAEVGDVARFATKDAFASYNGTAPIDVSSGDQVRHRLSRAGNRRISHALHMMAVTQIRYPATPGRRYYERKRCEGKTPKEALRCLKRRLSDLVYYQLITDRRGTIGACGSPTTPPPTRSTSTSPATRSRRAAPPSRPPRRPAQMGSSPWTGKTAAWSASRSSTPAPASTTTSSTRPKSTAKTAAS

SEQ ID NO: 355477 - protein, 339 aa, unidentified
MPATSIVGLDTAKNVFRLHGADHEGRLTFKKRLRRGQVTDFFANLPRCVIGLEATQGAHHWARILETFGHTVRLVAPQFVKPYLQSQKNDPNDAAAICEAVSRPQMRFVPRKTVEQQDLQALHRIRSRLIGCRTQISNQIRGLLAEYGIVLPQHLIQVRRALPQLLDEKEKRLSDFAKRLFSTLYEELQALDQRILAMEAEVNQAFQQNPLCQRIAEVEGIGPVTATAVVAAISNGNTFHNGRQFAAWLGLVPRQNSSGEKQRLSGITKRGDRYLRTLLVHGARSVVFRAAKKDDARSKWIAEKQKKLGTAKACVAVANKNARMIWALLAHDEPYRRAA

SEQ ID NO: 355478 - protein, 417 aa, unidentified
MEYPPETLPAVPPGGVTCGIDWANDDHAVCVVDMAGKVVQRFIAEHTGNGLAGLVRRLRRAGAGEVAIERPDGTVVETLLEAGFTVVVISPNQLKNLRGRYGSAGNKDDRFDSFVLADTLRTDRARLRPLLPDSPATVTLRQTCRARKDLVHHRVAVCNQLRAHLKIAFPGAVGLFAVLDSPVSLAFLARFDCQDRADWLSPRRLAAWLEGQGYCGRKDPAELHARLAGAPRGATGDDGAAKAHITRALLAVLASLVQQIKTLNAQIAEQLALHADAHIFTSLPRSGTVRAARLLAEIGDCRARFPTPESLICLAGVAPSTRKSGKTTYVDFRWAADKQLRDAVCHFAGDSRHASPWAAQLYNDAIARGKDHPHATRILARAWLYVIWHCWQNRTAYDPARHKALQRILAQEKPAAA

SEQ ID NO: 355479 - protein, 415 aa, unidentified
MGYKVAGIDIHKKVLMVVVMLIQAGGLVEKIERRRFGTTTPELEKLAAWLQALGVQEAVMESTAQYWKPVWGALEGKIPTLNLAQAFSNRARRGRKDDFRDAERLVRRLVAGELVLSFVPDPEQRNLRTMTRMQVHLTYDRGRLHNQVECLLEEMRIKLSSVLSDLFGVTGRHILGAMVKGETDPQKLAAWAGNRLQCTAKELVAALTGHVQPMHQRLLGLYLERLKLIDQQIDELQHMIAEALQSEQDAVQRLAEVPGFGADSAQQMIAEVGPQAATFPSAGEMSSWVGTCPGQNQSAEENHSSRSAKGNRYARRVLTEAANAAVKTKGSHWQVVFRRLLPRLGYQQAAWAVAHRLCRVVWKILHDKVRYVEQGVNRDPKARAHRARTLARALRQLGYNVELTPLTPAPAPTSP

SEQ ID NO: 355480 - protein, 410 aa, unidentified
MQVVYERCCGLDVHKRKIVACLLTLDGGKLQKDIRTFSTTTNALLALLDWLTGAGCTHVAMESTGVYWKPVYNILEGHLELLVVNAQHLKAVPGRKTDVKDAEWIAELLQHGLLKASFVPPKFVRELRDLTRTRTSIVRDRAQAVNRLQKILEDANIKLASVATDITGRSGRAMLRLIITGETDEKTIAELAKGRMRAKLAELEQALIGAVTDHHRFLLAEQLNLVEYYEGMIERLNSGVEKLLLPFQKEIEILDSIPGVSQRTAEVLLAEIGTDMTRFPTHRHLASWAGMCPGNKESGGKRLSGKTRKGSPWLKSCLIEAAHGASHTKDKYLSAQYRRLVTRRGKKRALVAVGHSILVIGYHLLLRKEIYKDLGGNYFDEQHRRQVKIRLVNRLERLGYKVALQEKPAA

SEQ ID NO: 355481 - protein, 301 aa, unidentified
MRAIGIDVHRDFCEVAISEGGRLRSAGRVPSTPAELELLGVSLSDDDEVALEATGNALAIARIIEPHVARVVVASARELHAIAGAKAKTDRLDARTLAKLLAAGMLAGTWLPGEQTRALRRRLSRRAQLVRERTRLKNEVYATLYRNLKGAAPVSDLFGAAGRRWLEELELPADERETVAGCLRVLDFLGGEVAHLEMGIARQAIDSPEIRRLVTIPGVNLITAATLMAVIGDVERFPSARKLVGYLGLDPRVRQSGSSPARMGRISKEGAASARHVLCEAAQAAMRTPGPLRAFGQRVGA

SEQ ID NO: 355482 - protein, 343 aa, unidentified
MQTVTTIGFDIAKSVFQVHGVDAAGQVVVRRQLKRRQVIAFFQKLPACLVGIEACASSHYWSRELQAIGHSVRLMPPAYVRPYVKRQKNDMADAEAICEAVTRANMRFVPTKTPEQQSGLVLHRTRHLFMRQQTSVINAIRAHLAEFGIVAPVGRRGVEELLRIVADPNDKRVPEVVRACLAALGSQLLSLKKQILDFDRMIMAWHRSNQMSKRLNCIPGVGPLLATALVGSVADPKTFRSGRNFSAWIGLVPKQHSSGGRERLGSISKQGDRYLRGLFVAGALAVIRCAKTHGTKHRPWLTALLARRPTKVAAIALANKLARMAWAMMATGERYNYPASLKV

SEQ ID NO: 355483 - protein, 341 aa, unidentified
MDKIASQPVAWCGIDVSAQQLVVALQRGDRAVQHRTFPNGSVGHQALIRWLARSTGTVRVCLEATGLYSLDLALSVHAVPSIELAVLNPKAVCRFAETLRRSKTDPADAVVLLDYARRMPWQSWQPPSATALVLRSITRRFAALTKQHTMEANRLHAAEASKTVPRCVRQDLKQSLRQIECRLKRLQSEARKLVARDAELEQRYTLLRSIPGIGESSALQIMGELEVLAPDLDVRQWVAHSGLDPMQHTSGSSVHRAARISRAGNRHLRRVLYMPAVVGVRFDPYLRTFYEHLLERHKTKLQAIIAAARKILHAIYGMFRSRSRYDGSKLFPLLQPTAQAA

SEQ ID NO: 355484 - protein, 417 aa, unidentified
MTVNSLMQRRSAIKPDTLIVGIDVAKFQHVACTLVPGGAIGRPFEFANSREGFVVLSAEIEARKPTPASAVIVGLESTGVYWINLASWLAEHGCRVVQVSGLYVHRAKELADNSRGTSDAKDALLIADLVAQGKYLSFVRPAGVLADLRQLVGLRQRLVHERAARYNLLHQSVDLLFPEFADVFRDVTGPSARRVLRRFPTPAAALTHPPDEMRRLLSEDGRIQASVAKLAQLQAVARQSIGTREGTAGIEYALDDTLLELDSLDTRVKQVEAEINRLLAQVDETPILTSMVGRMTAAVILSETGGLRQYSCAAAVLKLAGFNLYQISSGQYCGDRHISQMGRPLLRQTLYLAVLQHTHPGMPLYPYYAELLRRGKPKPVALVALCCRLVRLLYALIRDGRCYSPRPPDKNQQTQAA

SEQ ID NO: 355485 - protein, 363 aa, unidentified
MQTCERAKTLFVGVDVHKDTHTAVGLSPFGEKLFELTIGNYPQDFAELAEIVKLAAETANLSPRIGLEDCQGFGQRLAEYLNNDGYAVTHVPPILVDHKRQKAAHPEKNDYLDARGVAEVMIQKIDTLPVNKITQDSQIAKDIQELSLDREYLVKEQTRLKNQLHLLLHRIWNSEYSEKFKDPFTVKGLRYWKKLIPKNTSSFLAKNMKRKVKKLEALRLEIKELESDMELLITKSGHKVHTANGCGIVLAAMIIGEIGDISRFKSPSALAKYAGCAPREHSSGKTHRHRKTRSGNRRLNCAFHRLALSQISRMGNEKAKAYFLRKISEGKSKSQALVCLRRQIVNIIWMIMKHKTDYNLQKS

SEQ ID NO: 355486 - protein, 411 aa, unidentified
MNPQKMVAGIDVHKRILVVVVLHSSAPERDHATARFGTTYQARQQLVEFLRFHQVSHVAMESTAQYWRPVWMDLEDEFPLTLAQARSTHAPRGRKQDLSDARRIARRLLSGDLTASYVPGPEQREWRLLSRTRVGMLESVVRLRNQIEVLLEQAQIKLSSVVSDVLGLSGRRILHALREGVHDPVQLAALAHHRIRTSKEDLADALSGQLTPSQQLVLKLYLEQIEQIERHMLEVEKALAQAEAQHQDAIQRLCEMPGVSVRSAQHVIAEIGPRAEAFASSGKLASWVGVCPGRNESAGISTSNRSPKGNRMMRRILSQIAWATIASKGSEGQRRYRKWVGRLGPQKAAWAVAHYQLRVMWNVLHQGVRFRQPDTANLDQSSLLHRAKRVLADLKRLGYTVTIAPPPDLAT

SEQ ID NO: 355487 - protein, 339 aa, unidentified
MKVSTLGIDLAKNVFQLHGVGCNGQTVLKKKLTRDKFLPFLMQLEPCLIGMEACASSHHFARVLRQYGHEVKLIPPQYVKPYVKTNKTDAADAEAICEAVARPNMRFVQIKTAEQQAILVLHTERNILIRERTACANSMRAILAEFGIIMPRTLSQLYKKVPEILEEYDNELSPFVRCSVARQLEHLQGVEDQITLIEQELSSWAKTQPACQRVLKVPGVGLMTATYLVASVGNGQQFHSAKQFAARLGLVPREFSSGGKQRLGRISKRGDRYFRYLLVHGARAVAAVIERHKDNMPWLYRLLSKKAYNVAVVAQANKTARILWSMLVHHTEYRTLSAV

SEQ ID NO: 355488 - protein, 356 aa, unidentified
MQTQVTKKIDFSGKDLFIGLDVHKKSWSVTIVIDGMEHRTFTQPPDPGALNNYLQRMFPGGSYNSAYEAGFCGYGIHRELNSLGIKNIVINAADIPTSQKDKLQKRDPIDSRKIARGLENGSLHGIHVFDRGMEELRSLNRTRFYLMRDLRRSKNRIKSFLQYYGVSIPPEFDNNQWTLKFVSWLHQVKMQTMSGQDAFSNLIESYEHHRQQLLILSRMVRLRISQYDNELYSLLKTISGIGPLTSSALITELGDINRFQHIDHLSSFVGLIPKVRESGETTHTGGITFRCNTFLRTLLIESSWQAIRMDPAFMQYYQHHVINSKGHKVIIKVARKLLNRIRYVMKNRQPYVTGVA

SEQ ID NO: 355489 - protein, 492 aa, unidentified
MHRKQSLDYFNQSFERVPVRSRSTNEFSFADAYFNASTIRLSQNGSNACLPTNADQLNTKKKPTPMNPNNQNQSFAAFIGLDKSDKKINVSLQRYGTAKIERSIIKGGAEALHAWVATLCTRFAHRQVAICLEQPAAGLIHGLMGYHFIVLFPINPMTLARYREAFTPSRAKDDPTDADFLCELVALHREQLKAWQPDDVCTRKLRHLTQARRRSVNMRTRFSNQLKALLKGYFPQALELCGDDLTTPMACALLQKWPSLQQLKKARAETIRRFYYVQNARRGDVIEKRLALIAQAAPLTNDPALIESSIITVQALTLGLRAVHTAISRYDREIARTFAQHPDASLFAALPGSGTAYSARLLAAFGSRRELFESAEVMLNFSGVAPVLKRSGQATLIHRRYAWPLFVHQSFIEYANESIRHSLWARAFYQMHKAAQKSHWVIIRALAYKWIRILFRCWQERTPYDEIRYLRSLQKSRSPLLQYLAQPAIQTA

SEQ ID NO: 355490 - protein, 452 aa, unidentified
MAKRKQLRRRKRRNRPGPAINLDAAGIDVGATEVYVAVPTDRDPDPVRTFDTFTRDFHELAEWLAACGVKTVAMESTSVYWIPLYTVLEERGIDVCLVNARHLKRVPGRKSDVLDCEWLQYLHSVGLLQGSFHPPEAVAAVRTVLRHRTSLVQMASSHVQRMQKALTQMNVQLHHVISDITGLTGLAILDAILAGERRPEVLAQLRHRNIKAKEKTIIKSLEGTWRREHLFTLRQSLAAYRNYQTQIEQCDSELQDMLGSFESWRDPDAPPVTGGPKDRLDPHGFHLRAEFYRIFGVDLTQIPGVGVRTVYTLFAECGRDLSAFPTAGCFASWLGLCPDNRITGGKVLSTRTRKVNNPASTALRIAAQSLHRSESCLGDFYRRKRYQLGPPKAITATAHKLARIIYHLVSTQQPYDDSILAQDELQTRIRKTRRLKSLAQALGYQLVPVPSG

SEQ ID NO: 355491 - protein, 339 aa, unidentified
MQVYAGIDLHANNNYLGVVDANGKRIFKKKLPNDPEIILGTLDPLRDRLAGAVVESTFNWYWLVDLLMDEGYRVHLANPSAIQKYKGLKHSNDVHDAFWLAEMLRLDILPTGYIYPKEERAIRDLLRKRSHLVKLRTSLSLSLKNIIARNYGRSMKQNEIIQLKQDLVTPLFEDNEDLALASKMSKEVIDCLTNKINRIERFVESKLGLKDSYQCLTTMPGVGLILGLTIMLETGDINRFSNVGNYSSYCRKVPSQWTSNGKVKGKGNKKNGNKYLAWAFSEAAELARRYSPEVQAYYNRKFQRTNRMVAHTALAHKYTRAAYYIMKDHVSFDPKRLFA

SEQ ID NO: 355492 - protein, 343 aa, unidentified
MSYGIDVSSESFTVSQGVLFANTKNEISHTCSFTIDVKGFKSFLKYVNSLNKKYQSNAGIQPWFVMETTGVYYEKLAHFLNDKGFNVSVVLANKMKAFSRVVSPKSRTDEIDSRTIALYGLERQLQKWDPPSEFISCLKELSREANDLNEQVAMIKNRLHAKKHSHKPDQLVIKRLKDQITFLKKQNAQVKKQINDVVKTNKAFSEKVKKITLVKGLREYTVVSVVAEMNEFKHADNKRQVVSYAGLDLKIDQSGKKDSKRRISKQGNSNIRRALYMPALSSKKHEKKLKLLYDRLCQRYNFKDKKRAIVAVMRKLLILIYTLWKNDTAYDPDYYLFNKSIAI

SEQ ID NO: 355493 - protein, 321 aa, unidentified
MTYIGIDVSKDTFVVAYSPDKNSKTKTFKNTTRGIHEFIRTISKDEHHCVMEATGNYSALLVYLLSEAGITTSLENPLKVKNFARAMLSTVKTDEIDARLIAIYGEKMQPAPYKLRSDAILTLKQKRTVIRQLKKQLIATKNLKGSMEALPFFDAKCRKSVEKTIAFLEKQVKDLEEDLASLAKSEYKKQMDLLTSVKGIGITLAAALIMATGGFTYFDNAKQLTRHLGLSPTYQQSGTSVNFKGHINRNGDSSLRSQLYVAAFSSIRCNTECRACYDRLRSKGKPGKVAVIAVANKLIRQAFAVVTQEKPYVDGYISSKK

SEQ ID NO: 355494 - protein, 408 aa, unidentified
MRRVIGLDIHRTFAEAVAWEDGRLIRLGRLDMTRTALEGFGKSLRASDEVVVEATGNAMAVVRVLSPFVARVIVANPLQVKAIAHAHVKTDKIDAGVLASLHAAGFLPEVWTPDPETERLRVVRHRTRIKNEVHSILHAHLIPRCPHADLFNRRGRDWLSRQPLPVDEKATIDRHVRELDRLAEDLDVLDREVAQGAIGNPSIERLITITGVNLTVAAGLVAAIGDIRRFTSPQKLVSYVGLNPRVRQSGLGLAQHGPSARSDAAMRARCWWRPPGLPRRRPDRFTRSSSAFGLGVATRSPPWRWLASWPSCAGTFSRRKRTISGRDPRWWPSRSGAWSSRPVSRPGRGINAVRPMPTTSRHSEIGRCSSRPRPSGLTSTSSANGGREDQARECASASIRPGTNDQAA

SEQ ID NO: 355495 - protein, 344 aa, unidentified
MTYYAGLDVSLRTVNICVINDQGEFIAETKVDSEVTDVVAYFDGLALDILSVGLEAGTMTQFLTYGLQSAGFEVVCMEARQVKAALSAMRNKTDKNDARGIAQLLRSGWYSPVHIKSMDSHRIRLLLSSRKAVLSKCIDLENEIRGLFKVFGIKLPPKLGHGSFDPAVRDIIETDVTLAESLLPLLDARLVLYHCFRKLDNRTRHMAHADLVCQRLMSAPGVGFVTALTYKAGVDDPTRFKHSRTVAAHFGLTPRRFQSGEIDIEGHISRCGDRDVRSTLYTAANAMMTRSSKWSPLKAWGMKLAKTRGHRRAVIAVARKLAVILHRMWIDDTQFQWGSEGARS

SEQ ID NO: 355496 - protein, 387 aa, unidentified
MTKTTSSPSPAAIDYDATLILAVETSNKNWVLAAHVPGLGPVKAKQTIDPSAEALAKAIEGYRRRATGCGATVDRVIVVYEAGYGGFWLARWLDTRGVEAHVVQPSSVPVDRRKRRAKSDKIDADLLLRTLLAWLRGEPRVCSMVAIPDEADEDARRPAREREELIRERISLTNRIGATLATLGVDDYNPLRRDRRIRLEALRTALGKPLPEHAKAKIVRIIERLELVLAQIAALERRRDAVLEKEAPGRAERMIQTLARLRGIGAQSATVLVYEAFIRPFVSGKALGSYAGLTGTPFNSGGNEREQGISKSGNRRLRGAMGELAWLWLRYQPDSALAKWFRDRMAGANGRMKKVLLVALARKLLIALWRYVTNGVVPDGAVLEAAS

SEQ ID NO: 355497 - protein, 398 aa, unidentified
MGVAVGIDVAKEFHWVRAIDTSDSRLLVDRRVDNEPVALHELVAELQALAVKHGQLRVGIDVVGGIAGLVAAMLLEAGIDLVHVSGLAVNRARQGMVGGEHKSDPKDAGVIADQVRHRRDLRPIDPVTEIDAEIRLLVGRRRELVADQTRRINRLRDLLASIFPGLERVVDPTQKASLRLLGRYVTPTEIRRAGRRRLVDHIARAGHLSRKHVETLADQALDAARAQDVAVAGERVAADLVREIADEITTAKTRLASLDADLEAALERHPDAALIRSLPGMGATLTAEFIAEAGSIDRFPTADQLAAAAGLAPVLKQSGKVRYLQRASTGNKTLKRVFFQSAFCSLQHPTSRAFYTRKRAERKTHHQAVIALARRRVDVLHAMLRNRQPYEVRPAKAA

SEQ ID NO: 355498 - protein, 342 aa, unidentified
MTLIKYSLGIDIASKTMQCCLSSIDIRQAVTIIATRSFPNTLAGFTKLDKWITAHCRQDEHPLVITLEATGVYYEACALYLKQAGYRVSVVLPNKSKKYMQSLGLRSKTDTIDARGLAQMGAEQRLAVWQPLSEFYFTLRTLTRHLQSLQQTRTSISNQLHALQTSIYQVKVATNQLKALLECLEEQIGSAEQAIQAHIASNATIAGKVDQLCSIKGVGLLTVAVILAETNGFALISHARQLVSYAGYDVIENQSGKRSGATRISKKGNHRIRRILHFPTINVVKYQGGIFADLFERTYGRHHIKMKSYVAVQKKLLIILYTLWRKDQPFMEQPVAMAGEEG

SEQ ID NO: 355499 - protein, 411 aa, unidentified
MDKVYDKCCGIDVHKKLIVACFRQGNKQEIRDFGATTRELLEMADWLKEGGCEMIAMESTASYWKPLYNILETSELNAMVVNASHMKAVPGRKTDVKDAEWIADLLQHGLLTASYIPDKDQRELRELVRYRKSLVGERNRELNRLQKMLEGANIKISGTVKDINGKSARNLLELMLTGKQIDSAEYDILYKQNVIAHNLKATKEQIIDDLNGVMSDIQKKMMRHVLDHIDQLNAHIKDLDDEIDNFMKPEEKQAAQVIQDIPGIGNTSAQAIISVIGADMTRFPTDAHISSWAGLCPGNNESASKRKSGRTTKGNNLLRDTLVVCAHSAVKNKGSYYSAQFARISAHRGKKRAYVAVAHSMLVAIYHILKDGVVFKDLGADYYNQFNKERKINAYLKKLKALGWEAPVVAA

SEQ ID NO: 355500 - protein, 451 aa, unidentified
MTNSSTPSFKGQDVYCGIDVHKSTWAISARCNGVEMFHGTVAASPRVAVQTLQHRFPEARFHCAYEAGFCGFGIHRELVAAGFDSIVVNPADIPTNGKERVFKNDSIDSGKIARHLEHGELVAIDVPSVELERMRCLVRRETQIRDAATRENNQLKAALYFHGEPVPKYLSNAVLQRLWRHSCEANDFEMASHIRLLLFLRGERQRIIKDEKKLQAMLGYADDVERLQGIPGIAFRTASVLQCELGDVSRFPTHSRLAAYVGLAPRLVGSGDEQKVKGGVSRKKGQLHYLLIQSAWAAVRTSTEFGSIFARLAKSKGNRKRAIVAVAKKLLFIAYAVLRDKVPYAPVMPGKARKGLEKEEVRRPSPVSPPQKPAPEGRTPENDAARRMTEKGMEILKQLASEGLLNEEDMLCGEYGVMPPDDAPDDFPAVPWQPPHARRRSRRTKQAGSQE

SEQ ID NO: 355501 - protein, 360 aa, unidentified
MIVQGTSVGLDVHALSVVAHAVDEETGKVARARLCPDHGEVLGWLHQLRAPVRVTYEAGPTGFGLARAITEAGMECLVAAPSKLQRPAGDRVKTDARDAAHLARLLRLGEITAVRVPEREIEAVRDLVRAREDARADLMRVRHRLSKLLLRQGIVYSGGTPWTCVHEEWLRRHRFDDIHLKAAFDHSFDAVLAATAARDRLDEQIMVVAASPRFADPVNRLGCLRGISALTGLALTVEIGDWSRFSVSSIGAYVGLVPCEYSSGNSRVQGSITKAGNTHVRRLLIESAWHHRKSYSTSGPTLRARWAKVDPALRARGHAGNRRLNKRWRSFTERGKNPLVANVAIARELAGWCWSLATMQ

SEQ ID NO: 355502 - protein, 358 aa, unidentified
MDTIADDDLEVTLGIDSHLDQHAAAVLDPLGRLLGTTTVDATTTGYERLLSWASSFGLVTRAGVEGTGCYGAGVAAFLGSAGVEVIEVSRAARADRRHLGKNDPLDAQAAAMVVLAGRATAAPKERSGIVESIRLLRTARQTAVKARSQAVIQIKAILVGAPHQLRDELRPLKTRDLIDRCALARPGRGRDPLTITRRVLRSIARRHRALDTEITALERELDELVALTAPRLLAEHSVGRETAAKLLTLAGDNPDRLRSHSAFAALCGASPVEASSGKTRRHRLNRGGDRQANNALYTIAMVRMQHHPETKAYVARRTQDGKTRREIRRCLMRNLARRLYPLLIADLQHAKTIPLLMP

SEQ ID NO: 355503 - protein, 424 aa, unidentified
MKVTFQTCCGVDVHKSFLVATIIKTSSGIEPSYQKRRFSTFNNSILEFKKWLLENECLYVCMESTGKYWIPVFNLLEDEINVTIANPKWVKAVKGNKDDTKDSKWIGDLFRLGLVRGSYIPCKKIRILREFTRYRYKLVSCRSSEKNRYQNALTVCNVALDSVVSDIFGKSSTSIIDYLLGQSGTSIDHEVIASKLLKRLKAKEDAVIESIEGYQMTDAQKYRMRLVRAHMDYITAEINDVDKMIENMISSNPDFENAVQFLCTIPGVKRDSAITIISETGTDMSQFSSSKRLCCWAGLTPGSNESAGKKKSVRITRAGVYLKPALVQCAHAAVKSDKSPYYKKKYESLVKRRGKKRAIIAIARMILTAIYQMLSTGEQWNPSDLYKIDMPVALVEKQKAKAIKQAKKLLQREGLLPPDEPLAS

SEQ ID NO: 355504 - protein, 402 aa, unidentified
MSVVGWDWASQAHDVTVLDDAGAVLDRWAFGHTEAGWVMALARLRRHGEPGDLPVIIEKTSGLIVDRLLVAGHPVVPVHPNAFHAARPRWGASGAKSDPGDSYKLADYLRTDGHRLRRVEPTDPGLRELQALVRLREDQVRARTAATNQLWAMLGNYWPGPRDLFHSLACGIALAFLTAYPTPQSAARLGEARMAAFLRRNSYRGGKSPALLLARLRAAPQAPLALPAATLTAMVGAHIQQLRSLQAAITGIEHLIAACVAAYPRTRLLARLPGVGTINLAQLLAEVGPILDRATSAEQAASECGTAPVTRASGKTTGVYFRWAASTRARKAITAFAHNARMQSPWAAKLYADARARGKRNPHATRIVARAWIRVIWACWHTGTPYDPAAHRTARQPHQLRT

SEQ ID NO: 355505 - protein, 390 aa, unidentified
MRALFPRPDEHAAIRTDLKAIFVSLELSRSTWVITSLAPGGGEKMSKHSVPSGDIAALLARLSQLKEKARARTGHVFPIIVIQEAGLDGFWIHRVLQTEGIESHVVDPASIATSRRRRRAKTDKIDGEALVRALLAYKRGEPRVCAMVKAPAPHEEDRRRISREREVLTAERVQHVNRIKGLLFAQGISNYEPLHRNRRERLEELMTGDGRPLPEGLKAQIRRELDRLELVIEQVKAVEAERDALLAQAQARSGVPAPAAQLLTLRGIGPEAAATLWTEGLFRTFNNRKQVAAYAGLAPTPWQSGSVHREQGVSKAGNPRLRTTMIQIAWLWLRHQPQSALAVWHRERIKRKGGRLGKTTIVALARKLLVALWKYATAGVLIEGAVLKQA

SEQ ID NO: 355506 - protein, 345 aa, unidentified
MELHTIGIDLGKTAFHLVGVNLHGEIVVRKKFSRKQLLHFTANLQVELIGMEACGGAHFLGRALREQGHEVRLMPAQYVKPYVKTNKNDFIDAEAIAEAVTRPRMRFVPIKTDEQLDMQSLHRVRERWVMRRTAIVNQVRGLLLERGITLPKGRSHLDTALPRILEDAELKLSGALRHLLAQLKLELGQMAMRISEADAVLNRTARDNADCQRLMAIPGLGPVTATALIAAIGNGAAFRNGRGFSAWMGIVPGEYSTGGKQRLLGISKRGNPYLRRLFIQGARAVLQQSAKQTSGLRAWLEQLVARTHPNVAAVALANKLARMAWAVLAKAELYRPPVPVSPAAA

SEQ ID NO: 355507 - protein, 323 aa, unidentified
MNKDIKYFGIDISYLVFDVTDSDGNYYQFKNNVTGFKKFIKLLDINSHCVMEATGYYHYQLSYYLLEAGIKVSVENPLSVKRCIQMKLSKIKTDKSDSKLICEYARQVELKLWQGNSKHQIECLQMTRLLSVYTKQSTMLKNKLHGEAVLGNPSKLVVGSLKRSLKHVQKEIKNLEEKLLILVKQVHQDVLTRIKSIPGIGNKTALMLVVLTDGLDRFTSASELCSYAGLTPLIRQSGSSVKGRPRISKIGNQKLRNLLFMCSFTACKYNKACRDIYERIVAKGKSKKLALIAVCNKLLKQVFAIAKSGLTYDPTYRSTLVKN

SEQ ID NO: 355508 - protein, 360 aa, unidentified
MSTVADTYKYVIGVDTHAKTHTYAVVAAATGAVIDTASFPTTDAGTARAIAWIERRSDGQQLAAVEGTGSYGATVTRALTTAGIRVCEVKPPKRQARDGHGKTDQIDTVAAARTALGTDATALILPRADGLRSALRVLLVARHSIDSQRTSDRNALNALLRIINLGLDVRAPLTNTQVDMIAAWRDRSSDDTAAAVARTEARRLASAIHQRTHELKTNHAALSKHVDELAPGIQDIPGVGPFTAAIILTAYSHQGRVRSEAAFAALAGVSPIPASSGNTTRHRLNRHGDRQLNRALHIIARCRMITDPTTKSYVDRRTAEGKTRREIHRCLKRSSPAASIAHWRPLLLDFNHRRVVWCPL

SEQ ID NO: 355509 - protein, 438 aa, unidentified
MGNYAGVDWASEKHDVLVAGAAGERLLSATFAHDEQGLRSLCRALVRLEVELVAIERPDGLLVERLLDAGLRILPLHPNQVAATRDRFRVSGGKSDRFDAFVLCELARTDHHRFRVLEPDSDQTKALRALTRAREDLVGTRTALSNQLRAELARFWPGPLGLFTDLHSRISLAFLERYPSPADARGLGAARLQGFLVREHYTGRQKPAQLLAKLRRAPEARIGELELATRRQLVLSLAATLKALNGQIKQLERQIATAIREHPDGQIFLSLFRKPNSVICAAELLAEIGDCRARYPTRDTLAADAGQAAVAIESGKRKAACFRWACNKRLRGAICTLADTTRHHNPWAQDLYASARRKHDHPRAIRTLGRAWCRIVWRCWQDRVPYDPARHRALQQHITVTIPTPSGPVVDHPATQYMHAGAVATAANPREQEVTAGP

SEQ ID NO: 355510 - protein, 327 aa, unidentified
MSNKSQLTDSTAKVNAAIDVSKSFLDVHVGDISLRRFPNNTRGLSTLKRILSRYNVSLVLLESTGGYESLAVSYLQACGYDVCVINPRHARDFARAMGRLAKTDKIDAEMLCRFADIIDARPDRERFVKPLTDSRREHLNALVRRRRQLVELRITEMQHKSAPAITSFGVSDINEVISYLNSRIADIDREISNHVKSCFSDVSDVMLSFKGIGPSAVSTIIGELPELGKVNRRQISALVGVAPYNRDSGNMRGRRSVSGGRSGVRNILFMAALSAIRFNPVIKSFYSRLVNAGKPKKVAIVACMRRIICILNAMLRDGSEFNASRFC

SEQ ID NO: 355511 - protein, 496 aa, unidentified
MSAFLRRSGQNPHRWATKGMKSKKELLAKKKHIKRKSAKAKHNRVLGIHNPHAAGADIGATEIYIAVPPDRLEMNVRCFGTFTQDLRAIVQWLREYKVTSVAMESTGVYWIPLYELLEQEGFEIYLVNARHVKNVPGRKSDVQDCQWLQYLHSVGLLRGSYRPAQDICAMRAISRYRDNLLHFGAQHLQHMQAALDQMNLRLHHVIADLSGLTGMAIIEAILAGERDPRQLAKLRDPRIKASQETIAKALEGNWRVEHLFVLGQALQSWKQVQQQLGQCDQKLGELSSQLEGKIDLANSPLPPSAKYCGREPRSKNQPNGPWREELYRHFGVDLTEVPGLSLGVVLTLFVELGADLSAFPTPRHFAAWMGLCPDNAITGGKVIRRGTRRNRQRIRLALRLAATSLHHNKTQLGECFRRLRARLGAPKAITAMAHKLARIIWHLVTHRVGYDESIFAEREEQLLRRKQRQLRNLAHSLGFTLVPNPRPAATSNAEVS

SEQ ID NO: 355512 - protein, 355 aa, unidentified
MTGTKYIGMDVHKESISIAVRNSAGKVVMECVIETKASMILQFIDGLRGDLHVTFEEGTSAAWLYDLLKPHVTKLVVCDPRKNKSMREGNQNDQIDARRLADLLRLDHLTPVYHGEHGLRTLKELVRSYLTVTKDLARVMTRVKAIYRSWAIPCTGKQVYARCHRAEWLGKINEPGVRRRAEFYYLQLDALRVLRQGVRRDLLVESKKHKAWKRLCQIPAIGPIRAAVLLGILQTPHRFRTKRPLWKYGGLAIETHSSADHRSVNGQLQRAKRQVSVRGLNRDCNHDLKNLFKGAAVIALSKPGPFQEFYAALLAKGMRPEMARLTLARKIATIVLIVWKKGVCFDAQHLKPQTA

SEQ ID NO: 355513 - protein, 418 aa, unidentified
MKVVYPICCGVDVHKTFFVATLITSQGIIPHYKKERFSTFNNSIRKFKQWLIDNNCFDVCMESTGKYWIPVYNLLEDTIRVTVANPKWVKAVKGNKDDTKDSKWIGDLFRLGLVPGSFIPDKPIRILREYTRYRYKLVSCKSSEKNRFQNAFTVCNVALDSVVSDMFGKSASSITDYLISSDSFDPEHCSSLLKGSLKKKADDVVESIEGYQMTQEQKERMIMVRSHLEFVEQSIAILDGKLDKMVAPYESAISLLCTIPGVERASAITIISEIGTDISQFANSKRLCCWAGLTPGNNESAGKKKSVRISRAGIYLKPALVQVAHAAVKSNKSPYYKNKYERLCKRRGKKRAIIAIARMILTAVYHMFVTGEEWNPSDLYKIDMPQAMQEKQKDKAIKQAKKLLISEGIIKDTDIIVA

SEQ ID NO: 355514 - protein, 389 aa, unidentified
MKIYVGIDIAKLNHFAAAISSDGEIILEPFKFTNDADGFQLLVSKLESFDKNSIIIGLESTAHYGDNLVRYLVAEFYQVCVLNPIKPCQMRKNNVRKTKTDKVDTFVIAKTLMMQDDLRFITFFDLDMMDLKALGRFRQKTIKQRTRLKIQLTTYVDQVFPEIQYFFKSGLHQNAVYALLKEAPSPKEIASMHMTHLANLLKVNSHGHFTKEQAKELRVLAQKSVGANDSAISIQITQTIQQIELLDSQLEKIEAEMTDTMKFNDSVIMTNPGIGYINGGMILGEIGDIHRFSNPNKLLAFAGLDPSVYQSGNFQAKTTRMSKRGSRVLRYALVNAAWNVVRNNATFKAYYDAKRAEGRSHYNALGHCAGKLVRVIWKMLTDEVEFNLK

SEQ ID NO: 355515 - protein, 354 aa, unidentified
MKRTTKYVAFDVHQATTVASVREESGRVIARSVLPTDSGALTEFVRGMRGARHVTFEEGTQAQWLYELLAPLVDRVIVCDRRGAPRQGNKGDQVDADQLSELLRRGALRAVYHGSADRVTLKELTRTYRNLVEDATRVMLRLKALFRARGIATAGTAVYHPRHRARWLAQLLEGGARFRADALYAELDVLRQLRPKAKAVMVTEARRDPAWRVLRSIPFLGPVRVALLLATMQTPWRFRTKRHLWAYAGLAVVSRSSADYTLVAGAPVRRRRAPMTRGLNRNHNRVLKDVFKGAATAATARPGPLQDFYHRVMARGTREELARLTLTRKLAALTLRLWKKGERYDPTKLTTPAR

SEQ ID NO: 355516 - protein, 345 aa, unidentified
MTIVGGLDIHRKQITFDYVDTVTGRVQRGRIAPADRAHLAGWLAQRFPGRTDVEFALEGCTGWRYVAEELAAAGVGAHVAEPADTAALRGGRRHAKTDRTDSRHLRELLADDRLPQCWIPPAQVLECRALLELYRDLRVEHTAWVQRIHAVLFHQGAGALTVPALRSQAGLVELSEQAADLSSAGKMQVVTALEMLAVLDAQLTQVRRQLLDAARHLRGARVLTARLYGVGPITALALCCWLAGAGRFSSARKAVRFAGLDVTVHSSDGKRSPGHLSRQGPSVLRWCLYEAGKTHARGSAPDHAYYAQVKDRIDGKRAALSEGRKIVRQACHLLSELGDDALTQV

SEQ ID NO: 355517 - protein, 345 aa, unidentified
MKIVGCDLHTRYQQVALLDQETGELMERRLEHESGEARSFYGALAGPVRVGIEATGHTRWFERMLGELGHELWIGDAAAIRATVVRKQKTDARDAAHLLDLLLTNRFPRIWRPSLEERDLRQLVWHRQKLVWMRNAVGNQLHALAMGEGVCRKQKLFTKKGRAELESLALGPWASYRRQELLRMLDELDRSLQRLDDAVQQQAEQNLEAVRLMTHPGVGPVTSLAFVLTIGPVGRFQRSKQVASYLGLNPREHSSGGKQRLGSISKQGNPMMRSLLVEAGHTAARLDAELRQDYQRLKLRRGSGVAKVAIARKLAVRMYWMLRSPANYAQLVRMQGSPRGTLVGQ

SEQ ID NO: 355518 - protein, 363 aa, unidentified
MSDGKRSAARHAGQATAFPAAIIAGFDVHLRQITFDCLDSVSGEVLRGQIASEPAAVREWMAQFSGREVHVAVEACTGWLFVARAVEECGGTAHLAETVETRALRGRKRRAKTDRQDALWLRELLAEGRLPESWIAPEHVRQWRSRLHLRKALVDERTQWLLRIRSVLYHHGISGGAPARIAATGGRRFLDGLDLPADAHERVTVALFMVSTLEQQVHQIERELRKIARHQSGCQALMTQFGVGELIALTFLAELGDASRMSSSRKAVRFAGLDIGVHRSDQTSRVGHLTRQGSSPLRWALYEAAQSATRRQSPDYAHYHALRADGMTHTRASLTIARKIARRSYHLLNNLGPDALAPVPQTA

SEQ ID NO: 355519 - protein, 370 aa, unidentified
MDQNIKFFVGLDVHKDTISISVCEAGREASQFRGTIRHDVAALLKVLRKVGTPARQLVAYEAGPTGYGLHRRLIAEGFACQVVAPSLIPQRAGDRIKTDRRDSARLAELLRAGELKPIWVPDLEHEALRNLWRAREDALQMRMRARQHLKAFLLRQGRIYASKRSWSKMHERWLANQRFELATDQLAFTEYVLAVQASQAQLQRLDLALVQATEHWRFAAVVSALRTLRGIDTVSAIGLVAEIGDIQRFAHPRHLMSYLGLVPSERSSGQSVRRGGITKTGNAHARRLLTEASWNYRYPARLSRVLQSRQEGQPESICRHAWKAQVRLCGRFAHLRRRGVHINKVCIATARELTGFIWAIARQASTTCAA

SEQ ID NO: 355520 - protein, 356 aa, unidentified
MKASIKKTSFKGEVLYIGMDVHKKSWMISIISRDIFLKRFSQEPDAERLSKSLKKMYPEATLKCVYEAGYCGFWIAEGLQKEGIDCIVVNPADIPITNKDKDRKTDKVDSKKLAELLRAGLLTGIYIPKVEELEDRYLLRMRSILIRYQSATKNRIKAALTFNNIIIPEEQLSKYWAKNYINYLKTIKFTQVSGQEAFTALLRQLDYYREDILRITKSIRELAKTEKYKNVIERLISIPGIGIINALTLLTEIADIDRFSCANRFRGFIGLVPKEHSSGERINRRSMSKRGNNRLKTMLVESAWVAVRTDPAMTLAFEQLTKRLNKSGAIIRIASKLANRILHVMVTKEQYVYSVA

SEQ ID NO: 355521 - protein, 371 aa, unidentified
MKEFNKHIGLDVHKETIAVSVAEANGGEVRYLGEIANTPEALDKLVKQQRKDGANLFFCYEAGPCGYGIHRQLTDLGWDCQVVAPSLIPKKAGDRVKTDRRDSMMLARLHRAGELTAVWVPDGAQEALRDLTRAREDMKHLQRQAKQRLLAFLLRHGKRYDGKSNWTLAHYRWMEGVKFDHPVQQIVFQEYIDTVKAMSKRVDALDKQIESAATRSVFWPVIEGLMALRGVNLLTATTIVVEIGDLRRFASAPQLMAYLGLVPSEHSSGSTKSRGGITKTGNGHVRRVLVEAAWTYRHPARKTTVLQKRAERTSEAVQEIAWKAQTRLCGRYRLFEARGKLKVQACTAIARELAGFIWAIGQALPQPAANA

SEQ ID NO: 355522 - protein, 391 aa, unidentified
MEVMVETCCGIDVHQKSIVCCILDGPLDTNKPKKQHRTFGTTTKKLREALIWIQSQNVTHVFFESTGQYWIPIFNIFYDSNLTLILANPQHIKNLPGRKTDMNDSEWIAQLGRCGLIQPSYIPCEEVQQLRLLTRRRKSYTERITQCKNEIHNILQRANIKLTSYLSDIYGLTGMALLEMFINGEVITEETVLPKIQGRVKATVDQLVEAMDGKLSIEDRFLLGQSLEHYRHLVNQVEEITAVIKQYVLERFEREYSLLIELPGVSAIVACVILSEIGPNVEAFQSQGNLASWAGVCPGSYESAGIKKSSHTTQGNKYLKSSLFQAGGTAGRSKDEAFHNLYARISGRSSKMKAIIACAHKLIRIIYKILSTGEHYDAKKALGLRQQARAN

SEQ ID NO: 355523 - protein, 392 aa, unidentified
MIYVGIDIAKDKHDCFITNSDGEVLFKSFTISNNREGFETLFHRIESVSDSLDKVKVGLEATGHYSYNLLGFLLDKGLPTYVINPLHTNLYRKSLSLRKTKTDKVDSRTIATMMMSDVNLKSYSDTSYHNEELKSLTRYRFDKVKERAKLKSSVSRLVCILFLELETLVPTLHMASVYALLSEFPNADAVANAHLTRLSNLLSESSKGRYGKDTAIMFRDAARSSIGSHMPAKSLELKHTIKLIQELTAEIDEIEAAIKQIMDEEIQSPILTIPGISYRMGAMIIAEIGDFNRFDSPDKILAYAGMSPSTYQSGQLDNCYSHMEKRGSRYLRYALYNATKYICHWDKSFGAYLEKKRSEGKHYNVALSHATKKLVRLIFAMEKSGRAYLPTT

SEQ ID NO: 355524 - protein, 339 aa, unidentified
MQVTTIGLDLAKNVFQVHGITQDDEAAFNRPLRRAQLLSFFSKIEPCLIGMEACSSAHHWARELTKFGHDVRLIPPIYVKPYVMRGKSDAIDAEAICEAVTRPTMRFVAIKTVEQQSLLSVHRARSLLVRQRTQLINGLRGMVAEFGVYIARGLARVIGFAEDILAGEVLDLPDIVNEVIHNLCEHLMALHTRVRWYEDRLKQVAKEDARVRLLRTIPGVGAVTASAIIASIGDGHQFRNGREFAAWLGLTPANKSSGGKEKLGRITKMGDQYLRPLLVVGMTSLVRQTKSHPKRASKWLTSLLERKPARVATVAMANKTARIVWAVLTRNEPYTPHTA

SEQ ID NO: 355525 - protein, 371 aa, unidentified
MKQFIKYVGLDVHKETIAVGVAEPNAEEVRYFGQISNTPQSVEKLVNQLRKGGAHLSFCYEAGPCGYGIHRQLSDLGWDCQVVAPSLIPKKAGDRVKTDRRDALCLARLHRAKELTAVWVPDGAQEALRDLTRAREDMKHLQRQAKQRLLAFLLRHGKRYDGKSKWTQAHTRWLEGVKFEQATQQIVFQEYVDTVVALSKRLDGLDGHFQRAAGESVFWPVIEALMALRGVNLLTAATIVAEIGDLKRFASAPQLMAYLGGVPSEHSSGPKQTRGGITKTGNGHVRRVLVEAAWTYRHPARKTAVLQRRAERTSEVVQEIAWKAQKRLCARYRTLEARGKLKVQACTAIARELAGFIWAIGQVMPQPAAKA

SEQ ID NO: 355526 - protein, 363 aa, unidentified
MGNARTVAVGLDVHKSSVRLAVVRGGEVVGEVALPYDHERVERELGSWPGARVCYEAGPTGFGLYRHLVAAGVDCVVVAPGLVPSRPGDRVKTDRRDARRLAALHAGGLLTAIFVPSPELEALRDLVRAREDARLDRMRARHRLGKFLLRHDRRMPTTCWGATRRAWLGRQAFGLPGQQQAFDDYLFCADQIDRRVQALETELARLAAEGPHRELIARLRCLRGVDTLTALGLVCEVGDFARFNTAEQFMSFVGLVPSERSSGEGRRQGSITKAGSSHARRLLVEAAWHARRRPTVGYELARRHRGQDPAVLERAWRCQQRLHRRWRRMAGRGKPHQKIVVACARELAGFVWAIATDQPLRTT

SEQ ID NO: 355527 - protein, 364 aa, unidentified
MKKSSKKQQGATVAESKPTQVVGLDLGDRHSHYCVLSSTGEAMEEGRIQTTRASMEKHFASEPRMRIALEAGTHSPWVSRLLKSYGHEVIVANPRKIPTLTKSESKNDRNDAEQLARMAAFDPKLLHAIEHRSPERQQDLNLIHTRSVLVRARTMLINSARGLVKSAGQRLPACSSEVFPEKAPAAVPPALKAACTPLLEQIILMNQSIAGMDKQIDQLDKKYPEITLLRTVPGVGPVVAACYVLTLDSPQAMETNRQAGAYLGLRPRQQKSGDSDPQCKITRMGNTYLRSLLVQSAQHILGRSRPDSELRRWGLKLAASGGKRGKKRAVVAVARKLAVLLLSMWRNHKKFEPFPQSVAQLTTA

SEQ ID NO: 355528 - protein, 360 aa, unidentified
MFTERTSVGLDVHARSVAAAAIDGVTGELFQTKLTPSHEHIRAWLGDLPGPVAVAYEAGPTGFGLSRALRTAGIRCEVVAPSKLQRPSGDRVKTDAKDAVHLARLLRLDEFTAVSVPTVDQENARDLVRAREDARGDLMRARHRLSKLLLRQGIVYSGGKAWTGAHDAWLRRQRFDASALQITFESDYDAVLTVKARRDRLDAAIAAMAADSEFTPLVQRLGCLRGIGTLTGFALTVELGDWHRFTGNTIGSFVGLVPSEHSSGQSRVQGSITKTGNSHVRRLLVEAAWHHRARYVVGKTMHDRWQRATPAARARGDAGNRRLHARWDTFRARRKRPVIANVAIARELAGWCWSLAVLEE

SEQ ID NO: 355529 - protein, 331 aa, unidentified
MKIKEFIGIDISKLKFDVRIHSNQKASVFDNNTAGFKKFIAWLMKNVSCSKEEILTAMEHTGIYSFPISVFLTEKHFNFVLLPGLEIKRSLGIQRGKDDKIDAKRIAEYAYQKKDKIVPSQLPFKNIFKIRRLLALRERLVKQKGGFLKDKKENKMFIKQSENKVLFEAIEKSIKEHDKLIVKIEKELDEIIANDELMKKQYHLIISIKGVGKQTALVMIAYTNCFTNFENWRKFASYAGTAPFPYSSGTSIKGRNKVSHLANKKIKSLLNLCARSAIVCNHEMKIYYQNRKAKGANGMSTINIIRNKLIARIFAVVKRGTPYVDTFKFAA

SEQ ID NO: 355530 - protein, 342 aa, unidentified
MEQSIRCGIDIAKLVFQIHGVNAKSGETVMVKKLARHDMLHFFANKPPMLIGIEACGGAHYWARELTKLGHAVKLMSPQYVAPYRRGGKNDANDAEAICEAVARPNMRFVAVKSESQQAVLVMHRMRDQLVHERTALMNQIRSYLHEFGIVIAQGRAPLAKIFPIIEENMQLPLLLRQSIAELADRLADLERRIQTLDQRISAWSKQDNTAKALLTLCGVGPVTASAAVATAGNVAAFKNAREFAAWLGLVPKQNSSGGKSKLGAITKRGDRYLRTLLVQGARVVMIAAQKAKLTQKDNPMFDWIYKLLERRPSNVVAVAIAAKQARMLWAIMKKQQNMVMA

SEQ ID NO: 355531 - protein, 335 aa, unidentified
MQIYGIDLAKEKFDVSFFDLTSKKVSNQPSHKVVTNNLKGIGKFFKGLPSDAVLVAEHTGVYGDTLLKCCMDSNVKIAFVGGYVIHRYRATPDRAKTDVLDCALLRDFGERYPDKLKYKTFPEEALYELRQLARHREMLVEQRKQLITADRSEDCRPIRSLAVKRSMDRIKEMLDTEIAETEKEMLKVINGHESIHHNYELIKSVDGVGLITAVELLVKTENFTKITTARQYAAYAGTAPYEKSSGKMDKGAHISKIGNRRSKTLLYICAESARLHNKEIKLYYERRTLIDKKPRHYVLNAIANKLLRIIFTLVEKGEYYDANFIRQDPRVVKYN

SEQ ID NO: 355532 - protein, 349 aa, unidentified
MRFYTQQHRFYCGVDLHARTMYLCILDGAGQVVFDQNLVADPDAFVKAVAPFRDDLVVAVECLFCWYWLADLCAKEQIAFVLGHALYMKAIHGGKSKNDQIDAGKIARLLRGGTLPQAYVYPAGMRATRDLLRRRMYLVHKRAETIAHVQNTNSQYNYAPFGKKLAYAANREALQVAERFTDPSVRRMIDIDLALIDQYDTLLGDVELYLTRTAKVDDVNTFHRLRSVPGIGKILALVLLYEIHDIRRFPEVGNFLSYARLVRCAHESGGKKLGSGGKKIGNPHLRWAFAEAACLFLRQSERAKKWLKRQEKKRGKGKALGILAAKLGRAVYHVLHKKVAFDEQRFWAS

SEQ ID NO: 355533 - protein, 403 aa, unidentified
MGEIAGIDWASEEHRLSLVDSEGRRLLERRVSHDEEGLSGLCRLLAGRGVCRVAIERPDGLLVERLLEAGIGVVPVHPNALAAARARYQVARGKSDSFDAYVLAELARADMHRLRVVEPDSDETKALRALTRARQELVRARVSLANRLRAELERFWPGAARIFADVDSPIGLAFCERYPSPEDARGLGEKRLQRFLARHRYSGRRTPVELLERLRAAPHGRSGELELEARRTVVLLLVASLRPLVEGIAQLDSEIAHAIRAHPDGGIFLSLFRDPTTTLTAAELVAEIGDSRARYPRSAALEADAGMCAVAVESGKHRSASFRRACDHRLRDAVATLADSSRHHHPWAADVYRRARARGCDHPHAIRILGRAWLRVIWRMWQDHTPYDPARHGGLQRLLAQGG

SEQ ID NO: 355534 - protein, 402 aa, unidentified
MFYLGIDVAKKSSRYLVLDEQGKRVVSFSLENLKERFQNLLSRLQEAKIDAKDILAGLEATGWFWENLYQFLQEKGFKVILLNPYYVNKFREALAKKAKTDDIDALVIANLLRTGEYMNSVVPEEKIQVLREYTNLRYEFLRTLQDYKRKVISLLGVVFPEYERTALRNPFGAAPLQIFKEFPTAKDLACAKPKQIEKIVRSIQGNNFDIKEIQSLLGWAKNSIYSGRARESRSVSLKMLLEHVSNLNSNIQELDKKIEDILSPGSDGSFPGENLLSIPGVGKKTIAAVLSYLGTDGSSFCSAKKVAGFVGFFPKLYQSGETRRENKISHRGPRVLRWALYMSAVACLIHNKEMRVIYQRKISQGKSAKQALIVVAKKLLQIMLAMLKSGKPYNPIQVFANS

SEQ ID NO: 355535 - protein, 318 aa, unidentified
MAQKRFVVGIDVAKGKVDVAIRCLNERATFERGAVGEQELLAWLARHGAARAVMEASGGYEKRWAQLLRKAGLEVVIVDPKRVRHFAKSAGRLAKNDVIDAGVIAWFGETFDDLHSHSGDADREELDQLVTARSALARLQAEVDGWSEQERPKPVQKAHQAVLKALAAQIARLEAAIARKIDKTADFSERAEIIESVPGLAKGSAAGVVAFLPELGRVDRQAAAALVGIAPFDNESGNWCGPRCIQGGRQKLRNLLYMPVMGAATKHNPVLKAYYGRLIAKGKKAKVALIACMRKLITILNAMLARKEKWDAAKFVPA

SEQ ID NO: 355536 - protein, 421 aa, unidentified
MKRAETGKVRGVKDDALIVAIDVGMEMNRGYCTTPDGRDIKPFKFDNTREGLDKLWGMVMASKNRFKCNEVVIGYESTGPYGEPLVHYLAKKSVKMVQVNPMHTKRLKELNDNSPLKTDDKDPRVIADIIKLGRALSIVIPEGDAAYLRRLNNSRERHVRERTALVNQLQQLVFLLFPEFKKVMKDIKCRTPLYILKKYPTPEAISVLDKRILGEEMRKKSRGKFREPHAEMLINLAQNSIGIKEGVSGLSMDIRHILLQLEMLKTLIAEVEGEMEMALGRVSYSSKLLSIKGLGVVSVAGIIGEIGDFKNFKTRSEIMKLAGLDLYEISSGKMRGQRRISKRGRSLLRKILYYTAIQTIRKNGILHDYYTRLTDRGMKRMTALVAVSRKLLGIIFAIVRDDSEYSVNFEFTKRQVIKKAA

SEQ ID NO: 355537 - protein, 461 aa, unidentified
MKKPKGRAAAKVDPGSRLGVIQSDVAGIDIGSREMFVCAPAGRGEDREMVVFATTTQQIQECIGWLKQKKVRSVAMESTGVYWIPVLEMMESSGLEVLLVDTRPLSRVPGRKSDAEDCQWLQTLHSHGLLRGAYRPNEQISELRTIVRQKAVLVREQADWIRRMHKCLDQMNVRVHHAVSDTKGATGMAMLRAIVEGERDPRNLAKLRDRGCQKSEAEMVELLTGNWRSDHVFNLKQHMTMYDNAVQQIAAYEQEIQRRMQEITPAGRRDLQAPPLANIEKRKTMKKRDQEGKRQALYRAMGEDLTTIDGVGVEIVEVILSEYGTEMSKFPGERQFVKHVALAPHRPVSGGKVLRSKRNKQKGTRTAEALRQAASSLKHSRSALGAYYRRIARRKDSGIAVFAVARKLAGLVYRMLRFGQQYVDIGQAEYEKRYQETRIRALKSTASQLGYNIVKQEPVTA

SEQ ID NO: 355538 - protein, 361 aa, unidentified
MFTERTSVGLDVHARSVVAAAIDGDTGEVFRKRLTPANDEVIGWVRSLPGPVAAVYEAGPTGFGLARAFDTAGIRCEVAAPSKIQRPAGDRVKTDARDAMLLARLLRLDEIVAVTVPSVAREAARDLVRAREDVRGDLMRARHRVSKLLLRQGIVYYGGTAWTGTHLRWLRQQHFDTPGLQLAFDADHEAVLAAQARRDRLDAAIEAMAAESEYTPVVHRLGCLRGVATLTGFALAVEVGDWQRLTGSTIGAYLGLVPTESSSGQSRSQGSITKTGNTHARRLLVEAAWHHLKPYRTPGAAMRARWELAPAAARARGHAGNRRLHQRWLPFTDRQKEPVIANVAIARELAGVCWSLAVMDD

SEQ ID NO: 355539 - protein, 416 aa, unidentified
MQVIYPCCGGLDIHKKFVVACVLTTADDGRVRKATRTFRAMTDDLLALLDWLSGLGCTYVAMESTSSYWRPVYNLLEGQLALLVANAYHVKAVPGRKTAVKDAGWLADLLRHGLIRGSFIPSPEQRHLRDLTRYRSHLVEERARLTNRLQAVLEDANVKLAAVVTDVRGASARAILAALLAGETDPPLLAEPARGRLRAKREQLARAVVGRFSEHHAFMLTEHLSHREYLEEAMGRVSAEIARRLRDDLAAIALLDTVPGISARSAEALLAELGTDLSRFPDARHLASGAGMCPGNAESGGKRLSGKTRKGNQALRQALIQIAHVASKTRDTYLAAQYRRIAARRGKKRALVALGHTILVIAYHILTRRQPYHELGVAYSDQLERQRVEQRLVRRLERLGYTVSLQPPASEPPVAA

SEQ ID NO: 355540 - protein, 478 aa, unidentified
MNAARPPALNRKQRKELARRLRVEDPGLEVMHPHAAGIDVGNSAHYVAVRPDRDPNSVRRFECFTADLHRLADWLQHCGVTTVAMQSTGVYWIALYEILDARGFEVYLVNARHTKNLPGRKSDVQESQWLLKLHTYGLLRNSFHPPAAIRVVRTYWRQRGDHVQAVSTCIQRMQKVLTQMNIQLANVISDLSGWTGQRIVRAMLAGERDPQQLAALSHPGIHATRDTIAKSLEGTWQSDLLFVLQQEVAMYDAYQQRIAECDHELEQHLKGFADKVADTASATEASSTTPCEPRRSGPKRRRKAGSHTPQFDLGRELHRISGVDLTRIDGIDVSVAQTVISEVGLDMTRWKTEAHFASWLGLCPDNRITGGKVIRKGTRHVINRAATALRLAATTLLRSQSYLGAQYRRLRARLGAPKAITAMAHKLARLVYRMLKWGHEYVDKGLQYYEERHREQQVQLLKKRAAKLGLQIVEPEAV

SEQ ID NO: 355541 - protein, 344 aa, unidentified
MTVDYYVGIDVSLEASSICVVDGAGKVIKEAKLSSEPEAFIAWFKALPFSLARIGLEAGPLSQWLYAALKEAGFAVELLETRHVRDAFKAMPVKTDRNDARGIAQLMRLGWFRPVHCKSAPAQETRALLTARKLVQGKLYDTEMSLRGILRGFGLKVGRTKKAGFASRIMELTEHHPALKAIAKALLTVHEVLLKELNRFENQVRKLARGDARARLLMTTPGVGPIVGLTYVAAIDDPARFSSSKMVGAHFGMTPKKYQSGEIDVTGRISKMGDKGVRAALYEAAHVILTTPVNGGALKSWAAKLARRAGMRKAKVALARKLAVILHRMLADGSVFDVTKAAAA

SEQ ID NO: 355542 - protein, 354 aa, unidentified
MKKNSIPASEIPGLTIGLDLSDRSFQFCELNAQGEIVNEGQLKLDRATLRKYLAAQAKARVALETGGQSAWGKQVIEELGHEAVVANARELEAVTGRSHRTDHHDARQLARLARVDRALLNPVQLRGTAEQVDLFVIRARAVLVEARTMLINFARGITKTLGHRLPASASHRFVERVREAVPEALEPALTGLLEVLHEITAQIEDYDAKIEALAVERYPETRWLKQAPGVGTLTALTFLLTVGEPGRFEHSRDVGPFLGLVPRRRQSGEQDPHLRISKCGDGYLRKLLVQCAHVVMGRFGPDCALRRWALDHARQSRTAKKRTVVAVARKLAVLLHRLWSRQEVFQPFPAAVAA

SEQ ID NO: 355543 - protein, 434 aa, unidentified
MNTAHPYDLVIGLDRSDKKADLCLINTHTGQRRSEIIHTTPEALWEWLLALRQQFPQARVGLCLEQPAVHLIPFLEPYAWITLHPINPLTLQKYREAFVTSRAKDDTKDADFLADLLLHHHAKLPVWAPEDSATRAVQQLVFHRRAVVDERTGLSNRLIALLKSYFPQALVFCGDDLWRPLATAFLLKWPSLQTAQKAKPATLKQFYYRQGSRSQKLVAERLALLAKAVPVTDDSAVIDSFVLRVLLVCRQLQQLHQTVAKFDRQLAAAYSVHPDRMIFASLPGAGPVLGSRLLASMGSQRERFADSASQLQCYTGIAPVTKKSGGSCYIHRRYLCPKFHRQSFHEYAKESVLWSRWAAAFYLQQRKKGNPHHTAVRALAFKWQRIIWRCWQDRQPYDELKYEAVLKQRGSELLKLFPSVDLGKSPWKNPAKIN

SEQ ID NO: 355544 - protein, 347 aa, unidentified
MEYFAGLDVSLETVNVCIVNAAGDTLLEKKIAAEPAAIVHLLKSFGSPFKRIGLEAGPTSSWLYGELRAAGYGAVCLECRHVKAGLSAMRNKTDRNDARGIAQLVRLGWFRQVHVKSEEAQRTRMLLVNRQQLLTKALDIENSVRGSLKVFGLRIGVVARRGFEARVLELVADDPIVLAVTKPMLRVRRALLEEFERLDRLCQQLARRDPVCRRLMTVPGVGVVVALTYRTGVDAPERFSKSRDVGAHFGLTPKRYSSGQTDYDGRISRCGDEMVRTALYQAANVLLHHGRWSSLRSWAMRIAKRGSVKGAKVALARRLAVVMHRMWTDGTDFRWSDTSRMTAPTAA

SEQ ID NO: 355545 - protein, 342 aa, unidentified
MTQFKYFVGVDIASSTFTASVGTMPWQVLLKPEEFENTEDGFQTWLAWLIQHQVAPEDTIVCMEATGVYGEGLAYFAVAKGYAVAVQPPLEVKRAFKPNLRKSDAVDSLQIAEYAGRFADKLSFWQPRSEVLEQIKVLLATREQFVAQNTAHKNGLKAIQRKPVKTPFAEQAHLQMIQFFKKQILAIDTEIRRLMENDPTFKQMLFLLLSVPGVGLLLAAHMILLTQVSLDYKQLNSFLGIAPNEYSSGSSVYGHPTSRHFGPAAIRKLLYLAACSVIAHRAQFRIYFSRMTKAGKPSRLILNNIENKLVKIICAVLRTNLPYDPNYLSVQPLVLKNSLTGS

SEQ ID NO: 355546 - protein, 356 aa, unidentified
MTRIAQLEPTRVTVGVDTHRDVHVAVALDQLGRRLGEIELATTRAGYQRLLAWAERFGAVEAFGIEGTGCYGAGLARHLGARKVLVIEVMRPNRQTRRRKGKSDPTDAEAAARAVLSAEAAGSAKAGDDLVEMIRVLRVARQTAIKARTQAINALRSLLVTAPPELRDELRALSTSRLVGKAARLRPGPLDSPLTASKLALRHLARRYQALEAEITSLDTQLAQLTAAASPRLLEAFGVGADTAGALLVAAGDNPERLRSEAAFSMLCGSSPINASSGKTNRHRLNRGGNRQANAALHRIVLVRMRYHQPTRTYVDRRTSEGKSKREIMRCLKRYVAREVYTALTQPGEQKLARAA

SEQ ID NO: 355547 - protein, 344 aa, unidentified
MIQIPAVIERCAGIDVGKRELAVAVIVGPADQDGEVETRTFGTTVPALEELRAWLIQQRCTSVAMEGTGSYWIPVKNVLESSLRIVLVCAKKHKPARGEKTDFRDAKNLAHLHRHGLLKGSFLPHQTVVELRDLTRRRKKLLAHLAAEKNRIQKILEVANIKIGSIVSDVFGVSGQAMLSVLVAGKQISAEEVADLSKRRLRQRIPELTEALQGHRMNDHHRWLIAQSVEHAALLDRQMEELETRIEEKLQPYREQYELLQTIPGVKEMTAASILAEIGPDMSQFETAKHLCSWAGISPGNNQSAGKSKQSRIKKGSKFLLTTLVEAAWAAARNGTRAVWAARI

SEQ ID NO: 355548 - protein, 359 aa, unidentified
MEVQEVVPRPVVGGVDTHKDLHVAAVVDEHDHVLASQSFATTRQGYRQMLTWMRSFGQLRCIGVEATGTYGAGLLRYMQNAGVEVLEVTTPDKHDRRRRGKNDDLDAQNAAHAAFAGKRTVTPKTRDGMIESLRVLKACRKTAVAARRVALQMIHNTIICAPDDLRDTLRKMTRMQLVRTLAAWRPDLTDYRNVISAYRISLKSLGRRYLELHDEIADLDAMISAIVDELAPNLVARNSIGHAGAAQLLLTAGDNPKRLHSEAGFAALCGVSPVPASSGKTTRHRLNRGGDRAANSALHIIAIGRLRTDPRTKAYMAKRMAEGHSKLEAIRCLKRYIAREVFTLIGQRQKEINQARITA

SEQ ID NO: 355549 - protein, 344 aa, unidentified
MGEVSTIGLDIGKSVFQVHGVDDAGAVVIRKRVSRARVLEYFGELPPCLIGIEACPSAHHWGRELQLLGHMVRLVPPSYVKAYLKRNKNDANDAAAICEAVTRPSMRFVPIKTKEQQTALMLHRTRQLLVRQRTMLSNALRGHLAELGIVSAKGRNGTAELLRIITNGADSRVSPAVRDILDVLARQYSAIGIEIASIDRSIMALHRGCEASRRLAEIPGIGPIAATALVAEIGDWKTFSSGRSLAAWIGLVPKQYTTGGKDRLGSITKQGNRYLRWLLIVGAMAVIRYARKHGTEKRPWLGRLMERRPTKVAAVALANKIARMAWAIMVRGERYKEPKLLLAA

SEQ ID NO: 355550 - protein, 372 aa, unidentified
MKKRSSSRQNPKPAGKPKREHQSVTIGMDLGDRNSRYCLLSDDGVILREDQVATTKSGMVETFGRMGRTRIALEVGTHSPWVARLLQSFGHEVIVANPRQVKLITESSRKDDRLDAQTLARLARIDPQLLRPIQHRSEKAQTALMTIRVRAALISVRTSLVNTARGLAKALGERLPKCDADQMGVSQSESLAPNVRGVLEPLLKEVESLTEKIKDSDRKIEQIAQQDYPETVLLKQVGGVGPLIALTFVLTVEDKGRFQKSRDIGCYLGLRPRRSDSGQSQPQLRITKEGDPYLRTMLVQGAHYIISRRGPDSDLKRWGLHLAERGGKRGKKKAVVAVARKLGILLHRLWVTGEVYEPLRNHNLQKERKKAA

SEQ ID NO: 355551 - protein, 347 aa, unidentified
MTLTIVETRAITGGVDTHADVHVAAALDPIGGLLGVGEFPATPAGYARLLAWLGGFGTVCLVGIEGTGSYGAGLARHVTAAGVRVAGVDRSDRQDRRRQGKSDPLDAVSAARAAQSGRARGAPRGRDGTVEAIRALMVAKRSAAGERTQTINQARALVLTGPDDLRARFAEHTAAALVAGTASLRPRPGSTLGYATRIALRELGRRAEFLDGQLERLDELIAPLVTAHAPGLLALRGIGPNTAALLLIAAGDHPERLRSEAAWAHLCAAAPIPASSGKTIRYRLNPGGDRQANHALWRIVFTRMGSDPATRAYVERRTKEGKTKAEIIRCLKRYVAREVYSHIRPAG

SEQ ID NO: 355552 - protein, 345 aa, unidentified
MEIIRVGVDLAKNVFQVHGVDARERPVWERQLRRGEWLRVMCERVAPGAEIGMEACAGAHHWARELEARGYRVKLMAPQFVKPYVKSNKTDRNDAAAICEAMSRPSMRFVEIKSAEQQDIQAIHRVRSELIKRRTSQVNQIRGLAGEFGLVAPLRIGSLRRALPEWLEDAENGLSDRFRRLLAGLAEELRHLDGRITELDKEITAIAKASSAAQRLMQLRGVGPVIATALVAALGSGEGFRRGRDFSVSVGLTPRQHSSGGKDRLLGISKRGDAYLRKLLVHGARAAVRTVGYKDDPQSRWIRTLLTRKHTNVVVVALASKTARMAWALMRYEADYDPSLAARAV

SEQ ID NO: 355553 - protein, 345 aa, unidentified
MEIIRVGVDLAKQVFQVHGVDGQEQPVWRGSYRRGKWLEEIIKRVEPGAAIGMEACAGAHYWARVLRARGYCVKLMAPQFVKPYVKSNKTDRNDAAAICEAMSRPSMRFVEVKSVEQQDIQAVHRVRTELVAQRTSKANQIRGLVGEYGLVAPIGLGALRRTLPDWLEDAENGLSDRFRRLLAGLADDLRLLDARITELDDEIASIVDSDPAVQRLLELRGVGPITATALVAALGTGEAFRRGRDFAVSLGLTPKQHSSGGKERLLGISKRGDAYLRQLLVHGARSVIRTASDKDDSLSRWLQKLLARRHTNVVAVALASKTARMAWALLRYDTVYQPSRAAATA

SEQ ID NO: 355554 - protein, 324 aa, unidentified
MTDAVLGIDVSKNTFDTNLGAGTKARSKSFANSPDGWHHLIAWLGEHKIGQVHACLEATGRYGLGIALALHEAGHVVSIVNPAQIRDFARTKLGRNKTDQVDAVHIREYAELFKPRPWTPPSPAMRRLCELQTIRAGTVAGLTEWKNRRGSGITDDLTRSLAETTIRHFTSQLEAVDQAIAETIDNDVELSAKRDLLVSINGVGEALAGIVFAELPGPDVLGSSAAAAAYAGLNPQQHQSGISVNRPVRISKIGNAVLRTALYMPALSAMRYNPAVAALVDRLKAQGRLKGKQIVIAAMRKLLVLCFGVLKTGKEFDPAMAMGK

SEQ ID NO: 355555 - protein, 485 aa, unidentified
MENRPGRVTNRHPYRLNDWRRLSSAISTGSGTYAQMMSFEDSAIRIMGYSPPERFHPQETMEKQKLMSKDSVEIAAFVGLDWADQKHAVTLQESGSDQRDRFTLDHTPEALQSWIQSLRERFGGRPVAIAVEQKRGALIYALMHVEFLHLYPVNPITVAKVREAFYPSGAKGDPSDADLLLDVLISHRRHLRVWTPDDALTRSIQLLTEDRRRVVDERTALTNQLTAALKTYFPQALNWFGDLHTPRACAFLHRWPTLQQFKQASPSSIRKFYKAQGYRGDDKREQLIANIKKAQPLTQDSAVLLSCSMKVETLTQQIPLLTEAIERYDQKIAALFDQHDDSTLFGSFPGAGSALAPRLLAAFGSNRDRFECASQLQELSGIAPVTEKSGEAIWIHWRLACSTFLRQTFHEFAGCSILQSDWARACYDQLRKRGKSHHAALRALAFKWIRIMFRCWKDGKPYNEAVYLKSLHSRRSPLAPDLTAQ

SEQ ID NO: 355556 - protein, 329 aa, unidentified
MKKDWYVGIDVSKKWLDVAIFVENSELKGYSHTQVGNSKSGYKELLEWLKEHDVDASTCMYGMEHTGFYSDGLQHFLDKKGYKYTMLEPAVIKHYPIQPREKNDRLDAAKIADYLFRFKETIKFSRVPDKTMEELRNLHRERKFYVEDRVVYLNRKQVVGKEEAKRLDKIISLLDKQVESIEEKIRDIIRNDESLMESYLYLTSITGIAFVNAVNAIVITQNFTVFKTARDYASYIGVAPHTKKSGTTVRWKPKPYKHCDLTAKADISQAAKIAIVHDVELKRFFERKCNGKEDADTIRKAMNAVKFKLVLRMFAVVKQKHEYRQFTTI

SEQ ID NO: 355557 - protein, 359 aa, unidentified
MKKVSRVRRNDKGKQVVKGEKLYVGIDVHKKTYHVAIWSSKRGLVETWVQPAVDEVVTRQLERYGKGVKQVVYEAGPTGYDLVRRLRADGFCADVIAPSKTPRTVSRDSKSDRLDCRKLAEFAANGMLRSIRIPTRQEEADRQLIRLREQMARKRKVIKNQIRSFLLRYGIAEPRGIKNWSKRAVEELRSVELLKELRECLDIMLEELEHAEKQVEHVTEKVEELAQGERHREEAEILQSVAGVGPVTAMTYRLELIEPERFKTANQVARMVGLAPWVYQTGETRKEGPIMKSGNKQIRTTLVEASWNWVRKDPVARAKFIHLLRKTGSEKKAITAMARRLAIILWHMLVKKERYRPAA

SEQ ID NO: 355558 - protein, 350 aa, unidentified
MTIIGCDYHPGFQQIAFVDTETGDYGEQRLEHSEGAEKFYRDLAAQGKKVRVGMEASGHARWFERLLAELNFELWIGDATEIARKRERKQKTDRQDAQHILQLLMENRFPKIWVPSGENRDLRQLLWHRHRMVQMRTRIMNQLQAVALNEGLRCKKRLWRQHGREQLESFRLAPWASRRREDLLQLLDGLNPTITDLTQVIEQEVEKCPEARRLRTHPGVGALTALAFVLIIGRTERFQCGKQIAAYLGLVPLEDSSGNRRRLGHITKQGSSMLRFLLVEAAQVTARSIPEWRSKYFHLAMRRGRKIAKVAMARRLAIALDWMWRKGWNYEQSRKFGSHAGKLGTGDGVQ

SEQ ID NO: 355559 - protein, 353 aa, unidentified
MEYIAFDAHKHYTLASVARPDGQLVREQRLPHERGALQQFLARCEPGSPVAVETIGNWYWIVDEIEAAGCVPKLVHARKAKLMMGEINKTDKLDVRGLNQLQRNGTLPTVWIPPGELRDQRDLPRTRMVLVRQRTQLKNRIHATLAKYALHNLDVSDLFGVRGRALLRQRLDLLPPYTAYATQQLLEQVENLDRQVRGFEHQMQTVFKPTPTIQLLLTLPGIGLLLAVVIALEVGSIARFATAEKLAAYAGTTPRVHASGGKTRLGPSRPDVNRYLKWAFVEAANAICLNRGRAPRRHVSRLYERVARRKGHQKAIGAVARHLAEATYWILTKQETYREPNAAAVSSTGDKRG

SEQ ID NO: 355560 - protein, 529 aa, unidentified
MLLSVKRSIFNQKHSLMKPKESKAPAAKVKAKRRTKKSVCKIRTQKQSSEGLRQINWHAGGIDVGAQEHYVAVPPKSVPEGQSAVRSFSAFTNGLDALVEWLKECGVTTVAMESTGVYWIPLSQKLGEAGIEYVLANASHVRNVPGRKTDVKDCQWLQELHSFGLVSGSFRPDDEVCKLRSLQRHRGNIVSSASAEIQHMQKALQQMNLHLHHVVSDINGATGLRILDAMLAGERDPKALVKLRDPRVSRSTVTEMEEALKGDYRPEHLFVLEQSLQTYRFHLVQTEKCDQTIETVLKSLAAKVQVSEPANDQGEPPSGTPGTRIYHLSSEGDATAPSQSRGALQKQKRRQKPARNQPTADFRAYLQTICGVDLTAVIGLNILSVLILISEIGTDMSRWRNAKAFCSWLGLCPGNKISGGKVLSSRSRRVVNRAATILRVAASTLGRSDCCLGHFYRRKKAHLGPPKAITATARKLACIVYYMLKFKQEYREPDPSAYQAKIQRGRLANLKKQAATLGFDLVATASVPA

SEQ ID NO: 355561 - protein, 389 aa, unidentified
MPYHIEIDISKFKHNCFIATDSNVKVKDFIFTNDKAGFNLLLEELKPLGDPTKIKVGIESTGHYGANLKHFLVQSGYTFMEFNPYLTNQFSKALSLNNAKTDKIDAEVISKYLGLVDYDNLHIRFYHANDLKELVRLRNNYIEERSKELVHLTNVLDKMFPEFKPFFNNIFGHTALFILKTYTSKAKIAKLNKTHFDKLNSLSRGKFTYAKFNQLKQLAETSIGIDSIQFEFIIRLSIKHLDDLNTLLDELDYQIENLYQQTDSKLSSIPGLGIISAATIYAEIGNIKNFSSPEKLISHAGLKMRIIQSGTMNRTGKLVKRGSSLLRKTIWNYAFLSLRFLPTINDYYHKKKLEDKHHKVVLTHVCRKLLRMIYHIEFNNVTYDSNNFK

SEQ ID NO: 355562 - protein, 408 aa, unidentified
MAVVMIGIDPHKGSHTAAAIGPGEEPLGQVRVLASASQAGQLIEWARAWPGRTWAVEGATGLGHLLAQQLLAAGEAVLDVQPKLAARVRLLEAGNTNKNDANDARSVAVAALRSATRREVTAEDQAAVLKVWSKRYRDLGRARTQVACRLHAVLAELVPGGFGKEITAGQGARVLQAITPASPAAAARCELAAEFLADLRRLDAQRRDTRTKLAAAVRESGTTLTQVFGVGPVIAAAILGATGHAGRFGNQDRFAAYNGTAPIEVSSGGRKIHRLSLRGNRRLNHAIHMAAVTQIRHSHSPGRAYFDRKIAEGKTGKEALRALKRQLSDVIYARLQADAARPGRGAPAEAEGPGGQSGNGSVSSAAGSHPRRQLFGQATPGPQLSLRPAAPARQAVPATPVKNSRRAP

SEQ ID NO: 355563 - protein, 313 aa, unidentified
MAQIAPSVGIDVSKEWLDVAVHPSGEHFRVNNDANGWRELTRRLSVLGTRAIGIEASGGYERDVIGVLIAQGLPVRGVNAWKLRQFAKAAGVLAKNDRLDASVIAWFVATLPCREVRHDPAQAHLAELVTARRQALDAMLQLSNQLEHLRDPELRRLQQRRIRQLEADERRISTRIAEAIAANAAMTERFNLLSSMRGVGPVLAATLIALLPELGTLTNRQIAALVGVVPYDFDSGKMRGLRSIFGGRAAVRWVLFMAAQAAAIWNPNLKAFKKRLLAKGKPPKVAIVATMRKLIVTLNAMVRDNAPWLPTTT

SEQ ID NO: 355564 - protein, 343 aa, unidentified
MNVQTVNNLPPAAAHDAIVRCLLAIELSKKSWIVAVNTPLSEKISRYTLKGCDWKGLLELIEKIRTRVARELNRPVEIISCYEAGYDGFWLHRLLEAHGVRNHVIDPASVQVDRRARRAKTDNIDVAQLLRSLMAYLRGDPKVWSVVRVPSVAEEDDRRLHRERDRLITERVQHVNRIKGLCAVHGIYDYEPIRSDRMLRLEQLRTGDGRKLPPHLKAEIVRELQRLELVLAMIKTIEAERKAIISAKTPHVNVTKIQDLIKIKSIGPGISTVLVGEVFYRKFNNRQQLGSYVGLAPSHFQSGPMSRDQGISKAGNPKARTVMIELAWIWLRYQPNSPLSVWP

SEQ ID NO: 355565 - protein, 373 aa, unidentified
MNKFSKYVGLDTHADTIAVAVSDASGGKPRYYGEISNRPASVEKLVKRLSPDGEVVSFCYEAGPCGYGVYRQLTDLGHACDVVAPSLIPTKPGDRVKTDRRDALQLSRLQRAGELTPVWVPGREQEAMRDLTRAREDLVSMARRAKQRLGAFLLRHGKVYTAGVKKWTKRYFRWLEEVKFDFPVQQIVFQEYVDTVNHLQARVEALEVEMERALPDWSLAPVVEALVALRGVDRVSAMTLLAELGDITRFDSPRQLMAYLGLVPSEASSGRRQRRGAITKTGNGHARRTLVESAWSYRFPARKTAHLQRRAKQTSESVQAIAWKAQKRLCGRYRHLLERGKLKVQITVAVARELAGFIWAIACEVMGRPVAVR

SEQ ID NO: 355566 - protein, 342 aa, unidentified
MSEVSTIGLDIAKAVFQAHGADAAGRQLFSRRITRAKLLEFFAAQPRCLVAMEACSGAYHWARELTQMGHQVRLIPPAYVKPFVKRQKNDAADAEAICEAAQRPNMRFVAIKSEEQQASGLVFRTRDLLVRQRTQTINAIRGHMAEYGWVAPRGPAWVAQLGDLIDDEVGASLPTAARDMFRVMLGLLDELDIRVAALDKEIAKRAREDEVARRLMTIPGIGPIAATAIAALAPAMETFKRGRDFAAWLGLTPRQKSTGGKTRLGRTSKMGERTLRRLLIIGASAVVQHASRRGPPEGSWLAGMLARKPRMLISVAQANKTARIVWAVLVTKQDYRAPVVSG

SEQ ID NO: 355567 - protein, 337 aa, unidentified
MTLYCGIDLHSNNSVVAVLDEQDRTVYEKRLPNDLTTITEALCIYQSELAACVVESTYNWYWLVDGLMATGFPVRLAHTSALPEYSGLKYSNDFSDARQLAHLLRLGLLPTGYIYPKEERALRDLLRRRLLLVRQRSLHHVSLQSLIARHSGQRLNTLQIKQLTKGQLADYLQGHALLGGEITHQARCWLENAVRKIEQELQHHIKPREDYQLLQSMSGVGPVLGSTIALETGSIERFASPGNYASYARCVKSEKISNKKRKGQGNKKNGNKYLAWAFMEAGHYGAIWNPRINRFYQRKKAKAHILVAKKAVANKLARACYHMLKRGEEFDVKRAFG

SEQ ID NO: 355568 - protein, 355 aa, unidentified
MNQEKYIGMDVHAATISVAVKNAEGKLLMECVLETKAATILEFIQGLRGTLALTFEEGTLATWLHDLLKPHVSRLVVCDPRKNALLRDGNQNDRVDARNLAELLRTNQAHAVYHGKHGTRALKELGRSYLTLTQDTTRVMNRIKSVYRSWAIACAGTSVYSRRHRAQWLAKLVEPGVRIRAKHLYQQLDSLEPVRQAARRELLRESGKHAAVKLLRQIPSIGPIRSALLVAILQTPHRFRTKRQLWAYSGFAVQTYDSGEFRFVRGKLQRNRERITVRGLNHNHNHDLKNLLKGAAISASQRPGPLQDFYAALVEKGMRPSLARLTLARKIAAITLIIWKKGVSFDPKQLQRQAA

SEQ ID NO: 355569 - protein, 348 aa, unidentified
MKENITIGMDLGDQSHVVVVLDKNGDEIEMRTISNTEFSLVEYFSRYPKATVAIEAGTHSPWISRLLKEIGCKVYVGNPRKLRIIWDCNDKSDKRDARILAMVCRVEPRLMWPVKHRDKQAYADLGVIKARDALVQNRVRLINHVRSVTKTCGYRIPKCSTPSFSKRAPDHIPPELEDSFTPLLLTIDLLTQQVKELDRQINKLCLKYPETRLLLQVPGVGPVTALAFVLTIDDPHRFIKSRQVGAFLGLTPKRDQSGKCDKQLRISKAGNTYLRSLLVSCGQYILGPFGPESDLRNYGISIVIRGGKNAKKRAVVAVARKLTVLLHRLWISDQLYNPFYKSVAQNAT

SEQ ID NO: 355570 - protein, 481 aa, unidentified
MSQPKKHSPKPGQEKPAAGQGKRGGKRKGMCLEDRPILEPNAAGIDIGAREIFVAVTPDRAEDPVQVFSTFTEDLERMAQWLVSCGVSTVAMESTGVYWIPLYDVLEKHGIRPCLVDAHGMKNVPGRRTDWHECQWLQFLHSVGLLRAAFRPDGEVCAVRSLMRHRNDLVQMTNQHIQHIHKALTQMNVQIHHVIDDITGVTGSAIVDAIVAGQRNPLELAKLRDPRIKASEETIVKSLKGNWRPEHLFTLKQARQMYRHYQEQITACDAEIEKMLVAFQPRVDPQEKPLPPDRKKKKHRARQKKGALNTGFDLRTESYKLFGVDLTQIPGLMLMVLTLFSEVGRDMSRWKTAGHFVSWLALCPDNDITGGRVAWRGMRKVHNRAGELFRMAAYSLHHDRSPLGDYLRRMKSKLGPPGATTATAHKIAIIFYTMVKKQVEYDATLWAERDAQREKRFEAKIKRQAQQLGYKLVPIEEKPAA

SEQ ID NO: 355571 - protein, 319 aa, unidentified
MEQQAIYVGIDVAKARVDVAVRPLDDRWEISHDQKGITKLVSQLETLDPAMVLLEATGGLELSLVAALAAAALPVVVVNPRQVRDFARATGKLAKTDSLDAAVLAHFAEAVQPPVRPLRDAETQALNTLAARRHQVMSMRVSEKNRLSAAAPDIRPRIEAHIAWLEQELDDLDKTLKQTLRGSPIWREKDDLLRSVPGVGPQLSLALLAYLPELGTLDRRQIAALVGVAPYNRDSGTLRGKRTVWGGRAQVRAALYMGALVASRHNPIITGLYQRLLAAGKPKKLALTACMRKLLIILNSMLRHGSPWRNTTLESIALS

SEQ ID NO: 355572 - protein, 400 aa, unidentified
MLLFFEVITMIFVGIDVAKDTHYAAVSDDSGAVLVKPFAFQNNAEGFCLLLKKLSEFDRSKLLIGLESTGIYSENLICFLYESGFRLAVINPIQTATLRKTAIRKTKTDKVDTMLIIKSLMVNSYRLYSQRDADSLKLRTLCRFRQNLKKSKARLKIQLAGYVNLVFPEFGKFFKSGIHIAASYALLKKYSSPKEIAALRTSTLCTLLSKASHGRFGKDTAEALKSLALSSVGVKNPYISIQIAQTIAQIELLEQQIKDLNSAIEEAMESINSVLMTVPGIGAVNAACILGEIGDIKRFSKPCKLLAYAGLDPTVRQSGQFTAKSTRMSKRGSALLRFALINSAWQLTLNDTTFKAYYDLKRSQGLNHYGALGHVAHKLTRVIFKLLTSDTPFHPAKLVA

SEQ ID NO: 355573 - protein, 327 aa, unidentified
MYLCILDQEGNVVLHKNFRTNQEAFLAAIEPFRGDLVVGAECVFCWYWIADLCAREGIEFVLGHALYMKAIHGAKVKNDRVDSRKIAAMLRGGMFPMAYVYPAKLRATRDLLRRRCYLMRRRSDLLAHIQNTNSQYNLSAFGKKIAYKVHREGIAEQFAATDVRKSIEVNLELIDHYDKLLEDLKRHILRSARYHDPDSLHLLRTIHGVGPILSLVMLYEIHSIERFPRVQEFVSYARLVRCPHESAGKRSGRSRKKIGNMHLKWAFSEAAVLFLRANPKGLEFKKKLERKHGKAKALSILAHKIGRAVYFMLRRKQPFHMERFLAA

SEQ ID NO: 355574 - protein, 315 aa, unidentified
MSDVPCFVGIDVAKAQLDIAIRPTGERWTVPNDASGVATLVDRVQTLQPTLIVLEATGGLERLVTSALATAGLPVVVVNPRQVRDFARATGQLAKTDALDARALAHFADAIRPKPRTVPDAQTQELRTLLGRRQQLVAMRTMEQNRLAGTSGRLQTDIAAHITWLNARLATLDDDLDTVLRSSPLWRENDDLLRSAPGIGPVCARTLLLELPELGTLTRQKIATLVGVAPLNCDSGTLRGRRMIWGGRARVRTVLSMATLVATRYNPRIKAFYERLLAAGKVKKVALTACMHKFLTILNAMLKHRKSWQDQEVQG

SEQ ID NO: 355575 - protein, 427 aa, unidentified
MRTIGLDVHKHFTQVAVLEAGRIVSNQRIETKPWALRKLAAELGPDDQVVLEASVNTWAVADLLRQHAGRVVVSNPLRTRAIASAKVKTDKVDSEVLAQLLAADFIPEVWVPDDATRKLRQLVSRRRSLVQQQTRQRNRIHAVLHRNLVDCPATDLFGVGGRRWLAEVQLPANERREVDSNLRVLAVLEDEVKSLDDEIAVVVVDDHRVRRLLTIPGVGVATAAALVAVVGDIQRFDRPNQLVGYLGLDPRVRQSGDQPYRTGHISRQGQAHARGLLIEAAHATVRVPGPLRAFCERVQGRRGKQVALVAVARKLTVLTWHLLTKDQDYQWALADLTARKYKRLEVQAGIAKPGRVMGQNVFSRESMVQGRRVLASAEAAYRTMVAARQVQRGAAASMGERLGGPRAGRAAEISPPDSALLHEVDRA

SEQ ID NO: 355576 - protein, 408 aa, unidentified
MQVLYPRCAGLDVHKDTVVAHVRCVSEPIHHETRSFATTTSGLLALAEWLAEHACTHVAMEATGVYWRPVWHVLEGQVELVLANAQHIKNVPGRKTDVSDAMWIADLLAHGLIRSSFVPPTPIQELRDLTRTRKQLVREISQHSLRIQKVLEDANLKLGSVLSEVLGVSGRAMLGAIIEGESDPHKLAGLAQGTARRKHDALVEALHGRIRPHHCTLLRLHLNLIVALEHTVGEIDAVVGKCLEPIHQRARLLTTMPGISDLGAEVIVAEIGIDMTRFATAGHLVSWAGLCPRNDESAGKRRSTRLRKGGTWLKTTLVTAAWAAVRTKASYLRTQFTRIRARRGAKKAIIAVAASMLTAAYFMLRDGVPYRDLGPSHLDQQHRDKTIRRLIRRLQDLGYNLPPNAQPA

SEQ ID NO: 355577 - protein, 388 aa, unidentified
MQVLYERCAGVDVGKDVIAVAVRLPGDGPDGRQTVKRMFKTFYGVLREAAGWLSSLGVTHVAMEATGICSMPVCHALLEHGNFGQVLVCNAGHVKNVPGRKSDLADAEWLAHLLECGLLRGSFIPPTAIKAARDVLRYRTKVVQSRTSEVQRLGSVLQDAGIKIDSVASSIAAKSGLAMIEALIDGERRPQVQADLAKGKMRVKIPDLELALEGRFGGHHALMCRLHLDHIGLLDEMIARLDAQVEAMMAPFRAERDLLITIPGTGALAAAAIISEIGTNMPGFFPDAAHLASRAGICPGTHEPAGKRRSGKRRHGKRAPAAGPGGKRPGGGPPPGLPQVPLPPARHEMGRLPQPHRQEESDHRRRPRDASHHLARPGRRRALRRAGC

SEQ ID NO: 355578 - protein, 311 aa, unidentified
MTIVANTFAYVIGADTHSRTHTLAVLDTRTGARVDIQTFSTTSAGLSRAVAWIARRTSGLADVLVTIEGVGSYGARLARACQDAGYRVVEAFPTPARERRGLGKSDEIDAELIARSVLGVDASNLRDPRQDAGVRAALRVLIGARDLINLERTRSINALTALLRTVDLGIDARVSLTKTQLALITAWRARREDLATATARREAIRLARRVTACDDDLAANRDEITALVAASDAAVLLDEPGIGAINAAVIIAAWSHPGRVRSEAAFAVLAGVSPVPASSGNTIRHRLNRGGDRRVNRALSSIGGPSCRHAA

SEQ ID NO: 355579 - protein, 359 aa, unidentified
MKCSTAVETIAVDLAKSVFQVLAVDAQGKVLESHRLSRAAFIAFWHNRAPARVVMEACGSAHHFGRWLSALGHQVTLLPAQYVRPYVRRSKTDAADCLAMIEAARAIDLKPVPIKTELQQVIQLLHRARQQWQETRTARINLARGLLREFGIAIPEGAERGQQAMRTALGHEALDQRMRDLIASLLDEIRALEQRVVDTDRALASTAKDDRVIADLEKLPTIGWVTATAVRASIGDIHRFKNGRVLSSWLGFTPKEHSSGSTRQLGRMSKCGDVYCRTLLIQGARAVLAAAKRAQTAGKPLDRLRAWAVALAERRGFNKAAVGLANKMVRIIWATWHHARSFDADYGKRFDQEIAMSNA

SEQ ID NO: 355580 - protein, 414 aa, unidentified
MNSCLFVGVDTHKDSHTAAVLDGYFDVVSTVTFTNNKEGFARLETHLAKISREMDIIFGLEDSQGLGSFLAAYLVGKGYTALEINPVTTDRGRKHTVSRDKSDESDAIVIAKTLIRERKNLYPVRIERNSVALREMVGYRQLLVGEATRIKNRLHIALFNQYKGVLGCFGSPFGKCALAFFLRYPDPKSLEDVDIGFLSCFLKTHSKGRFSDKKAKAILESIDNSIADSLTDTRARIISSHIKRLLDIKEELTEIKEALISLVKASSYYCLVSIPGIDIVTAAKIVASVGDISRFSSASRLARFCGIAPREKSTGRKKKYEKSKYGNKFLHSAIYYVALAHISRTRSGADKNPISRAYFLKKIAEGKTKKEAITCLARRLVDIIFAVMRDRSIYSFSKSGSTKKREPELDPVAA

SEQ ID NO: 355581 - protein, 332 aa, unidentified
MENFYFIGVDVSKKKLDFCVMFEGKVVHEEETTNHQSAIMSLLHHLEEDYGIVSDQILVCAEHTGQYTFPLACACKAVECKLWLENAAEIKYSSGVQRGKNDKVDAKRIAVYARRFQDKVQYYERPTEDIERLKQLESEHTLYVTDLAKYKGQMKDQKDYMPKALYERKMKRLQALMDDLEEAIQAITDEMDEVTASCPVLSRQRELLMSIDGVGRVVATNMIIATEAFTRFDDPRKFNCYAGVAPFSYSSGSSQHSKARVSHRADKVMKRLLHLAAVAVTHRVGGELKKYYERKVAEGKNRMSVINALRAKIVARMFAVIKRNEKYKPILS

SEQ ID NO: 355582 - protein, 397 aa, unidentified
MIAVGIDVSKSKSTVAILNGDGSIRAKPFDVHHVADELQALVDYIKRTSEPPTILMEPTSHYHYPLLKAFTEAELPVCLINPYQMKKYGDTELRKAKTDKRDSLRIAQYALEKSYSLIPYTPQDQKYEDLRFLSRQYSQRISTLTVAKVQLLSLLDETMPGITTILPLKSRDPDNCVLLRFIKRFKSFDVIRKIGKTRFLDSYQVLVKKTKDRFAGSKGLAIYELVLNSVTTRGENPLSAMTQDQCVDLVSTSQKAADEINLQMRIIAETMPEYKVLRSMAGVGDRLGPIILGEIGDIRRFHSGKALNAYAGNDAPPYQSGQFESRNRHISKRGNPALRKACFEVMQALKLTKPQDDPVYLFLLKKEQEGKPYNVAKMAAVNKFLRIYYARAMELYK

SEQ ID NO: 355583 - protein, 353 aa, unidentified
MTQTITYRVGFDVAKTVFQVHGVKNEPGEAVAIARRLRRAQVEPFFAKLPSSLIGMEACGSAHYWARLARKHGHEVRLMPPAYVKAYLKRNKTDAHDAAAICEAVARPTMRFVAVKSEADQATLMLHRLRASFVEKRTAAANQLRAAFAEFGITAAVGAGGFKELLQLIESKAESFALLPQALRLVLCELAWQWQSCEAAVRRMDVEIAAGVKTSERAKRLTEVPTIGPVGASAIDALLPDPQLFRSGRDFAAWIGLTPREDSTGKTIKRGPITKKGDGYLRRLLVLGATSHLARVRRGQTKGASAWVLKMAAHPKRKLAAVALANKTARVAWAMLAKGEDYRAPAAAALQAA

SEQ ID NO: 355584 - protein, 451 aa, unidentified
MNKKVSLEIINPNAAGIDVGSRSHFAAIGQGKDDVREFGVYNEDLQAIAEWFLANGVKTVAMESTGTYWQSLFAVLQNAGLQVILCNGKFTKNIKGKKTDVQDCQWIQKLHTIGLLSGSFLPDEATEQLRTYCRHRANLLDQAADTTRKMQKYLRLLNLRLDVVVKDVTGLTGLSIIDAICKGETNAEKLASLRNGNCKKSEEEIAKALHTNGRKDYLFALKHELGMYQSLQAAIQDCDIEIEKMLNEQISNNDNKRQHYIDKKVHKKVNKNAPKNIDINLMSYQYFEGVDLLAIEGVSHSTVLSVISEVGLEGLKKFETAKQFASWLRLAPNNKISGGKVLSHKVPKGSSRLKIALRNAANAIGNLKDTPLSNFFNRINFRKGRVSAISATARKLAVIIWNMVVKNRPYNNEHGYEFLDQKRKRKVQEMKKLIHKFDIKTDELGLQLNGA

SEQ ID NO: 355585 - protein, 344 aa, unidentified
MRIVEVTGGVDTHADNHMAAAVDQNGGLLGIESFPATETGFEDLLSWLAGFGPVVRVGVEGTGSWGVGLARFLTSVGVEVIEVDRPNRQKRRKEGKSDPTDAVAAARAALSGEASVTPKSRNGVMEEMRVLLVARRSAREQRSQTLNQLRHLVFCAPEAIQDRFKDRPKTGLVSEAANMRPRQGSHPITYRTNLVIRGLARRIKHLDAEMRTIDATLRSLIEETAPSLLEMYGVGVDTAATLLVTAGDNPERLHSERSWARLCGVSPIPANSGKVTTKFRLNRAGDRQANAALYRIVLTRMSSHEETRRYVARRRDKGLSNPEIMRCLKRYVARQAFKHLPHMI

SEQ ID NO: 355586 - protein, 336 aa, unidentified
MSSGEKTVPATTVVNASALRWARSTFGPDLTWGIEDVRNVSRRLEQELVNAGQRVVRVPTHLMARTRASARTRGKSDSIDATAVARAVLREPDLPVAQHDSVSRELQLLIERRETLVEQRTATVNRVQWRIHELDPVRSNNLKPLIYAKHRDPVAAWLAKQAGLVAELAFDELDDIARLTQLINALEKRIAERVRVHARHLLALPGCAELTAAKIIAETANVTRFNSEAAFARYIGVAPLPHSSGSTDGHVRFTRSGNRQLNTAVHRVAVTQIRIGGPGRRYYDERRRAGDSSPAAVRKLKRRISRVVFSRLKADEAERHSQSDTNVNVATADTSG

SEQ ID NO: 355587 - protein, 484 aa, unidentified
MAKRKMSTFERLNTGQMNRAQRRELGRRVAAGDPGLAIVHANAGGIDVGNESHFVAVPPDRDVDPVREFGCWTAALNEMAEWLQSCRIDTVAMQATGVYWIALYDILEQHGIRVVLVNAQHTKNVPGRKTDVQECQWLMKLHTYGLLRDSFRLQQDMEYVRTIWRVRDRHVKEAGRAVQHMQKALTKMNVQLANVISDISGVSGQAIIAAVLQGERDPYKLADLADYRVKASREEVARSLEGNWRADVLFELQQAVDGYHFAHGQMRECDEKLTLYLASLPTRMLDIPAPSKGAPETAAQKRKKAKKPRDNEPRMDMKVELQRICGVDLTSIDGINVMTAFTVISEVGTDMSRFQDEKHFTSWMGLAPSKDISGGKIVGRGKKKVKNRVAVVLRTAATTLLESDTHLGARYRHLRRQLPTFKAAVKAMARYLAVLIYRLLTHGEAWVDRGAAQFERRRLERELASLHSKARAKGFTLVPIAEAC

SEQ ID NO: 355588 - protein, 290 aa, unidentified
MNIKRIGLDLAKNVFQIHAVDHREHVVLRKTLRRDRMAAFFTQLSPCLIGIEACGSAHYWARELTRMGHTVRIIQPRLVKPYLKGQKNDANDAEAICEAVSRPGMRFVAIRTERQQTLQAEHRVRARLIRARTALSNEIRGLLGEFGVVLPAGIAQLRKALPEIVSQQVQWDECFIRLLCELSEELQGLDERVARHDRRLQQSARDDIRIKRLLAIEGMGPVVASALVAAVGDGRQFRSGREMAAYLGLVPRQHSSGGKARLGHISKRGGPLRADAANPWSAGSAECVSE

SEQ ID NO: 355589 - protein, 358 aa, unidentified
MKYYIGCDAHKKYSVFAGINGAGEIIPAQRVEHNREGYRSFLEGLPPASQIAIESVGNWYWLIDEMEKAGHIPTLVNAGKAKLMMGNINKTDKLDARGLAVLSLNGTLPAVWIPPGELRDQRELARMRIFLVRIRTGLKNRIHATFAKYAITFQEVSDLFGVGGRNLVQKRLVELPPETRHSVKEQLRLLDQLQKQITEVEKRIWQIVKVTPEMQLLMSLPGIGPILAILIAFEIGDVARFGDGAHLASYCGAVPRVKSSGGKTYYGKTRPDVNHYLKCAFTEAGNAIVANQHRMTGRHVVALYQRISRTKGHAKAIGALRRHLAEASYAVLRSGQPYHEPALSRKPFVAKEVCARLA

SEQ ID NO: 355590 - protein, 346 aa, unidentified
MEHYAGIDVSLEWSSICVVDALGKIVKEAKISSEPATLVAFFEALGFAVKRIGLEAGPLSQWLHAGLKRAGFEAVLLETRHVKAALSAMTVKTDRKDARGLAQLIRMGWFRPVHAKSIRSQEVRALLVARKQLLGRLIDVELSIRGILRGFGLKVGPVTRKGFEARIRELVTGQATLERIAGAMLSARVALKAEYEKLHKTVLAIVRDDAVCRRLMTVPSVGPLVAITYKSAMDDPNRITKSKAAGALFGLTPRKYQSGEKDVTSGITRAGDEMVRTALYEAANVLLLRITRFSKLKRWGIDVAKRRGSKRAKVALARKIAVILHRIWVDGSTYRWTETQPIAAQA

SEQ ID NO: 355591 - protein, 324 aa, unidentified
MSQPNPLCVGIDVSKATLDMDIAASSDVAQFTVSNDSDGFNAIITGLRRHSVALVLMEATGGLEVAVACSLQAEGFEVAVVNPRQARDFARAMGYLAKTDRIDARVLTQMAEVINRHPERKRFIRALPDAERQALAAMVVRRRQLIAMLVAERNRLHPFHPQNKKSINTIIKALEDELVRLEKEMDSHIRNHFKEIAERLSSIKGVGTMTVSAMLAEIPELGTLSRREISALIGVAPVNRDSGTMRGRRTIFGGRAGVRSALYMAALVATRFNPVIKTFYVRLLAAGKAKKVALVACMRKLLTILNAMLRKNEEWDESYHHVAP

SEQ ID NO: 355592 - protein, 387 aa, unidentified
MQKPHDNSKVCRAAFVQDSTLVVVIEMALTSWLVAGMIPGVDREPLKKIAPDPEELLQLLYRWRNEAIKAGKEITRIAVAYETGRDSFWLARWLRARGIDAHVIHATSVAISREHRRAKTDRIDTAMLRRGFLGWLRGEPGHCSLAIVPTVAEEDAKRPHRERESLVQERTSTVNRMKSILIQFGVRNFNPVLRKASEKLDAVRTPEGIPLPPNAAAALRRHMERLGVIKEQIKAIERTRLQRLQRDPADKMNAMVFLLVQIIGFGVETAEQLVHEILFRDLRDRKAVARYAGLTGSPDESGSKRREKGLSRSGNGRVRTILIQLSWRLLKLQPGSELVLWYQKRTADAKGSRKPMIVAFARKLIIALWRYVNTGLLPEGFELKPAA

SEQ ID NO: 355593 - protein, 421 aa, unidentified
MLGVGIDWAEEFHLVALGRPGEGVIDVARVEHDPRSLDALIARLVALEPDPAEVRVVLETSSGMLVERLVEAGFTVVPVNPDLIARRRGPARKKDDAGDARIACLLALDRFERLRPMVAHGDEAAELRAIARDDERAVRDERRLLNRLRADLIATFPAALTIPGDDMGAPTFLRLLERWPTANALAEASRDDLLALARAGHHGWPDRFADRVQTALAAQQFVARDWLVRAKADTIRLAAIQLLALGAQRRAWERRMGELLIGAPRSGRDLPKDNDRGPAVPGGEIYLSFPGLGDRLAARVAGEIGDIANFVSPNALQCYAGKAPVTRRSGKSELVIAHRLACNGHLRDAVQQWAFCSLRGSGWAREFYAAQRARGKSHHAALRALGNRWLEVLWHCLQRGLRYDEATHVTNRNRALHRAAA

SEQ ID NO: 355594 - protein, 355 aa, unidentified
MALSSPCIAKPSYSLYCGIDIAAKTFTAKVCKGDEEPSKALNFKQTAEDFAQLKKFLLAPELPPDQILVVMEATGTYWTLLASYLDHNGFGVSVINPVALHDFAKSLLLKSKNDQLDAQTLARLGRSHKPTRWTPPPAIYRELSQRLSQRADLMEMRQQLKNQLHALSVCEAVPSVVARLELLIETLSQQLKELDKEIKKVVSEEPLWAAEVALLETITGIGWLTACWLVTLTLNFTTCEKAESLVHYAGLAPTPRKSGTSVRNRPMIGHGGHGPLRAVLYMAASSAIRFNPVIKAYYLHLRENKGKAYKVARCAAARKLIHLAFAVVTSKQVFDPDYLVHLKAKKLAEGLAVAV

SEQ ID NO: 355595 - protein, 421 aa, unidentified
MTVNVSSMKDAVLVAIDIAKARNDVLVQLPNGTKKKFKVANKMKDYKEFIDYLSSFNKPCFIAFEATSNYHRPIAYHLQKAGFTVHLVSSFAAAKTREALHNSWDKNDPKDAQVILHLLKTGIVQTYYDPLINQYNDIQEIAKTYHQISLRKVRVQHSIMNHYLPLYFPEAEMFFHSSRALWFSHFISHFPTPSTILKHTQEEFINAAWDVVGRKVDKRNWLINFYQTAKESIGLPTEPDSQAIRMFCIILQEHQDLCKQLKTLEETAESFLEGNNDYKHLLSIPGIGPIIALTILAEAGDLKRFKHYRQFLKFCGFDLSTQQSGFFRGQTKLSKFGNARLRYVFWLAATVAIRMRENTFRKKYEDYIKQDPQNDDLKRKGYTAVAAKIARVAYGIIKNETNYRCYHESVIPSGRIPSARP

SEQ ID NO: 355596 - protein, 342 aa, unidentified
MQIAILGIDLGKNSCSVVGLDVAGRVVLRRRLRREGVIKLAAGMPGCVIAMEACCGAHHLGRLLREHGHQVRLMSPEYVRPYVKAQKNDDRDAEAIAEAATRPTMRFVELKSEAQLDMQSLHRARDRLGGERTALINQLRAVLLERGIVVPQGRRKLERYVDALLAEEEIRFSPRTRLLVEDLRAEWRELDRRISAFDDEFAAQARSDETARLLTSIPGIGPLNATALTAAIGNAQTFGRGRDLAAWLGLVPKQVTTGGKPKLLGISKRGNGYLRKMLIHGARAALPTLSKGETPLGAWLRGLLGRAHVNTVVVALVAKLARIAWAVIRSGKKFDMKAATAS

SEQ ID NO: 355597 - protein, 341 aa, unidentified
MNVKTIGIDLAKNVFQIHGVDEHGKRLFNKQLRRAQMASFFANIPPCLIGMEACASAHFWANKLISTGHNVKLMAPQFVKPYVKTNKHDAADAEAICEAVTRPNMRFVPVKTAEQQAVLALHRSRQSFIKQRTAQANQIRGLLAEFGIVVPRGIQQLQRRLPELVEDADNPLPVLFRTQLSLLQHHMAYLFDVIATLDKQIEQCYRQNALCQRIGKIPGIGPVTASALIATIGKANNFENGRQLAAWLGLVPRQHSSGGKQVLLGISKRGDTYLRTLLIHGARAVLQSAKHKQDAVSSWANQLMARRNNNIASVALANKNARTVWALLAKEREYCAPIISA

SEQ ID NO: 355598 - protein, 400 aa, unidentified
MRAVFGIDVSKTSSEVAILVNGEKVHSYTILNDAIGFNRLLGDLKTVHNPEIIFEATGVYSRRLQAFLEEYSYAYTRLNPLEAKKQLDSLRVRKTDKIDAEKLAKSQLVHNRKPTYVQEEVYQHLRDLSRFYQNMTEDLVRTKNRLHKVLQVTFPELENLLSTPTGEQYWNLVMAFPCKEFVLSLSQSNLCEVIRQSTSKRISKKRIAYLTDKLIKLAKQSFCAVKKTSPMLEEVRYYAQELLRLSERRQVVLNDMVALAQPLPEYDILRSIPGIAETTATSIIGELGDIRRFQSTNQINAFIGIDLKHYESGNFLAKEHITKRGNPYARKILFKCIHNIASASHTNPCHIADFYEKRKRLSTIASTKPHAIASIHRLIRTMYYLITHNKLYDYSLTQNR

SEQ ID NO: 355599 - protein, 524 aa, unidentified
MPGWAPRGMKIYGGRNIFAASEGMVCLQAMAGLRAMSNWCREPEKEMATDAQGHHKLLLRAREGESFDRWASDQPITVRRWQMLRTIYRRVAGLDVHKKTVVATRMRMTEDDRVVWETKTFGTTTPDLLELHDWLLEWSSTHVAIESTGDFWKPVYNVLEGTFELLVVNAKHVKHVPGRKTDATDSEWLAELMMHGLLKASFIPPEPQRALRDMTRYRTTLVQERARVVNRVQKLLEGANIKLSSVATDIMGVSARAMLDEIVAGQADTTLLAELAKGRMRTKIPELEKALTGKVKAHHRFLLAKQLAHVDFLDEQIEEISAEIGRHMAEMGGPSRPGADAGGGEKPTEGEQPLPPLTWEEAVALLDTIPGVNRRAAEVILAEIGLDMSRFPTADHLASWAGLAPGNHESGGKRYSGRRTKGNRSLSSMMTEAAQAASRSKDTFLSARYHRLAARRGKKRAIGAVAHSMIVMIWHILTSRQPYRELGGNYFDERKKESKVNYYLRRLEQLTGAAVTLGFQPAPA

SEQ ID NO: 355600 - protein, 424 aa, unidentified
MNFKMQNKQNQLIERITDQHLVVGVDIAQHVHVARAVNYRGIVIGKPLSFENNEEGFTRLLNWIKELKHMKNLDTTIVGMEPTGHYWINLSKWLVKQNIDVVTVNPHHVKRNKENRDNTQSKSDKKDALVIADMVKNGYYAFVRSTSESFEKLRVLMANRDVIVKRLVSSINQINRWVDVVFPELRQVFKDVSCKGAIATLRLFPTPAEICSLQPQDIVTGWKSCMKRHSGHKKARSLLTLAKRSIGTKQALDAYKLHLEQLLEEYDLASSQLERVTQEVTNVLEQIPFVKQILAIKGISEISLAGILGEAGDLSGFAHGNALLRHAGLHLAEASSGKWKGQIVLSKRGRSRLRRYLFLATMSLVMNNPEFKALHSNNVKVKKIKKMKSIMKLCGKLARVLVGIARNGSVYKPEMVFPLEKLAA

SEQ ID NO: 355601 - protein, 415 aa, unidentified
MSSAYERVAGIDVHKKILVVVVLDSRCPDRDCASAKFGTTATQLKELAAFLRRHEVRQVAMESTAQYWRGVWMELEGEFDLKLAQARSTQAPRGRKWDRADARRIAHRLLAGDLTISYVPPPEQRDWRLLARARVAMVEQIGVLRSQIEGVLEQAQIKLTSIVSDALGVSGRRIMRALIEGERDPERLAQLGHRKLRATREELGEALCGRMTFAQGLVLKLYLDQIESIEQDIATLEQELAKQLSDHEQAVARLCAVPGFSALAAQSAMAEIGPQAAAFPSAAHLASWAGMSPGQHESGGQPGSGRSAKGNRMLRRLFCQIAWAAVATKDSEARRRYLRLVARKGPQKAIWAVAHYIIRVTWKLLHDGVDYISPDTSGLRTRTLLKRANRITAELRRLGYSITFSATPAPQPSPA

SEQ ID NO: 355602 - protein, 373 aa, unidentified
MDYNTVYVGMDVHKESFTLCSFTIEEDKASHTQRVRSDYRQVLKYLEFLRTIYGEDAHFICGYEAGCLGFTLYHQLTDHNVKCVILAPTTMLEQRGGKRIKTDKRDAALIGRCLAQHNYSPVHIPTEEDDQIKEYIRMRADHKLSLKKVKQQILAFCMRHGYRYEEGSCNWTQKHIKWMKALKPGGMYKETLDEYLATFDWLTDKLDRLDKRIEELASGEKYQESVKKLTCFLGVRTQTALTVLVEVGDFKRFASAEKFSSYIGLVPGEDSSGDDCNGLSITKAGNAQVRTLLVEAAQSYSRGRIGSKSKELKARQAGNTPQVIRYADKANERLRRRYYKMVIGKGKPCNVAKTAIARELACFMWGMMTDRIA

SEQ ID NO: 355603 - protein, 348 aa, unidentified
MNTTTTTYAVDTAKSVMQLHWVDVASGEICRRKLSRAKFTQFFGALKPARVVMEACGGAHHWARSLAAMGHRVELLPARQVRAFVRGNKDDAADARAIWLASQQSDIRRVPVKSTQQQAVLSLHRLRSHWVCVRTATINMLRGLLYEFGVVLPPGKVLGLKVLAARRAEIDALLPPLMQRQLDGQLAALRQLELEVKHIEVELALVQRTDSAAKKLRQVPGIGLLGATALAATLGDARGWRNAREFSTSLGLSPRHNGTGGKVTMGGINKRGDPYLRTLLISGARAVANAPSAPEWVRQLMLRRPANVAVVALANKLARTAWALLAHDREYARDWVSKLPRAAQAAAA

SEQ ID NO: 355604 - protein, 461 aa, unidentified
MAQKRKKRGKPIQSLKTIKPDAAGIDLGSREHWVAGPPIEADTPNVQRFGTTTPELLRLADWLKDQGVTTVAMESTGVYWIPLFEILDSRGFEVILANARQVSHVPGRKTDMLDCQWLQLLHACGLLRGSFRPSDDICRLRALMRERDTMIDQRSDWIRRMQKSLDQMNICVHHAVSDITGVTGMAIIRAIVDGQRDPRTLAAMRDRRCQKSEQQITEELTGNWRLEHLFNLRQALKMYDQFCEIVTEYDTEIIAYIKTLQPCVDDNETVPPPASKSKARNIAKKGQEPMRQALYQLNGFDLTTIDGIGVDTAAVVTSELGLDYDAFPDEGHFVSYLRLAPNLSISAGKKVPSKLKGTTTTRVATALRTAALSLRNSKTALGAFYRRISRRKGASVAVFATARKLAQIIYRLVRYGQAYIDIGAKVYEAQFNNRRLTYYTKALKDMGYKVKPLETAEAEAA

SEQ ID NO: 355605 - protein, 509 aa, unidentified
MGCRDSDIGDRPAASWRIPFERLSVPFPPLSAAPCANLTMEEAAMKHNSTRERKEKRLSVSLLERIQPDAAGIDCGQNSHFVAVPPDRDPQPVREFRTFTADLYRLADWLVQCGVKTVAMESTGVYWIPLYEILEQRGLQVVLVNARDVHNVPGRKSDVKDCEWLRELHSVGLLRASFRPSAATVPLRSFMRQRETLVEEASTRIQRMQKALTEMNLKLHTVLTDLTGQTGLKIVRSILDGERDPEQLAAYRNYRCHASHAEIVAALTGNYRTEHLFALRQNFAAYEFLLKQIAECDGEIEALLTTLAAQQPPPSAPLPTARRKRVSKHQPQFDIRGPLHRLTGGTDLSQIDSIGPQAALHLIGEIGTDMTRWPTEKHFTSWLALAPNNKISGGRLLSSRTPPSANRAAVILRRCAMSLTKTSTALGAFYRRVAMRIGKAKALTATARKLAVLVYRVLASKLVYNDPGADAYHQLNRTRELKSLRKRAKLLGLELVDPSTGEVLVNPVF

SEQ ID NO: 355606 - protein, 410 aa, unidentified
MDTLIERCAGLDVHKDSVTACVRLPAAGGGREQVLATFATTTADLLALRDWLGALGVTVVGMEATGVYWKPVYYVLEERMQCWLLNARHLHNVPGKKTDTLDAVWICQLVEHGLVRPSFVPPPAIRELRNLTRYRKAQIEERTREAQRLDKVLQDAGVKLSSVASHLLGVSGRAMLQALVEGTRDPATLAELARGTLRKKLPALREALHGRFSRHHALLVGAILTKLDFLDEVISDLSAEIEQVIAPFAAEVALLDTIPGVDRRTAEAIVAEIGVDMSRFGSAARLASWSGFCPGNNESAGRRGPGTTRKGSKWLRTHVVEAAKAASRTKQNYLAAQYARLRPRRGTGRATVAVGHSILVAAFYILDRHQPYRDLGPDYFRRRHSREHHARRLARQLQALGYRVTLEEAA

SEQ ID NO: 355607 - protein, 553 aa, unidentified
MGRRASLLGELAEPPQLCCSGISSLKFPPNQINSNKKGEAPLFNEPSGFHLWHNLWAVCNEAAAETKGASPMKKRNIYQNQSQELLSLFETAGSSAKVMCVPMDYAKKDHLVMFCNGHGDIVRKPFSVKNSPEGLEYLLDQVTRSCRRRGIKKQHVFFGGEDANSFAENFVSTLRFKGWLIAGVNARDAKKQRTNLQASTDRIDLMGIATMLLNCRANCCPAQSGIYRNLRTLVRHRRKLVAMLTEVKNRVHGIVDRLFPGFLNENKSGIVPFTQSSLHLMENRFSPKQVRRRKREKLIEILKRFGTSKAEYTADKLQQSAAQVLHTPVEYVDTLQLSLAQHVKHIRCLQEGVAQLEKEMAINLAQTQGAFLTSVRGIGIVLAAGVTAEIGDPNEQKPLNNLVSYSGIIPRVKQTGGPDGKTYIYSVAKRCNRILKDYVVKSALHLGLHGPEDLMIDYKRRDASGQHADFGIGRRYLRMAMSLMRTSQIYIPPRLRKTDSTLEERAGYYLMSWPYLREKWKKYGALEAAFAKDRPLGLWRQIVQELYDIKLKL

SEQ ID NO: 355608 - protein, 334 aa, unidentified
MSKEIIAQNEEIVIGVDVSDAKHNIAVLNARSEIVVQREMRAPTREKWAKFLGRFPGCAVKVIYEAGPQGYTLYDTIREFGAAAVVIAPVKTIGIKTDRRDALRIVRDFVSGSAKVITVPDRKKRVLRQLLRQRHQIRKDIVRIKNRMSALTRFHGLVGTFRAVFTRKRDVQVLTFCFDQQQEMCAFLEKKRDEIDALLEEVARDAEYRDDIGKLKEIKGIGALTALEIVLNVADIRAFGDAASFASYCGLCPGEWSTGATRRLGHITRRGPGRLRGALVQCAWTAARCDPEEKKKFNELRTRIGKKKAIVAIARRLSVRVWNKLNIREAAQAA

SEQ ID NO: 355609 - protein, 429 aa, unidentified
MQESSSSASAEGVAAYVGMDWADQKHDVILRTASEPAKVEYRRLAQQPEALMEWVAELQQRFAEKGKILVALEQSRGALIYHLMGYEFLELYPINPSQLASFRQTFSPGGAKDDRPDAELICELLYCHRDRLKAWKPDDELTRKLTFLNEGRRKAVDQRTQLANEIKSQLKVYFPLALEVLDNDCSTALAADLLLQWPTLDSLQKQRAHKLRKFFYAHNCRQEQKLLERLELIKAAKPLTRDLAVIEPTALRVQLLAQQLKSLLPYIARYEKQIAELFDAHPDSFLFRDLPGAGSALGPRLLTAFGTDRERFERSMEISSLSGIGPVRRASGKKSGKHATVHFRSACPKFLRQSFHEFAACSIRYCSWAEACYETQRKRGKGHHAAVRAVAFKWIRILFACWKQRVPYDPQRYQQTLQTRGSEYAKITA

SEQ ID NO: 355610 - protein, 364 aa, unidentified
MVKKATRISRFVAAVEDRPIYVGLDVHKKTYSVALFDPEDGIVETYTCPSGEEALAEQLAGLGCQIAHVVYESGPTGFALSRALERAGFAVSVIAASRIPRGYAAAAKTDRIDAVKLANYFARGLLRPIAIPTVEQEGYRALVRRRKRIAESRGKIKQKIKGFLLASGIDEPASLQKWSLAASDDLSALPIPPEHRMALASMVREYLFLLSEDKLLRAEIRTATMRIHPDRFKRLTSIIGVGETAASHFLAELFSPERFNRAEEVTSYLGLAPVVSQSGNSKARAKLRPVGQKRLRGILVEAAWQWTWRDPEAKAIYNHHFAKHGIGQKAIVAVARKLAIKLWRMTVETPPSPVEGVARGAWSG

SEQ ID NO: 355611 - protein, 411 aa, unidentified
MEIVHARCWGLDVHKKSVVACVLITQPDGLIDRQVRTFKTMTADLLALADWLSSLGVTHVALESTGVYWRPVFNVLEDEGRTLLLVNPQHMRAVPGKKTDVRDSEWLADLLRQGLLRASFIPPAPIRAVRELTRYRKTVVQQRADEANRLQKTLAGANLKLAAVASDVLGVSGRAMFAALLDGERDPEVLAELARGALRSKLPQVRQALTGRVQPHHLVLISQILAPIDFLEQASAPVQAEIERCLPPFAEALALLQTIPGIKAVAAAAILAEIGPDMSRFPSSGHLASWAGLCPTNKESGGKRLKGPANRGNVWLRAIMGEVAWGSIRTHGTYFQAQFHRIARRRGRNKAAIAVAHSLLVVVYHVLRTKRPYAELGGNYFDQLDATRLEHHHVRRLEQLGYTVTLSPIAA

SEQ ID NO: 355612 - protein, 397 aa, unidentified
MIAVGIDVSKSKSTVAILNGHGSIRAKPFDVHHVADELQALVDYIKRTSEPPTILMEPTSHYHYPLLKAFTEAELPVCLINPYQMKKYGDTELRKAKTDKRDSLRIAQYALEKSYSLIPYTPQDQKYEDLRFLSRQYSQRISTLTVAKVQLLSLLDETMPGITTILPLKSRDPDNCVLLRFIKRFKSFDVIRKMGKTRFLDSYQVLVKKTKDRFAGSKGLAIYELVLNSVTTREENPLSAMTQDQCVDLVSTSQKAADEINLQMRIIAETMPEYKVLRSMAGVGDRLGPIILGEIGDIRRFHSGKALNAYAGNDAPPYQSGQFESRNRHISKRGNPALRKACFEVMQALKLTKPQDDPVYLFLLKKEQEGKPYNVAKMAAVNKFLRIYYAHAMELYK

SEQ ID NO: 355613 - protein, 354 aa, unidentified
MEASPRPPGARKPETELGAVSTTAVPHPDSRSGPSPHLQGRVMDEQRTVFVGTKDRLDVHLRPSGEAFFVPREGKGMDDLVIRLQGLSVALVVLEATGGFEATVAAALAGVGLPLCVVNPRQIRDFARAMGRLAKTDTLDAEVIALFAERVRPQARPLREPERVHLAELVGRRRQIIEMIGMETNRGRQAIDKPLARRLARHVAYLQKELDAIDHDIGDAIKHSPAWREAEALLKSVPCIGDVTARTLLAELPELGTVSRHQVAALVGVAPINRDSGLMRGRRAIAGGRTSVRAVLYMAALTAIRRRSPFRAFYDQLTARGRPKKVALVAVMRKLLTILNAILRDHTPWRPLNA

SEQ ID NO: 355614 - protein, 394 aa, unidentified
MKLIGIDIGKNKHFFCVMDQQTGEIISQPVSFSNDKEGFDFLVKKIKSYPKDSILIGMEDTGHYHFALLKYLLDLQYTVALINPKTTDFNRKMQGGITKNDKLDTINICDVLDTPERKKQYRITKVNSFDLYEQKQLTRHHHNLKEEENVYKNRLQKCIDIVFPEFNKLFNSKYGIVYMNILKMFGSAENIANTDIRTIRKCFEIEGRDNCISLTPERLKVCARSSIGISSSAEVIQIKHLTAQIELIEEQLTEIDKKIEEFSIQNNSPILSIPGISHFSGTSILAELGDISNYSKPSQIIKFAGVAPLHYESSQFNAQHTAITKKGSKYLRKTLYQIILPVIRHNPVFNKYYQLKISQGKGHRCAQGHCVRKPLRIIYHLLKTNQQFDPQLLR

SEQ ID NO: 355615 - protein, 434 aa, unidentified
MKKSRTYRAKSVKDVDWKEVVKGRERQAAHVGVDVGKRAVLAVVRWNGDEFDRPWLVKNPDEIRQFVGLLVDIKRDRELTVAMEPTGTYGDVLRQALFDAGIRAERVSPKVAHDYAEVFDGVPSQFDGKDAAVVAELAVLGKSQEWKYETPNVADQEMAYWVDWMDAQRKQAAMWLGRLEALLARHWPEATRWLRLSSPTLLRILNHYGGPKGLADDPQAVALVARWGGRYMAVEKTRGLVASARETVGVRQGQIDVRRMQAYAATALAAHRELVQSKHRLTKLARGNAVIQAQARAVGVVTACVLWTHLGDPRDYFCAAAYRKAMGMNLTEHSSGEYQGRLHISKRGSAVVRRWMYFAALRWIRNGPGRRWYLRKRARDQEGAKRALMGVMRKLAKGLHYVGTTGEPFQPSRLFSGQSSRSRKVRKASLARRS

SEQ ID NO: 355616 - protein, 427 aa, unidentified
MEVLFDVAAGIDVHRDILVVSVRRASEKGREKVETRTYSTFHDGLVQMVAWFDEQSVPVVGLESTGVYWKPVVLALRQISPSRLVWLVNPAEVKKVPGRKTDVKDSEWLSKLVLHGLVAPSFLPPAEQAELRQLTRFRNKAVGNKTRTKNRIIKELESSGIKLASVCSDPLGKSGRAMLAAMLEGNKTVDEIANLARGKLREKIPNLKRALAGRFTEATRFILRQLLGDLSHIERDIQALDEQITQRLTPYQREVDLLLGMPGLERVAVAAILAEIGPDMSVFEKADRLAAWGGVAPGSNESAGKAKRAPARKGDKYLRTILVQAAQAGKNKRGSWWRETYYRLVPRLGQPKTIMAIAHKMLVAAFYMLRDSVPYRAPSPQPVPPAKASRLVQQYTKKLAALGFDVALSPIAALPPAAPAAVPAPTT

SEQ ID NO: 355617 - protein, 355 aa, unidentified
MGMDVSKDWIAVAVMQPEEDAPSVVEKIFHDEVSIRRFVRQFRTPARLATCYEAGPTGYELHRLLTSMGVACEVVAPSLIPKAPGERVKTDRRDAKKLVRLHRGGQLVAIRVPSPAEEAVRDACRARADMVDDLSRARKRLGAFLLRHNHIYRDGTTWTMKHHAWLRAQRFEERAMTVTFGHYLGVVESREAELDAMEAELRPWLKDSLFASQIARLCAYRGVAGFGALTLTSEVCDWRRFPAAGAFMGFCGLTVSEYSSGASTKRGHLTKTGNNHIRSQLVESAWAYQHRASVGAALTRRQEGLDPDTVARAWAAQLRLTARYRKLLARKNNKPVVIAAIARELAGFLWAEMVA

SEQ ID NO: 355618 - protein, 414 aa, unidentified
MKPCLFVGVDTHKDSHTAAVLDGYFDVVTTISFDNNKAGFGLFEEKLKKLGCERDLVFGLEDSQGLGSFLARYLAGKGHTALEINPVSTDRGRKHTVSRDKSDEKDAILIAKTLIRERGTLNPVRINQNSVALREMVGYRQMLVSESTRIKNRLHIALFNQYKEILGHFGSIFNKCALAFFASYSNPSLLEKIDLDTLSVFLKANSKGRYGDKKARAILSSTDNNIADSLSDTRAHIISAHIDRLVSIQQELKKIQDILVELVKASSYYCLTSIPGIDIVTAAKIISGVMDISRFSSSSKLAKFCGIAPSEKSSGRKKRYEKSKYGNKSLHSTIYFIALSHISRTRNGRDKNPLSRAYYLKKISEGKTKKEALTCLTRRLVDLIFAVMRDRSIYNFSKSKFTKQKDIILNTVAA

SEQ ID NO: 355619 - protein, 329 aa, unidentified
MVSLGIDVSKGRLDCALLADGGGKPLGRRAFPDDAGGTEQAASWATRVSGATAADTHVILEATAAYHEPAARRLAALGTRVSVVNPAQVRSFAKGIGILGKTDRLDARLLARYGQLARPRAWQPPAEAVADLQALVARLDDVEADLRREKSRLEQARTRGCPGIVEQSLLESIAALKSRRGSLRRAIVAHVAAHGELQADLERLLTIPAVGPKTATRMLALLRARGFESARQAAAYLGLVSVEHQSGKSVRGRPRLSRAGNPRLRAALYMAAVVGIRRNPDIKAQYERLLKAGKCKMAALGAAMRKLVHLCFGVLKGGGDYRAGVATPA

SEQ ID NO: 355620 - protein, 377 aa, unidentified
MPHPLEPDGTLIAVIEMSLSSWLVAGIVPGVERQPLKKLAVDESMLLKLLHRWREEAEKAGYMIKRIAVAFEAGRDGFWLARWLRARDIEVHVIHTSSVAVSREHRRAKTDRLDTELLKRAFLGWLRGERDHCKMVAIPTIKDEDGKRPNRERESLVGEQSRIINRMKATLVRLGIRGFNPKLKKAAERLEGLRTPEGEPIPPNTLSELRRDMERRRLVRNQIRQIESARRDRLEHAPGEGAHAMVRLLARVMGIGIETADMLVREVLSRNLRDRRAVARYAGLTGSPDESGKKRREKGLARSGNPRVRRGMIQLAWRFLLFQKDSALAQWFRVRTENARGTRKTMIVALARKLLIALWRLVRQGVVPDGVVLRPAQ

SEQ ID NO: 355621 - protein, 439 aa, unidentified
MKHKKALGKRARRSRPLLERVNPNAAGIDCGSEMHYVAVPAERDPEPVRCFKTFTGDLHQLADWVVSRGVKTVAMEATGVYWIPVYEILEARGLEVLLVNARHVKNVPGRKSDVSDCEWLQELHSVGLLRGSFRPIAEIAALRSYVRQRETLIESAATTINRMQKALVQMNVQLHVVISDITGATGQRILRDIVNGQTDPQHLAKHRDGRCQASEAEIAAALTGNYRPEHLFVLKQNLELKAAPPQAPLPAARTRRKARSNEPKFDVRTPLHQLSGVDLSQIDGIGPYNSLRLISEIGTDMSRWPTEDHFASWVTLAPHNKITGGRLISSRTQPSANRAADILRVAAMSVGYTQTALGAFYRRLASRIGKAKANTATARKLAILVYRVLKGEIVYKDPGADAYNARHRETVLRRLRRQAAVLGFGLVNGQTGEILEGVS

SEQ ID NO: 355622 - protein, 344 aa, unidentified
MGNVTTIGLDLAKSVFQVHGVDAEGAVVLRQRLTRTRMLKFFAKLPSCLVGIEACASSHYWARELIALGHDVRLMPAQYVKPYVKRGKNDAADAEAICEAVTRPTMRFVGIKSPEQQSAMMLHRVRLILSRQRTQLSNALRAHLAEFGIVAPIGRNGIERLLDVIADADDGRVPAEARICLEMLAAQLRVVKQQILENDRRIMASARETEVGRRLMEIPGVGPLLASAFVATIADPAIFKSGRNLAAWIGLVPRQNSSGGKERLGGISKAGNRYLRQMLIVGAMAVVRHAERNGAKRPWLVQMLARRKAKVAAVALANKTARTIWAMMTSGEHYREPLPALAAA

SEQ ID NO: 355623 - protein, 369 aa, unidentified
MTHVTSIGLDVHARSVAAAAFNPFTGEVVRRSFGTDASEIAEWALGFEDPRACYESGPTGFHMARELRALGLDCAVAAVSKMQRPAADARRKNDRRDAEFIARMLATHNIVEVPLPDMAVEAARDLDRALDDATRELRRSRQRLNMFLIRLGHVWDERNADGARKKAWTRAHWRWVSEIRLEGPQRDALEYYVTAARCAESDRRQLERRVVALAGTDRWRATVEALSCIKGVDTLTAFRLAAEAGSFSRFRSAPAFASWCGLTPSEHSSGESERRGGITKAGNALARTALIESAWHYSTCSPRPKAPAPGTDVPPAIRSRADDCTARLHRRREALAAAGKSACKANAAVARELACWVWEIGCRSEGTVL

SEQ ID NO: 355624 - protein, 347 aa, unidentified
MTLYIGVDFHPHQQTVAWCDTQTGETSTCTLQHNLSEVLKFYQSVSPSIVGIEASSRAVWFEQLLSETNHQLLVGNPTLIRARARSRHKSDARDAQLILDLLVKDEFPAIWRRSAASSQIIDVLHLRRQLVGQRTQTYNRLQALAHSGGLPKGKMKTLGFQSLLKQVPMNESSQMQRDHLFSLLAQLTKQIRELQSWLRQKAASDNQVQLLLTQRGVGYLTALATVHTLGDVSRFQKVSKQAIAFAGLDSLEKSSAGKTRFGRISKAGSPLLRGLLGQSANIVVRYDARLKAFYKGLAKRKPKAIAKTATARKLLVKLAIMLRDNITAEEFDRRGESSWQCSILDKV

SEQ ID NO: 355625 - protein, 356 aa, unidentified
MPTMPDQALEVILGVDTHEEEHVAALVDDLGRLLATRSFKATTRGYRGLLAWARTYGPLVRAGVEATGSFGVGLARFLAAEGVDVIEVTRPNRRGRRHLGKTDTVDAEAAARMVLSGEATATAKRRDGAVEAIRVLQIARRSAIKARTQAGQQIRSLIITAPAELNGALAGLTLKRQVTRCARLRRGAGDDASGSTRRALRSLGRRWQQLDDEARELERELATLIKTAAPPLLAEPGVGPDTAGKLLVIASDNADRLRSDAAFAALCGVSPIEASSGKTKRHRLNKGGDRQGNNALWTIANNRLIHHPETRAYAIRRSAEALSRREILRCLKRHLARRLYRLIVADLTAAAALDLT

SEQ ID NO: 355626 - protein, 343 aa, unidentified
MGEVSTIGLDIAKSIFQIHGVDVDGAVVIRKRITRAKLLEFFAALPACLVGIEACPTAHYWSRRLQALGHTVRLLPPSYVKAYVKRGKNDANDAAAICEAVTRPSMRFVATKSEQQQSGLMLHRSRQLLVCQRTMLSNAIRGHMAELGVIAAKGRNGTAELLKIIANEQDDRVPAAARFSLDVLARQYAVVRAEIVAIEKRIHAWHRSSEESRRLEEIPGVGPIVATALVAEVGDWKEFTSGRSLAAWIGLVPRQHSTGGKQRLGGISKQGNRHLRWLLVAGAMAVIRYARQHGTKRPWLTRLMDRRPIKVAAVALANKIARMAWAMMVRGERFREPKLLPAA

SEQ ID NO: 355627 - protein, 353 aa, unidentified
MTSIKYIGMDVHKESISIAVRNAAGKIVMECVIETKANAILDFIHGLRGELQVTFEEGTWATWLYDLLKPHVTKLVVCDPRKNSRQGNKNDQIDARELADRLYMNKLSSVYHGGAGVRTLKELARSYLTISKDLARVMSRVKAIYRSWGIPCAGKQVYAPRHRADWLAKITEVGVLRRAEFYYQQLDALRSLRHEVRRDLLAESKKHKATKLLCQIPSIGPIRAALLIALIQTPHRFRTKRPLWKYSGFAIETHSSADYRSVKGQLQKAKKQVSVRGLNRDCNHDLKNLFKSAATIASVKPGPFQEFYAALVAKGMRPEMARLTLARKIATIVLIVWKKGVSFDAQYLKPQTA

SEQ ID NO: 355628 - protein, 354 aa, unidentified
MSNEKYIGLDVHQATISVAVMDSMGKVIMESILETKASTILEFLAGLRGSLFVTFEEGTWAAWLYDLLKPHVTEVLVCNPRKIALLKHGNKSDKIDARKLAERLRLHDLKPVYHGQTGVRMLRELARSYLTVVKDLSRVMNLKALYRSWAIPCAGRDVYYKRHRSQWLEKIPEAGTRRRAEQIYEQLDLLRHLRQQARRELLAESRRHAITAKLRQVPSLGPIRSALAVALIQTPHRFRSKRQLWTYSGLGLETRDSGEYHYVQGQVRRRKKQATIRGLNKDYNHDLKGVFKGAATRASVKPGPFQEFYQRSLAKGIKPTMVRLTLARKIAAITLTLWKKGEDFDINKLNSQAA

SEQ ID NO: 355629 - protein, 392 aa, unidentified
MVVSVGIDVSKDKHDCFIVSSEGEVLADVFMIPNTMDGFRSLLQRIWECCDSQDKIKVGLEATGHYSYNLLGFLLDNGLPTYVLNPLRTNIYRKSLSLRKTKTDRVDARTIASMLLSDVGLKPYTDTAYHNEELKSLTRYRFDKVKERAKLKGSIARLVCILFPELEKLVPSLHFASVYALLEEFPGAKQIAAAHLTRLKALLETASKGRYKRDTALEIRDAARNSIGSWMPAKSLELQHTIRLIRELDNEITEIEEQIQTIMDELNSPITTIPGLGFRMAAMIFAEVGDFTRFDSPDKLLAYAGLSPSTYQSGQLKNCYPHMEKRGSRYLRYALYNATKYVCHWDPTFAAYLAKKRAEGKHYNVALSHATKKLVRLIFAIEKSRQPYCSAT

SEQ ID NO: 355630 - protein, 317 aa, unidentified
MQGCREIHGVDVAKDEVVAAAHGQTHVRTVANERKAIDTWLAALPKGSIIAMESTGIYHRLLAQCAHAAGMQVYVLNARDVHFYAKALGARGKTDRVDAGLIARYAAEHHAKLHAWQPGDSAHRRIQELLSRRAMLVTKRESVRQAFKGERDLAGQLKQLDGCFEKVLAAIDAKVDKLIAADDALTMGRQRIASVTGFGPQGSALLAVLFARIPFANADALVAYAGLDPRPNDSGKKRGSRKLSKRGPGHLRRQTYLSGFSASKSNALKPLYKDLRAKGFATTEAFVILGRKLLKAAFAIWKNGQPWEPAKLLPKSV

SEQ ID NO: 355631 - protein, 374 aa, unidentified
MNGRIPQYQAHYAKQGGDKLINIGIDVHKRRCVATLKDSSRQILQQITFDNDSDGITKFIDSIKQRYDAARAVCESTANYWIRLHDTLEENGIDTILAHPAKTKIIAQARLKNDKLDSEVLADLLRADMVCESFVPDKHYRELRNLVRTRLGLIRTRTTYKNKVHSILAKYEHHCPTYKTFSKKGIKWLKEIKLSETDRMAMDAYLDGINTTQKQIDIFESHMASIAQDDKRIILLMTIPGINYITALTVISEIVDIKRFATPEKLVSYAGLAPSQRNSGDTKKSGNITKHGSVWLRYAMVEAAHTAIQHDERINRFYSRISARRGPQKAKVAAAKEMLVIVWHMLHNMEPYRTQNHCLTQRKYKRMQRQSKST

SEQ ID NO: 355632 - protein, 407 aa, unidentified
MQTLHKRCAGLDVHKKEVVACLRLVARNKASHEVRRFPTTRGLVELAEWLEEAKCSHVAMEATGVYWKPVWHMLEGRFALILANAAHIKGVPGRKSDTNDATWIADLLAHDLIRASFVPPRPIQELRDLTRTRKQLTREIVQHTQRIQAVLEEANVKLSSAITDILGQSGRRILKAMIAGETDPDKLASLGSPRLASVRFELSAALHGRVRDHHCFLIGQHLKTIEQLEQTISDFDARIEAALAPFRDTIERLKEVPGLSETSAQILLAEIGMDMSQFQTAGHLLSWAGLVPRLDESAGKRRSTRVKKGGPWLKPVLVQCAWAASRKKNSYFQAQFLRLKSRSGPKKAAIAVAASILATTYHMLADGAYYHDLGNDHFARRDPARVAQKLADRIRNLGYQVDIKVAA

SEQ ID NO: 355633 - protein, 452 aa, unidentified
MTEKDKISMEIVNPRAAGIDIGSRSHWVAVGQGSNDFKEFGVYNEDLYSIAQWLRENEIKTVAMESTGTYWQSLYAVLMAEGFQVILCNGKFTKNIKGKKTDIQDCQWIQKLHNIGLLSGSFLPDEATEQLRTFCRHRSNLLDSAASASKKMQKYLRLLNLRLDVVVNDVCGLTGMTIIKAICNGEKNPEKLAELRHHNCKKSEEEIAKALHSNGRQDYLFALKQELEMYELFQAKITQCDIEIEKMLQKTIDDDDDKKQHFIEKKTYKKVNKNSPKNIDLNLMAYQYFEGVDLMAIEGMSYSTVLSLISEVGVEGIKKFPTAKHFTNWLRLAPNNKISGGKVLSSKVPKGSNRLKIALRNAANAIGNLKDSTPLSDFFKRINFRKGRVSAISATARKLAVIIWNMVVKGVPYHNPEEYLFRDQKKKLGLLRKIQKQITKFELESTDFQFTN

SEQ ID NO: 355634 - protein, 323 aa, unidentified
MQGKVSFQEDAMPVVYAGVDVSKEWLDVHLHPLGESRRFSNDKTGIRQLKRLLARHQPKSIVMEATGKFHRPAHRSLWLDGFAVAVVDPLRARMFARACGYLAKTDRLDARFLALLAESLRPPADTPPSPHVEALQELVNARSAAKCDITALQNRSKTATTALLRGELNRRVRRLEQHVERLDKEIERRVGEDPQLYRKAEILTSIPGIGRVTALALMAGMDELGSCSGKQAAMLAGLAPIANDSGARTGRRSIRAGRPAPRRALYMAALSACRYNPALARFADTLKAAGKPAKVILVAVMRKLLVLANCLLAHDRIWTPNPP

SEQ ID NO: 355635 - protein, 388 aa, unidentified
MPKPVDLSKSLAALDQDSTLIVVIEMSQSSWLVAARAPGLARDPLKKLPPEPEQLFKLIDRWREESRRAGRVVRRVCVAFEAGLDGFWLARLLRHHDIEAYVIHPTSIPVKRDHRRAKTDRLDTELLMRAFLGWLRGEADYCSMAAIPTLAEEDAKRPTRERESRVNARSRLVNRLKGALARLGIRGFNPKLRKAAEKLEALRTGAGEPLPPNTLAELRRDMAQLRFVSDQIKQIEKAREARLEKAPREGAHPMVLMLASIKGVGLETAEMLVAEVLSRKLRDRRAVARYGGLIGSPDESGSRSREKGLARSGNARVRRGMIQLAWRFLMFQKESALAKWFEARTANGPSGVRKTMIVALARKLLIDLWRFVEDGTVLVGVELFDSRA

SEQ ID NO: 355636 - protein, 343 aa, unidentified
MKPAPAVHPVTTHPNPLRHVGVDVSKDTLQLDAGDLFHGEIPNTPAEIAKRLKALRKKAPLHVSCEATGPYDRPLVNTCRALGLPVSRLNPARVAQYRKSQGIEAKTDKEDAHVIHLFVSKHPPAPLPPPDATRDTFRQLHLVRDMLVAQRAALSNLRETVNLPVARKPLDAALRALDARIARLDAQIRRATDAAEPAFRGLVGALDGITGIALLTATKLAAHVPELGTLSRRRAASLSGLAPFPDESGDWSGPRHIKGGRKPVRDALYMAALTATTHDEVSRGVYQRLVARGKHHNVAITAVMRKLFYHANCVAARHQRSLVLPAAGTPPADASRGVPNADA

SEQ ID NO: 355637 - protein, 340 aa, unidentified
MNQSMTIGIDLAKHIFFVAALDGSGKPARRKKLRRHEVLPFLANHPGAVVGMEACSGAHHWAREIRALGHSVQLLPAQHVKAYLRGQKNDYNDALAIAEAVQHGRIRCVEIKTVDQQLDQSLHRLRQALVTEQTGLINRTRALLAEHGVDLPEGKHRFRQAVLAQLEDAQNGLPWRLRELLGRQYQLFIALEQELAWYEREIKTKAAENEACQRLMSVPGYGPIVSSAFYGWLGSGQQFRCGRDVAAALGLVPKQYSTGGKTVLGSISKRGDRHLRALLVHGARAVARYAKERDDRLSRWVCSLIERRGYNKAVVALANKLARIGWAVVARGQAYQAVPA

SEQ ID NO: 355638 - protein, 341 aa, unidentified
MKKNLFFIGLDIAEADFAASIYKTPDQPIVTKEAIPNDRKGFDLLLLWLYDHHIDKKNCRICMEATGVYSQAIAYYLLLAGFPVSVEPPLKVKRAFDPIGHKTDPVDSKQIAEYAYRFQDELTSWQPRDEILEKIRQLLSVREQFTKQKVALKNAMHAYSRQRVQVALIKKAHQETLAQIEKQIVRIDKELAKLIKQNPQILQKADYLKSIPGYGMLLAAHLLVITENFTKIQNSKRLASFVGIVPYQHQSGTSVFKRAKIRHFGPGPSRKLLRLAAQSVATHDVTFRRYYLRKLAQGKAKSLVLNNIANKLLKVACAMIRNNTRYIKEHRSIHPMYLKSA

SEQ ID NO: 355639 - protein, 365 aa, unidentified
MARIPQQGPIHLGLDVHRNTISIATLLPDQASAAVEQIPSDETAVLAFVGRFAEPGRLRVCYEAGPTGYELARLLHRQGVACQVIAPSLIPRAAGDKVKTDRRDSRRLARLHRAGELVAIRIPTPREEAVRDLCRARADLVDDRSRARRRLQAFLLRHGRVYRSGACWTGKHQRWLGTQQFDDRQLQATFAHYRAVVTSRDAQVTAIEADLTDAAIQAPFADAVARLAAYRGVGQLGALSLAAEVGDWRRFAHAAAFMAFTGLVPSERSSGDSVWRGHITRTGSKHLRFQLVESAWSYHHRPLIAGALRERQQQVGPDTLARSWAAQLRLCRRFRQLERRKHIKGVAVVAVARELAGFLWAEMQA

SEQ ID NO: 355640 - protein, 347 aa, unidentified
MRFYTKPHQFYGGIDLHARTLYLCILNQDGEVVLHRNMRAAPEPFLKAIAPYREDLVVCVECIFTWYWLADLCTQEGIPFVLGHALYMKAIHGGKAKNDKLDAHKIAVLLRGGMLPQAYVYPAEMRATRDLLRRRMHLTRKRAELLAHIQNTNSQYNLPEIGKKLAYKANRDGVAERFPESAVQKSIDLDLTLIDAYDRLLTDLELDLVRTAKEHDAQTFYRLRSIPGVGKILALVLLYEIHDIHRFPRVQEFVSYCRLVKCAKESAGKRYGTSGKKIGNASLQWAFAEAAVLFLRNNPAGQKYLARLTKKHGKGKALTVLAHKLARAVYYMLKRESVFDMDKFFNE

SEQ ID NO: 355641 - protein, 337 aa, unidentified
MKHTVIGMDIAKRVFQLHAVNPETGEIERIKLARGEVLPFFAQRCPSLVAIEACGSAHWWGRQLTALGHEVHLIAPKSVRPFVIGNKTDAADARAIWTAIQQPGAHFVSIKTEQQQAILALHRMRAQLMKFRIMQTNALRGLLYEFGVVLPEGVRALAKAWPAALATVADQLPAMLIDSLREQWARVQTTEAEITAIERRLSSALRESLPCQQIAAIPGVGLLTATAAVAVMGNANTFKSSREFAAWLGLVPRQTGTGGRIRQLGLSKRGDTYLRTLLIHGARSVIAKAHRSPWIEALLKRRPYSVAVAALANKLARTIWAILAKGRAFEPAAFCGT

SEQ ID NO: 355642 - protein, 367 aa, unidentified
MKKVSTVAAKQNRNNSQQKLTVGLDLGDRNSWYCMVDEAGQIQLEQRVRTHGTGLQEVFASMPHSRIALEIGTHSPWVSRLLSELGHEVIVANARKVRLIGESRKKDDRLDAQTLARLARIDPELLYPVKHRSAQAQADLMMIRARAGLVRARTGLVNTARGLAKSYGERLRGCNVRNMNPEKAEGLSPELQRALEPLLAGIEAVSERIREYNQRIEQLAQQSYPRTALLKQVKGVGTLIALTYMLTLEDPHRFGKSRDVGCYLGLQPGRRNSGRSEPQLHISKEGDPYLRTLLVQGAQHILGPFGIDCDLRRWGLKLAERGGKSGKKRAIVATARKLAVLLHHLWVSGEAYEPLHNSRRTTVAAAA

SEQ ID NO: 355643 - protein, 357 aa, unidentified
MFYAGIDAHTRYVVVVIINRMGERVLGPTRVKVEHRERLLALLAPYRPLDAIMETSSSWPWLHEVLTGAGVHFVLAHARRLRAIADANYKRDDIDAELLARMRVAGLIPEVYPTPYAQREWATLLRHRTTLATQRTALVNRIHAQLHMRGLHLERGRLLTRAGRQWVRTEAWAHFGLEQRALVRSHLRVIAGLRPLIRALDRHIAQVAAMIPEAQVLGTIPGIGPQRALVICAEALPIARFRTPGHLASYAGLVPRSKQSGLAPVRHGSIPAGSNRWLRGALVRAVVTHVQHAPESWLTRYYVAQKARVGWPTARIAAARKLARAVHAMLRTNSCWRNSTTDPVRGELEEPHAALTA

SEQ ID NO: 355644 - protein, 425 aa, unidentified
MRFIALDVHRDFCEVAIAEGGQVRLAGRVETTPAGLELFAQSLGADDQVVLEATGNALAIARVIEPHVARVVLANPKAVKGATQTAKTDKLDARMLAKLLAAGFLPEVWTPDEQTRVLRRRIARRAQLVGQRTREKNQIHAILIRNLKARPPVTDLFGVQGRKWLSEQGLLDDEREMVEACLRGIDFLDREVAGLERALAELVLASDELRRLLTLPGVNFVTACALMAAIGDVARFPTARHLVSYLGLDHRVRQSGSEPARHGRISKQGPGEARHVLVEAAWHAARTTGPLRAFAERIAARRGANVATVAVARKLAVIAWHMLTRGEDYAFVRPSLVREKIRRLELMVGAERRQGRRNPVRVFATSEQHRLEKELAAQAELAYRRLMVDWKAQRRKGTGAAPGRASRRPSSGQAARQETAPPPAL

SEQ ID NO: 355645 - protein, 338 aa, unidentified
MKLYGAIDLHSNNNVTVLIDEQDQVVYQKRLPNDLPLITQQLSGYRDRLQGIVVESTYNWYWLVDGLMDQGHRVHLANTAAIQQYEGLKYTDDHSDARWLAHILRLGVLPQGYIYPKEERAVRDLLRKRGQMVRQRTANLLSIQNLITRNTGSSIRSNRIKTLDAEQVDDLLPNSDLALAVKANLAMIQCADGQIDILERTVTDRIKLRAAFGFLKTVPGIGQILALTIMLETGEIKRFPTVGDYASYCRCVGSQKLSNGKKKGSGNTKNGNKYLAWAFVEAANFAIRYNARIKSFYQRKKAKSHGVLAIKAVAHKLCRACYYIVRDQVPFDIAKAFT

SEQ ID NO: 355646 - protein, 454 aa, unidentified
MGKPIKGRRLSLECIEPNAGGIDVGATEIYVAVPPERAAEPVRCFKTFTSDLREMAAWLERCGITTVAMESTGVYWIPPYEILEDAGIRVCLVNSHYVRNVPGRKSDVSDCQWLQYLHSVGLLKPSFRPDAAICALRSLSRHRAGLVESAAVHIQHMHKALTQMNLQIHHVLSDITGISGMSIVEAIVAGQRDPGQLAGLCHAKVQADRQTVIKSLTGNYRPEHLFTLKQSLAAYQSYQRLLAECDQEIQRLTNSMSGKIDPGAPSSSTPSSPQKRRKNQFHFDMRSELHRLFGVDLTAVPGINALTAHTLLAEVGPDLSRFPSADAFANWLALCPGNKKSGGRVLSSRTRPTNSRLSHALRVAAQTLARSRSYLGNFYRSMRARLGAPQAITAAAHKLARILYHLLSTGDAYDESVFAREQQKQNLRLHKRLAKQAQSLGFQLIPLNSAGACS

SEQ ID NO: 355647 - protein, 405 aa, unidentified
MEIFVGIDWAEAHHDICVLNEMGMVLAKRRIAEGLDGVGQLHALLADHAAEPNQVVIGIETDRGLLVGALLAAGYQVFAINPLAASRYRDRHSTSGAKSDPGDAKMLADLVRTDRHNHRPVAGDSELAASLQVLARAHQNLIWSRQRLVNQLRSNLREYFPAALAAFGTDLAHPLALGVLDAAPTPAMGRTLSQSKLAAILRRAGRERGVEEKAAAIQAQLRAPQLAAPALIGEAYGKSVAATVRILRELNAQLASLAAELTQSFEGHPDAELYRSLPGLGVVLGARVLSEFGDDRTRFAHPKARKNYAGNSPITKASGTRRVVLARMARNRRLADACHLWAFCALSGSAGARHYYRTLRQRGKTHHQSLRALANRLVGILHGCLDHGQVYREDIAWPQSPTVAA

SEQ ID NO: 355648 - protein, 383 aa, unidentified
MARSKPKASRTVPPAPALPPQLAAANLHAAGIDVGAEAHFVAVPPSDDPQPVRGFGAFTADLEALAAWLVACAITTVALASTGVYWIPLFALLEARGFEVLLVDPQQVQKIKGRPTSDVHDCQGIQRLHTFGLLARAFRPTDQVCVLRSYLRQRAMLLTYAAQHIQHMQKALTQMNIKLQHVVSDITGVTGLAIIRAILAGERAPGTLAQLRNAHCKHDETTIARALQGNWRDEPLFAVAQAMALYEVSHQKIAECDRHIEASLQTFADRSEGQPLPPAPRPRKRGRNQPAFAVRDPLYRITGGDLPQIEGIDETTSLVILSEMGLERSRWPTVQHFTSWLGLCPHHRVSGGKVLSRRTKPCANRAATALRLAAACLHHSQSA

SEQ ID NO: 355649 - protein, 356 aa, unidentified
MDNRKYIGMDVHQASISIAVGDAAGKVLMECILETKAATVLEFIQGLRGSLWITFEEGTSAAWLYDLLKPHVAKVVVCDPRKNALLKAGNKNDRVDARKLSDLLRAGLLTPVYHGESGVRTLRELSRSYLAASKDLTRVMNRLKAIYRSWAIPCAGQQVYSPRHRAAWLEKLREAGVRRRAQQTYQQLDFLMGIRKETRKELLAESRKHPARKLLEQIPRLGPIRVALLIALLQTPHRFRTKRQLWNYCGLGLRTRSSGEYRYTGGQLQHARKPPALRGLNVNHNHDLKNLFKSAATQAGACKDDPLGEFYQNLLAKGMQPPMARLTLARKIAAIALKIWKKGERFDPAKLKQQAA

SEQ ID NO: 355650 - protein, 342 aa, unidentified
MSGMIIGLDLAKSVFQVHAVDADGKVVITRKVRRSQMLEFFGRLNPCLVGMEACPSAHHWARELSALGHEVRLMVASYVKPYVKRQKNDMVDAEAICEAVTRPTMRFVPIKSESQQAILMVHKTRALLVRQRTMLVNALRGHLTEMGVVAPKGIRRHADLVERVLAHGADEIDLPPLVRDIVLSSARQIGSLNAEIKELERKILEWHRTSEASQRLATIPGVGVITASAMAATVVDPAAFRSGRDLAAWLGLTPRSNSSGGKERLGRITKAGNRYLRTLLVIGATAVVGFSRRTTEGPLMSWVRKLLQAKSARLTTVALANKIARICWAVMARKAVYGEAAA

SEQ ID NO: 355651 - protein, 347 aa, unidentified
MSHYVGLDVSLDTISVCIVDEMGKVVREEEISSTPEAIRGFLLGTGLAIKKIGLESGNLTHYLTKGLLSLKYEVVVMDSRKMAAILAVTINKTDKNDARGIAEALRVGHYKQCVHRSDDALETRTLLHGRGTLVDERTHLVSSIKGHLKVYGVKLGKGTGKTFREKVEASISALKMSTRKTIQALLNVLDVLEEEIKKLNREVVELGKEDADVQLLQSIDGVGPITALAFKAEMDNPARFKDSKDAGAYVGLTPTQYSSGETQRQGGISKRGSRRTRCLLVEAATALLMRSRKWSKLKAWGMKLMKKKGAKKAIVAVARKMAVMMHRMLITKEPFKRTNKPKEEKAA

SEQ ID NO: 355652 - protein, 386 aa, unidentified
MPKPNDLSRSFTAFEQDSTLIAIIEMSLTSWLVAGILPGIERHPLKKLGIDEEALLQLLHRWRDEAINAGRKITRIVLAFEAGRDGFWLARWLRARNIEAYVIHPNSVAVSREHRRAKTDRLDTELLKRAFLGWLRGESDHCSMAAIPTLGEEDARRPNRERENLLGERTRIVNRVKACLVRFGVRNFKPTLRKALERLEALRTPEGGPLPPNSFAELRRDMVRLRFIMDQIREIEETRLQRLVHNPEGGSHPMVRLLARVIGVGIETADMLVHEILSRNLRDQRAVARYAGLTGSPDESGKRRREKGLARAGNARVRRGMIQLAWRFLMFQKESALAQWYRSVTNEARGAIRKTMIVALARKLLIALWRMVRTGEIPQGVALRTA

SEQ ID NO: 355653 - protein, 351 aa, unidentified
MFIIGVDYHPSDQYIAFVDTETGECGEQRLNHREGEAEKFYRELAARGVSVRVGMEATGYSRWFERLLAELGIEVWIGDAAKIKSKRVRKQKTDREDARLLLRLLREDNFPRIWVPSPENRDLRQLLWHRHRLVQMRTRIMNQLQALAMNEGQRRKKKLWSEVGRAQLEKLPLAPWASRRRKDLLELLDRMNPTIEELTRAVEQEARKRPEVQRLVTHPGVGPITALAFVLIIGTPQRFPCGKQIGSYVGLIPEEDSSAGHQRLGHITKQGSSLLRFLLAEAAQAAARCDAGWRRRYAHLALRRQRNIATVAMARRLAVRLYWMWRNGWEYAEWVKFGPHAGQLGTGHGVN

SEQ ID NO: 355654 - protein, 413 aa, unidentified
MSIEAQEVRCFFTFTEDFEKLRDYLVENSIETVAMEATGVYWSILYDMLEEAGMDVWLVDGAQTKQVPGRKTDVKDCQWIQQLHSYGLLNRCFVAESDVKELRIYQRLREDQIRSASMHINHMQKALTEMNLRLTEVLDQIHGVSGLAIIEAILKGERDKEKLLRLCHSKIIKNKKDEVLKALNGRYTKAGLFALQQAFDSYCFYQHQIEQCDKMLEDVLKRMSKGKPNQTISSHRKPIRHNKPDIDNLGTEMMKIFDGKDATTLSGITDYTWMQLLSETGTDLSRWPSEKHFTSWLGLAPGQHTSGKMKKNKRKSGRPKAGQIFRQIAQSLLTSKRIALGAFGRRLGSRKGSPVAIKAIARKLAVLYWRIMVKGMEFVEKGIHDYEERLLAQKQRSLNRLAKELKIQVVYNV

SEQ ID NO: 355655 - protein, 389 aa, unidentified
MIYVGIDVAKDKHDCFITNSDGEVLFKSFTIPNNREGFETLFQRIGSVSDDLTKVKVGLEATGHYSYNLLGFLLDKGLTTFIINPLHTNLYRKSLSLRKTKTDKVDSCTIATMMMSDMNLKSYSDTSYHNEELKSLTRYRFDKVKERAKLKSSVSRLVCILFPELERLVPTLHMASVYALLCEFPSADAVANAHLTRLSNLLFDSSKGRYGKDTAVMFRDAARSSIGSHMPAKSLELKHTIKLIRELTIEIEAAIKRIMDEEIQSPILTIPGISYRMGAMIIAEIGDFSRFDSADKILAYAGMSPSTYQSGQLDNCYSHMEKRGSRYLRYALYNATKYVCHWDKSFGAYLEKKRSEGKHYNVAISHAAKKLVRLIFAMEKSGKAYLPTA

SEQ ID NO: 355656 - protein, 372 aa, unidentified
MAAGAGWHRAGIVATHDRLSVTLIGSGSLARTIAVRRVRGCDPYLPAAGHSGPAAATAGGHLDLLGWSRTWPQRTWALEDCRNLTRRLEADLLKAGETILRVPTKLMAGARRSAREPGKSDPIDALSVARAALREPNLPVAHLDGIERELRLLVDYRDVLISDRTGHQSRLRWFLVELGVPEPPSRRLTVAAVLASVDLQLLGRTEPCARIARDLVARISELTVAINDLAREIGELTKALAPSLLALFGCGALTAAKLVAETAGIGRFRSRAAYASHTGTAPVPVWSGNLVRHRLSRGGNRQLNVALHRIAITQLRCPSLGQAYVAKRIAAGDTKTEAIRALRRRLSDEVYRRLQADEAARAATENVAPAAA

SEQ ID NO: 355657 - protein, 456 aa, unidentified
MGQKRDQRQHVLERINLHASGIDVGASGHHVAVPPGSSPDGMDVRECGAFTEDLIGIVQWLQACGVTTVAMESTGVYWIPLYDLLDSHGFDVHLVDPRQLKRVPGRKTDILDCQWLQDLHTMGLLSGAFRPPDQVTALRAFVRQREMLVRYASDHIQHLQKALTQMNVKLQHVVTDITGVTGMAIIRAIVAGERDPKVLAAHRQAGCKNDEPTIARALEGTWREEHLFSLRQALELLDVYQEKIAACDAAIEAHLAGFPDRTGGAVPPQAGRARRRKNQPGFDLRSSLVRMTGVDLTRIEGLEATTVLKVISETGPDMTPWPSVKHFASWLGLCSGSKKSGGRNFSGRTKPCANRAAAALRIAAQSLHHSKSWLGAFLRRKAMQRGMPKAITATAHKLARLIYFMLKNGTEYVVKTQDEYEQRHRERTLASLTRNAKRFGYILVPVGDPIPSECPA

SEQ ID NO: 355658 - protein, 317 aa, unidentified
MSIAAQTTFVGIDVSGAELVVAVHGDDMVRTYPNDPAGITRLRGWLQRSSLPVRVAFEATGGYEWPVWAALDASDLHARQVSPAEVKALGAVFGQCAKTDKIDARAIAKFLSLRPDAGRKLPRENIRVLKELATMRRQRVEARSCLKQQMKHRAGGLNADLDAAHLAQLQAQIDTLDARITAMIDEDQRLRRAKDLLCSIPGIGPVVATTILAELPELEALNAKTVAALTGLAPRARDSGKYKGKRFIGGGRRIVRDALYMAATVAARHHPTLKDFYEKLRGRGLPYKKAITAVARKLAIEANAVIKRGTPWQKKPV

SEQ ID NO: 355659 - protein, 414 aa, unidentified
MDVVFDRVAGLDIGKASVTVCVRTPGEGGKREVQTRTFRTMTRSLTLMADWLQECGVELAAMESTATYWNPVFYCLEERMECWLLNAAHMKAVPGRKTDVKDAEWIAQLLEHGLVRPSFVPPPQIRRLRNMTRHRVQLQGDRTRDAARLEKLLEDASIKLSVVASNITGTSARAMLGALVAGERDAAVMAELAKSRLRRKIPDLREALTGRFDDHHALIVGQLLTRLAQTEAALADLDAAIADAMTPWAHELELLQTIPGIGLRTAQVFIAETGGDMSRFPTAAHLAAWVGVAPAIHESAGKRTPAGTRHGNKFLTSMLVEAANSAARSKHTYLAAQHARIASRRGHNRAAMAVAHSMLVAAYYMLIRDEPYHDLGPTWLDEHARNQASTRRLVTQLERLGHTVVLDPEAPPAA

SEQ ID NO: 355660 - protein, 432 aa, unidentified
MAETSELEWAAFAAIDWADQKHFWILVPTGSRQQETGELENTPEAVDAWAANLATRFDGRPVAVCLEQSRGSLVYMLTKHAHLVLFPVHPTTSARYRETFYPSGAKSDPSDTALLLELLVHHRDRLRPLRPDTTETRLLRLLVEHRRRMVDEKTRHSNRLTACLKLYFPQILRWFDDVDAPLVCALLERWPSLEQLRRANPSVLRKFFHEHNCRSEDLIQERIQAVYAATPATRDAAILEAESLTASQLVVILEGLRRNVAELDRRIAQVYGKHEEAFLYASLPGAGPALEPRLLVAMGTDRDRYQAAAALQCYSGIAPVTERSGHSQWVHFRWACPKYLRQTFHEYASHSIGYSEWARAYYDRQREAGKSHHAAVRSLAFKWIRVIFRCWKDHKPYDEQAYLRTLQRRASPLTGRKWESAAGFQKLSANPS

SEQ ID NO: 355661 - protein, 313 aa, unidentified
MSNPPEIFAGIDVSKSHLDLALWNVHRSWRFSNDPEGIRTLADLLLKHQPALIVLEATGGYEQAAFRCLSASQLSVAIVNPRRVRDFARANGRLAKTDRIDAYNLAHFAQVVRPHAHPASTEAQQRLVGMIARRRQLHRMITAEKNRLRNAHPTVHLQLQEHIDWLRQALKELDSEVKDLLQSDHELEAKADLLCSAPSIGVVTAASLLADCPELGTLDRKKIAALVGVAPMNKDSGRKSGKRRIMGGRAPLRAALYMAALSASRYNPAIQPFYARLVGNGKEKKVALTACMRKLLTMLNAMMRDNKHWSSTI

SEQ ID NO: 355662 - protein, 476 aa, unidentified
MHDLGAARGTSSRGDQSMSRRRKTNRCEHSTSNDKPQPLPILQPNAAGLDIGATEIYAAVAGDRDQKPVRCFGTFTVELLALAAWLRQCGIETVAMEATGVYWIPVFQILEAQGFKVCLVNPRYFQNVPGRRTDVSDCQWLQRLHSVGLLHGSFRPPQQVCGLRSLTRHRDNLIQLASTHILHMQKALDQMNAQLHHVLSDITGLSGLAIIDAILDGERDPAVLAELRDGRVQASAETIVQALTGDYRAEHLFTLKQSLECYRHYRKMLASCDREIEQLLKHFEPRVDATTKPLATPKVRRKPVRNQPKFDLRKHLYRIFGVDLTEVPGLNVLTAHTILSEIGPDLSKFPNDGAFASWLGLCPHNDITGGRVVSSKTRRVKNRAAHAFRLAANALWRSKSALGDYFRRMRAKLGAPEAITAAAHKLSRIVFHMLSTREPFDESLVRNHEQQFRARAEARLRAQAKALGYSVVAATA

SEQ ID NO: 355663 - protein, 384 aa, unidentified
MKKNSIAKLQVSKSQIRRMAAKQRLTVGLDLGDRSSRYCILNEAGEKASEDQLPTTKAGLDSLFAKMAPCRIALEVGTHSPWVSRHLAAMGHEVLVANPRKVRLITQSVKKNDRMDAEQLARLARVDPQLLAPIRHRGPEAQGDLAVIRARAELVDCRTALINTVRGLAKPMGERLKSCDADYVKESLADGLNEATQNAIRPLLKSVEEITKQIGVYDKKIQEIEKRYPETKLLKQVNGVGTLIALTFILTLEDAERFEHSRDVGPYLGLTRKQRDSGDSQPELGISKAGDVLLRRLLVQAAHCILRDGAPDSDLKAWGLTKVQAGAKTGSGKKGSKRRKKKAAVAVARKLAVLLHKLWVTGEVYDPQYNRKAVEAAKGKAKAA

SEQ ID NO: 355664 - protein, 329 aa, unidentified
MQELSTQKCDWILGIDVAKAKFDIALLLPTGKFKSKVFDNEASGFRKLDAWLGKQGVASLHACMEATGVYWEALAEHLVDAGHQVSVINPARIKAFGTSQGVRTKTDKVDARLIATFCQRISPEPWQAPSVALRALRALVLRRQALSTMRTQESNRLQVAHAAVRDSIDTLIAGLDEQIAEVERKIRELIDQDPDLREQFKLLHTVPALGEKTIALLLSYFSEHQRFDKANQASAFVGLNVQHRQSGTSMNAKPRLSKIGHSAARRALYMPAVVAMSKTAWGQAFAARLSAAGKPNMLIIGALMRKLVHIAYGVLKSGKPFDPSLHRLT

SEQ ID NO: 355665 - protein, 406 aa, unidentified
MNIHNLAHLQVAVDIGSHEHYVAIGLSEGGILDEFSITHTPAGFQYFFSRIERQEHLYNRPVDVAMEGYNGWARPLDSQIQSHGYQLYNVNNLKLARFKEIFPAPAKSDLVDTHKMLELFQLQDHLPLAKGVLQAVLPVPDANRRLKRLTRRRRQLINEKVALQNRIQPDLQATCPTLLDMTGSIDNLWFLHFLTCRDDLTKLMRLQTKSLLAIQGVGRKYLNLILDWQKQAEFSNEIEEVGPMIQEDARRLLALMASIKTMDAKIDSQIQKSAYAQHIDSIPGFGLVCSAELAGEIGTLDRFPKQSSFSIYIGMAPLDKQSGGYQGTKSPKHVNTRARKAMMTAVCRHMAYVPESRAYYDKKRSEGKTHNNAVRALGRHISRVIWSMLRHDRDYIELASINEKTA

SEQ ID NO: 355666 - protein, 361 aa, unidentified
MNYNTQNAKIASITEKTLIVGIDVGSETHYARAFDWRNYEYTKKPLEFSNTEAGFLTFKAWMEDLAEKHGKNVVIPGMGPTGHYWFALGKFLQDNGMKPVHVNPHHVKKSKELDDNSPSKNDRKDPKTIAALVNEGRFSYPYIPTGIYAEIRSLSNLRFQTQEELTRIKNRIARWFSIYFPEYKDVYGDVKVVSGRKVLQIAPLPEDIKKLGAEGVNQIWRDAKLRGAGMKRAKTLVSAAEHSVGSKEAPEAARIELRHLLNDLDVYATRLDELLHRIEAILWEIPYVDKLMEIKGIGLITVSGFLAEVGDIKRFDNPKQLQKLAGYAIVTDQSGKHNGESRISYRGRKRLRYLPETSIDQ

SEQ ID NO: 355667 - protein, 334 aa, unidentified
MTMELLAIDLGKQSFHLHGIDLDGVIISRKVSRAKLADAVAALAPVTVAMEACASAHYWGRRFKAENRKVLLINPRFVKPFVRGAKNDAVDAEAIYEAATRPTMRFVPVKSIDQQDLQSLHRIRERLIVQRTSLINHTRGLLAEYGIVFPQGAWRFVAQAADAIAEAELSDLGRELFNGLLDQLHDINARVGKLDAKIAEICRDNDDCRRLAALPGVGPIIATALVASVDDARHFHSGRELAAWIGLVPRQYTTGGKPRLGGIGRRANHYLRMQMIHGARAVVSRLAKHDDRRTAWLKAIVERRGFNKALVALANKTARIAWALLTRKENYAAV

SEQ ID NO: 355668 - protein, 357 aa, unidentified
MKRRVMDNRINFNGKVVNIGIDVHKLSWRITAMVEGVVVKAVTIKPSYSVLKKVLSQFKGAQIRVAYEAGPAGFSLYDELTADHIECIVTPPSLIPVESGNRVKTDKKDSTKLAHYLENNLLKRVWVLSKEERAYRQLLRTRRQISHHRSNVMRQIKSLLLFHGIHSPYEGPQIWTKTFVRWLRSINGDEYIVHSLNVLVDLYEYLTQQVNELTEEVIKLARTEKYAHRVQLLTSIPGIGVLSAIELLVELQDVTRFRSADQLSAFIGVTPSQYSSGERVRMGSITHLGNHRVRTLLVESSWTLIRKDPALYKVYESIKKRRGAKRAIIAISRKLVIRMRRILLDEKPYKINHSLAA

SEQ ID NO: 355669 - protein, 360 aa, unidentified
MDVHKKTITIAIADEGRQKQPRVYGTITNDLDALDKFCRKMVSTENQLHFVYEAGPCGYGIYRHLTEKGIDCMVAAPSLIPKKSGDRIKNDRRDAKMLARLHRADELTTVYVPDCQDEAMRDLNRAREDAVIVAKKAKQRLKAFLLRNGVAFAGSSQWSEAYFKWLADIAMPHPAQQVALQEYIDAVRESLNRVKRLTDQIRQMVPGWRLAPIVSALQAARGVSLVVAVTVLAELGDLSRFAKPSQLMAHLGLVPSEHSSGESIKRRGITKTGNSHVRKALVEAAWSYRMQARVSRLLLKRQQGLPDQVCKIAWKAQLRLCARYKRLVAKGKTKQKVVTAIARELSAFLWAIAKQVQPLA

SEQ ID NO: 355670 - protein, 346 aa, unidentified
MKINRVGVDLAKTVFQLHGADHKGHAVWKRQLSRSQWLKVLYETVEPGTPVGMEACTGAHHWARQLTLRGYPVTIIPPQFVKPFVKSNKNDANDAQAICEAMGRPNMHPVRVKTVEQQDIQAIHRVREEIKSHRIAKANQIRGLVSEYGLVAPQQLPSLRRAIPDWLEDADNGLSFLFRQLLQGLWGDLHVLDQRMAELDNQIGVMAQQDPVAKRLQQLRGIGPLIATALIATVGDARQYRKGRDMAAAIGLTPRQHSSGGKDRLLGISKRGDAYLRCLLVHGARSAVRTAKDKDDRLSRWIASLQTRRHTNVVAVAMANKIARMAWAMITKGADYDPDFNPAIAG

SEQ ID NO: 355671 - protein, 455 aa, unidentified
MAKVRSWVGLDVHAAKVIACVVDAESGEMSVHRLCGETAEVVAFCAGLPGPTRAAYEAGPTGYGLARALAAAGIGCVVAAPGKIERPAQDKIKTDARDAERLVRLLMIDALHPVRVPTAEQEALRDLVRAREDVRVDLMRARQRLSKLLLRHDVRDEDTISRWGERHRRWLAQVDLGQPGARATLTDYVGAVEALELRRGTLEAAITQLVPDTPCAQAVARLRCLRGIDTLSAVGLAVEIGDFDRFERPGQLMAYVGLVPSEHSTGQTRRQGHITKSGSQHARRLLIEAAWHYRRPPRLGTTLQRRQQDQSSIVVAIAWKAQQRLHHLWRRLDSQRHMRRTIVAVAVARHLAGFCWAIVNSHDQELPDQPPVQSEPLRSRGRRRLADAGLPSSASRSACGRPTGDSSAGHPLCGSEVGAGGPTTGKAVASSDARHAGDRPARTRRSHPKPDTAAR

SEQ ID NO: 355672 - protein, 362 aa, unidentified
MISVGIDVSKEKSTVCILKPYGEIVRSPYEITHTESQMAELASMIKCFDDEVRVIMEATGNYHLPVLSFLKEHEIFVSVINPLIMKKYSNIILRKGKTDKIDSIKIANYGLDNWFHLTNHESSKDVYVQLRLLGRQYGHYIKLKIESKLSLTTMLDYTMPGIKTALKSRSDKPEKDKLNDFVEEYWHYDNITQKSKKQFINSYKTWAKKKGYHQSEAKAIKIYDLAQQGIPTLSSNAPSTKMLVLEAVRVLREIDKTLALILSQMQELAKSLKEYTVVREMSGVGDIIAPRLIAEIGDIRRFHSGKALIAYAGIDAPPYQSGRFTGTRRRISKRGSSVLRKTGYEVMKCLKSNKPETDAVYL

SEQ ID NO: 355673 - protein, 340 aa, unidentified
MSEITTIGLDLAKNVFQVHGVDETGTVVVVKRLRRGQVIGFFASLPQCLIGMEACATAHHWARELAALGHAVRLMPPQYVKAYVKRNKNDAADAAAICEAVKRPSMRFVPVKTIEQQSALLMHRARDLLIRQRTMLVNALRGHMAEFGLVEAQGLHKVAALITIVMDESDRRIPDMARQALKMITDQISDLQTRISALETQVLAWHKNNPVSQRLATIPGVGPIIATAIAATVADAGVFRSGREFAAWLGLVPRQNSTGGKARLGGISKRGNSYLRRLLVNSAHTVLLCSKAAKADPWIISLRGRKPRLVVAVALANKTARVAWAIMSRQDTYRRIAAAA

SEQ ID NO: 355674 - protein, 457 aa, unidentified
MSRKGKRTKGIEEAHPFAGMSRINPNAAGVDIGAVENVVCVSGEGDTQIVRAFGNYTVDLQAIGKWLKEHGVTTVAMESTGVYWIPLFEELERQGFECLLISSRSMRRVAGRKSDVEDAQWIQTLHTYGLLESSFRPQAELIALRTLLRHRSQLVEHRSPHIQHMQKALLQMNVQLSQAVTDTMGITGRTIITAILAGERDPAKLAALREPGCKKSEEEIGRALTGTWREEHLFVLKQSMEMYAFYTQQVQACDDEIERVYSLTRPDWDAGELKPPSSRKRNSHSKNRPQNPESIRKHLKRISGVDLSAVDGFGVSLAQTVIMECGTDMGKFPKEGNFCSWLGLAPKHEISGGKVLKNNTLKTKNRAGQAFRMAANSVKQADCVFGVMYRRLKARLGPAQATVATAHAIARVVYRMLKYQVEYETISVEEYEKKYRAQQIKYMKRKAAKLGYQLVPV

SEQ ID NO: 355675 - protein, 365 aa, unidentified
MTTRQRSTSSSTDPPVRREVVLGVDTHGEVHVAAVISPLGKVLGTESFPATVAGYRRLLVWARRRGTVRQAGVEGTGTFGAGLSRYLLAQHVQVFEVNRPDRTARRLLGKSDPLDAQAAARAVLSGRTRAQAKSGDGPVQGARIYKLAKDSAVKARTQAINQLKAVLVIADPALRERLSSLGNAELFRTCATLSPPDGGGDEDAVVQATHMTLRMLAERIEQLTGQINELNQRLTRLVERHAPQLLVPMGIGPDSAVTLLITMGDNPERLNTEASFAALCGVSPIEYSSGRRITRRLNHGGDRQANAALHRIVFTRLRHDPRTQAYYERRTQEGKTRREIIRCLKRYVAREVFNLVRPVSRAPAL

SEQ ID NO: 355676 - protein, 346 aa, unidentified
MEHYAGLDVSLKLTSICIVDRTGKVEREGVVASDPEAIATFIKLHAPHVVRIGLESGATSTWLWTELNKIGLPVICIDARHAKAVLKMQINKSDRNDAAGIARIMQCGWYKEVCVKDLDSHATKALLVSRALLVKIKRDIENQIRGLLKNLGLVIGRAKMNMFAVRAAQLAEDRSELFAAVDPLLKARGAVEQQILDLDRKVLRLARNNAQVRRFMTAPGIGPVTALCFLATIDDPTRFKRSRSVGAYAGLTTRRYASGEIDWTGRISKCGDKMLRSYLYEAANVLLTRVAKWSALKGWGIRLAKRSGLRKAKVAVARKLAVILHRMWIDGTEFKWSSKDAADQPA

SEQ ID NO: 355677 - protein, 476 aa, unidentified
MAVERRLSRKRRNDLAQQLRSDDPGLEVMHPHAAGIDVGNSTHYVAVRPDRDPDPVRRFECFTADLHRLADWLQQCGVTTVAMQSTGVYWIPLYEILDARGFEVFLVNARHTKNLPGRKSDVQESQWLLKLHTYGLLRNSFHPAVEIRVVRTYWRQRGDHVHAISTCIQRMQKVLTQMNIQLANVISDLSGWTGQRILRAILAGERDPDALAALSHPGIHATRETIAKSLEGTWQPDLLFVLQQEVTMYDAYQHRIAECDQALERHLKGVADKMADTAPDADPSPASSQEARQSGPKRRRKAGSHAPQFDLGRELHRISGVDLTRIDGIDVGVAQTLISEVGVDMTRWQTEAHFASWLGLYPDNRITGGQVIRKGTRHVVNRAATALRLAATTLLRSQSYLGAQYRRLRGKLGAPKAITAMAHKLARLVYRLLKWGHAYVDKGQQYYEARHREQQVQLLTKRAAKLGLQLVAPEVA

SEQ ID NO: 355678 - protein, 370 aa, unidentified
MKKHSTTPKSPKQASACKGGPITIGLDLGDKTSRYCVLGANGEVMSEGSVGTTRKAMAEKFAKMRRCRVAMEVGTHSPWLNRWLSSLGFEVIVANARQVQLISASSRKNDRLDARLLARLARVDPQLLRPIRHRSETAQADLMRIRVRAALVEARTRLVNAARGFAKAMGERLPACDTDSMGVERMESLPEGLRDTLKPLLEQVESLTEKIKESDVKIEQIARTQYPETELLRQVSGVGTLIALTFVLTLEDRERFRKSRDVGCYVGLRPKQSESGQSQPQLRITKEGDVYLRTLLVQAAHCILSRRGPDTDLKRWGLKLASRGGKNAKKRAVVAVARKLAVLLHRLWVCGEVYEPLRNSQASGSSKKAA

SEQ ID NO: 355679 - protein, 335 aa, unidentified
MKHYAGLDLSMESTQVCIVDDNGRKVVSEKVESSPEAIAMMLERYGPVERAVIETGRMSPAICLGLRELGIPVVCIDARQAHQSLKAMKANKTDPHDAAGLAQLARTGFYKEVHVKSPAAHGVRSVITARSHLVEARVRLDNTIRGLCATFGYRPGVGQGKAFLERIMQAAHIPGLGDAIASLLSVRAELVEQIKEMDRRLRLIASQSQACEILMTIPGVGVQTSAAFAAAVDEAGRFRQSRNAGAYFGLVPRRHQSGELDWTGRITKQGDGTVRKLLYEAANSILTRSRETFALKTWAMKIAKRRGLKKARVALARRLAVIMHAMLRDGTLFQA

SEQ ID NO: 355680 - protein, 413 aa, unidentified
MVPVMAVSSRSSGVRLEDLVAVPIDVGKHSAMAKAIDFAGAELARPFVFSLDRAGIGQLVARVRSVLPASVSLVRVGLEAAGHYHLPLAGGVLPAEWELRVLNPGHVAMQRKVSGQRGVKTDRVDLTAIADLLLAGQGTIAPPFADLVMTLAGWAAHRRRRSLLRRRTIQQLTTHVDRCFPGLGRAVWSVVLSQAGRLVITELPDPVRVVRLGPTRLRAFAAKRGVRMTTPMAAKIVEAARQALPVPGAEVARRLLAADLELLADIETQITVADREVEALVPLTPFGVLTTTPGWGPVRVANYGAAVGDPERWPSHRQLYRAAGLTPRIYESAGHRRDGHITREGSVPLRVALVDLGMGLWHQEPASRVYGAQLRARGKPGAIIVTAMAHRANKIAYAMVRDQHPWESSRWAT

SEQ ID NO: 355681 - protein, 408 aa, unidentified
MDVVHARCCGIDVHQASLAVCVSIKQEGESEKHKLRCGTMTAELLRLVDWLHGHRVTHVAMEATGVYWKPVWHVLEGQFELLLANATQVKALRGRKSDLKDGERIADFLQHGLLQGSFVPARPIQQLRDLTRSRTMLKQEQARISNRILKVLEDANVKLSSIMTDVMGVSGRAMLQAVIQGETDPDELAKLARGRLRGKIPQLQQAARGGLSEHHRFLLEQWVAIWDELAGRIAKFEQRIEEEMRPFESAVKTWSSLPGISRVTSWTLVAELGADMTPFPTAAHAASWAALCPGQEESAGKRKSGRTRRGNVWLRTALTQAAWGASVTKGCYFKAFYHRLAARKGKKRAIVAVAHALLVTGYMLLWTGRKFQDLGEDYFDRLDQERLTKRLVKRLERLGHKVSLQPAT

SEQ ID NO: 355682 - protein, 486 aa, unidentified
MGKRTVKSRPQGATKQPATHQPPRKRRQRGRPVLSDSLQLTSEHAAGIDIHQREHWVAVPPGSAPPPPKDHPANLPAHVRRFGTNTADLEELADWLATCGVTTIAMESTGIYHIALFELLERRGFEVYLVDPRQTKHVPGRPKSDVHDCQWIQRLHSYGLLSAAFRPADQVVVLRSYLRQRQMLIGYGGQHIQHMQKALEQMNVKLGVVVSDITGVTGMAIIKAILAGERDPLKLAKLRNDKCKHTEAEIARALYGTWRAEHLFELKQAVDLYEFYQARLRECDRQLEAHLRAFEDKSGGEILPARLRQYKRPANDPRFDVRPLLHQMSGVDLTVLEGIDDSTALTILSEIGTDMSKFPTEKHFTSWLGLSPQHQGSAGKIRSRHVRRGGNRAARAFRLAGQGCHHAKNALGAFYRRIQSRSGGGKAVVATARKIATRVYRLLKYGLDYVRQDMAAYEECYRLKLIKGLARKAQELGYRLEPATTP

SEQ ID NO: 355683 - protein, 428 aa, unidentified
MTSHEDRLQRFHEMRRTIRGDESILVVGVDVAKDQHHAFFGTTNGKTLWKKLIFDNSIQGFKSLRTMADNLMTQHGLKRSVYGVEPTASYHKALAEHLLRNDEQVVYVSNVVVKNNRASLDGRWDKNDTKDAANIADLISRGRCQFYDLAEGDIRELRSLLAYRTKLKKQEHALRMRIRNNLLAQYFPELDKQMPQGGQDGLILDILSQGFAPAQIAGISFETFRTQLRLQQRHIVQEERLRTIWEASQESIGCALPEAAVWEGKMLVAQLRQTRQIKQELEVQLKTVGIRFPTYRCLLTIPGFGPIVSTMTIAAIGDANRFTSRKQVLRLAGLDLSAYRSGNKSESAVPVISKQGKAGLRYALVQAATIASYKDATIRNYFTRLLKGRELERGIKLKMRVKLAAKLLVVAWTLMKRCEAFDPDYFRT

SEQ ID NO: 355684 - protein, 343 aa, unidentified
MDYFAGLDVSVKETSVCIVDNAGKIVREARVASEPEALLQVLTNTIYRLKRVGLEAGPLSQWLYSVLAEAGLRLICVETRHMRAVLRAQINKTDRNDARGIAQMMRVGLYRPVHVKTLRSQKLRMLLTHRKLLQSKAIAIENDLRATLRNFGLKVGIVGTVKFEARIKELVANLPDVALLVEPLLVVRRVLREQVGILHRRLLAVVRDDDVCRRLMTIPGVGPVVALTYRVTVDVPARFRNSKAVGAVFGLTPAKYQSGENDRTGAISRCGDEMMRMMLYEAAQSMLVRSTKWSWLKAWAMKIAKHRGMKKAIVALARRLAVIMHRIWVDSTAFRWTREVAVA

SEQ ID NO: 355685 - protein, 351 aa, unidentified
MRSIGVIPNRCESVRKLVKKLGPVEELRFCYEAGPTGYVLYWQLTALDAKCEVVAPTLVPVRAGDRVKTDRRDALKLARSYRAGELTAVWVPDAAHEALRDLVRAREAAKRDQLRARNRLTKFLLRHGKRPPEGVNPWTLNYMNWVRKDVHFEPLAQQATLLDYLHEVEHMAARVTRLEQAIEEAVQLAPHQMREVIEALQALRGIAKVSAVTIVAELGELSRFGEARQLMAYSGTVSREHSSGESCKRGGITKTGNVHLRRIVVEAAWAYRHAPAVTACLRKRQERVSEEVKEIAWKAQHRLHGRYRKLTARGKNTGKVITAVGRELLGFIWAIGVKVEAEQRKALGQAA

SEQ ID NO: 355686 - protein, 335 aa, unidentified
MEIWSGIDVSKKTFVASWVRSTVHLDDFQKIPHRQFQRTPEGVRQYCRWLQDQEGDLSGVVMEATGRYSLELLVWLVQQRPDLAPAIVNPRQAKHFHKGLGLRNKTDAVDARSLGLMGCHQQPRSYQSPPPEYRLLRELMRQRRDLVGIRTAEGQRRQELPAEFKGPLRILRSHLKHLEKLLLRLDQQIDQLLAESGSLRRDLTLLKTIPGVGRVVALTVMGELGDLRRFERSRQVSAYSGLAPSNQESGSSKKSSHLDRNGIAEVRAVLYLAAMSASCNATDNHMARTYKGLQQRGKTNKQALTVVARKILVMMRAMLINEQSYQDDFSRLALS

SEQ ID NO: 355687 - protein, 346 aa, unidentified
MSEGYDGRQYVGIDLHRRRSVLVRMTDGGETLETVRIVNDRDRLAAVMARAGERPEVVLEATYGWYWAADELAELGAVVHLAHPLGVKAFSYRRVKNDERDAADLADLLRMGRLPEAWIAPPAVRELRELVRHRAKLVHLRTNLRCQVHAVLAGQGIAVPVSDLFGVAGTALLDRCELTPAAALRIASLRRLIEVFDTEIDQAGQVTAARLGGDPGYLAVQTIPGVGPVLGAVFVAEIGDVTRFPDPTRLTSWAGLTPKHHESDTTVHRGRITKQGSRLVRWAAVEAVQRAGKNSRLGAHRDRIAARRGRNIGTVAAARELLELVYYALRDHTVRRLRSPAAAPAA

SEQ ID NO: 355688 - protein, 348 aa, unidentified
MNITTVGIDLAKLVFQVHGVNERGKTMLRKVFKRADLIKFFANLAPCLIGMEACGGAHFWARKLSEFGHTVKLMAPQFVKPYVKTNKNDARDAEAICEAVARPNMRFVPVKNIEQQALLGLHRARQRFVWSRTAQSNQIRGLLAEFGLVIPKNICALQERLPEILEDAENGLPGTSRDLFARLFDHFRELDRQKELEAQIKAWHRQSDVSKRLAAVPGIGPLTASALVASVGDAKSFKSGRQLAAWLGLVPHQESSGGKERLLGISKRGDTYLRTLLIHGARSVLYSLKRRAEPPADGWLTRLAERRNANIAAVAFANKNARIVWALLAHQRDYQPGYGSSLAVEAAG

SEQ ID NO: 355689 - protein, 402 aa, unidentified
MNCVGIDVSKGKSMIAVMRPFGEVVVSPFEVLHTDSELSELARLLKSLDGETRVVMEATGNYHAPVAWLLHDAGLYVSVVNAMLVHDYGNNSLRRAKTDKKDAVKLANYGLDHWLTLPRYVPDEDTRLMLKTCYRQYQQYSKVQTMLKNNLISLLDTTFPDANRLFASPPRADGSEKWVDFVDAFWHCECVCGLSEKTFITRYQKWCRKHGYNFNENKALDIYASACGHFGVMPKTDTTKLLVEQAISQLWATSAALAALKQEMQSLAASLPEYPVVMGMFGVGPSLGPQLMAEIGDVRRFHSKKALVAFAGIDAPPYQSGQMDVRSRSISKRGSASLRRTLFLVMSVILQRAPMDEPVYQFMSKKHSEGKPYRVYMMASANKFLRIYYASVKAYLDSMEYD

SEQ ID NO: 355690 - protein, 348 aa, unidentified
MKNTIAITIGLDLGDKAHAICVLDATGAIIDKRMITNHVESLRRLAKKYSGARIAMEVGTHSPWVSRFFSDQGLEVLVANPRKVRAIYANDRKSDERDAEMIARIARMDPQLLYPVQHGSEQAQLDLLQVKLRDNLVRQRVDVISAVRFTLKSIGIRLPSPDTAYFAKRARKVLGDQPEVLILIEPSLCVLDEMTIRIRELDRAIEKLCRESYPETERLRAISGVGPITALVFVLVIGDLKRFAKARDVGAYLGLVPKRDQSGALDKQLRISKAGDGYLRRLLVSAAQYILGPFGPDCDLRRHGLALAERGGRAAKKKAVVAIARKLSVIMLTLLQQESDYEAIRKAA

SEQ ID NO: 355691 - protein, 311 aa, unidentified
MTTSSEAYVGIDVSKDRLDVAVLGGKQEKQVCNSQAGIKELVQWMLELQPELIVVEATGGYQRAVVEALFHAGLCVAVVNPARVRQFARADGLLAKTDRLDAFVLAKFGKKMQPRQYEGKSEAEKQLSALLVRRKQVEEMLKAEQNRLRTISPSLKSSVERIIAILKEEKKRLDEQIRELMNEQQAWQEQTEILTSAPGVGVVTTATLLAELPELGKMDRKRIAALVGVAPMNYDSGKKRGYRKTKGGRTNVRSVLYMSTLVATRYNPLIRTQYQHLLKRGKEKKVALTACMRKFLTILNAMVRDQQPFRM

SEQ ID NO: 355692 - protein, 329 aa, unidentified
MKAILGIDIAKLSFDVALLLEKKFYCKKFTNNQSGFKKFELWLQSKKISTAHACMEATGNYGVALAEWLDEREFIVSIVNPAIIKGFAQSQLSRNKTDKADAKLIARFTQALKPAAWIPTRTEVRELRALVDRCENLKCMLVQEKNRLDMQRNEEVRQSIKVHITWLEEELHELEEAIQQKIDSDPDLKNDNALLQSIPGVGEKTSATVLAYVAFENFKSAKEISAFIGVNPRQRTSGTSVRGRTRLSKTGNSYLRKSLYMPALSALRFNDTVKNFARQLAHNGKTKMVIIGAVMRKLVHIMYGVIKSGRAFDVAHNIPKKILIKANVA

SEQ ID NO: 355693 - protein, 339 aa, unidentified
MKYTPVGVDIAKHLIQVHFIDEHTGEVIDKQLRRQDFLMFFCNREPCLIGMEACGGSQHWARELTKQGHKVRLLQARFVKAFVMGNKNDVMDARAIWMAVQQPGKEIAVKTEEQQSVLVLHRSRRQLVKFRTMQINSLHGTLLEFGETIHKGRAAMEREFPEALERMKERLPPYLITVLENQYNRLNELDSLIEDIEKQLTSVAKQNETCKRLLDIPGVGPLIATAAVATMGEASAFKSGREFAAYVGLVPKQTGSGGKIRLLGISKRGDTYLRALFIHGARAAALLTKEPGPWITELKKRRPASVAIVAMANKLARTVWAIAAHGSKYDKNHVSTRPY

SEQ ID NO: 355694 - protein, 377 aa, unidentified
MSKIRFVGLDVHADTIAVAVAEPGGDVHSLGIIPNRLESVRKMIGKLGPVGKLKCCYEAGPTGYVLYWQLSQLGVACEVIAPSLVPVKSGDRVKTDRRDAEKLARCYRAGELTAVWVPDAAHEALRDLVRAREAAKKDQLRHRHRLGKFLLRHGTRPTEAGEKWTQKYLNWIRIHARFDQPALNATVSHYLHEVEHVAERIVKLETAIDEAVKQAAPEVRAVIEALQALRGVAQTTAATVVCELGSLSRFPSASQLMGYSGLVPREYSSGNKTQRGGITKTGNAHLRRVLVESAWTYQHRPNVQGRVLRRQKSLALSDEAKRIAWKAQQRLHKRFTTMAARGKHKGQIVTALARELLGFLWAIAVHTEAQFKQTKAA

SEQ ID NO: 355695 - protein, 401 aa, unidentified
MEAHLRVGVDVGCHAHRVGIADPDGSILEEFDISHSEAGFAEFFRRVEERREQLEIPVAVAMEGYNGYARPLDRLVQEKGYRLYNVNNLKLARFKEVFPGAAKTDPIDARKILELFHLREQLPMAKDVLQEVVPAPEVNERLKRLSRRRRQLVTEKLRVLNRMQADLQAVCPELLAATQDADNLWFLRFLSFRDDLRQLARLRRQTIRQIPSVGAKYAQAIEAWQARATFSDEVEYVGPMIVEDARRILELHQQIHALDQAMSELSEKSEIARRLSTIAGFGKTTIAELAGEIGTFSRFSSEASLALYVGVCPLTHQSGEMSKARIPRQVNTRCKAAILTATARHMQCEPQSRMYYDRKRAEGKSHNQAIRSLARHLVRVIWAMLRDGRDYEVREDAHPAS

SEQ ID NO: 355696 - protein, 272 aa, unidentified
MNITTVGLDLAKNVFHVVCFDERNKEVKKRMMRRNQVRHFFTQLSPCRVGMEACATAHYWGRELRALGHDVKLVPPQYVKPLVQGNKNDYNDARAIAESLDRPKISFVAVKTTEEHDMQAIHRMRSQCLRDRTALSNSTRGLLGEYGISFSKGLAVLRRKIPELLEDADNGLSLRFRNLLARRYEQLVEIDEHIAFYTKELELLSKQDDACERLQTIPGFGPIVASAFRSAIGDGRAYVRGRHAAASLGLVPRQYSSGGKNVLLGISKRGDK

SEQ ID NO: 355697 - protein, 339 aa, unidentified
MNRTAVGVDIAKNVFQVHYIVQETGEIVNKPIKRAKFLEHFSNRAPCLIGIEACGGAHHWARQLTKMGHEVKLMPGEFVKAFNVRNKSDAADARAIWLAVQQPGKPVAVKTEMQQAMLGLHRMRQQLLKFRTMQTNSLRGLLTEYGEVMSKGRSKLDKEIPVVLERLAERLPAVIIDTFREQWNGLAKLDEQVAQIERRMREWKKEDKSVKAIGEIPGVGLLTATAAVAMMGDPKAFSSGREFAAWVGIVPRQTGSGGKVNLHGISKRGDTYLRTLLIHGARSVLEHAKEPGEWVEQMKKRRPKNVVVVALANKMARTIWAVLAHNRPYRKDYVSVKPA

SEQ ID NO: 355698 - protein, 393 aa, unidentified
MRVPGGRGGTVLEKERFATTTAALAKLGAWLADRQVSLVAMEATGVYWKPVYYSLESSFEVWLCNAHHVKNVPGRKTDMSDAEWLADVAAHGMIRPSFVPPPPIRELRELTRYRKTQTDARVAEIQRLEKVLQDAGVKLTSVASKVLTQSGRLMVEALIEGQRDPAELANLAKGKLRPKIPELAEALNGHFGSHHAVAARRILDHIDFLDATITALSEQIDLRTAPYQAARELLLPVPGFDRLVIDTVIAETGADMSRFPSPGHLAKWAGICPGNHESAGKRRRVGTTPGNRWLQRALVEAASSAARTKGSYFGAQYRQIAKRRGPNKAAVAVAHSLCDLIWHMFSTGECFHDLGDDYFQRRRDPERETRRLVSQLEQLGFHVALTTPQDPAA

SEQ ID NO: 355699 - protein, 326 aa, unidentified
MQIAVSFFGADVGKAEIVVADHGRAKPVTKILKNTPSSLSKWLQTLPQGSVLAMESTGGYERMLADLAHERGLKVYVLNPKALHHYAKSQGQRGKTDRLDAIMIARFIASEHERLHPYQPCAQYIERLRQMLRLRRMAVITRTQLRLSSERHHQVHDAQAQVQKALDALTELANSLEDQMLAEIQAEPALAQDFKLLTSIVGVGNLTATALVTTFARIPFTSSDAVVAYAGLDPRPKESGAYKGMRKLSKQGDGILRSLAYNAATAAARSITFKPMYQALLAKGWATTQALNIIARKLLRIAFGVWKSRKPFERELFLANQACVKP

SEQ ID NO: 355700 - protein, 374 aa, unidentified
MAGITEFGELVGRLLSEDGQAADVLVCTETDRGPWVNALIAAGYRVFSVDPKQAHRHREILSSSGAKSDKGDAHGLADMVRTRRHQLRDAGGDSEIAEAVKVVARAHQTMIWERTRHMLRLRAALREYFPAILAVCDTVDLSLTSRPLLVLLDKAPTPELAAKLTARQILPMLKGYRNKDAKAAQIQQILRGEHLGQPPVVTRAYAASVRSSVAVLMVIVEEITHLETEVKAHFGQHPDADIILSQPGLGPILGARVLAEFGDAPGRYRSSKDRKNYAGTSPITRQSGKMRIVAARYIHNNRLVDALQGQASCAILHDPDVRGYYDQLRARGTKHNAALRQVANRLVGVLHGCLNARTRYDRNTAWAHRHTAAA

SEQ ID NO: 355701 - protein, 354 aa, unidentified
MTKITKVNFGGEPIYCGIDVHKLSWRVNIRSEEFELEDYSQPADEGMLLSHLRKNYPGAAYELVYEAGFSGFSLQRSLASKGIKCLVINAGDVPSSDKDKRRKSDCIDARKLSKALVSRSLKGIFVPQQEMEHIRTLVRQRSKLVQDQTRCKARIKHLLLFSGLKVEEDSSWSGHYIKRLEALDCGTIHLRQALDLALQEYQSIRKLNLLSTRQIRALSQQEPYAKIISLLRSVPGIGLINAMVVFSEIQEMSRFKTLDKLCGYAGIVPDLHSSGEQQSVRGITHRSNYYLRVAIVESSWSIVRKDPVMLMYFKQYCNKMHPNKAIIKIAKHLLSRIRYVWLKEEPYQTGRIDF

SEQ ID NO: 355702 - protein, 361 aa, unidentified
MVYIGVDLHRKTTQVAAVNGGGELLVNRKVPTSGPDILRVFGEVVAEAPPTAVAFEATFGWGWFADLLRDAGIEVHMAHPLATKAIANARVKNDAVDAKTLAHLLRAGMLPEAWAAPLEVREARRLVRMRTSLVRMRSRIRAQVHAVLAEHGVSTPMSDLFGKEGRRLLEELRLPELSQGRLEACLRLIDDLGKEIEIADTEILARFETDPRTRRLLPITGIGPTIAAILLAEVWDVSRFPSAEHLCAWAGLTPTERSSADHTRRGHISKQGSRWLRWVMVEAAVRALSNPQLGVFYTSIEKRRGSKIARVALARRLLTLAYYALRDEGGCRAFPVPTEIPRGRARSLIDMASRGTAVIAD

SEQ ID NO: 355703 - protein, 385 aa, unidentified
MQASNTCMPIVDHNGTIFVAIELSQRTWLVVMRSPERDRISHHQLAGGDHCGLLALIETVRARAARTLGSVPAVVSCYEAGYDGFWLHRRLVGAGITNFVFDPASIAVEQRGRRAKTDRIDGEVMLRTLMAHCRGEPRVVRIVRVPGREQEDVRRDSRERQRLIQEQTGHINRIKALLRLLGLAAGNPRRRDWPAWLDGQRDWQGEPVPPRLMVELKREHARLLVVGEQLAALSSAPAASDVTEAAARMAERKEQLLRLKSLGPVFAATLTNEMFYKDFRNGREVASYCGLTPTPWRSGCMNREQGISKAGNPRVRHKAIELAWLWLRHQPDSALSQWFRRTTSDASGRTRRIAIVALARKLIVALWRYLVTGLVPEGAVIKAST

SEQ ID NO: 355704 - protein, 402 aa, unidentified
MNSVGIDVSKGKSMIAVMRPFGEVVVSPFEVRHTANELNELAGLLKSLDGETRVVMESTGNYHAPVAWLLHDAGLYVSVVNAMLVHDYGNNSLRRGKTDKKDAVKLANYGLDHWLTLPKYVPEEDTRLMLKTCYRQYQQYSKVRTMLKNNLISLLDTAFPDANRLFTSPPRADGSEKWVDFVAAFWHCECVCGLSKKAFTNQYQKWCRKHGYNFSEDKALDIYASACGHFGVMPKTDTAKLLVEQAVSQLRATSAALAALKQEMQSLAVSLPEYPVVMEMFGVGPTLGPQLIAEIGDVRRFHSKKALVAFAGIDAPPYQSGQVDVRSRNISKRGSASLRRTLFLVMGVLLQCAPMDEPVYQFMNKKRSEGKPYRVYMMASANKFLRIYYASVKAYLDSLEHG

SEQ ID NO: 355705 - protein, 404 aa, unidentified
MIPPKLCHPSGTCSIASTRHQGLAPLVCCKRSPASKTRGAVGRLPLGLRSRSPARPPPPENHSGPSPNSRSDPESAFARTGTPGEPETTRSDTHTTAGIDVSKDHLDIATYPPGEPIRLPNTPDGCVALADRLAGVRLVTLEATGGYEAAAGAALHLAGVPVAVVNPRQARDFARVLGRHAKTDRVDAAVLAEFAARIDPTPARAPDPDREALAAVLTRRRQLLDMRVMEANRLRPDTPAAIRAGIADHLAWLDDRIATADRDLAAAIRRTPAWRTQDDLLRSIPGIGRVVSRTLVADLPELGTRPADQLVALAGLAPFADDSGGRTGGRHIRGGRGTVRRALYLAALSAARVAGPLRDFAQRLRARGKAAKVVLVAVARRVLVIANAVVRDGRPWEPTLAEAR

SEQ ID NO: 355706 - protein, 400 aa, unidentified
MNRTRTVAGLDVHKDSIYLCIMGYDQAIIWENTYGVLTPDLRQMHHDMRAHGVTEAAMESTAVYWVPVWTELCESMELRLVNPYFIKQLPGRKSDVKDARWIAECLLKNLIKGSFVPEPIVQDMRKLNRRIMDLCEDTTYNSNKLDAALQRCGFRLSNYVATTKSKSYRSVLKAIIDGQTDPDELLSLVHGRILNKHGRERVKAALTGSFSETDLIVLRQLKETLDLIEEQTADCQQELVRLCKEHYPKPYERLQTIPGVKERAATAIIAETGVDMKMFATAASLVGWCGLKPRNDVSNGRFKSRKVTHGNRYLRQILIEIAWAASRTRNCFFSHFSYLQTTVKKKNKMKIQVAIARKILVALWHMLSKEEDFIDIYLKRQEELKRTEGQIKLLESYMAD

SEQ ID NO: 355707 - protein, 397 aa, unidentified
MRNRYGSVAYGGMDVHRKFSSVTLRDAEGQVVARERLDHEDRRKMRQHLRRWPAGTALVMEASFGWPWVSDEVEAAGHRPLLSNCYKVEQMRKARGQVKTNTKDADLISMLPAESTRWWEVWRAPPDVRDLREWMRHRADLVVLQTEVKNRVHALLARQGVFHPFSDLFGGQGRAFLHRLCEDGYHANGALPPGTLEAIRSDVRVLLALRAELATITWRLRGRLTQDPLVRRLKTIPGIGLILAHVVASEAGVIGRFRSHRNLASYACLAPRSDDTGEADPTRVPLGRHLGDRGNRTLKWAFIQAAHAAVRHGGKWRAMFDRHTDGGTKNRGRGYVKVARELVKVVFAVWSKAVDYTETPSPRPGSAPVRRRKEDSRPGTGQPLHPMAEVSGPQASS

SEQ ID NO: 355708 - protein, 412 aa, unidentified
MSFVLPEALFFIGIDWAAETHAVCVLDAAGKVAAEFTIGHSADGIATLIRRLARCGAPGDLPVAIERPDGRLVDLLLEAGHPVVPVKPNAIKTWRDGEVLSGAKSDAGDAAVIAEYLRLRAHKLRVVAPYSDQTRALRTVVRARGDLVEMRVVATNQLSALLETHWPGAKAIFADVESPVSLEFLTRYPTPAAAAHLGEKRMAAFCVKHGYCGRRTAAELLARLRSAPAGTTLESLTEALRDAVLAAVGVLTALNAAVKNLDRSIAAHLGEHPDGAIFTSLPRSGQVNAAQVLAEWGDARQAYEHPDSVAALAGVTPVTSQSGKHRSVYFRWACNKRFRVAVTTFADNSRHASPWAAKIYNDARASGKDHPHATRILARAWIRVIYRCWLDGTPYDPARHGAATALASQTAA

SEQ ID NO: 355709 - protein, 367 aa, unidentified
MKQQTSATTETGIKGSNIIDFTGKTIFVGIDVHHKDWQVAKVIDGICLGNHRMKASDTELIEHLRSRYPGAVFKCVYESCAWGFTLQRRLQQAGIDCIVVHAADVSTTDKEKRRKTDKVDALKLARDHEAKHLKAIHVPDEDTQKDRNLIRLRKKLTGDLNRSKNRLKSLLKYQGIDIPERFGKACWSYNFMNWVEQEAGKDPLLKDTLLLMLEEVRLLRELLLKAERKIRELMQHKYSQQATLLISTPGIGQTTAMLFILEAGDMRRFRSFDQLNDFVGFCPDTDSSGDMKRDTGITTRRHKQLRTALLEAAWRAIRIDPALLETYQQLIKRMKVHQAIIRIARKLLRRMRAVLLSGIPYQKGRIA

SEQ ID NO: 355710 - protein, 446 aa, unidentified
MEVVFPYCAGLDVHKKRVTACRLVSDSTGQVPEGVAELQTFGTMTHELLALADWLVEAGVTHVAMESTGEYWKPVYNLLEGIVTIFLVNASHVKNVPGRKTDPADARWLAKLMRYGLLQASFIPPIAQRDLRDLTRYRTKLVQERAREVNRVQGVLERANIKLASVASDVLGVSGRAMLEALITGQADPATMAALAKRRMRSKIPALEQALTGTVRDHHRRLLAMQLRHIDFLDEQIAALNSAIAQCVTTLSQEAPVSPAPLAPTTIDVPTPADPPPPLTFTRAVELLDTIPGVNQRGAEMIIAEIGIDMTRFGTAARLAAWSGVATGNDESAGKQRSGKTRKGNQVLRAGLTQLAHGAVRTKGTYVSALYRRLAARRGKRRAILAVAHSIMGSVFHMLSRNEPYRELGPNYFDERRRHYTVDRLTSRIEHLGYRVHLEPLPTAAA

SEQ ID NO: 355711 - protein, 403 aa, unidentified
MEEQVPRVVIGMDPHKRTVTIEVMTADETVVGGGRFDTTVEGYAAMLEHVGGWPERVWAIEGCEGIGRHIAHRLLADGQDVVDVPAKLSARARVFATGQGRKTDATDAHSVALVGTRMAGLRPVVTDAQLEVLQLLVDRRRSIGDEHTRKISQLHRILLEMLPGGAKKYLSAAQAKALLAGVRPRDAVGKTRKRVAAELVADLERIYARKKAADKELKELVAATGTSLLDLHGIGPSGAARLLVEVGDLSRFPDRNHFASWTGTAPIDASSGDHVRHRLSRGGNRQVNRVLHIMATVQLRTPTEGRAYFDRKKAAGKSSMEAMRCLKRRLSDLVFRTMLGDYVAGRITTVAGPVTKQVTGPGGHRGNDSDSSATGSQPHTGSSDKPLPGPASTQRRTPLPAAS

SEQ ID NO: 355712 - protein, 373 aa, unidentified
MFHFTTLFIGMDVHKESFSLCYYDMMTNQFKHSTKVGPNVSYIVNYVNELRRLYGQDAEVLCGYEAGCLGFTLYHQLQAHGIPCIVMAPTTVMKDGSKRVKTDKKDAAQLAKALAFRSYRPVHIPTAEDEQVKEYIRMRTDHKVALKKIKQQILAFCLRHDFRYTEGSNHWTQKHVRWLRSLNPEGLYAEILTEYLLTYEKLVDQIERYDARIEQLGQSDSYQEKVSRLSCFIGIKTLTALSIVTEIGDFNRFATAQQFASYLGLTPSENSSGDKERRGVITKAGNSHVRRLLIEAAQSLAKGTIGYKSKELKRRQSGNRVEVIAYADKANERLRRRYRTLVLGKNKKQNVAKTAIARELSGFIWGMMTERIA

SEQ ID NO: 355713 - protein, 356 aa, unidentified
MSRDIKYIGMDVHKEATVIAVRNGSGKLVMESILETEASSILQFIHGLRGELQVTWEEGTWAAWLYDLLQPQVERVLVCDPRRNALLKEGNKSDKIDARKLADLLRTGMLRPVYHGEHGLRTLRELGRSYRTISQDLNRVMNRIKALYRGWSIPCAGTRVYAPRYREEWLHKIEHAGVRRRAELLYQQLDGLQTLRRTLRPELLAESRKHKASKLLRQIPCIGPIRAARLLALMQTPHRFRSKRQLWTYSGLGIETRDSAQYRFVRGQLQHAKKPQQIRGLNQNHNHEMKEIFKGAATRASCGVGPLRDFYVALLAKGMKPEMARLTLARKIAAIALTLWKKEEHFDAEKLKLQAA

SEQ ID NO: 355714 - protein, 307 aa, unidentified
MNKIVIGIDISKHKFDATYRSANQKWKDKVFENSSVGFENLLKWMSEHKIEKAHIVMEATGRYGEDLANFLYISGHHVSIINPAQIKHYGRSLLRRTKTDKVDSHLIAEFAERHDLSCWKPLSSSLQSLKDQVRCLEAFKKDATQTSNRLESAKDAVVQKMLKDRQDHIQQQIEDLMIKIKTLVKDDPILTENVTLLKSIPGIGEISAINLLTELPDLSLFKCAKQLAAFAGLNPSIRRSGISVKGRETISKAGSKELRKIFFFPAMSIMRHPSSIKPFIERLKGKGKKGNLIFLKTELVHIDMHFL

SEQ ID NO: 355715 - protein, 362 aa, unidentified
MKDATTPNEEGKVTVGLDLGDKHTQLCMIDAGGELLEEARLRTTPAALRQRFSAMPTARLVLEAGTHSPWVSRLLEDCGHEVYVANPRKLRLIYQNDSKSDRVDAQYLARIGRLDPALLAPFRHRCAATQADLALIRSRDALVKARVRLINHIRGAVKSVGGRLASCSTESFAGRAASQIPAELKPALVPLLEMITSMDEKIRAYDRQIERTARERYPETALLRQVPGVGTLTALTYVLTLEDPARFASPRAVGSYLGLRPRKADSGDLSPQLHITKAGDEMLRRLLVGAAHYILGPFGPDTDLRRWGLALAARGGKRGKRLAVVAVARKLSVLLLRLWATAEVYEPLRNTAGEPRSLSRPA

SEQ ID NO: 355716 - protein, 351 aa, unidentified
MTMNSTTTVGCDLGDRYSHLCVLKPDSGAAETHRISTTRAGFAKFFGERPKCKVVIEVGAHSRWVSELLVELKHQVVVANARQLPLIYRGRAKDDITDAEKLARLGRFDERLLSPIQHRSQAAQADLAVIRARDSLVRSRTALINAARGMMKSAGHRVPKCTSSAFAVRARKVLPEMLCAALVPLLDAIEGLNEQIKVYDKTIEQTAEVSYPETKVLRQVAGVGALTALAFILTLEDPKRFRRSRTVPAFLGLCPRRQQSGDNERQCGISKAGDGDVRRLLVQSAQYILGPFGPDTDLRSWGLRLADRGGKNAKKRAVVAVARKLAVLLHRLWKTGDCYEPLRQTQSKAAA

SEQ ID NO: 355717 - protein, 340 aa, unidentified
MEITTIGLDLAKSVFQLHAIDADGNVVWRKKVRRGALLETLAKVPPCLVGMEACATAHYWAREISALGHEVRLMPPAYVKAYLRRQKNDAADAEAICEAVRRPTMRFVPAKGAARQAVLVLHRSRELLVRQRTMLINAIRGHCAEFGLVAPQGARGSRDLATRIRQTDSAVLPDIAKDAMVLLVEQFHALVRQIQALNRRLIVWHRQDQASQRLATIPGVGVIRATALAASVTDPAAFRSGREFSASLGLVPRQNSSGGKDKLGRISKMGDRYLRKLLVVGATSVVRRARTTDTTAANWVRDLLERKPVRLVTVAMANKTARIVWAVLSRGETYRSPAAI

SEQ ID NO: 355718 - protein, 309 aa, unidentified
MQKIFVGIDVSKKKLDTYITGLSNYSVFDNTKSGYVKLIKVLKKVNPELILLESSGGYELPIAYKLLTEVFKVAIINPRMIRAFARAKGLHAKTDKIDSRLIAEYGEALKPEVVEIMSKEGRELKELVLRRGQIMNQITAEGNRLETLMSKFLRSDIKKHIKQLKRHLELVDKEIHRLIDNRLCWKKEKGFLTSIKGVGNVLASTLIAELPELGKLNRKEIAALVGVAPYNADSGKKTGMRFIKGGRKHLRNTLYMATVAAVRSNARIKAFYLKLKGKGKASKVALVACMRKFLILINALFKKEMLPAT

SEQ ID NO: 355719 - protein, 340 aa, unidentified
MNHYVGIDVSLEASNVCVIDASGKIVREGKVASEPAALIAWFGALELSVTRIGLEAGPLSQWLYAAMRDAGLAVELLETRHVRNAFKIMPVKTDRKDARGIAELMRLGWFRPVHCKSMEAQETRAMLTARKLVQKALHEVEMSLRGVLRGFGLKVGKVAPSRFEARIRELVEGHPNLEVIAASLLAVRATLRREFNGFEKRLRTLARSDMRARLLMSVPAVGTIVALTYAAAIDDPARFTSSKTVGAHFGLTPTKYQSGETDRTGRISKIGDGSVRAALYESAHIIITKPIKGCTALKSWAMRIAKRAGMKKAKVALARKLAVIMHRMLADGTTFTTQSA

SEQ ID NO: 355720 - protein, 338 aa, unidentified
MSQVSTIGLDIAKHVFHVHGAEERGVALFSRRLVRGKVLEFFARQPRCVVALEACGGAHHWARQLLALGHEVRLIAPAYVKPFVKRNKSDALDAEAICEAAQRPTMRFVAVKSEQQQAAGLVFRTRDLLVRQRTQTINAIRSHMAEYGRVAPKGPSHVAALAGQLEELPEAARAMIRVMLDMLGEFDRQVADLDREIARRAREDEVSRRLMTIPGVGPLTATALAALGPPPEQFAKGRDFAAWLGLVPVQNSTGGKQRLGRVSKAGERTLRRLLILGSSAVVLHASRRGAPRGSWLEGMLARKPRMLVVVALANKMARIVWAVLMKQEDYRAPVAAAA

SEQ ID NO: 355721 - protein, 344 aa, unidentified
MHIASIGIDLGKTTFQLVALGERNKVLVRKKCSRPQLLAYSANLPASLIGLEACAGAHFLGSALRAQGHQVRLIPAQFVKPYRKSNKNDFIDAEAIAEAVTKQNMRFVEIKTQEQLDWQAMHRVRDRLMQRRTALINEIRGFLLERGLTFAARPISLRKNLPTVIEDAEQNLSPRLRWLLDRLWQEWKQTEIDIKAITDEIERISNDDARCRRLRQIPGFGPLVSTATVAAIGNGAAFRRGRDFAAGVGVVPRQYSTGGKQRLFGISKRGNIYLRRMLIHGARAVLLRVKYDTGGFGQWVHRLAQRAPRNKVVVAIANKLARMAWAVLSSGKQYRHQPLPLAAA

SEQ ID NO: 355722 - protein, 362 aa, unidentified
MKKDLQRTEQNAPTQGASKTIGIDLGDRWSGYCVLDRDGEIVEEDRLRTSAVEVEQRFKKMPATRIAIEAGTHSPWVSRLLERLGHEVIVANARRVRLIYQSDRKNDRLDARMLARLARVDVNVLAPIHHRGAETQADLAVIRGRDSLVAARTQLINAVRGTVKSLGGRLPKSTTAAFAGKVPALIPSEIKVALEPLLRSIASLTEQIAKADEQIARLAEEKYPETRLLRQVKGIGPLIALTYVLTVGDPHRFAKSRTVGSYLGLRPRQRESGASAPQLGISKAGNNHLRWLLVQAANYILGPLAPDSGLRRWGLGLAAKGGKNGKRRAVVAVARKLAVLLHRLWVTAEVYEPLYGIESEAA

SEQ ID NO: 355723 - protein, 406 aa, unidentified
MRFYIGGDWADAEHAVWVEDENTTKIASRIVPQTAEGLSEWGRWLDERRAEGIELWAALENPEGRIVDFLLDHGVLVFPVNPKALDRARDRFRMSGAKSDPFDAYVLATFLRTDHGHLAPLRPSSEAAQELKGLTRDHARQVRQQTRLLNQLTATLKAYYPRALEGCEDLKSQWARAFLREDSTPAAVAALTARQWQRWARAPRLSAERIAELWAILQRPQLPVPAHVVRVNARLVGALLAQLETTITAVEAYREAIPDFFASMPAAEWATSLPGGRSGTTVPQLYAELGDAPGRWQTFRHLQGHAGSVPVTDRSGKQVTVQFRFACNLHLRQAVHQFAFQSLGKSEWARAYYDRCRKRGHSHHHAVRALAAKWLKIIFVLWTRQVAYDETYHLATMARQHLRQTA

SEQ ID NO: 355724 - protein, 341 aa, unidentified
MYYVGLDVHKKSIAYCVKQADGVIVREGSVAARRQDLSAWAAALPRPWTGAMEATLFSDWVHDHLAPFAEALKMGHPARMRAIATSKKKTDRLDARTICDLLRCDLLPPAFVMPPALRQLRRVLRYRNLLVRAGVRMQNKIAGLLLEMGVEYDTPRLHRKRYFGELLEDKQAEIPASARRLLEFSREQYETLHRMELQLLRGLEQHPDIAQRVARLMTIPGVGPVLGLTWALEVGPVERLGNLSRAISFCGLSSALRESAGKQTRGPISKQRNAHLQTALIEAAHLAARWNPLLAEVRERELQRGHPNRATLAVARKLVAFLMAADRGHQPHPRAATAAAA

SEQ ID NO: 355725 - protein, 460 aa, unidentified
MRQKKTEQRKAVDLNSLDQIHLDAAGLDIGAEEIYVCVPEGRSSNSVRHFGTYTSGLQALALWLDECSVTTVAMESTGVYWIPVYDVLAAAGFEVYLVNARHIKNVPGKKTDVLDCQWIQQLHTYGLLHASFHPDDEIRALRALVRHRDNLIRCRATHIQHMQKALEQMNLKLVNVVADVTGQTGMTIIRAILEGERDPYVLAGYRQPRCVKSEREIAQALDGHYRDEHVFTLRQAVELYDVYTQKILTCDQEIAAKYSTLEPEIDIEEHPLPPPRQRQRLGKDNTPHFDLRTELYKMAGVDLTQIDGVNVLTAQAVLSEVGTDMSKWPTAGHFASWLALCPSNKITGGKIKKRGRRKTNSRAAQALRMAAQGLSRSQSALGAYYRRMRAKHGAEKANVAAARKLARIIYFMLKNKTAYRDIGVDQYDAQYRERRVRNLERQAKRLGFRLEPVPAVAMVS

SEQ ID NO: 355726 - protein, 373 aa, unidentified
MKQTIRSFVGMDVHKETISISVAEDGRSGPVRFIGVIPNTLEAVHKMAKQLTRHGELDFCYEASGCGYGIHRQLTRLGHRCTVAAPSMIPRKPGERIKTDRRDSEKLAILHRSGDLTPVWVPDTTHEALRDLVRARVDASMHLMRARQQLLAFLLRHGRSYPTGKHWTQRHRSWLAGQTFQEHAHGIVFQDYLETVWTAQQRRDALIDRISAMVGSWSLGPLVEALRGLRGIDMISAATFIASTGDLSRFESPRLLMGYLGLVPSEHSSGGTIRRGGITKTGNREARRMLIEAAWSYQYPARVAKEKAEILIRLPKKIRDIAWKAQTRLCTRYRSMVARGKKPTVVVAAIARELAGFIWAIGQEMRLLMASGQ

SEQ ID NO: 355727 - protein, 403 aa, unidentified
MTEVIIGVDPHKLSATIEVVDHRGNLLGSGRFTTDKAGYSAMRAHVRAWPQRVWAVEGANGAGRPLAQRLVEAGEHVVDVPAKLAARVRLFDTGHNRKTDARDAHSIAMVALRTTGLRVLAPDEELEVLRMLTDRRDELAHRRVQTVNRLQRLLSELIPGQRKKDLSALQAKAMLASVRPRDLAGKTRRRMAVEQLADLVAVDAKLKKIKAELKTAVLARGSTLLDIHGIGPAGAARILADVGDVARFADRNRFASWTGTAPLDASSGEQIRHRLSRAGNRRMNHVIHIAAIVQLRHDTEGRAYYRRKLAAAKTPMEALRCLKRRLSDVIYRRLVADAKATGLTAGETGPGGHCGASLQSSAVDSHPLIDTSDQPLPGPAAPTLQPVSPARKTSTTTSPQPAA

SEQ ID NO: 355728 - protein, 338 aa, unidentified
MLYVGLDIHSKHVAICVLDENGKLLRRAQVRTIQETLGILERLPDRFEVCYEASCGYGFYHDALRPLAARVVVAHPGQLRLIFRSKHKNDRHDAEKLAKLLFLGEVPAVHVPSVDVRSWRELITCRRHLIEKRTMAKNGLRALLRSVGVSAQRRPGLWTKAGIAWLRQLTWPTATQALRRDLLLEEIDGLNRQVNRVEAELDRLSNSHPAVFQLMSIPGVGVRTSEAVVSFLDDPQRFPNSKAVGRYFGLVPTQDQSGGTNRLGHITKAGSATVRRFLTEAAWQAVRRSPTVRAYFERIRRDDPQRKKIAVIATAHYLARVMYALLRRGELWQEKIPA

SEQ ID NO: 355729 - protein, 322 aa, unidentified
MEVGQTVADPGVVGGVDTHKDLHVAAVVDELDRVLESRCFATTRQGYKRMLTWMRSFGQLRRIGVEATGTYGAGLLRYMQNAGVEVLEVTTPDTHDRRKRGKNDDLDAQNAAHAAFAGRRTVAPKSRDGMVESLRVLKACRKTAVAARRVALQMIHNTIVCAPDDLRETLRKMTRMQLIRTLAAWRPDLTDYRSVGSAYRITLKSLGRRYLELHDEIADLDTMIVAIVDELAPALVARNSIGHGSAAQLLVTAGDNAERLQSEASFAALCGASPVPASSGKNDPPSPQQRRRSGGQQCAPHHRHRTASDRSPDQGLHREACC

SEQ ID NO: 355730 - protein, 346 aa, unidentified
MKHYAGIDVSLESASVCIVDERGLIVREGKVASEPEALIGWLAKPGAEVELIGLEAGPLSQWLHAGLSQAGLKVELLETRHVRAAFKAMSVKTDRKDARGIAQLMRLGWYRPVHCKSLPAQEMRALLVARKLLQKQLHAVEMSVRGILRNFGAKVGQTTSRGFEGRVRTLVEGQPTLQTVADALLAARTVLARELSSLEKRVRSAARHDDRVRLMMTAPGVGSIVGLNYVSAIDVPQRFRSSRSVGPHFGMTPTRYQSGEIDISGRISKVGDGSVRSALYEAAHIILTKPVKNAGALKRWALAIAKRAGKKKAKVALARKLAVILHRMWMDWTPFDPTKAVGAAAA

SEQ ID NO: 355731 - protein, 323 aa, unidentified
MTLYIGVDFHPHQQTACWCDMETGEIKTRTLFHNTDEIKQFYQTMPPSTIGIEATSKATWFENLLFENQHKLLIGDPKLIRKRATSRHKSDNRDAANIFDLLIRSEFPTLWRRTPVSSARLELMRLRHNLVKQRTQTYNRLQALAHAAGLPKGKIRTYLFQARLQRIELSEAFNLQRQMLFEVVANLNQQISQLELWLQAQAAADAQVKLLLTQKGVGYLTALCLIDTIGDISRFTRPTKQVPAFVGLDPVEMSSGSKTKFGSISKAGSPLLRFLLGQATQSVSRYDQKLKAKYKQLSKKKHKAVANAFDPKRSRLFDGSVFD

SEQ ID NO: 355732 - protein, 366 aa, unidentified
MGLERTSVGLDVHARSVSAAAIDGVTGELIRQRLVPDQRVIVDWVRGLPGPAAVAYEAGPTGFGLARALTGAGIRCEVAAPSKIVRPSGDRVKTDARDALLLARLLRLDDIVAVRVPTVAQEAARDLVRAREDARGDLMRVRHRISKLLLRHGHVYYGGEAWTAKHEQWLRGIRFADPQQTGTQAAYDADLEALGLTLARRQRLDEQITTMAADSEFTPVTRRLCCLRGISTLTGFALAVEIGDWSRFTGASIGAYLGLVPSEHSTGNSRRQGGITTTGNTHVRRLLVEGAWHHQPGYRIGATMRARWDQATPAARVREHAGNQRLHARWTQLSRRKKTHTVACVAIARELAGWCWSLATLPDTDT

SEQ ID NO: 355733 - protein, 399 aa, unidentified
MAASWRVVIGVDTHLDTNHLAVITDAGKLVADAEFPTSPAGYDDAVRWARSFGSIVIAGVEGTCSYGAGLTRALQAAGIEVAEVSRPDRATRRRQGKSDPLDAYAAARAALAGDRLAVPKDAQTTALRAVLTARRGAVKAHTAATNQIHALLVTAPAELRERYRRHSISALVKALARCRPATHRDPTTVAVLTAAKALACRIEFLQHQQDDLTAQLDVLVTQINPALRAAYGIGPDTAAQLLVTAGANAHRLRSEASFAALCGAAPVPASSGKITRHRLSRGGDRAANNALYRIALVRMSAHSQTRDYVRRQDANGRTKKEILRLLKRAIAREVFRLLTRPGPIDDYSDLRPARQAKNLTLATVATHFAVPIITISRLERGHQRNDTLANNYRRWLTAA

SEQ ID NO: 355734 - protein, 347 aa, unidentified
MNFYTKQHKFYCGIDLHTKNMFVCIIDAGGNVRVHQNIHTQPEAFLRTIAPFREDIVVAVECMFTWYWIADLCTQENISFVLGHALYMKAIHGGKAKNDKIDSLKIATLLRGGMIPQSYVYPARMRATRDLLRRRNHLMRKRAELFAHIQNTRSQYNLPDPLGCIAKPQNREGIAQRFDDPSVQKSMAVDLEVIEAYDPILTQLERDIIACAKEHDLRSYALLQTIPGVGRILALVLLYEIESIGRFPQVQDFVSYCRLVKCIKESNGKKYGSSGKKIGNAHLKWAFSEAAVLFLKGNEPGKKYLQRLARKHGKAKALSILAHKLGRAVYFMLKNKEAFNQKKFLGL

SEQ ID NO: 355735 - protein, 344 aa, unidentified
MNEAYDDKQLVGIDVHRRRSVLVRMSESGELLGWERILNDRDRLAEVMAQAGEHPEVVLEATYGWYWVADAVAGMGANVHLAHPLGVKAFSYRRVKNDVRDAGDLADLLRMGRLPEAWIAPPATRELRELVRHRAKLVHARTSLRCQVHAVLAGQGVPVSVSDLFGVEGSKLLDELVLPQVYRYRIDSLRRLIAAFDVEIDATARLSRERLGQDQGFAAVKTIPGVGPILGAVFVAEIGDVSRFPGPAQLASWAGLTPKHYESDTTVHRGRITKQGSRLVRWAAVEAVQRTEKGTRLWVLRERVAARRGRNIATVAAARELVEMVFYALRDHTVRRLSRPLLAA

SEQ ID NO: 355736 - protein, 316 aa, unidentified
MNIQVFVGLDVSKQHLDVAVRPQGRHFVISNNDRGIKQLVKRLTALKPQLIVLEASGGYELLATAALAEAQLPVALVNPLAVRQFAGATGKLAKTDKIDAQVLAHFAEAVRPEPRPLPDQEQQLLKAALQRRVQMVKMIGQEKNRLEKTFIPTLRQDIQAHLAWLQQRLDQLDRDLNDQIRQSPLWRSRDRLLQTIPGIGPIVSRAVIAQLPEVGALPGKKAVALVGVAPYNRDSGRFRGKRMIRGGRSYLRRMLYMAAVVASRWNPVIRAFYQRLLAAGKPKKLALTACMRKLVLILNAMVKNDQPWNQFINQAP

SEQ ID NO: 355737 - protein, 338 aa, unidentified
MKSILKQVIGIDVAQKELVVAAGRLFSDLGKEIYSHRVFTNSEKGFAEMLVWVKKLTDVNAPLQFIMEATGVYHEKLAYYLTSKNHKVSIILPNKISSYMRTLDIKTVTDKSCSEAITRFGLERSLEEWKQPSPIYRKIKQLTREREQIVEERTVVKNQKHAEETEAYPNKSSLKRMQERIKMLIRQEKEIKEEIAVLIAKDEETQRVVNLLCTIPGIGQLTAAIILAETNGFELVRSRRQLASYAGLDIREKQSGTSVKGKPTISKRGNKYLRKAMHLPALCAIRYNEKFKMLFGRLVSKHGIKMKAAVAVQRKQLELAYTLFKNNSRYKADYKGEL

SEQ ID NO: 355738 - protein, 388 aa, unidentified
MIYVGIDVAKLNHFASAISSDGEELIKPFKFTNDADGFQLLSSHLDFLPDDSFIIGLESTAHYGDNLVHYLVNNGHKVCVINPIQTSTLRKNNIRKTKTDKVDTYIIAKALMLQQSHRFVTIDDINLMDLKALGRFRQKSLKQRTRLKIQLKAYVDETFPELQYFFKSGLHQKAVYALLKEAPSAKDVASMHLTHLTHLLEVASHGHFKKETASQLRVLARKSVGSPDSALSIQVVHAIEQMELLDSQIGHVEAEMTDIVKYLDSVIMTIPGIGYINGGMILGEIGDIRRFPGPKQLLAFAGLDPSVYQSGNFQAKRTRMSKRGSKVLRYALMHAAHNVVKNNSTFKAYYDAKMAEGRTHYNALGHCADKLVRIIYKMLTDKVEFNLA

SEQ ID NO: 355739 - protein, 327 aa, unidentified
MAKRTTICAGIDTGKRKLDVALDGSSEQLQIDNTPEGYKVLLDWLRRHRVKRIGIEASGGYEQAVVAELRRKGIVVVVFQPAQVSAYAKFHLQRAKNDKIDAALIAACTAAVKKIHTPPDARLLPFAEHLTMINQIGEDITLLKNRLETCRNERIQQVWKEDISRLAKRERTEFKALVAAIREHRDLAERLDLIYSVSGSGMPTAVAILVRMPEIGQLTREQAAALAGLAPYDDDSGNHVGVRHIDGGRQRLRRALYTAALPASFRWNPHLITLYKRLIAAGKGHKRALIACARKLLIFVNAVVARGIPWGHERPPTVAASALPQTG

SEQ ID NO: 355740 - protein, 311 aa, unidentified
MEHSRFVGIDISKDHLDVHVRPTGDSFRVRYDDAGLVTLVEHLRPLAPVVLVLEATGGHEVTVAATLASAALPVAVVNPRQVRDFARATGQLAKTDTLDARVLALFAEAVRPAARPVPDAQAAALGELIARRRQLVDMLGAEHNRRRLLRDRRLQRHLEAHIAWLEEALRRLDHDLTTLIRSTPVWRETDDLLRSVPGIGPVTAGTLIADLPERGRLDRRRIAALAGLAPIARDSGAFRGRRMIMGGRAHIRRVLYMATLTAITHNPVIRAFHQRLVAAGRPGKVALTAAMRKLLTILNAMLRDRRPWHPA

SEQ ID NO: 355741 - protein, 344 aa, unidentified
MERYLGIDPHRDSCTLALVSPRGKKVKQLVVPTAGSELVKTVREIRGPLHVCVEEGEWSEWISEILSPWVARLVVCRPVARRGPKSDAVDARELAERLRTDRTGHPVYKPGSEWARVREAVRLESKLTQDLTRTKLRLNSLYRRRGLTCPNGEIYLPRHRGKWVAKLPASGRPCAELWGEQIDLLGELLEKAEDQMHAAARRFPIWRTLQSAPGIGEKRASILLATVVTPHRFRTKRQFWSYCGLGVVTRSSSDWVRQPAGWVRAEVVQTRGLNRAANRPLKAVFKGAALSARLMLSPNPFRDHYDQMLEGGTKPNLAQLTLARKLAAIVLAMWKSESEYKPMS

SEQ ID NO: 355742 - protein, 416 aa, unidentified
MNSPAKSTSQRFLALDLHKHYLVVGGVNFRQQVVLNPRRISLEKWPAWAKANLLPSDAVVLEATTNAWDIYDQIVSWVARVVIAHPPKVKWIAEARVKTDRLDVLRLAHLLAADLIPEVWVPPVEVRELRALMAHRRRLVQMGTRARNRLHSLLHRHNLKPPAGKIFAQKHREWWQKLDLSPTQLMRIRHDLATLDHVQGQLAEIEQELSRLSTAEPWADQVPFLLQLPGFGLIVSLTVLAAIGDISRFSHPKKLVGYAGLGASIHDSGEKHRTGRITKRGRKELRWVLVEAAWRAADTHPYWKAQYERLERRIGSTKAAVALARKLLVAVWYVLTQRTSDRHADPDKVAFKYIMWSWKLDDVKRNGLNTRQWTRYHLMRLQLGEDLTHILRGGHRYPIAPGEELRALLPELQAAD

SEQ ID NO: 355743 - protein, 419 aa, unidentified
MSTEKRKVYGIDVHKAFLVATVLDREGKSETRRIQQNPESLLEFRDWIQSENCESVAFESTADYWRSLYLVLEGRVPVTVANAHHIKHVPGRKTDITDSRWIAQLELNNLITPSRIFVEEMYDLRSLTRSRELLVQNRTELKNKIHHLLDSTSIRLSSVLSDLFGKSGTIILKGLVQNKPFEEIIESLPKKMRGSADAISSALPASIPPVFLVLLQSYLKLVDDLDNEIKLLEGRIREALINKSREIQILTSIPGIGFIGASTLIAEIGDVHDFEDADKLTKWAGLTPSVYQSANVTRTGSITKQGSRHIRWILVELGHVAIRSPGRIRTFFERLMPKKGYKKAIVAVARKMLRIVWHLLVHDEVFVDDFPRSKQVKFPKMPKKIQAVGINRIIELLSTASEVIFKDRNQEIFRLGLSD

SEQ ID NO: 355744 - protein, 397 aa, unidentified
MNTSYAVFCGIDVGKGEHHAVGLDASGTRLFDKALRNDETRLRAVFDGLAVSGPLLVIVDQPNTIGALPVTVARACGHDVAYLPGLSMRRIADLYPGQAKTDARDAFIIADTARTMPHTLRRVDTGDETLAELGVLVGFDDDLAGEATRTSNRIRGLLTGIHPALERVLGPRVTHPAVLEILARLGGPDGIRRAGKRKLTSVAVKHAPWMGARLADEILAALDAQTVTVPGSKAAEIVLPHLADSLKEVLLQRKRICEDVERMLDDHPLSHVLISMPGVGVRTAARILLEVGDASAFKSAGHLAAYAGIAPVTHRSGSSIRGEHPARSGNRKLKRALFLSAFAALHDPTSRAYYDRKRAEGKKHNAALICLARRRCDVLYAMLKNKTLYQTPAAAAA

SEQ ID NO: 355745 - protein, 411 aa, unidentified
MKVVHEVCCGIDVHAKMLVACLILVNGEKQVRTFSTMTDDLLRLRDWLVAAQCTEVAIESTGVYWKPVFNILEDALTVILINPEHARALRGRKTDIKDAQWLADLLRHGLLKASFIPPPEIRELRELTRYRESLVREQGAVANRIQKLIESGNIKLGQVASDALGASGRAILWALAGGEKDPHKLAGLARGKLKEKSLTLERALEGRLTVNQRYVLGELLQRWEELEKADARVTKEIDKYVQAHPKLARAREILDGIPGIGLRVAEVIIAEIGIQMAVFADAAHLASWAGLCPGNKATGGKRLSGRTRKGNTYLRSALVQAAWGAGMKKNCYLSSQFFRLTKRLGRKKALVAVAHSLLVIIFHVLQSDQTYTELGGDYFDRHHVEQQRQYYLRRLHLLGLKVTVEELPQAA

SEQ ID NO: 355746 - protein, 422 aa, unidentified
MKKRIYRKIPVNQFRPDAVLDADLGGRLVVAIDVAKVNMVAALATTTAQVATIISWKAPYENAAVIEILRVFRTRGLVVEAVMESSSTYGDVLRAQLEQDGFPVFRVSGKRTFDAQEVYDGVPSLHDAKSASIIAKLHVDGASKLIRPDPPERRQLRAAVAIMDLHQERYLQLVHRLESWLARHWPELTSLIELTSSSLMALLARVGGPADVAAHPERARTVLHGISHGLIDTDTIAAVIASAKTSLGIPLVGLERDALVAIATEAYHAHREFASAKSAVDRLACQTPAAALAPVIGHSTAAVVFTDVGDLRTYSCTRALLKAMGLNLKEKSSGFFQGQLKITKRGPSRVRQYLWLAVFRWIQIDPIARAWYTHKKQRDGSRASRAAIALMRKLVKALFHVARGEAFDSTKLFDVSRLSLAK

SEQ ID NO: 355747 - protein, 339 aa, unidentified
MNEVTLIGIDLGKHSFHLHAQDAAGRMVFRKKLSRQQLLRTLANVPPCRVVMEACAGSHWLARQLAGMGHEPRLISPQFVRPFVVGNKNDFGDAQAICEAACRPSMRFVSPRNEAQQTVSAMHRLRERLVRERTATVNQIHGFLLEFGISLPRGAALMSRLPTVLDHETLPPRLVGLVVRLRAQVHYLEEQLRQVVQDLKASLREDDKSRRLLEIPGIGPITASALAVELGDARQFANARQFAASIGLVPRQYSTGGKPTLLGISKRGDRNLRRLLVQCARAVMQHTASRTDALSLWVKTLSTRRHSNVVACALANKLARIAWAVLARGTHYQARALTT

SEQ ID NO: 355748 - protein, 345 aa, unidentified
MELHTIGIDLGKTVFHLVGLNLHGEVVVRKKFSRTQLLRFTANVHVGLIGMEACGGAHFLGRALREQRHEVRLIPAQYVKPYVKTNKSDYIDAEAIAEAVARPTMRFVPIKTDDQLDLQSLHRVRERWVMRRTAVINQIRGLLLERGITLRKGRCYVGAALPGILEDADAKLSGALRMLLAQLKLELDQLDLRIDEADALIKKTACENEACQRLVAIPGIGPLTATAIIAAIGNGGAFRKGREFAAWMGLVPGEHSTGGKQKLLGISKRGNSYLRRLFVQGARAVMQQRTKQSSGLSRWLAQLTSRTHRNVAGVALANKLARMAWAVLAKNEPYRPPVLADVAAA

SEQ ID NO: 355749 - protein, 360 aa, unidentified
MAIVAHAHPFVIGADTHARTHTLAVLTAAGEQVACEQFPTTAAGLARAVAWAARRTGGDLAVLWVVEGTGTYGAGLARAAADAGYQVVEAARMGTRTPGTGKSDPADAARIGAAVLPLDTTRLRRPRTDQGVRAALQVLVSARDHMTSERTATVNALTALVRTTDLGIDARRPLTNRQTTQISGWTTQDLASTSTEDLATTTARNEAARLARRVVELDTQIKTNSTDMDRLVRASAAAPLLDTTGIGPVTAAVCLVAWSHPGRVRDQAAFAALAGVNPVPASSGNTVRHRLNRGGDRRLNRALHMATVTRMTHDPETRAYVDKRRAEGRTTKEVRRCLKRYLARRVYRTLTSASTTPDPT

SEQ ID NO: 355750 - protein, 385 aa, unidentified
MQKHHDDSKACLTAFVQDNTVIVVIEMSLASWVVAGLIPGVNREPLKKIAADPEELLRLLYRWRDQAIKAGKDITRIAVAYETGRDSFWLARWLRDRGIDAHVIHATSVAISREHRRAKTDRIDTAMLRRGFLGWLRGERGHCSMAVVPTIAEEDAKRPHRERESLLKERTSTINRMKAILAQFGVRNFKPSLRKAAEKIDAVRTPEGVPLPPNAAAALRRQIERFRLINEQIKTVEKTRMQRLRHNPAGKYNTMVFLLVRIIGLGIETAEQLVHEMLSRNLRDRKAVARYAGVTGSPDESGASRREKGLSRSGNGRVRKILIQLSWRMLQFQPDSRLVRWFKNRTANSQRSRKPMIVALARKLIIALWRYVNTGVVPDGFKLAK

SEQ ID NO: 355751 - protein, 386 aa, unidentified
MRIALGLDLADKKCAAYAVPVGKAKKAQREFLDGFNKDFRRVPTTKEDLQRMVDVLKDESDGIHVLIENSTITHKVYWLLVGMGCEVLVAQSADLLRITESVTKNDDNDAMELAAYMRRRLNGEDEFRTVMMTPPEIMAKKMFIRAIYVDKTYLSECKKRLRFRLKVMGADLRREYKDISCERSLTQLRETGDPYLCYEVAVIRATKSRIQDGERYISTLFKDDPYFDLLMTIPGFGLEISAYISTIIIDIDRFDDKKQLEAYSGLVPRQRSSADSDPNCRTTHHGDEWAREFLGYAVKAHVMWAKDSVVTIMYNRLRARGMPYKKVITACSRKMVDVVWSVLKNGRSFTSDQNVLRQARGAAAEIERMDSELSEQELDAKYAEAA

SEQ ID NO: 355752 - protein, 349 aa, unidentified
MEQNEVILGVDTHLDTHVGAVISDTGRLLGTRSVSTDTAGYLDLLTWANSLGHLRRAGVEGTGTYGAGLARVLRDHEIEVLEVNRPDRAMRRSKGKSDPTDAENAARAVLSGRATAIPKEQSGAAEAMRAVSVARRSAVKAKTQAINQLRALLVSAPQEIRDRLLKAKAAECVEGCVRLRSLGKTPMLQTLTTTLRLLAKRWLTLAEELKALDTMLDSLTSQHARRVRERFGIGPQTAAVLVAVAGDNPERLKSEAALAALCGTSPLQASSGKTVRHRLNRGGDRSANNALWTIAMVRMRSDPRTRAYVERRTKEGMSNKEIHRCLKRYIVRELYPLILADLADSTASA

SEQ ID NO: 355753 - protein, 360 aa, unidentified
MINVGIDVHKKRCQACLKDEKGRLIEELNIPNTTEGAEQLASMLTTYGEAKIVLESTGNLWIRLYDTLNQHAPTFKVVLANPNKTRIIAEAKIKNDRMDARVLADLVRADLVAESYVPNHEIREQRALLRKRRSLVNDIVAVKNRIHNQLDKYDLQPHYSDVFGKQGREWLRNLQLPPIERTILDVNLKQLQSLEESVQAITVKIAQEAIDRADVKLLMGFTGIDYYSAMLLLSEMGPITRFPSAKKLVSYAGLAPGIRQSADHTVHGRITRDGNKYIRWILIEAAQNASRFDPKLRPFYLRVAARRGHQKAITAVARKMLVSIYHVLKRQETYHGQRDELLERKINRLQRTVDSSLQAE

SEQ ID NO: 355754 - protein, 308 aa, unidentified
MTTIYTGLDIAKLNLQLELAGRPYDLPNTAPGHRRLVQLVTRHPGAHVICEATGGYERDVVAALQAAKVPVSVLNPARVRHFARAQGQRAKTDNIDAAVLTAYGQALQPKPTAPRTEHEQQLTELVRRRTQLVEVLVAQRQQAEGLRVPAMRRQAQSLIRRLERDLAQVEAQLKALQQQATELQVRVQKLEAITGVGMITALSVLAELPELGTLNRQQAAALAGLAPHPRDSGQWRGQRHIGGGRAPVRRALYMAALVAARSNHVLKAFYQRLRAAGKPAKVALTAVMRKLVVLMNHTLKHPNFVLQN

SEQ ID NO: 355755 - protein, 329 aa, unidentified
MYYVGIDVGSKELVMCIRHKGKNYKAKSFENTPKGHAKIIKILSSKKGDVSICLEATGIYHFDLAVALIRSNLSLMVVNPKSAKHYFEALMTRSKTDQVDAGVLAQYVETMPFNAWKAPDNNVLELRALSRRIATLTKFKAQMKNQLHALDSTTSTSDMIKNEAIQSIKFFEDQILRLKKHALTIIESDNGLQRYLKIITSIKGIAETSAIQLLGELLILPADMKNRQWVAFAGLDPRHHQSGTSVLKKSRISKAGNAYLRQALYMPAICAAYRDPYVKGYYQHLIVDQGLKKMQAVCAVMRKLLHAIHAMLKTDTCFDNTRFYDMAVS

SEQ ID NO: 355756 - protein, 312 aa, unidentified
MAQMVKTAGIDVSKAWLDVAIWPTREATRVSRDAAGIATLIAWLTEHEVIRVGLEASGGYDREVTDGLQAAGFEVAQLNPLRVRRFAQAKGRLAKNDTADARTIAQFTAVMVEDVPSQRRRDLDALAELLTYRRQLKGWSTDCTNQLEHLRDAAWRKDIEHKKAGFERDLKRIDQKLADMVAKHDDWSALARRLRTVPGVGPVVSATLIALLPELGALSRRAIASLVGLAPFDHDSGKHQGERHIWGGRKLVREALYMAALSARTHNPVIAAFAERLKGKEPKVILTACMRKLLVILNAMLRDGTDWRAVDA

SEQ ID NO: 355757 - protein, 362 aa, unidentified
MGKASWLVRSVVPGVERQPLKKLEPDATALLRLIERWRSEAVRAGRPISRVALTYEAGRDGFWLARWLIARGIEAHVIHSASVAVSRERKRAKTDRLDTAMLMRVFLGWLRGERGHCGMVAIPTIEEEDARRPSRERESLVNERSRIINRMKSALARLGIRGFKPHLRRAPERLACLLTAEGTSLPANIIEELRRDMARLALVREQISAIEKTRVERLERAPDTGPHAMVRLLSRVIGIGIETADMLVREILSRKLRDRRAVARYAGLTGSPDESGLKSREKGLAKAGNARVRRGLIQLAWRFLMFQKDSALARWYRIRTEGPNGARKTTMIVALARKLLIALWRLVTTGEIPDGVELRPAA

SEQ ID NO: 355758 - protein, 386 aa, unidentified
MSTKPRSWRRCGYLGATRARQVITETFGTNTQALVTLRDWLQAHGVTHVAMESTGVYWKPLYYVLEDAFTLLLVNVQQLKHVPGRKSDVQDSAWIAQLLEWGLLKGSLVPPVPIRDLRDLTRYRKHQIRDRAREVNRLHRILEDAGIKLSTVATNVMGASGRAMLEALLRGTTDPVVLADLAKGKLRKKLPALRQALAGRFRDHHQFLIGQILGKIDFLDDTIATLTEEIDLDTIPGVDRKGAVTLLAETGGDMSRFRTAAHLCSWGAMCPGQNESAGKRRSGRTRQGNPYLRTTLIEGALAAARAKGTALQSRYYRIKRTRGHKKAVVAVGHQMLEIAYYVMRDAVTYQELGADYFDRQHRERTTRRHIRQLEALGYRVALEPVA

SEQ ID NO: 355759 - protein, 394 aa, unidentified
MHKDTHCAVVIDCWMNKLGEINFENRPSRFPAFVEDVRKICGTKEIVFGLEDTRGFGRNLAAYLVGRKFEVKHVNPAYTSAVRLANPIIYKDDSYDAYCVARVLRDMVDTLQDAKHEDIFWTIRQMVKRRDLIVKSNVMNKNQLHSQLAYSYPSYRKFFAMVDSKSALCFWENYPSPEYIWNTTPEEIYQTIKPVHQALKIQRIHEIISMIERDGDTRKDYQPERDFIVRNIVKDIRHNKELIAEIDDELRKLIPLTGYKLHTMPGIDLVTEAQIISEIGDINRFPDSDKLARFMDLAPVQFSSAGKGKDQRCRNGNRTLNAIFHFLAIQMVAVSASGKPRHPVFREYFEQKVKEGKNKPQALVCVARRLVRIIYGMMKTRTEYRPYEKVDDKN

SEQ ID NO: 355760 - protein, 355 aa, unidentified
MKYNYDYTGRKIFVGVDVHKTTYAVAIVCDKAIVKRDTLCAIPEVLGDYLEKHFVGAQINCAYEAGFSGFGLHRHLIKRGINNIVVHAASVEIGARDKVKNDKRDALKIAVQLEAGRLNGIFVPSIEMEEKRELTRLRSTFVQDRNRIATRLKLKAHYHGLIGPEDHKRVSNEWIEMLMNKQMLPGIQYSITALAKEWHSMNEKIKELEFFLAEQAKGDEYLESVYRSAKGIGKTAARILANELGDMSQFPSERNLFSYTGLTPSEYSSGEHTRKGHISRQGKPILRSTLVQCSWIAIRYDKELNQAYERISKRAGAKRAIVAIARKLIGRVRACFRTGELYRSQELLSVEEAVA

SEQ ID NO: 355761 - protein, 377 aa, unidentified
MKRIKFVGLDVHAETITVAVAEQEGEVRALGVIPNRVESIRKLVKKLGPVGQLRFCYEAGPTGYAVYWQLTALGAKCEVIAPTLVPVKTGDRVKTDRRDSLKLARNYRAGELTSVWVPDAAHEALRDLVRAREVAKKDQLRARHRLIKFLLRHGRRPPTGVKPWTLNYLSWVKHEVHFEPMAQEATLLDYLNEVEHAELRIARLNLAIEEAVKLTPPKMRAVIEALQALRGVAQVTAVTIVAEVGEVSRFTGARQLMGYGGIVASEHSSGESTWRGGITKTGNAHLRRVVVEAAWAYRHRPSVGETLRKRQAVVSEEIREIAWKAQHRLHTRYQKLMARGKEKEKVVTAIGRELLGFIWAIGVKAEAAQEKTERRAA

SEQ ID NO: 355762 - protein, 370 aa, unidentified
MKTKTITPSVVRTSPASAASSGFTLGLDLGDRSHHVCAMDATGQIIREGSLPNTRPALAKLMAEFPQATVALEAGTHSPWISRHLTELGATVLVANPRKLHAISRSERKCDRRDAQMLARLARVDPALLHPIQHGSAQAQHDLLGLKLRDALVRTRVNLINAIRFTLKSLGYSVRNPSSESFHKTVLADIPADCLPVIQPLLTVLAQVTEQIKGMERDLVQRSRKDYPATQRLQQIAGVGPLTALCFVLKIGDPQRFSRGRDVGAYLGLCPRRDQSGGTDKQLRISKCGDGLLRRLLVSAAHYILGPFGPPCALREHGLRLAGTGSAREKKRAVVAVARKLAVLLLSLWKHGTDYEPRVTASPTLVMTPA

SEQ ID NO: 355763 - protein, 446 aa, unidentified
MSQKDIPDPLEAEFAAFIAIDWADQKHVWKLKVPGSSKIETGELEQKPEAVEVWASQLAQRFQGLLAVCVEQSRGALVYQLLKYPHLVIFPVHPSSAARFRQALHPSGAKDDPLDTEVLLELLLHHRQHLRRLVPDTPETRLLQGLVEQRRRLVDEKTRQKNRLTDCLKIYFPQALEWFDLDTALAGEALRRWPSLPQLQGNHPGALAKFFRQHHNRQAEEELLERIRQIHAAVPATKDLAVVETGMAVVRAGMDLLEVLHRHITALDKQIALAAAAHADAFIFASFPGAGPALMPRLIAAFGSLRERYQQATELRCYSGIAPITERSGKTSWTHFRWQCPKFLRQTFHEYALHSLPGSAWARACYQAQPEKGKGHHAAVRVVAFKWIPILFRCWKDRVPYDEHIYLQALRKRKSPYVPALAPLIDVTQIRWQSASGFQKLTADFS

SEQ ID NO: 355764 - protein, 411 aa, unidentified
MHEKQKHIYVGVDLHKQHHVAVIINCWQEKLGEIKVENKPSAFPTFLLDIDKLIEEGLTPVFGLEDVGGYGRALAQFLTDHGQVVKEVNPALSYAERKSHVTVQKSDSWDAECVARILVRQLSHLPDAKPHDLYWSIQQLVTRRNALVKAQGALKNQLHIQLSHHYPSYKKFFSEVDGKTALAFWERYPSPSCLEGVSIKQLTTFLLEVSNNTCSVKKANEILKLVKEDGNTTKEHQETRDFLVESIVRHILFGKQEIGKVERELKQLMSLLDFQLDSMPGIDLVSASALIAEIGDVRRFPNANKLARFAGIAPVYFGSGGKGKEHKSKQGNRALHALFYNLAVQQVQVAKGSKLPRNPVFHAYYQRKLKEGKTKGQALVCIMRRLVNIVYGMMKHKTAYKLPIVQEKEVV

SEQ ID NO: 355765 - protein, 337 aa, unidentified
MKTTTSISPPPRFFLGIDVGKPDLYCNIIGPDQSSSERFDNTPEGIKHLIKWVIKTAPSEQVSACLERTGHYGDAIAIALNAIGLASLHLVNPHQIKAFGMQKLRRNKSDTADARLIARFLKSEYLELRPWCPRSADQQKITELSRYADSITQDNARLKTKLDAQPDKTIGTSLRRRIKAQKKELDATRASIARLIKANPDLHAKSQLLKTIPGLGEISTQIVIAELPDLEEFANARQLAAWVGLTPRHYESGTSGRTRTPITKIGSVHLRRGLFMPAMTARVFNPLLKTFADRLKENGKKPKQIIIAIMRKLLHQIYGILKSGQPYNPEKRGYAGT

SEQ ID NO: 355766 - protein, 344 aa, unidentified
MENYAGIDVSLELSSVCVVDAQGKILKEAKVASEPDALVEFFEAVGFAVKRIGLEAGPLSQWLHAGLKGAGFETVLLETRHVKAALSAMTVKTDRKDARGIAQLIRMGWFRPVHAKSVDAQEIRALLIARKQLLGRLIDVELSIRGILRGFGLKVGPVTRKTFEARIRELVAGQATLERIAAAMLSARSALKAEYGRLHKAVLAIVRDDAVCRRLMTVPGVGPLVAITYKSAIDDPHRIVKSKAAGALFGLTPKKYQSGEKDVTGGITLAGDETVRTVLYEAANVLLSRITRFSKLKRWGMDIAKRRGSKRAKVALARKLAVILHRMWVDGTTYRWAEAAPIAA

SEQ ID NO: 355767 - protein, 341 aa, unidentified
MVLIKKGAVVLKKRLKREALLNYLSQLPACMIGIEACGGSHHWAREIQKLGHDIKIMSPQYVKPYIKTNKNDSNDAEGICEAVSRPSMRFVPIKSVLQQEIQLIHRSRSQVIKQKVAQMNSVRGLLHEHGIAIGLGKSRLYKALVEITSPDSEVFAERTKNIFIRQYEILKRFDDELAYYDKEIKVLAHDDAQCKKLMQIPGIGEITATALSAAISSAHDFKNGRALSAWLGVVPRQNSSGEKHRMQGISKRGDCYLRSLLVHGARAVVLWSSKKDKPNKHECWINQLVARCGWNKSVVAVANKTLRIVYGVLKTGEAYDPNLAHGELVDVATGEVINEII

SEQ ID NO: 355768 - protein, 445 aa, unidentified
MSAQRSFRHGRKRKRVTLCRKVLARSLPVPERDVMNTYRIAGIDVHKRMLAVVIADLTKDGIEFQRHKYGASPEHLKMLAERIVSDGVQAVVMESTAQYWKPVWRALEGKCQLHLAQAHSNRAPKGRKRDFEDAERLTRRFVAGELILSYVPDREQRLWRTLTRSKNQFIREKIDATNQMEAFLEEAGIKLSSLVSALNGASSRRILKALSENQTDPSKLAELGDPGLKASRAQFVDALSAAATLDAGYRKLLGLFLRRIEEAERRIQELHELIAQRLKAHNDAVVRLSEVPGLGADSAQQIIAEVGPEAKAFLSPAQLASWVGVCPGSNESAEKQRDTKSPSGNRPMRRILSLAANAAIKAKGSIFDHTYKRLVGRTGHNKAVWAVAHKLLRVIWKVLHDKVRYQEQGLRTNPAAARKRALRLIAQLKRLDYCVQILREPALST

SEQ ID NO: 355769 - protein, 390 aa, unidentified
MYYCGIDVAKHKHAIALLDEQGQPVQRAFTIENTRAGFDHLLQALAQLQGPVLIGLEATGHYWWALYEDLTRHNHPVVVLNALQVHAFRKSGVRKVKSDRTDASWIAEFLRFSQPEPAQPTTAVFLQLKEVSRFRYHLSDQIGDCKRKLLSILDRVFPEYETLFSSVFLSSSRQLLAKAASAQELATFDLSELTDLLKTTSRGRFDRPKAETVQTLAKQSVGVRFLADAAQLEVRCLLAQIDLLEDQRDQVDAALAQLMAQVPQHLTSIPGVGPTTGAALLAEIGDIQRFDAPEKLVAYAGIDATVYQTGQFEARQMHMSKRGSPYLRHALWQAAAMAIQYDDELRTYYDRKRSEGKSHGTALGAVCRKLITRIYIVLKENRPYEVRPQH

SEQ ID NO: 355770 - protein, 345 aa, unidentified
MQPMYYIGLDVHKRTISYCVKDGSGAIQGEGTLPATRAELDRWMKTLPQPWTAAMEATVFTGWIYDHLQPHAATLKVAHPLMLRAIAAAKKKNDRIDARKICDCLRCDFLPECYMASTAIRERRRTLRYRNLLVRQMVQVKNKTSMLLMEAGVSYNKQRLHKAGYFRELMATNPDINDGLRSLLRLCRETVVRLSKTESALVRSLERDPQLLERVERLMTIPAVGPITALTWALEVGDVKRFSSIKKAISYCGLCGAQKSSGNTTLRTPLSKQRNKHLQTMLIEAAKMAPRYSPTLALLYDQEKQKDNANRATLAVARKLVAYLMAVDRGERNFRVPENNNSIAA

SEQ ID NO: 355771 - protein, 431 aa, unidentified
MSTLDIVVPTPAAAPTSEFDGKKTRGQLDNTPEAIEVWAAELAQRFGGRPVAVALEQSRGAVIAVLSKYAHLALFPVHPNSLANYRKSFSPSGAKSDPVDGDLILDYLVKHPEQLRCLRPDTVETRSLQFLTEERRKLVDAHTATLQSLIHWLKQVFPQIVRWFDDPGAPLVADLLLRWPTLQELKKAQPKTLRKFFHQHNCRSEERTQERLDQILQAVPATDDPALLQTGTLSIQNATRILASMRQGIAEFDRRIAVIYQAHPDRFITESLPGAGPALEPRLIAAAGSLRDRFTSAYNMECCFGIAPVTETSGNSIWIHWRWACSKFIRQTFHEWAACSIRSCDWARAFYDRKRADKKSHHAAVRALAFKWIRIFFRCWRNRVAYSDQHYEEALRTRASQSKPTKTVSKVNSAVEWKSCAGFSRPVKFSS

SEQ ID NO: 355772 - protein, 349 aa, unidentified
MGEVSTIGVDIAKSVFQIHGVDAAGMVVIRKRVGRAKVLKFFAGLPPCLVGMEACATAHQWARELKKFGHDTRLMPPTYVKAYVKRGKNDAADAAAICEAVTRPSMRFVPIKSVEQQSALMLHRTRDLLIRQRTQLINALRAHLAELGLVAAKGHEGLHQLVTAVAESSDERLPSNARFACQAIVAQLSAVQTQINGIDTRITQAHRANADSKRLDAIPGFGVILSTAVVATMTDPKAFKTGREFAAWIGLVPRQNSTGGKERLGSISKQGDRYLRRLLVLGAISIVGTARTRPDKYPWVTELLGRRPAKVVAVALANKMARTAWAVLARGETYRAPTRSSSAAIAAAA

SEQ ID NO: 355773 - protein, 322 aa, unidentified
MKSIIYIGMDVHKKTYSLCALLKETGEIIGETKIPADVSLIIKFIENAKKSVDSDDVQIKTGYEAGCLGYSLYWQLAAKGIECDILAPSTMHRSAKNKVVKNDRRDAKNIAANLANGTYKSVYVPTDEDVEIKEYIRMMHDFKIELKKVKQHINAFLLRFGHHYPGKSKWIPAHIKWLKELELSDMYREILDEYLSQLEILSEKIERFKHRLEELSQKETYNEKIGQLRCIKGIDTTAAMTMHAETSDFDRFPTANAFASYCGLTPGEDSSGESYHRLGITKQGNSMIRTTMVEAAQVLRQKRQKSEIKTERSECKSYRLCR

SEQ ID NO: 355774 - protein, 333 aa, unidentified
MKIIGCDFHPSFQQIAMVDTETGEQTERRVTLAEAVEFYRGLAGPVRVGMEACGNTLWLERLLAELGHELWLGDAGKIRAMEVRKQKTDRRDAELLLRLMLEGRFPRLWVPSQEQRDLRQLLIHRHKLVGMRRQVKNQLQHLALNQGVQQKRKLWTQAGRKLLEELPLTGWTARRREEALQLLDDLDHRVGELDGAVEQAAEKDAVTQLLKTHPGVGPITSLAFALTLGDVGRFAHSRQVVSYLGLNPSEHSSGGRQRLGAISKQGNPMVRSLLVEAGQSAARLVPELKRAYQRLKHRKHSSVAKVMVARKLAVRLYWMWKTTTAFNRHSHAG

SEQ ID NO: 355775 - protein, 348 aa, unidentified
MNPTTVAVDLAKSVFQISIADDKGHILKRQRFTRRQFERFLEEIPPYHFVLEACGTAHHWGRLLLSLGHTVVLLPPQYVRPFVRRTKTDQRDADALVQAALSGEIPPVAVKSCDQQQMVALHRVRAGYMKTRTARINLLRGLLAEQGVAIAIGARIGLAQIARLIHDDETELPGLFRECAQGVLEEISGLEKRVAAIEAQLRTLAKEDVAQELQTIPGIGLLTSTALVGSVARIDGFPSGRHFASWLGLTPREHSSGGKQRLGRITKRGDTYLRCLLTHGARAVLLSAKRQHQAGKPLPHLQAWAVQVEANRGHNKATIAVANKLARIVWAVWSTRRPYESEPARQAA

SEQ ID NO: 355776 - protein, 340 aa, unidentified
MTITTVGIDLAKNVFAVHCVDQHGKTVLVKPKVPRAALPELIASLPPSVIGMEAYSGAHYWARLFRQYGHEPRLMAAKFVSPYRMAGKSGKNDAADAQAICEAVRRPHMRFVPVKDESQQAMQCLHRTRQGFIEEKTATYNRLRGLISEFGVIAPQSTDALRHMVSEQKKSLPLQVQQCVDDLLKHIDRIENNVTEYDRFLSRMAKVDHRSQRLMELKGIGPTTACALVASIGNAHDFKNGRQLAAWLGLTLSQYSSGGKSKLGRITKAGDSYLRTLLVQGARSVLIGAEKKTDSFSRWVCSLVERRGYWRAVVAIAAKNARLCWASLHYGDDFRLYSVS

SEQ ID NO: 355777 - protein, 338 aa, unidentified
MIVIGVDVHKQSLTAVAVDEAGRMLDERTVTGANDGLVAWASSLSDERLWALEDCRQLTRALERELLAAGEELVRVPPKLMAPERRAGRARGKSDPIDALAVARAALREPRLDHPRPAEQRLRELKLLVDHRDDLIDERRRAQQRLRWHLHDLDPTLAVPLGALDRAVWLDRLGRWLARREQTTQVRIARQLLGRCRASTREIVALERELEARAQTLAPRLLELPGCGPLSAAKLLSEIGPIERFANDARLARHAGVAPLEASSGKRLRHRLDRGGNRQLNCALHRIAVTQGRVHAPARAYLERKQGEGKSRREALRCLKRQLVRTVYSTLKAESALT

SEQ ID NO: 355778 - protein, 404 aa, unidentified
MHYVAVRPDRDPQPVRRFECFTADLHRLADWLQRCGVKTVAMQSTGVYWIPIYEILEERGIQAYLVNARHTKNLPGRKSDVQESQWLLKLHTYGLLNNSFQPPSEIRVLRTYWRQRGEHVRGAATCVQRMQKALTQMNVQLANVISDVSGLTGQTIVRSIVAGEHDPRKLAELSDPRIQASREEVAKSLEGNWRPELLFVLQQEVAMYDTYQQRIAECDQQLQKHLAGFANLIPLQPTEEEPKRKKTKPAKNAPRFELRSELQRITGVDLTRIDGIDVMVAQTLISEVGLDMSRWKTEAHFSSWLGLCPDNRTSGDKVLARGTRRVVNRAATALRMAAITLMRSRTYLGAQYRRLRTKLGAPKAITAMAHRLARLAYRMLKYGQRVSTSLRPALMEFSEFFLVC

SEQ ID NO: 355779 - protein, 329 aa, unidentified
MKKHYIIGVDVSKLKLDVHCYGQSQSLLVSNDSRGFKELLKWIRKEISKDVSSIMVVMEYTGIYTYSLEKFLHDCELDYVKRPALDIKQSTGMKRGKTDKADAIMISEYGWYRKEELRPMKPVSKGQQQLQQLMAYRDKLVADKASYETRLKELKGQLGKILHSKVIESTEHVMQMLETEIKETKVAIEELVGREQELQINYDLLRSVLGIGFVTAIHFLIVTENFSRFNNPRKFACYAGVAPFEHKSGSSIKGKTRISHLANKKIKSLLTMAAYCAINHDRELKTKYEQKLKEGKAKMSALNIIRFKLIERIFAVIKRQTPYILSQAA

SEQ ID NO: 355780 - protein, 317 aa, unidentified
MNETTSVIVGIDVSKAMLDVAVRPAGMTLRFTNDEAGIVALVAEMKGLTPALIVLEATGGFETSSAAALAAASLPVAVVNPRQVRDFAKATGRLAKTDTLDATMLAHFGDVIRPAVRPIKDADLQALEALTTRRRQLLGMLTAEQNRLPMASAQTRKDILQHIAWLKKRLKDIDAQTTRRIKESPLWLAKDRLLQSVPGIGQITSSILLTALPELGKLNRREIAALVGLAPFNRDSGTLHGKRSVWGGRAEVRSALYMATLVAARFNAVIRDFYTRLCAAGKPPKVALTACMRKLLTILNAMLKANTTWAQSTPRNA

SEQ ID NO: 355781 - protein, 343 aa, unidentified
MTLHVGLDVSQKLTAICAVDDTGRRLWRGQCSSDPEQIERAVRRHAGDDARIGIETGPMTPWLVHGLRDRGLDVTCLDARHARAALKMQINKTDQNDAEGLAQIMRTGWYRSVHVKSFDAHRARALLGARAQLVGMTTRLSNHVRGVLKTFGMLPGAMRGLPFDRRVEAMLADRDDVAPIVRPILVAWRQLREQIAAFDKAIRALAKSSPACRLLMGVPGIGVLSVLAYVSTVEDPTRFARSRSVGAHLGLTPKQYQSGEVDRSGRISRCGDTLARTLMYEAAVVILTRVKRASSLKDWAHAIARRSGPGKARVALARKLSVILHSIWRSGEPFRWSEQPPVA

SEQ ID NO: 355782 - protein, 320 aa, unidentified
MTSRGAEKMKNDTIGVEVSKDHLDAHRLADGATRRFPNTKGGYKALIKWLTETPLYRVVFEPTGPYHRAVERALGASGVPFVKVNPRQARRFAEATGKLAKTDRLDAAILARMGSLLELEARPARSEVLFELKELYVAREALVKDRTAARNRGKALTLSLLKRQNAQRLEQIDRQIATVEAAILQLVEADESLADRFAILISIPGVSNITAFALLIAMPELGSLEAGKAANLAGLAPIARQSGRWTGRSFIRGGRADVRQALYMPALVAARFNPDMKAKYAHLIETGKPAKVALTAIMRKLVVLANALLKANRTWTPRTA

SEQ ID NO: 355783 - protein, 383 aa, unidentified
MQPTQVKNFTPDEVVLAVALELSKASWKIALNDGKRDKPAIHTVTDEEASTRLAHAAAVIEEVKRKWKLEAGVRTVVMYEAGQDGFWVQRGLAKLGYEALVIDPASIPVERQARRAKTDRLDAIKLVTCLRGWLRGERDRMHVIQVPSPEAEAQRQLVRDRGELQKECGQHRDRMRKLLCTVGCKDPVEGDFAERLAHGAIRCYDGTALAVELQERLSRECERLALAQQQLATLEKRLVKQLPEPAQERIATLSKLKGVGEVGAMRLVLELFWRDFANRRQVGSCVGLVPQPYDSGESRVDQGISKQGNRRVRALLIEMAWMWLRYQPESGLARWFAQRTQGSGTNKRGKRIAIVAVARKLAIALWRYLKEGVIPEGAAMKAA

SEQ ID NO: 355784 - protein, 447 aa, unidentified
MNNYYLGCDVSKGYCDFIFMNQQKEVVEKNFQLDDNHNGHERLLKLLNNFVTKHNPGRIYIALESTGGYENNWIKTFKKIKETLPIEVTRVNPAGVCFSSKAELNRNVTDKTSAKTIAEYQINHSEKINYNQSEDMFSLKKYWKTLSMMKKQKAQLLNQLHSVLYNSNPEILIYCRNAVPGWVMKVIERYPTAKKLSAATVKSLRKIPHIDEKKAETLILRARTSVASLNDEVTEALVKQLVDRIYELEKIIEEQEKYLERAYKSEAGVELLTSFKGIGLYSAIGLLIRIDGVERFSSVKHISSYFGVHPVYKLSGDGKWGIKMSKKGNAEVRYLLYNIARTAVVHNPIIKEFYKSLRQRGMPKMAALGAVMHKVLRIVYGMLKNNQKFNPEYRKKNNQSVENNKVKPDLSRRYQKLSSEAPISRRQNKKRKEQLISQSQLYRESAG

SEQ ID NO: 355785 - protein, 424 aa, unidentified
MKVTYQTCCGVDVHKSFLVATSVKTTGGIEPSYQKKRFSTFNSSILEFKQWLLDNDCHDVCMESTGKYWVPVFNLLEDEINVVIANPKWVKAVKGNKDDTKDSKWIGDLFRLGLVKGSYIPCKIVRILREYTRYRYKLVSCRSSEKNRYQNALTVCNVALDSIVSDIFGKSSTSIIDYLLEQSGTSINHEEIASKLLRSLKSKEDAVIESVEGYQMTDAQKYRMRLVRAHMDYITAEINDVDKMIENMISSNPDFENAVQFLCTIPGVKRDSAITIISETGTDMSQFSSSKRLCCWAGLTPGSNESAGKKKSVRITRAGVYLKPALVQCAHAAVKSDKSPYYKKKYESLVKRRGKKRAIIAIARMILTAIYQMLSTGEQWNPSDLYKIDMPVALVEKQKAKAIKQAKKLLQREGILPPDEPLAS

SEQ ID NO: 355786 - protein, 398 aa, unidentified
MVPIFYAGIDIAKNKHEASVIDANGSLLLDSISFTNTREGCEKLIALFAKLDVLKDAVVVGMEATGHYWLSAYSFSVELGYDVRVINPIQSDAFRKMYIRQTKNDSKDSFVIAQIMRFGQFSATQLSDERVMALRQLSRYRLSLVSECGDCKRKVIALLDQVFPEYDKLFSDTFGAASKELLLQCQTPEDMLSISTRKLTTLLTKASKGHFTVQKAKQLKTVAKDSFGITFAKDAFSFQIRQLIEQIIFLEKQLDALEKELGILLRQTNTVITTIPGIGDALGAAIVGEIGDINRFDAPGKLVAFAGLDVTVRQSGEFNGTRNRISKRGSPYLRRAIWLAASSAVFCDPILSEYYQSLRARGKHHLTAVGAVCRKMCNLIYTILKEDRPYQPLPPKGI

SEQ ID NO: 355787 - protein, 347 aa, unidentified
MNFYTQQHKHYCGIDLHARAMYVCILDEQGTKLVHKNLPTTPEAFLRLIAPYREDLVVGVECMFTWYWLADLCSQEGIAFVLGHALYMKAIHGGKAKNDKIEAHKIAVLLRGGMFPQAYVYPSEMRATRDLLRRRCHLARKRAELLAHIHNTNSQYNLPEIGKRLANKSNREDVAEHFPDPSVRKAIEVDVALIDQYDQLLGEVELYLTRSAKAHDVQPFARLQSVPGIGQILALVILYEIQDIARFPRVQDFVSYCRLVKCAKESNGKRFGTSGKKIGNVHLRWAFAEAAVLFIRQSQPGKEYFAKLEHKHGKAKALTVLAHKLGRAVYYMLSREHAFDLKRFVTA

SEQ ID NO: 355788 - protein, 357 aa, unidentified
MTNDKYVGLDVHQASTSIVVLDCNGKTISESVVRTRADAIRDFISGLSGTIHVTFEEGTQAAWLYEVIRRLVFELVVCDPRQNKVLAAGNKGDRIDARKLAELLRAGLLKPVYHSNHDTKALKQLTHNYDSLVSDTTRVMSRIKAVFRGQGIPCSGRDVYYKRNREQWVTRLGEPSLRIRVQFLFDELEPLKALRRAAKRVMLKEARLHKAFKILSEVPTLGPVRIAQIIAAVGAPHRFRTRRQFWAYCGFAVVTRSTDDYRFDENGPLRRSRPPATRGLNRNFNRRLKHVFKSAALQGTSKEPFKSYYQARIAAGMQPEMARLTLARKIANITLTLWKNGDQFNGHKLSELHDRTT

SEQ ID NO: 355789 - protein, 365 aa, unidentified
MKKSSKKQQGATVAESKPAQVVGLDLGDRHSHYCMLSSTGEMMEEGRIQTTLAAMEKHFAGEPRMRIALEAGTHSPWVSRWLKSYGHEVIVANPRKIPTLTKSESKNDRNDARQLARMAAFDPELLHPIEHRSPGRQQDLNLIHTRSVLVRARTMLINSVRGVVKSAGERLAACSSESFPEKVPGAVPPSLKAACIPLLEQIGQMNQAIAAMDKQIEGLDKKYPEIAVLRTAPGVGPVVAACYVLTLDNPQAMETNRQAGAYLGLRPRQQQSGDSNPQCGITKTGNTYLRSLLVQSAQYILGRRGPYSELRCWGLKLAASGGKRGKKRAIIAVARKLAVILLSMWRNRKKFEPFPQSAAQLATAV

SEQ ID NO: 355790 - protein, 407 aa, unidentified
MELAALYKRVIGLDIHQAQITACALLEEPDGTMRIEQRQFGGFKRDRRELAHWVASLKPEEVVMESTGIYWKSPYAALEAVGIRAKVVNARHVKHVPGRKTDVGDAHWLATLARAGLLRGSFVPPAKLRELRLIARQRQKLVGQLASEKNRLHKVLTDSGVRLGVVVSDLHGQSARAMVKAIIAGQPPHEVLKLASRRLKAAREEIFDALQGELTASHRFVLDELMRHIEEIETRIARFDARLLAELESEHNALALLQTIPGVDLIGAAMLLVEIGTDMDAFGSAERLASWVGICPGNNESAGKRKSGRVRKGNPYVRRLLCEFAHAASRTTSVFKSKFQSLLVRRGYKRAIIAIGHKILRTLFFMLKRREHYRDCATDYEALSVQRNAPRWIKSLIKFGFIAPTNA

SEQ ID NO: 355791 - protein, 367 aa, unidentified
MCIRDREWAAGWWEVPGGGVRAGEDSLDAVIREIKEETGVDVSKKKLDLCLRSNGKDILYDVIPNDLSSIKSWLTRTFEKFFLSEDSLVVCAEHTGQYTYPLVCATKSIGVYLCLEDAAKIKYCHGIPRGKNDKIDACRIAMYAERYNDCLQPYTASELIIQKLKNLSTERSMLVADRAKYQSQLKDQVDYMEHSIYIAKCNRVEGIINTFTDYIAQIDLEIKELINQAPVIAHQMDLLMSVDGVGERVALKMIMETDAFTSFTDPRKFCCHAGVVPFVYVSGSSQRSKNRVSNRADKSIKHLLHMAALSVSQVKNSPLKKYYDRKVEEGKNKMSVLNAVRAKLVTIMFAVIRTDAFFSRNYQNSLA

SEQ ID NO: 355792 - protein, 440 aa, unidentified
MFFRKTKNVMNQPLDPDPTNDYAAFIAIDWADQKHVWSLQVAGQTKKETGTLEQKPELIGPWVAKLRDRFGGRPIAVAVEQSRGGLIHALQSYDFLVLYPLHPLTVAKFREAFKASGAKSDPLDTDQILQILTKHLDLLRPLNPDTVETRLLGRLSQDRRKTVDLRTSHIEGLSAALKEYFPQAIEAVGGNLASRLAGDFLQKWPTLEVFQQAKPSTLKRFLYGHNVRSPKRIEAVLELARMAQPLTTDPAIVESGRRLAQMHAQAIQTLNPIIADYDHRIEQVFNQHPEVKLFNQLPGAGPAMAPRLLAFFGTDRARYAKANNVQSFCGVAPVTRSSGNTRAVFMRRACPKFARQTFHEFARLSIATSQWARNYVDYYKGKGKKFHAIIRALAFKWIRILFQCWQKRTPYNEEHYLAALKKRGSIFATLHLKTASQNSL

SEQ ID NO: 355793 - protein, 397 aa, unidentified
MYIVGIDIAKRKHEAAVIDGDGAVIIKPFSFTNNCSGYNRLLAMLTKAKLPLDEVSFAMEATGHYWLALFTRLQKEGFRVQVINPVQTNSIRSFYIRQAKTDPRDALLIAEVIRFGHFSESTLHPENIYELRELCRGRHAIVSMQADVKRKVVALLDQVFPEYETAFTNLFGDTSMAILQTCPTPKELSEMPLEELCHLIEVSSRKRFRMVKAQELQELARNSFGFAMAGDVFSTMIRLYAKHLVFLKQQVQEMDRKIAEIMDTLDTPITTITGIGPTLGAYILSEIGDIGRFSSAAKLAAYAGIDPTMRQSGEYNGVRNRMSKRGSPYLRHAIWLAASSAVLHDPALKLYFQKKRDEGKPYMASVGHACRKMVSIIYAVMRDNKAYTPYIPNEISA

SEQ ID NO: 355794 - protein, 435 aa, unidentified
MRLKDYGRNPEKRKAYVQQQGLLMVGVDISKDKHDACIGTFGAAIQRKLTFPHSREGFSLFEKTIRKAMFKAKCHRVLIGMEPSGIYWYALYERLKACGYGVCLVNCQAVSNNRKTLPDGANKTDRKDAYSIFDLLCQGKFLLPVVRDPDLQAAYRMMCRHMALKKRISRIRNQLRQAIHLAFPELNGQIKDLCMPTSLRFLMANPTPRAVVYNGRQRFMDKWRPRRRCGQWRPEKLAHIYELAKTSIGLKDPHRIYEFEIKALAEDLADAVAKSRMWLEKAMELLEQRADYQLLLTLPRIGKPTAAAILTAVGDVQEFAYGKQLVKLAGLDIRVFESGSSIRKRPRISHVGSAFLRHWLYHYALRLVAYDPAFKALHHRRKMNSPGKGAPRRALMAVCDKILRIVYRMLKDNFPYLPKMDCLYASQYGTMQKAA

SEQ ID NO: 355795 - protein, 349 aa, unidentified
MRAIGVDLHKDLIVACFLEEDGGHQIARFRLTADGLAAFRGRLRPDDRLAVEAGRNVWFFLERIAGAVGEAVVVDPRRFAPIADSKKKTDERDALELARALRADYLPTVPIPDTRIIRLRQLFAARETLVKTATQYKNLAHAALARNGVPSRRADLASVRGRDRLARVEGLPASDRAILDLALRQLEAVEQEVAGLEQLIISAGKDLPGLRRLLQVRGLGLVAAIGILAEIGDVAWFPSARKLAAYAGLVASVRQSNRTEHRGRITKQGRKRLRTLLIQAVLVLITGQRRNPLAEFYRLKKQEKGSGKALCATARKLLGVIYVLLTKDLDYWFLEERLYQKKLRALAAA

SEQ ID NO: 355796 - protein, 412 aa, unidentified
MDLVYARCAGLDVHKATVVGCVRVPGVGRGERHTETRTLATTLRGLEELTTWLTGHGITHVAMESTGVYWRPVYAGLEGVVQVLLVNARHVQMVPGRKTDVRDCEWLAQLLECGLLRGSYVPPAAVRDLRDLTRLRKALIRERGHHVNRIEKTLELANIKLGIVVTDLMGKTGRAILEALSAGHDAPEQLTALAQGSIRTKKQAALREAVAGRLTPHYAFLLRQHRSLIEALDTHIGTLDARIETAMAPFAEAAALVQTMPGVATRAAQAILAETGVDMGPFPTAGHFASWARLCPGTHESAGKRRPTTTGQGAVWLRATLQEAAWAAARTKRSYYRALYHRLKGRRGAKKAIVAVQHAMLVALWHMLKRRVPHHDLGADYFDRRNTARLRHHHVRRLQQLGYQVVLVEEAA

SEQ ID NO: 355797 - protein, 451 aa, unidentified
MAKSMKKKRSKRKSLNEFNIINPNAAGIDISSKDYVVSISGNRRKKNIRTFGAFTCDLKAIALWLLSCKIETVAMESTGVYWKQLFMVLQEHGLEVFLVNSRHVKNVTGKKTDEDDAHWIMRLHTCGLLSNSFQPEEQIRTLRELLRHRKSLNRNKTIAVNKMTKALNSMNVKLNIVLSDLTSVSGQRIIMSINSGERRPKELVKLVHHKVKASKEDILKSLEGTWREESLFELKQATEHYYFLQNQTSECDKKIEEQMVLITAKYKDGDITGLKEMAAKKHTRKNELKFNVNPYLQEILGIDVSQIYGFSDDTALTLFAEVGSDLSCFVTANRFTSWIVLAPNNKISGGKIISSHLPKKKHAIKKALIQAANSLYRSDNALGDCYRRLKSRMGPKAAKCAMASKLAIIYYSMVTKKEEFNIELLNSHQQSFKMKRIKFLENQLAVLKDVA

SEQ ID NO: 355798 - protein, 327 aa, unidentified
MVARRRSASTDLSAVAGPLCIGVDVSKDWLDIADTAGRAVRIANTVAAITEALAGPWSQGCRAMVCEATGGYDRPLRLVAAQLGLPLRRVHPNRARAFAQAAARLAKTDAIDARMLARFAAFIADEPARPSPAPQTQTLAALVSRLDQLSDLRQSESCRAHQAHEASVKASIGAVIEVLDSQIDAIQHAIDALIASDPILTEKASLLRSCKGVGPKNAQMILARLPEIGALDRRKIAALVGVAPITCKSGSSINRASIAGGRKPLRDTLFMAALCASSHNPTFIAFRDRLKANGKPHKLIIVAVIRKLIVTLNAMIKAKTPFKPALT

SEQ ID NO: 355799 - protein, 366 aa, unidentified
MEQITRTDAAGQIVRVGADLAKRVIQVHAVDAAGRVVCRRALPRDKFIAWCARLPKGCIVAMEISSGAHHWARRLAELGLAPKLMSAQLVEPYRSQGATGKNDANDAAAICEAASRPSMRFVPVKSVEQQSMLCVHRLREGLKAERTACINRIRGLLAEFGLAFAQGPEALRRVLADVLEDASHEMNTLGRLVIQRAAEQWRQLDEHLAWCDQRIAAHLRDNPAVRSAAQLMGIGAVGASAAVATVDDFKQFKNGAQFGAWCGIVPRQHSSGGKNQLGRITRRGDCYLRTLLIQGAKSAVLTAHRRHDPISRWVLALRERSGWQIAAVALANKNARILWAVMTKGERFDAHHVSVKPGDAPVAVAA

SEQ ID NO: 355800 - protein, 366 aa, unidentified
MEYSTIISLDVSDKTSKVCIMSKIAGKKQILEETTIYTTKDALLSYLKTKNPTWPVVFETGTHCRWMEKVVKSLGMKPIVANPAHMRMVTESNTKNDRNDARELAKIALADVELLHPVSLRSEICQQMLRLLKARDVMISVRTKFVNQLRGFAKSMGFRLPSCSANKVYLLDKSQWPEDFETVAWPIMDILETIEIKIKAYESQIKKLASCPELKEKIERVREVYGIGLLSGCALVASIDADPDRFSKARDAGAYFGVVPKQRQSGEMDMQCHITLSGSEFVRNLMVESAQIALRESAIDTDIKLKGLRICQRGGKIAKKKAVIAVARCLIVTAVALLKHPERKYIPLSEKGRLELEAMRMIEAVA

SEQ ID NO: 355801 - protein, 401 aa, unidentified
MNAVGIDVSKGKSMVCVMRPFGEVVLEPFEVLHTAQSLNDLAGKLKALDGETRVVMEATGNYHKPVAFVLHDAGLFVSVVNPVLIHDYDNNSLRRVKTDRKDAVKIANYTLDKWTRLRQYLPEDDTRLALKNCYRQYQQAVAVRTMLKNNLISSLDLTFPDANKLFSSPAKSNGCEKWVDFIGDFWHSECVSSLSSDAFAKKYLKWCQKHGYNFTRSKSDTIYACAVNAASLPKSPTSKLLIQQQVAQLKAVSQSVAAFQQEMLRLSQQLPEFDTVMEMYGVGPSLGPQLMAEIGDVRRFSSKKSLIAFAGIEPQPNDSGKIVGNDSGISKVGSAVLRRTLFLIMTVILKTQPQDEPVFQFMNKKRSEGKPYKVYMMASANKFLRIYYARVKAVMDSKHPK

SEQ ID NO: 355802 - protein, 319 aa, unidentified
MTDHEKTILYGVDVSKARLDIASSQGASIGLNNTGDEIAQWLASFPGRARIALEATGKYHELLLAQALAAGHEVFLINGRQLNHYREAVGPRAKTDPGDARLLLRYLSREEHDLKPVKALTVLEKRLWQLLQRRAVLVKVRTQLRLSLGGDDQLQSVQDDLTESLNRSIVRIERLMKQLADKLGWQEAVKRCQSIPGIGLINALALVTCFHRGEFQRSDQWIAYLGLDVRVRDSGVSRGRRKLSKRGNPELRRLLYNGAMSAKQMPGVSEQYERYRHRGMSSTATLVILSRKLARIVFAVLSKGENYDEKMSRWVCMNP

SEQ ID NO: 355803 - protein, 326 aa, unidentified
MNLSAAALGIDIAKLKFNVCLINRSGKLKHKVFLNNVSGFEQLIRWLDSQKAGEPHACLEATGTYGEALALYLFDAGYLVSVVNPAAIKAFSTACLSRTKTDKVDAALIARFCLAQQPPAWLPPTPEVRELQALVRRLEALIEMRVAEENRLSSGITVGAVKHSLEQHIAYLREQINQTEQLIQKHINNHPDLKEQSNLLDSISGIGTATAALLLAEIVNIKQYKSARQVAAYAGLVPRERRSGTSVRGRVQLSKIGNARLRKALYFPAITALRCSNFFKAWADGLRERGKCKMSVIGAAMRKLIHLSYGVLKTGKPFDPNWAKTA

SEQ ID NO: 355804 - protein, 334 aa, unidentified
MENIALIGIDLGKNSFHIHCQDRRGKAVYRKKFTRPKLIEFLATCPATTIAMEACGGSHFMARKLEELGHSPKLISPQFVRPYVKSNKNDFVDAEAICEAASRPSMRFVQPRTESQQAMRALHRVRESLVQDKVKTTNQMHAFLLEFGISVPRGAAVISRLSTLLEDSSLPLYLSQLLLKLQQHYHYLVEQIKDLESQLKRKLDEDEVGQRLLSIPCVGTLTASTISTEIGDGKQYASSRDFAAATGLVPRQYSTGGRTTLLGISKRGNKKIRTLLVQCARVFIQKLEHQSGKLADWVRDLLCRKSNFVVTCALANKLARIAWALTARQQTYVA

SEQ ID NO: 355805 - protein, 348 aa, unidentified
MRFYTQQHRHTCGIDLHARSLYVCILDDTGQKLIHKNIKASPELLLKLIANYRDDLIIGVECMFSWYWIADFCADNGIEFVLGHALYMKAIHGGKAKNDKIDSEKIARLLKGGMFPYAYVYPREMRSSRDLMRRRIKLARERGDLMAHIKNTLSQYNLPAHPENLRYENKRKPMHHAFPDPSVQRSIDLDLARIDFYDGQLAKLEWYLKRTAKSFDPKAVILLKSVHGIGDILSLVILYEIHDISRFPRVQDFASYCRLVKCQRESAGKIYGTAGAKIGNPYLRWAFGEAAVLFLRGNPEAQVWLEKKTRKHNKAKALTILAHKLGRAVYFMLRRENLFDQDRFLASR

SEQ ID NO: 355806 - protein, 393 aa, unidentified
MICVGIDVAKDKHDCVILNSEGKVLAGVFTIPNNADGFDTLLQKIHGCTSPDDKIKVGLEATGHYSYNILGFLLNQGLPTYVINPLHTNLFRKSMSLRKTKTDRVDAKTIAAMLMSNVDLKSYTDTAYHNEELKSLTRYRFDKVQERAQLKQSVSRLVTILFPELEKLVPTLHMSSVYALLIEFPGAKQIAEAHLTHLKSLLKDASKGRYGRDMATEIRDAAKHSIGSVMPAKSLELRHTIRLIRELDSEIKDIEAAIEAIMEELQSPITTIPGMGFRMAAMILAEIGDFSFFDSPDKILAYAGMSPSTYQSGHLSLAGTYSHMEKRGSRYLRYALYNATKYVCHWDPGFAAYLAKKRAEGKHYNVALSHAAKKLVRLIYALEKSRQPYRRAA

SEQ ID NO: 355807 - protein, 448 aa, unidentified
MAKHSVSQTPAPVAPSQLERRWQREFRQRWQAVAPAQWRCIGIDVGKYEHVAVAYDGLGQLLAQPLRFGIRTADYQAFFAWVAAVTPEPAVAPLFAVEPTGHYYEQLVYELAHRYGPKQVYIVQTTDVARRRADWNQGTFKNDEVDAAVISELLRQGHGRPYHPDEGAYLSLEQLERYRWAREQASTRLKNQIVGHVDRLYPGLVISDKTAAERYLPLFRNLWANDTPRRLLLLYPAPAELRNSGTETLYQRFRTAGYWMTRPYAAKILAAVQALPVPDAELAARRSVFLQQDLASLAYVEGQLAEVASEMVDLLDLTWGVWLRPTGIDPLRLACLVATIGDMRHYHAARQLFGRSGLHSGCHDSGTHQQRGQGERMVKPGDRHLRRQLLRFTLRMIAHYPALQTYHTRLLQRGKSKITANIAVARKLCGMLYALASQERPFDPTRLT

SEQ ID NO: 355808 - protein, 485 aa, unidentified
MKRKNIFRNESQKLDAAFIEAGLPERVLLVPLDFAKITHYACFCDGRGTYIRKAFTVKNTKEGIDYLVDQIERTRAARSVKSKRHVIIGGEDSASYTRNFMDRLFELGYLTVRLDSKEVHRQAESVDSSTDKTAVRAIAKTLLNRDALHTGGTDLYAQMRGLTRQRRRIVHLSTAVKNRIHTHADRLFPGFLSKESAVSAFSQASLELMANKFSAVTLARKSEKTLTRMLARQGVRGASEVAAKLKEQASNAICADDASVRLSSQLIESELSLFQTLQANLNDLNIECARILLRLPEAFAVSIKGIGITLAASIFAETGSLRQIQRSDQINAYAGIAPKVKQTGGPESPARIGGKRRQFNRILKDYTLQAGNHLYLHGPTELLHDAARRKLAGKAVDTAMARRFLRIARALAKSHCIYLPSDLRAGQHGTDAESQARAQYIVQIWPDLLLKWKRLGLHEEAFAPETPLGDWRIIVQEIYEIDLPF

SEQ ID NO: 355809 - protein, 344 aa, unidentified
MMTHFVGLDVSQKMTAICIVDNAGRRLWRGQCPTAPEQIAAMVRRHAGDNSRIGIETGAMTPWLVHELRALGLEVICLDARHARAALKMQINKTDQNDAEGLAQIVRTGWFRSVHVKSFDSHRARALLGARAQLVGMTTRLSNHIRGVLKTFGLLPGAMRGLRFDRKVEVLLEDRSDVAPIVRPMLVAWRQLREQISAFDKAIRVLVRSNSPCRLLMSVPGIGVLSALAYVSTVEDPARFSQSRSVGAHLGLTPRQYQSGDVDRSGRVSKCGDALARTLLYEAAVVIMTRVKKASELKDWALAIAKRSGIGKARVALARKLSVILHSVWRSGKPFRWTEQAITG

SEQ ID NO: 355810 - protein, 294 aa, unidentified
MKEPITSYVGLDIHKDSIAIAIAKAGRDAPQFIGTTVAQLAQVRKVLTRQKCIPSKTLVVYEAGPCGYGWARYLNTHGWRCEVISPAHVVRSAAGKAIKTDRRDALLLARESRAGNLTPIAVPDERDEAIRDLSRAREDAIAARLRARQQLKAMMLRHGRTYSSNAWTLAHERSLATVRFEHPAQQIAFDEYRQSVKDAHERCERLTQALREQCTGWRMGRVVDALMCLRGFDFIAAVTIIAELGDLNRFSHPRALMSYLGLVPSEHSSGNSRRQGAITRTGNRHARRILVESA

SEQ ID NO: 355811 - protein, 403 aa, unidentified
MAMVFIGVDPHKLSATIEVVDDRETVLATGRFGTDKTGYAAMRKHVASYRQRTWAVEGSNGAGRPLAQRLLADGERVVDVPAKLSARARLFDTGHNRKTDAHDAHAVAVVSVRTAGLRVLSFDEGLEAMRMLADHRAELAQHRVQTINRLHRLLSELTPGMSKKDLTALQAKAILASVRPRDLAGRTRRRLAADLLADLVAVEKRTKASTKELKAMVQASGSRLMELPGVGPVVAARILADVGDVARFADRNRFASWTGTAPLDASSGEQVRHRLSRAGNRKVNHMLHIAAASQIRLDIPGRAYYRRKLAAGKTPMEAMRCLKRRISDAVYRQLVADARVIRPPMVNAGPGGHCGASQESSAAGSNPLTDTSDQPLPGPATPTLRPRTASRKITTHKTFEPAH

SEQ ID NO: 355812 - protein, 320 aa, unidentified
MMAQDDRVVVGLDVAKDKVDACIRPLSLRRTEPSTAEGRRKLVAWLRKHKVGKAVMEASGGYEREWATALRKAGIEVRIVDPKRVRNFARSAGRLAKNDVIDAEMIAWFAETFGEAPAQAYDAAREQLAQIVNARQALLELRTKLQNQAEHAAPEPVQKMQARLLKKVAFDLAKLEAAIAALVKLTPHFAERAAIIESVPGLGEITSAGLIAAMPELGQVSNKIAPALLGVAPYDDDSGKRRGERQIKGGRRKVRNLFYMACLGAATRHNPVLKAFYRRLIAKGKPPKVALVACMRKLIVILNTMIARRQKWDANLYASS

SEQ ID NO: 355813 - protein, 408 aa, unidentified
MKTLLRRCAGLDVHKVEIVACLRLVEKGKVARRVRRFPTTTQGLLELVEWLEGAGCSHVAMEATGVYWKPVWHILDGHFALILANAMHVKAVPGRKSDVNDATWLADLLAHGLIRASFVPSTPIQELRDLTRTRKQLTREIVQHVQRIQAVLEEANVKLSSVISDIMGPSGRRILTAIIAGETDAEKLAALGSERLGCGRAALSEALRGRIREHHRFLFAQHLRTIEQLEESVAAFDARIAGALAPFREVVERLNEVPGLGRIAIETIIAEIGTDMSRFPTAGHLVSWAGLAPRLDESAGKRRSTRIRNGAPWLKPALVQAGWAATRKKNTYLQAQFLRLKSRRGPKKALIAVAASILTIVYHMLRDGTFYRDLGPEYFARRSPAKLAANLANRIRNLGYHVEISAAT

SEQ ID NO: 355814 - protein, 343 aa, unidentified
MSEVSTIGLDIAKSVFQIHGVDAGGAVVIRKRITRAKLLEFFASVPACLVGIEACPTAHYWSRQLQALGHTVRLLPPNYVKAYVKRSKNDANDAAAICEAVARPSMRFVATKSEEQQSGLMLHRSRQLLVCQRTMLSNAIRGHMAELGIISAKGRNGTAELLKIIADEQDDRIPVAARFSLEVLARQYAAVRAEVAAIEKRIHAWHRSSEESRRLEEIPGVGPIVATALVAEVGDWKEFTSGRSLAAWIGLVPRQHSTGGKERLGRISKQGNRHLRWLLVAGAMAVIRYARQHGTKRPWLARLMDRRPIKVAAVALANKIARMAWAIMVRGERFKEPKLLLAT

SEQ ID NO: 355815 - protein, 457 aa, unidentified
MSKGSGMTRGDRKRNARRERLRGLLPRDGAVVGIDLAEDKQALAVIDHDVRVLARKTVRVKAFRLGEALDWAAAQARVKGFTQVTVACEPTGPRWMQVQRLCAERGLPLVCIQPLVSHIAREQQDYTPHKSDESDCVMIGRLAAELHCYVPEELDETWAQLRHLGRRRAQLITAASASAHRIRDFLSVAWPVVTETCAKPLLSRTWLAALQVVTGRCGGDPARLAVMGEEAFTAAVRAAVQDWGGKRAWGPISRRVFAALTDTEGVVVSSRRGLLRRCADELGDLQRARAQLRAVEADMVAVLDELGLSRLGRIPALTAVGAAAILAEAGGPHRYDSSSSLVKHAGLSPSGNASGAFAGQAHISRRGRPGLRLTVWRAVWPMLQFNPVMAAKYQAMTSTADDEAGAAAARARRAKARVACAASLLRWLYSMAVHGTSWDPAAASGRQHDPRDQAEAA

SEQ ID NO: 355816 - protein, 350 aa, unidentified
MDATTVAVDVAKTVFEVAIANGQWQIVARHRFNRRQFTHFLTTVSPTRVVMEACGTAHHWGRCAQRNGHTVTLLPPAYVRPYVRRNKTDRTDAEALLEAVRSGEIPAVPVKTVAQQTLVGLHRIRDQWMTTRTARINAVRGLLREQGILLPAGAGPAVRAIPTLLEGAEAPLSAPLCRMLALIYEEIRQLEECIGRLERELRAVADADPIVCRLREIPGIGLLTSTALTGIVGSIHAFGRARQFASWLGLTPREHSSGAHRRLGGISKRGDVYLRCLLTHGARAVLNAAHRRTKVHEPLTRLHEWALTVQTRRGHNKATVAVANKLGRIVWAVWTRDVGFDPRPTRQEAA

SEQ ID NO: 355817 - protein, 347 aa, unidentified
MKFYNQQHKYYCGIDLHARKMYVCILDQKGKTMIHENIKTDPEMFFKLLSPYLEDIVVGVECVFCWYWVSDLCAKHKIPFVLGHALYMKAIHGGKTKNDKIDSYKIALLLKGGNFPTAYPYPAEWRATRDLLRRRMYLVHRCGELVAHIQNTNTQYNLPAFNKKLSRKYNHAGVAEQFENPEVRKSVEVDLAAIGSLNKILNQLEWHIEKTAEQHDYHTLYLLRSIPGVGLILALVMLYEIQDIKRFPSVQDFSSYARLIKPVKESDGKWAGKSNGKIGNHHLKWACNEAAILMLRESEKAKQYVAKLERKYNKGKALGIFTHKIGRAVYFILKNKEAFNMEKFFSQ

SEQ ID NO: 355818 - protein, 360 aa, unidentified
MDGSSKQPPMTAGLDLGDKYSYLCLLDTESGEVVEEGRLRTTPEDFRRRFCSEQPLRIAIEAGTHSPWASRVLKECGHEVLVANPRKVQLIYTNKRKTDEIDAENLARLARLDPKLLYPLKHRGEESQAHLAIIRSREALVGTRTQLVNHVRGAVKSFGGRLPKCPARSFHNKAPDHIPEALWPALGPILETIGSLTQRIRDYERQLETIAKERYPETELLRQVEGVGVLTALTFVLTLEDPYRFERSRSVGAYLGLVPASDQSGDRDPQKRRISKEGDEMLRKLLVGSAHYILGPFGKDSDLRRHGEKIASRGSKNAKKRAAVAVARKLAVLLHRLWITAEVYEPLRNTHHSGGQEEAA

SEQ ID NO: 355819 - protein, 398 aa, unidentified
MTESSDYESVQVFIGVDVGKDTHHAVAINRSGKRLFDKALPNDENKLRSLISDLKQHGQILLVVDQPATIGALPVAVARSEGVLVGYLPGLAMRRIADLHAGEAKTDARDAAIIAEAARTLPHALRTLKLADEQIAELSMLCGFDDDLAAQTTQASNRIRGLLTQIHPALERVLGPRLEHPAVLDLLQRYPSPEKLASLGEKKLAAQLCKLAPRLGKRLAADIAQALAEQTVVVPGTNAAAVVLPRLALQLITLRKQRDEVALEVEQRVLAHPLYPVLTSMPGVGVRTAARLLTEVACRAFASAAHLAAYAGLAPVTRRSGSSIRGEHPSRRGNKALKRALFLSAFAALRDPLSRAYYTRKMSQGKRHNQALIALARRRCDVLFAMMRDETFYTPQGS

SEQ ID NO: 355820 - protein, 479 aa, unidentified
MGASVSNLVMDCVQTKVVFFSGADKAAEESDSGAWKYNELLLPPLAVSTRRRLSTLKAPSGHGPGGETMQVVYARCAGLDVHKKTVSACISVCEAENKQRRTRVFGTFTRDLLALVDWLKEHRVTHIAMEATGVYWRPVWAILEGHVEQLLVNPQHIKAVPGRKTDAKDCEWIADLLQHGLLKGSFVPPTPIQDLRDLTRYRAELRQSQNRVANRIQKFLEQANLKLSSVASNALGVSGRQMLDAIIGGQNDPEQLAQMARGRLKNKIPELEQALEGRIRDHHRFLLKQFLEEWNDLGQRIARIEAEIDKRIGPFEEAVALWQTIPGVDRVTACNLVAEIGVDMHQFPTDRQLASWAALCPGNHESAGKRLSGKTRDGNKWLRRSLCQAAWAVTRKKNCYLSAQFKRLAARRGVKRAVMAVAHSMIIIGYHMLKTGRGYHELGGNYLEQINKDQLQRYYTKRLQRLGLKVTVESATEAA

SEQ ID NO: 355821 - protein, 447 aa, unidentified
MSDISVEQEPQFAAFVGIDWADQKHVWCLQAACSGKRESGELERSPEAVEVWVAQLSQRFAQRPIAVAIEQSRGALVFMLSKYECLHLFPVPSTMAGKMREALYPSGAKDDPRDADLLLDLLLQHRNKLRRLSPDTEASRRVQNLVEERRKLIDEKTEQINRLTSHLKIYFPQMLDWFDRLDREAVYALLERWPTLQEWQEASAAKLRMFFSKHHCRDQEVIERRIVGIRQAVPAIRDRAVIEAKSAVVKVIAQLIRILVQGIAELDRKIEDAAAAHPDFFIFDSLPGAGPALAPRLLAAFGSQRGRFGSAQEIQAYSGIAPVIERSGKKKWVHFRWAAPKFLRQSFHEWAGRSITQSSWARTYYEQRRQRGKAHHAAVRALAFKWIRIAFRCWKNNVAYDEGRYLATLVRRVSPVSSLWSLLLQPRRCEISVETQRKFLGARPKTS

SEQ ID NO: 355822 - protein, 425 aa, unidentified
MRQEIPEPAEFGAYIGLDWADQSHVISLRSADSNQVEHYQVKHTPEVLAEWVSGLQQRFAGQRVAVALEQARGAVVHALMGYDFLVLYPVNPKTLAKYREAFSPGGAKDDPTDADLLLELVTLHRDKLRAWLPDDELTRTITLLVEYRRQLVASQTRLSNRLTSLLKLYFPQALAWAGELTTVQACDFLQHWPTLAQVQQVAPTKLRKFYIAHGCRKAEVIEQRLQEIKVGQPLTKDVAVITASVAMVQATTSQLRQVLEAVARMDKQIAELFSQHADHALFSSFPGAGPVLAPRLLAAMGADRGRFAAASEVQQLSGIAPVIERSGKSCWVHRRWACPKFLRQSFHEFAGQSIRWSAWARAFYDQQRNRGNGHHAAVRSLAYRWIRIIYRCWQLRVPYCEETYCRALERRQSPLARILSAQTQS

SEQ ID NO: 355823 - protein, 316 aa, unidentified
MAKVVSEITLGIDVSKDELVIFDWDTEQLTRLVNEPAEIKTWLGNLYGPARIAIEPTSSYNLELVEQAHALGLTVYLINPRQLVHYRQAVNVRNKTDPQDAWLLARYVAHESASLRPFKPQCAKAQQLWALLKRRAVVVKARKQLEQSFKEIKLPHKALFSEIQRVLDRIDQRMQTLVRSLGWLADYQRCLSIPGIGPLNAIALVAVYRRGAFAGSDAFIAFIGFDVRVRESGKYKGRRKLTKRGEAEIRRLLYCASQPSRTYQPFDNYYQRQLEKGISKIAAKVILARKLARIAFTLLTNQQNFKKQEIIYSQVP

SEQ ID NO: 355824 - protein, 366 aa, unidentified
MLYLAIDQHRKQLTVKLRDEDAQVLVQRQVSTRWQAVREFLQDIQERGRQAGGWLVIVEVCGFNDWLLKLLVEYGAKEIVLLHPEERRRQKTDRRDANRLGELLWLNRHRLATGLRVQGLRRVVIPTADEQLDRKLTTLRWRIGRERTRLLNRIKNILRRYNVEQECPTKAVTCQTGLRWLRQLAVGELDRLDLDQLLARLETINTERATLEQKIRERQGRNPAAARIATVPGMGAYISLGLACRIGDIRRFPRPRSLANYWGLTPSARNSGENKQRLGSITKQGSALARFLLGQAVLHVLRKDSVLREWYKGIKRRRGSKIARVAVMRRLATIIWQLLRKEQNYVPGGPRRQEKRRAKAAQAAVA

SEQ ID NO: 355825 - protein, 366 aa, unidentified
MASVSHLAPIHLGLDVHRDTISVGILEPDQQVPEVDRIPHDEPSVRRLVGRLGDPRRLRACYEAGPTGFELARLLHSMDVGCQVIAPSLIPRAPGDKVKTDKRDCRRLARLHRAGELVAVRIPTVQEEAVRDLCRTRADMVADRTRARHRLSKFLLRHGRVWRGGATAWTHAHERWLLAQQFDEPALAATYAHYRVVLESRDVHLDAIQADLAGWYDRPPFAEQVARLSAYRGVTRLGALTLAAEVGDWRRFAQASQFMGFCGLVPSEYSSGQRTARGHLTKAGNAHLRAQLIESAWSYQHRPGVGIQIAGRQQGLDPQVIARAWAAQLRLCGRFRHLAVRKTSKNVVVAAIARELAGFLWAEMTA

SEQ ID NO: 355826 - protein, 320 aa, unidentified
MKLFIGLDVSLEKTAICVISEHGKIVTEAQVASEPEAMLRWIGDQDGEAAAIGLETGPLSQWLHRGLSAAELPVVLMETRQVKGALKAMPIKTDRRDAEGIARLLHLGWFRPVHCKSVSAQEVRAVLSARKAVQQGFITLEMSLRGLLRNFGLKVGTISRGRFEQRIRELAAGNPMLVAATELMLRARAALRRELAGLERHVRQLAHDDPVCLRLMSMPGIGVVVALTYRSAIDDPGRFTSSKKVGPWVGLTPSRNQSGERDISGGITKAGDVNLRRALCQAATVMMHRGGQHGCEPGRRNSRAAGAPSAQWLRWPDVSP

SEQ ID NO: 355827 - protein, 390 aa, unidentified
MPSVSTISISPIFWVGLDVHKESVTAAVFRNRDPEPLRVDRLPNDHKRIRRYFERLSAEGRARACYEASGAGYVLHRALTEWGIPCELAAPSLIPRRPGEHRKTDRRDAIKIARDFRDDRLVLIHVPTEAEERVRDLVRCRETFQREILKSRHYILKFLRRRGFIYREGTHWTTRHMNWIRQVLQPGTLADDDRTVLTEYFALLEYKLQRRDELDRRIEELALTPRYKPVVDRIACFRGFKTHAAMVLATELGDVRRFDSPRKLMAYLGLVPGEHSSGERRRMGAITKAGNSRCRHVLVQAAWCYRRRPAVGASLKRRQEGQDPSVIGHAWKCQHRLYKVFHRLAATKPNQVAATAVARELVGFLWAVLKDIDFDSLSHDFTTPEDAHAA

SEQ ID NO: 355828 - protein, 443 aa, unidentified
MNTPHPYDLVIGLDRSDRKADLHLIDTRTGQHRSATIDTAPEALWEWLLALRQQHPQARVALCLEQPAVHLLAFLEAYEWIRLYPINPISLQKFREAFVPSRAKDDAKDAFYLAELLLTHPDKLKPWAPEDSQTRAVQQLVFHRRAVVDERTGLTNRLQALLKQYFPQALVLCGQDLWRPLATRFLLKWPSLQAVQKAKPATLKQFYYLNGSRSAKLLEQRLALVAKAVPVTDQTALIQSFGLRVQLIGRQLQLVQQTLRHYDQQIAQTFQDHPDHPIFASFPGAGPVLGPRLLSSLGSQRERFESAANLQHYTGIAPVTKQSGSKCQVHRRYLCPKFHRQSFHEYAQISVLWSRWAAAYYLQQRTKGSHHHTAVRALAFKWQRILWRCWQDHKPYEEKIYETALRKANSPLVALLDKIQLGKSPCKPPAKNIEKPLAGSPQR

SEQ ID NO: 355829 - protein, 345 aa, unidentified
MPIVGGLDIHRKQLTFDYLDTVTGEVKRGQVAPADRAHLRAWLVRFAGRDGVAFALEGCTGWRYVAEELAAAGVAAHVAEPADTAFARGRKRHAKTDKTDSRHLRQLLAEGRLPECWVPPSHILECRALLETYHDLRAEHTAWVQRIHAVFFRQGAPALGEAALRTGRDLQAVRAAAACHLSPAGQLQVDTALDMLAALEARLDVLRHRLLAAARHLTGAKVLAARLYGVGPVTGLALTCWLGGAGRFSSARKAVRFAGLDVTVWSSDRKGPPGRLSRQGPPVLRWAVYEAGKTHARPSAPDHRYYAQVKDRQDGKRAALSEARKLLRQACHILAGLGDDALSAA

SEQ ID NO: 355830 - protein, 323 aa, unidentified
MQGKVSFEEDAMPVVYAGVDVSKEWLDVHLHPLGESRRFCNDKTGIRQLKRLLARHRLASIVMEATGKFHRPAHRSLWLDGFAVAVVDPLRARMFARACGYLAKTDRLDARFLALLAESLRPPADTPPSPHVEALQELVNARSAAKCDITALQNRSKTATTALLRGELNRLVRRLEQHVERLDKEIERRVGEDPQLSRRAEILTSIPGIGRVTALALMAGMGELGTCSGKQAAMLAGIAPIANDSGARTGRRSIRAGRPAPRRALYMAALSACRYNPALARFADTLKAAGKPAKVILVAVMRKLLVLANCLLSHDRLWTPNPP

SEQ ID NO: 355831 - protein, 368 aa, unidentified
MKQQTSATTETNIKGRNIIDFTGKTIHVGIDVHEKDFQVAKVLGDICLGNHRMAANGQGLIDHLRTHYPGAGFKCVYESCAWGFTLQRQLQQAGIDCIVVHAADVSSSDKEKKRKTDKVDALKLARNHAAHQLTGIHVPNEEIQKQRNLIRFRKKLVGDLNRSKNRLKSLLKYQGINIPEQLGKKNNWSYNFMNWVEEVAKKDVLLQDTLLLMLEEVKLLRQLLLETERALRKLMQTSYNDKAKLLMTTPGVGRTTAMLFLLEIGDIQRFGPFDRLNDFVGFCPDTDSSGEIDRDTGITSRRHKQLRSALIEAAWEAIRIDPALLDTYQKLTRRMKGNHAIIRIARKLLRRMRAVLISAISYQKGVVV

SEQ ID NO: 355832 - protein, 429 aa, unidentified
MQESSSSAPAEGVAAYVGMDWADQNHDVILRAASEPAKVEYRRIAHEPEALMEWVGELQQRFAGKGKILIALEQSRGALIYHLMGYEFLELYPINPSQVASFRETFSPGGAKDDRPDAELICELLYCHRDRLKAWKPDDELTRKLAFLNEGRRKAVDQRTQLANEIKSQLKVYFPLALQVLDHDCSTALAADLLLQWPTLDSLQKQRPHKLRKFFYAHNCRQEQKLLERLELVQAAKPLTRDLAVIEPAALRIQLLAQQLKSLLPYIARYEKQIAELFDAHPDSFLFRDLPGAGSAMGPRLLTAFGTDRGRFEHSMEVSSLSGVGPVRRASGKKSGKHASVHFRSACPKFLRQSFHEFAACSIRYCPWAQACYDTQRARGKGHHTAVRAVAFKWIRILFACWKQRVPYDPQRYQQTLQTRGSQYAKTAA

SEQ ID NO: 355833 - protein, 343 aa, unidentified
MHTITTIGLDIAKSVFQVHGVDAQGQVIIRRQLKRRYVLAFFQKLAPCLVGIEACASSHHWSRELRTLGHTVRLMPPAYVKPYVKRQKNDAADAEAICEAVTRANMRFVATKTPEQQSCLMLHRTRHLFIRQQTSVINAIRAHLAELGIVAPVGRNGVEALLNVVADAADKRVPDIARTCLTALGAQLRRLKEQILEFDRQIMAWHRSNETSRRLDAIPGVGPILATALVACVADPKVFRSGRNFSAWIGLVPKQHSSGGKDRLGSISKQGDRYLRSLFMAGALAVVRYAKINGTKHRPWLTALLARRPVKVAAIALANKIARMVWAMMAKGEQYKEPAALAA

SEQ ID NO: 355834 - protein, 408 aa, unidentified
MKTLHQRCAGLDVHKQEVVACLRLVTQGRVHREVRRFPTTTRGLLELAAWLEAARCTIVAMEATGVYWKPVWHILDGRFELVLANAAHIKGVPGRKSDVNDATWIADLLAHGLIRASFVPPQPIQELRDLTRTRKQLSREIVRHTQRLQAVLEEANVKLASVITDILGASGRRILKAMITGETDPSHLAELGSRRLGCSRDTLVEALDGRVRDHHRFLLDQHLKTIEQLEETMAAFDARLETARAPFRDTVERLTQVPGLSTRAAEVVIAEIGLDMSRFPTAGHLLSWAGLVPALDESAGKRRSTRVTKGAPWLKPVLVQCAWAAANKKNSYFEAQFLRLKGRRGPKKAAVAVAASILTTVYHMLRDGTCYQDLGPNYFARRNPARTARKLADRIRSLGYIVEIRSAA

SEQ ID NO: 355835 - protein, 345 aa, unidentified
MKCTTIAIDVAKSIFEVAVSRRPGRVAENHRLSRDKLMPFFAQREAATVVLEACGTAHHWGRQLQALGHRVVLLPPHAVRPYVPRNKTDRADAKGILEAYRNQDIQPVPVKSQAQQQVTALHRLRSAWLATRTSRINTVRGLLREFGLIIPRGAHHVVPRAWALLEDPESGLPDALRPALAEALLDIRQLEQHADQIETALDALATAIPLVARLRTIPGISPLTSTALVACVGDVDRFHSARHFASYLGLTPRERSSGSTRRLGAISKRGNPYLRMLLIHGARSVLGRARQSPPRGHLRLWATAIETRRGHNKAAVASANKLARIAYAVWKHDTDFREDPITTTT

SEQ ID NO: 355836 - protein, 350 aa, unidentified
MNFYNVQHKYYCGIDLHAKAMYLCIIDNDGKTLVHRNIRTDGAYFLKVLEPYREDVVVGVECMFAWYWICDLCADAGIDFTLGHCLYMRAIHGGKAKNDKIDSKKIAVLLRGGMFPTAYVYPKEMRSARDLMRRRIHFVRKRADLIRHVQISRIQYNLPEFKRNVRNRYGNSREGIVEHFDDRFVQKSIEADMLTIDHYDDVLKKLEREILNAAKLHDRESLRILQSVHGIGDILALTILYEIQTIERFPRQQEFLSYSRLVKCKKESAGKSYGTSGRKIGNANLKWAFSEAAVLFLRGNEPAKRYVQRLESKHGKGKALGILSRELATAVYYYMLKRKRSFDPEKFFRK

SEQ ID NO: 355837 - protein, 358 aa, unidentified
MLGVDVGKKELHGTWRDPETRRIRWQGAVPNTITGIEQLLRQAPGVSVVVEPTGRYGELLIRAAQAAGREVLLASPRKARAFLWSEQPRAKTDRVDSAGLALYGLTGRLRPYLLPSPAVDQVKQLLAARRGLSQSLASLRQQRASLPLAADVLTPAIAALERQIVELDRQMKRALGSATEPAPQRARAVAAAAVPTVADSDTTVAPAAPRGHSLATAAAALLAVPGIGKVTAPALAACLIDKQFTHPDQFVAYVGLDLRVSQSGQRRGQSGLSKHGDAELRRLLYLAALSAGNSTRDDTFVQRYQREQAKGLTKTAALNAVARKLAKVAWSLVTHGTTYDPKRVDRQPVEDEPLDRQP

SEQ ID NO: 355838 - protein, 351 aa, unidentified
MHIIGCDFHTRYQEIAWLDTETGEIQERRLMHAGDEVRKFYSSLTGPVRVGIEATGYSQWFERMLHQMGHECWIGDAAEIRASVVRKQKTDRRDAAHVLELLITNRFPKIWVPTPAERDLRQLVLHRVKLVQMRTRVQNQLQAMAMGQGVCRKKKLWSVRGRAELEKLPLDRWAQRRRQELLQLLDQLDRSIGELHAEVEQQARQNPDAALLMTHPGVGPVTSMAFVLTIGPASRFARGKKVASYLGLNPSEHSSGGRQRLGSISKQGNSTLRWLLVEAGQTAARRDPELGRVYQRLKFRKGSAIAKVAVARKLAVRLYWMLRSRSDYAALVRMSGSSGSAVVPEVQESGR

SEQ ID NO: 355839 - protein, 419 aa, unidentified
MIEAVLERCAGIDVGKKYVVCCLSLGAANSTATEETRQYDTTVAELEKMRDWLLENQCSHVAMESTGPYWKPVFNLLEDHFTVILANAQQVKSLPGKKTDRKEGRRLAHFLRHNLIEGSFIPPVAIRQLRDLTRRRRKLLGAGGSERNRVQKVLEDANVKLGNVLSDVFGASGQAMLEALLSNQGTPQQLAEFARGKLRRKMPEIVTAVEEHRMREHHRFLIRQSLRHMAFLEEQVAALDEEILRQMKPFEKEFESLQTIPGIKATAAASILAEVGVDMNQFPTAHHLASWAGICPGNNESAGKHKGTQTRKGDPWLRGTLTESAWAASRKKGSSFAARFRRLAPHRGQKRALVALGHNLLIVVYQVLSTGQPYQELGSTYHEERTKEARVRHHLRCLRALGALAPGADLTEVPHAPTV

SEQ ID NO: 355840 - protein, 316 aa, unidentified
MDGMNQVSVGIDVAKATLDLHVLPSGQSHTLPNVKAGFEELKQLLPKPAHCLIVLEATGGFEREVVAELIDAGYRVAVINPKRARDFAKALGLVAKTDRIDARVLALFAEKVQPAPSEKTPEKQAEIEQLVARRRQLIELKTQESNRWDVTYVKAAKKSIQAVINTLEAEIRGIEKIIESLVQSDDEWRNKAQLIQSVPGLGSVTAATVMADVPEIGKLNRQQISALIGLAPYNRDSGAMKGKRSISGGRKSVRCVLYMAAIAAKRCNPVIKAFAQRLAQHGKPFKVIITACMRKLLVILNSIVKSGRPWMAQTTS

SEQ ID NO: 355841 - protein, 373 aa, unidentified
MSDYSAFVGLDVHKDTIAVAVADAGRTGEVRFWGEIANTPDAVASMLRKLGGRHPRMHFVYEAGPCGYGIHRQIMATEHHCEVVSPAHTPRKPGDRIKTDRRDAIILARLSRAGELTSVWVPDTIHEAMRDLIRLRQAMVKDLRAARQRTKSFLLRHGRVFKGTSWKRSHRIWLGNQSFAHPAQQIAFQSYLNAVDQAQARRDEVDVQIRHFTADWSMAPVVEALQALRGVAFITAVTVVCEVGDIRRFAKPRQLMAFLGLVPGERSSGETRRQGGITKAGNVLARAVLIEAAWSYRTPAKIGAQMMLRQEGIPQAAKDIGWKAQVRLCGRYRRLMARGKKSALAVTAVARELVGFIWAIAHITEPTGAEGVA

SEQ ID NO: 355842 - protein, 381 aa, unidentified
MQNTIVQDEGAASLEVARTRVELSGSIIKIGLDVHARVYVAVAQFDHLLPKPARRLAPTQFVPWVEQLLGAGHTVHVVYEACGFGFGLYRELKALGAHCYVIAPRKLDEQCTGVKTDPRDATTLCQRLSRYLEGNTGELAIIRVPSEAEEQDRHVSRQREQMVRLRQKLEAQGRSLRVSHSLPSPAHWWKDQTWSRLSRLLPGWVIIRLEVHRPALLTLQQQISALTVQLEAAAPADVPAGVGKLTTVMMTREIYSWERFKNRRAISSYTGLCPGEHTGGTKRIPGSVTKQGNPRLRAALVECAWRMVRFQPNYPPVKKRLAILAKGAPATGAQRKKAIVAVARHLAVDLWRIHTGRCNAAQLRLNNAETLIVRGEQQKSA

SEQ ID NO: 355843 - protein, 350 aa, unidentified
MTMVGGLDVHRQQITFDYVDDDGLVHWGQIRPATRQTLRGWLAEHFRDGDADFALEGCTGWRYVSEELAAAGLGVHLGDPAETAALRGRKKRAKTDRADARLLRTLLVEGRFPESWIPPAHVVEVRTLGRLYCTLMDERRAWQQRIHAQVFHQGCPPIRALLTRAGREALAGAELSAAGRQYVDTALRRIDELSAEIDPLRTQLISFARRQPGCRALQRHYGVGWLCAVIIWAEIGDARRFSSSDQLVRFAGLDVTVYSSDAKRAPGHLSRQGSPELRWAAFEAAKSAARRGSPDHGYYHKLAAKHDGHNGKNPTLAVERKILRRCYHTLRELGDAALALPDIRPQEVAA

SEQ ID NO: 355844 - protein, 353 aa, unidentified
MEAGLCNWYRGTPRIRNITARDLNALHWEIRQARQRFHLPENTSVVSCYEAGRDGFWLHRYLRHQGIANWIVDSASIEINRRMKRAKTDCLDVSKLLTMLMRYHLGERKVWRTVTVPDEECEDRRHFHRELADLKVERTRHINRIKGLLTGQGVCTPIQPDFLDFLSTVRLWNGNSLPKELRSRLEHEYQRIQLVNQQIDELEAYRRETLRTSQQPHIQQVRQLMRLQGVGINSAWLFVMEFFSWRAFHNRREIGALAGLTSTPYQSGETNQEQGISKAGNRHIRAMIIEIAWGWLRFQPDSQLSRWYQQRFGQGSSRLRRIGIVALARKLLIELWRYLETGIPPDGAVLQPQ

SEQ ID NO: 355845 - protein, 372 aa, unidentified
MTTNTTSVTTTVIGGVDTHKHTHYAASIDDHGRLLGHEEFPANDRGYQELLTWLRRQGDIQAIGVESTGSFGATLTRALTKAGEQVVEVNRPNRLARRMDGKSDRLDAEQIARAVLGKTSTAVPKAKSGVVEVIRTLRVVRTSAVKARTRAFNTLWGVMIGSPSPLRDELVVLTKRTLVNRCLGLRPETDDLISISEDPTRLLMAGTKTALRNLARRWKSLDEEIKSLNRQIEALVRAAAPALVELHGVGIELAGQFLVTVGDNPERIRSDAAFAKLCGVAPQPASSGRTSGRHRLSRSGDRAANSALYIVTIVRMRHHQPTRDYVERRTAEGLSKREIIRCLKRYIAREIYANLPREAPVAAVGTGLPAAA

SEQ ID NO: 355846 - protein, 408 aa, unidentified
MRYYIGVDWADQEHAVWVSDEAGRKVTARGVPHTAQGLSEWGRELDEWRAQGLGLWAAIERPEGRVVDFLLDHGVVVYPVNPKALDRARDRFRQSGAKDDRFDARVLAEFLRTDHGHLSALQPSSVEAQELKRLTEGYHRLIRQQTRLVNQLTATLKAYYPRALEVAELTTALARAWLQHFPTPEALGRLTERQWQRWAKAQHLSAARSQELWGLLQAPQLPVPAHVVRAEARWMQALVKQLAPVVDEVAAYRREIETFFAALPAATWARTLPAGGGITVPTLWARLGDAPGRWSSFRHLQAQAGMVPVTVRSGKQQVVVFRFACDKLFRYAVDQLAFLSLQRSTWARAAYDQQRSRGHSHRRALRAVGAKWLKIIFVMWQRQVAYDEQYHLATMARQALQRPDRKIA

SEQ ID NO: 355847 - protein, 339 aa, unidentified
MQEKKKMIWAGFDVGKETFSASLDQVTENGKAKITSLPCRDFKRTPEGLTKFFQWAAGFVSGKDLHIVMETTGCYSQQLIDWINLSHPEVQVTIENARNIHAFIESLNLPHKTDKLDAQAIARFGTERQPHPTKRPSKTILTIRELSRERTALIKSRVELQNRRDTITSSVVRTINAQTIATLTMQIKKIEQEIKACIVEDEEILTEIHIMTTMPGVNFVSAYNILAEIGSLKQYSVKELSAISGLAPRIRQSGSSVHSSFMSRRSSGRLRQILYLDSLPGVPKIPVLQDFQQRLLAKGKKKMTVRCACMRKMLMMMRSMVVHNSPFDENFLKNFSTRT

SEQ ID NO: 355848 - protein, 365 aa, unidentified
MRIDIGVDLHKTQFTVYARREEKPGESGQYPTSDEGYRDFLGKLGGWRRSGHVIRIGVESTGNTRYFKHRLEAKGYPVVVINTLKFKVINESVKKTDKHDAATIAEFLSKDMLPESKLCSEASEQLRRLLKVRSTLVRARVTVKNQIHGLLVSMGLEDTRASLQSKRGRQRILDTLAGAVNGLVVQPLFETIDRLSENVKAIESEIEKLVSNDKVVELLQTIPGCGPITAWTIRAYTDDIRRFSNHKKYSSYAGLAPWVQCSNETEHYGRITKRGPEELRTAFVQLVIGICRSRQSASWRLMERYEAMKRAKGSGKSIIATARKMSKIVWFMLTREEEFNVELMTDNALEKKIDSMRTALNMMSA

SEQ ID NO: 355849 - protein, 389 aa, unidentified
MSATHVSESTTVTAPVLYVSFELSWGTWKLAFTTGSGRSPRIRTIAARSTAGLVFEISTAKRRFALPDDAKILSCYEAGRDGFWLHRFLANAGVANVVVDSASIEVNRHKRRAKSDRLDALELLSMLIRWHNGEQTVWRTVRVPTVDDEDRRHLHRELIDLKAQRTEHSNRIQGLLAGLGLSLVVDKKLPDRLAQLRQWDGAPVPPALQQRLRREHERWQMVGRQIDELVAQRKQQIRADDNPEVKQVRQLLRLKGVGENGAWLLVREVFGWRQIRNRRELASLAGLTPTPYGSGESQREQGISKAGNRRVRWMMIELAWGWLRYQPTSELSQWFRRRFGPGNTRMRKVGIVALARKLLVAFWKYVENDELPAGAEVVEKKILGLKRAS

SEQ ID NO: 355850 - protein, 399 aa, unidentified
MLNPVSSQLRVGVDVGSRCHSVAIGLSDGSLLEEFDIPHTAEGFREFFARVEACGRRHAVPIAVAMEGYNGHVRPLDSLVRARGWQLFNVNNLKLARFKEIFPAAAKSDRIDSRKTLELFQLGDHLPMAGEVLQEVMATPEENNVLKRLSRRRRRLVNERARVINSMQADLQAVAPGLLEITQDVGNLWFLNFLTCRKDILKLARLRRSSLLKVPAIGPTYADRIQAWQQGACFGPDARLVGDMIRQDAERILELKQQIKALEDQMAHVAERSSMACQLASIPGYGAVCTAELAGEIGTIGRFRNEASLALYLGMATLDNSSGKFRGSKVPKHVNARAKAAMMAAVDHHRKRVPQSQRYYEKKRAEGKKHNQAIRALGRHLCRVIFKMLSQERLYRIDH

SEQ ID NO: 355851 - protein, 406 aa, unidentified
MTYRVFVGIDWGSQEHAVAVLTRDGTGAQERKVAHTGMAIAALVDALITLADGAPESVAVALEVPRGSLVEACLERGFHVYALNPKQLDRFRDRYTVAGAKDDRRDARVLASALITDVGAFRRLDPEDARLVQLRELTRLEEDLDTERRRLSNRLREQLYRVAPGLLTLCPGADEPWLWTLLTRASTPAGAAHLPRAAVARVLHQHRIRRLTPDDLLAVLRAPRVPAAPGVLRAVEDHLAVLLPRLRLAAEQQQTCATRLEQLLDELGQTQEHRDVAILRSLPGVGRKISATMLAEASRPLAARDYHALRTQAGRAPVTQQSGQRRRVTMRRGCNPRLRNAVHYWAQVSAGHDAVSAALYARLRARGCSHGRALRGVADRLLAVLVAMLRHQTLYDPERRRISAAA

SEQ ID NO: 355852 - protein, 342 aa, unidentified
MKIHTIGIDLGKTSFHVAGLNERGEVVVRKRFSRTQLLRFTANRKVHVIGMEACGGAHYLGRALQEQGHEVRLIPAQYVKPYVKTNKNDYVDAEAIAEAVGRPTMRFVPIKSDDQLDLQSLHRVRERWVARRTAVINQIRGLLLERGITLRKGRRYLEEALPGILEDADAKLSGTVRLLLAQLKLELDQTALRLEEAEVLIEQTVQESEACQRLMQIPGIGPVTATAVISAIGNGAAFRKGRDFAAWTGLVPREYSTGGKQKLLGISKRGNRYLRKLFVQCARAVLQQKTKQAPGLKVWLEKMTSHTHRHVAAVALANKLARMAWAVLATGEAYRAPLPAAA

SEQ ID NO: 355853 - protein, 399 aa, unidentified
MISVGIDISKEKSTVCILKPYGEIISMPFEIKHAEKALSELTTMLLRFNEEVKVVMEATGIYHLPVLSYLQEKGIFVAVINPFEMKQYRNQGLRSVKTDKKDAITIANYGIDYWFRLRKYEVTAEIYQELKILGRQYSHYMCMRIESVQSLTHLLDYTMPGIKGLLKGRQEANGKDKLSDFVEAYWHFDNITKMSEENFVNSYVNWAKEKGYHQSQNKAVKIYSLAKDGIPTLSADMESTKMMLQQAVSVLKQVNTTLTVILAQMKDLAKRLPEYPIVRAMGGVGDVLAPKLIAEIGDIRRFHNGKALIAYAGIDAPPYQSGQFVGTNRKISKRGSSTLRKIGYETMRILKTHRAPEDSAVYWYILKKEAEGKAKRVAKIAGLNKFLRIYYARVKEVYQ

SEQ ID NO: 355854 - protein, 355 aa, unidentified
MSSNIKYIGLDVHKEAIAIAVLNGAGKLVMESIIETKAATLVQSLQGLRGELHVTLEEGTWAAWLYDVLKPHVHELVVCNPRRNALLKEGSKSDKVDARKLAELLRAGMLRPVYHGENGLRTLRELARSYQTISKDLQRVMNRLKALYRSWGIPCGGTQVYAPRHREQWLNKIAQPGVHRRAELFYQHLDGLQVLRRQVRGEFLAESRKHKAVKVLRQIPCIGPIRAALLLALMQTPHRFRSKRQLWTYSGLGVETHDSAQHRYVEGRLQRSRKPQQVRGLNQNHNHEMKEIFKSAATRASCRGPFHDFYAGLLAKGMKPEMARLTLARKIAAITLTLWKKGGRFDAEHLKAQAA

SEQ ID NO: 355855 - protein, 321 aa, unidentified
MDAAGRVVVQRQLRRAQVEKFFAAQPPALIGMEACGSAHHWARTLSALGHDVKLMPPAYVKPYVPRNKNDARDAHGCCEAVSRPDMRFVPIKSVEQQWARALHRTRDLLVRQRTQLANAMRGLLYEMGQTSAKGAAGIETLLRRVEAADEAIPAALLICLVPLAGQWRALDGEIGKLDKQILAQVRQQRAALRLTTIPSVGPIIAHATVAAIGDGRQFASARDFAAWLGLTRKTHDTGGKHRPTGHISRAGDKDLRRLLILGASSWLRQVRAKPDRGSPWIRGLLARRPVKVAVVAQAAKTARIIWAMLQSGQQYRAPAVA

SEQ ID NO: 355856 - protein, 345 aa, unidentified
MNKLSVVGLDLAKNVFQVHGISTDGEVVVRKQLRRSEVRKYFAKLESCLIGMEACGGAHFWSRELPRLGHTIRMMAPAFVKPYLKSNKNDRNDAEAICEAVQRPSMRFVQPKLPEQQAVLHLHHGRQLLVRQRVALSNHMRGVLSEYGIVLPQGVKVLSRQLPEILEDAENTLPMLARHLLAELKVEHDQLIGRVGRFEKQLKAWHANSLVSQRLASIPGIGVLTATALAATVGEGEDFKNGRQLAAYLGLVPRQASSGGKDRLLGISKRGDGYLRSLLIHGARAVIHHIRRRLKAGRPGGNPWVEQLLLRCHVNEAAVALANKMARTAWVLLARNETYCLARPI

SEQ ID NO: 355857 - protein, 436 aa, unidentified
MDDVEDEPLFAERVAGIDIGKAAIMVTIRVPSDTRRGRRQQETREFRAVLKDLLALAGWLGCWGVTRVGMEATGDYWKPVYFLLAREGFDCVLYHASQVKVLPGRPKTDRLDSVWLAKITERGQLPGSFVPPEDIRRLRTHTRYRRHLIQARTAEKERCEKLLEDAHLKLSSVIRDIHGVSGRDMLTAIIAGQRDPHVLAQLARGRMRIKIRELEEALDCSFFTEQHAFILQMMLANIDYLTRQVDELSAKIQALCEPYARQIAQLDGIPGFGVITAQDIIAETGADMTVFPTAGHLCSWARQAPQVSQSAGKRKGKNATGRGNPYIGAALGEAAIGAGRTQTFLGAKYRRLVRHMPKKKAQGAIMRTQLVICHALLSDPDAACEDLGTDYYERRQDIRRRARNHVRSLERLGYMVTIESLSPDPETGELPITQAS

SEQ ID NO: 355858 - protein, 402 aa, unidentified
MVDGPTRFFGLDIHKEYFVAVGVNAQREVVFGPQRVSNYQLDEWVARVLTIQDSVVLEMTTNTYLFYDTLVPLVHSVIAVHPPNVALVTNVKVQTDKKAALALAQLHAAGLLEGVWIPPQEVRDLRALIARREKMVRLSTMAKNRLHSIIHRNHLILPEKPFDPEQHSWWESLSLSSTEQFLVRSDLDTLEFAQKQVAQAEECLKKASAQDERIPLLVQLPGVAMLTAITILAAIGDVTRFPNAKKLVGYAGLGTRVHDSGMTHNSGRITKTGRKDLRRSMVNAANHAIEHHPHWKKEFERLELHLGRSKAVVAIARKLLVAVWHVLSEKAADRFADPANVARSFFTYAYRVGVRNLPEGRSALSFTREQLDRLGIGQDLLEIPWGSKPHKLPASKLLPEKE

SEQ ID NO: 355859 - protein, 352 aa, unidentified
MAKTGFDELMSVGIDIGKDTFHLVGFDPNGQRVIRQQIKRLALVATFEKLPRCIVGMEACLSAHFVSRTLRKLGFEPRIIPAIYVKPFNKGQKNDYNDAEAIAEAALRPNLKTVSEKTQDQLDLQALHRVRSRLVSRRTATINQIRAFLIEQGITVRKGLRALKNSFETILEERKDEISPRMRRILIGLYGDWMWMDDRIDKVSKEIEEISRTEENCVNVMTIPGIGPMISTAMVAAIGEGEAFDRGRDFAAWVGLVPRQYSTGGRTVLGRISKRGSRYLRMLFVQAAKVIMMRPHRWPDFSFGEWLTRASERMHRNKAAIALANKLARMAWSILRHKTVFDAPRDEVAVGV

SEQ ID NO: 355860 - protein, 493 aa, unidentified
MKQLNVLRGFTMKKRNVFQNQSQEILTLFEVAQDRSKVMCIPIDYAKKDHVVMFCNGNGKIIRKPFSIKNSPEGKDYLIDQVRKSCRHHGINLQHVFYGGEDCGAYADNFIAALRLENYLVAGVNALDAKKHRENVQASTDRLDLLGISKVLLNCRGNCSPAQSGIYWNLRALVRERRKLVHIATGVRNRIHNIVDRIFPGFLNEKKSGIFPFSKGSLALMKNRFSVNQIRRRRRSTLAKFLARQLVHHSDHCAEKLQQYASQVLQPPTDRIATLQITLKQQVKLFNCLQESILHLNKEIAEHLAQTPGVLLTSIRGIGITLAAGVSAEIGDPNKQGSLSNLVSYAGIIPRVKQTGGIQGKTLVKKVGKRCNRILKDYVVQSANHIGLYGPDDLKMDYKRRDAKGQHADFGMARRYLRMAICLMRTEQTYLPKILRSTRSNMKERAEYYITSWPTFHSKWKRSGALDLAFDKDMWLGQWRNMIQELYGIELTL

SEQ ID NO: 355861 - protein, 412 aa, unidentified
MSATHQPNCTSNPAHLYVALEMGMAKWKVCSTTAVGQKPRTKSVDARRMDLVMEEIRRAKARFGLPAEAEVHVCYEAGRDGFWAYRWLTRQGLDTVLVDSSSIEVNRRQKRAKTDRVDGEKLAIMLVRYQEGDRRVWSVVQVPSVEEEDARQLHRELKTLRGERTKHINRMKGLLIGMGIDVRGMAGMPGERLAALRLSWDTQTDPQGAPLPAGLRERLGRENERLELVERQIEALEEQRAEVIGRGSGVCVEKVRRLLNLHAVGVTTAWTLVMEFFGWRTFRNRREVGSLSGLVPVPYDSGGSERSQGISKAGNPRVRALMIELGWGWVRWQEGSALSRWYGQRFAGGSKRQRKIGIVALARKLIVALWRYVETGEPPEGAKLVDWRTKIPWRLQQELEEELESCLAGEVT

SEQ ID NO: 355862 - protein, 327 aa, unidentified
MRQANSLTQKVKTTVAFDVCKAALDVHVRIDGKAFQVPNTHEGFDQIALTLADYDVTLILMESTGGYEDAAACYFQSVGYDVAVINPRHARNFAKAMGKLAKTDRLDAAILADFAAVIDTRPDRARYIKPPTDEERKFLSQMVARRRQVVDLISTEKQRLAHADDYAKASINIIINLIESQLKEINSDISFYVKKNFSGLSNMLSEIPGIGDQSVGLLIGDVPELGQIGNRQLSAVIGVAPFNHDSGKMRGKRCISGGRQNVRNVLFMCAMSATRFNPVINAFFDRLIAKGKPKKLAYIACVHKLLRIINAMVRDGTSFNPDLHTVI

SEQ ID NO: 355863 - protein, 516 aa, unidentified
MGASNTFSRVIHDRVKRAVRNSHSEVVNNSAAAQTGPSENLAAAGTQTGASNPERVKPRTLTSPAACGPIAERTLPQEGRCIRSRQPRRAGQKPRRLRPMKPWKELTHFAALDWADDHHDLVVVDAGGQSVLELTFEHSAEGWQQAEQALTQWPGLPVAVETSAGPAVDQLLQRGFTVYPVMPKAAARYRERKRPTGSKDDLHDAWSLADALRTDGHGWCALSPLDPLTAELRALCRDEISLIEQRTALVNQLQAALKEYYPAALEAFDDWTKPASWAFVLVFPTPAALVAAGKRKWEKFLHTHKLWRAQRAAERLEIFARANQFSGGAAITAAKSMLAQSLARLLQTLEQELIAYRARIQALFQQHPDHELFGSLPGAGAKLAPRLLVELAGVNWSLLSLVQARAGTAPVTYQSGKIKRVKIRRACIHWLRATLHLWADLSRHSSAWAAAFYHAHRDKGQSHACALRCLAHRWLEIIGAMIRNRTTYDAEKHLAQIQKHGSYVLRLITSPDPKSL

SEQ ID NO: 355864 - protein, 351 aa, unidentified
MLIIGVDYHPSFQQISFLDQETGKCGERRLNHSDGEAERFYRDLKQRGVGVRVGMEATGHSRWFERLLAELGIELWIGDAAEIQRQRGRKQKTDRLDAELLLKLLLENRFPRIWVPNPENRDLRQLLWHRHRLVQMRTRIMNQLQAVAMNEGYRWKKKLFSAPGRALLEKLSLAPWASRRRKELLELLDQLDPKIAELSAAVEQEAEKWPAAVRLMTHPGVGPITGLVYILVIGTPERFPSGKKIGSYTGLIPSEDSSAGQQRLGHISKQGNTLLRYLLGEAAQAAARCNPDWRRRYMHLTMRRGKRIAKVAMARKLAVRLYWMWRNGWQYSQLVEFGSHAGKLGTGHGVK

SEQ ID NO: 355865 - protein, 322 aa, unidentified
MAMLSFGGIDVSKNRLDVMVLPEEQCSSVPNDAAGWANLVEQLRGCSIAAIGIEASGGYERGVMRALLAAGIPARQVNPFKLRQFARASGVLAKNDPLDARMIASFVAIMPTRPAQLQAPAAERLAEMLAVRRQLSAEKVAAENASRLLEDAMLQRLSRRRIGRLAADIDVLDERMVEIVATDAALAHRYRLLTSMPGVGAVLACTLLALLPELGRMSRKQVAALVGVAPYAFESGTLKGRRCIWGGRAHVRHVLYMAAMSASNWNPVLKAFHDRLKAAGKLPKVTIVAVMRKMITILNAMVRDDVTWADRYIGRHSVPTAR

SEQ ID NO: 355866 - protein, 455 aa, unidentified
MPKRKPSRKPHWSPSARRLEPHAAGVDIGATEIYVAVPADRDPHPVRRFGTFTRELEQLADWLKPCGIETVAMESTGVFWIPLFQILEDRGFRVGLVNARHVKNVPGRKTDVADCQWLQDLHAVGLLRASHRPPQTIGALRSLWRHRESLVQMAAVHIQHVQKALDQMNIQLHHVISDITGTTGLAIVEAVLAGERNPKQLARLRDPRIVASEETVAEALIGNYRPEHLFVLRQSLQAYRQYQGWMADWDREIERLLGKLESRLEPDQKLLSSPKDRHKPRRNEPRFDLRTYLYRIFGVDLTEVPGVNSLTAHTLLTEVGPDLHKFPPAAAFASWLGLCPDNRISGGQILSVRTRKVVNRLAGALRMAAQSLHRSQSYLGQYFRRLRTRLGTPAAITAAAHKLARVLYHIVTTRQPYDQSVFAVMEARARHRQFIRLKKQAVAFGFQLMPLARVP

SEQ ID NO: 355867 - protein, 326 aa, unidentified
MQSILGIDVSKKTMDVLLVTDHRVCHKVVKNDPKGFQQLEEWLKAENSGQVHACLEATGQYGEEVAEYLNICGHQVSVVNPARIKRYGESKLHRNKTDKADAALIAEFCQKEKPTLWQPLSPEIKRLKALVRRLQDQKANLQQEKNRLESGEKNRWVVCDLTTHIAYLKERIQATEKEIEEHINLTPDLKFKRKLLTSIPGIGHLTAHILLAEIGDISKFDSAPQLAAYAGLNPQGHRSGTSVYKKTRISKQGRSELRCCLYLPAIVAMYHNPVIQDLSERMAGRQSHKMEIVVASMRKLLHIAYDVLKNQTPFDPDFGEQFNFSS

SEQ ID NO: 355868 - protein, 408 aa, unidentified
MGIDIAKRTHYACFVDDRGRVLRKSFPIFQSKEGFQQLYKAIHGAMQAFGKSEVIVAVEPTGHYWLNLAYFLEEHGIPLVMVNPAHVCRSKELDDNLPTKHDAKDALVIARLAKDGRFLVPRLLHEIEADLRVGSTLKEKLRKEQTAVKNAIVRWTDRYFPEFWTVFRDLGKTALSVLEWTPLPADMAGRTVEELLEVYRQSEGMKCPQKAKIQALINTAKDSIGVTEGTAMARFEIAALVRRYRQLEAEIAALDAELKALVQTTMEYQWLKTVDGLGDATIIDLLAEIGSFAHYRDPRQLVKLAGLTLKENSSGQRKGQKHISKRGRKRLRSVLFRAMIPLIRHNEAFRELHEYYTTRSVNPLTGKQSIVALCRKLLNVLFAICTKKQAFDAERMKQDVLSQVQRAA

SEQ ID NO: 355869 - protein, 357 aa, unidentified
MKIVGCDLHAKQQTIAMMDTETGESTEKTILHEGNAVHEFYAGLGGPVVVGIEATGAMQWFLELLEELGVEYRVGHPAKIRAQETRKQKHDRRDAGLLLTLLREDRFPEIWMPSTEQRDLRTLLRDRDQWVRMRSRVQHTLQSIALNHALRQGRALWSTKGQSALRALSLPPYTSHRRNELLGMYKQLQERIQELDKEVERQARHRPQSCRLMTHPGVGPVTALATEVFLGDASRFTTGNQVASYIGMIPCERSSGKRQRLGKLTKEGNKLLRYLWTEATMHAAEKDAELKRFYRRKLVQKGMGKARIAAARKLGIRLWIMLRDQIDYAEFCRRGQLRQEGKAHAGMPELQHGPAMQ

SEQ ID NO: 355870 - protein, 340 aa, unidentified
MKFVGVDLHKKTISMCVITVVGGKRKVVCRRRFACRDTAGIRAFFERQPPFRVVVEATATYEWFLMLVEDLADRCVLAHPKKLRVIAESTHKSDKIDAHILALFLALDMIPEAYRPSRRIRQYRVLVRHRRWLQSRITAVKSKLRYKAAEYNADVARLFSSQGQKHLASIAMNSADRFTTQLLLEEWKRYEGQLAEVDAKLREFAKTAPAAEREARAVLATMPQVGPVTIDVVLSELGDWRRFRSAKRVVSYAGLDPGSRESAGKARQLKISKEGSRLLRWAMVETAWRLVNKYRRWQNVFEKLKKNTGSEKRAIVGVARRVLCVMFAMLRDGQPYRLAA

SEQ ID NO: 355871 - protein, 272 aa, unidentified
MNKNTKFFGIDISKDVFDVVDSSEKHHQFKNDPSGFKKFGKLLDGSSHCVMEATGSYYQGLATWLFSQSIDVSVVNPLSVKRFIQMRLKTSKTDKMDALMIRLYGESEEPKLWNPPSKLIIEATELHKLIELLVRQRAGLKNRLHALESKGITKSLVHTTVRRQIRNLGKEIADLEVKLESVIKEYEPDLLTRLCSIPGIGKRTAIYLIVITHGFEKFESSRQLIAFFGLDPIIRESGSSIRGKSRISKTGDNQVRKLLFMCAFTACEHNKA

SEQ ID NO: 355872 - protein, 384 aa, unidentified
MYKHNILFIGLDTHKVSTEVAHIEDQHGAKPVHHGKIKTTKAAITKLARQYQSKYPQATLHFVYEAGPCGYWIYRLLTSLGHCCYVVAPSLIPKKPGEKIKTDKRDALKLAKLLKSEDLTPIYVPESEDEAIRDLSRARETAMKDLKDAKYQLKALFLRNNITSKVNDNWSAQHLRWLTELVLPHPSQQIVLQEMIQTITERIAREKRLANELFHQVKQWRFYPVVKALQAVRGVKLLIATGVVAELGDLRRFDHPRKLMAYLGLVPSEHSSSDKRRLGSITKCGNGRARRLLVQGAHTYKHKANISTELQKRQESLPKEITDIAWQAQLRLCRRYNRLMSRGKHRNVVVIAIAREMAAYIWAIAREVVISEVNPRLRVSRVPA

SEQ ID NO: 355873 - protein, 342 aa, unidentified
MEKKLFIGIDFSKKTFDVSVIHFNNLQAVDYQQFENSKEGCLSLLKWIKTVSKQPNSSWLFCGEHTGLYSICLSEFLVKKGLSLWLENPLQIKQSSGIRREKNDRVDSQEIALYAYRFQDKARMYQLPDKALKSIELLLSFRARLLANKHNLLVSSVEIRRVISHNSTARYIYEQSKRDIERINKEIKEIERRMLEEIENNESLSENYKLVSSIKGISLINTTAILIATQNFTRFENSRQFACYSGMAPFGKQSGTSINTKPRVSGLADKNIKVLLTQAAKCAIRHDPNIKQYYERKLAEGKNKWLLVNNVRNKLIHRIFALVRNKQLYQMDYLNPCNKTVA

SEQ ID NO: 355874 - protein, 388 aa, unidentified
MSQSFDTSRSLTAFEQDSTLVAVIEMSQSKWLVAAVLPGVERRPLKKLDADAGALLKLLQRWRDEARKAGRTIRRIVCAYEAGRDGFWLARWLQAQAIEAYVIHAASIAVSREHRRAKSDRIDTELLMRSFLGWLRGEKRHCSMVAIPTTAEEDARRPSRERESLVGEQTRIVNRIKAVLALFGIGGFNPKLRRAAQKLETLRTVEGAPLPENAHAELRHDLERLRLVHDQIRAIESERLRRLAAAPAAGPDAMVRLIARVFGVGIETADMLVNEALARNLRDRRAVARYAGLTGAPDESGKRRREKGLARAGNGRVRRGMIQLAWRFLIFQKDSRLVRWFRERTADGRSTTRKTMIVALARKLLIALWRLVTTGEMTEGIKLRPAGT

SEQ ID NO: 355875 - protein, 364 aa, unidentified
MLFVGVDVHKDTHTAVALSPFGEKIFEMKIGNEAEDFISLVEKTKTEAGRIGLVPRFGLEDVHSWGERLSSFLVEEGLPVIAVAPVLVDHRRQKATHPEKNDSLDAQGVAEVMIQRIDTLPAYKLTEEAKKAKQIRELSLEREWLVKERARLKNQLHILLHRIHNTGYRVKFKDPFSKKALHYWMRSIPRETDAILAARMKRAVRRLLDLREEIQDIEEELEAMMKDNGTTLLTASGCGVVIAAEIIGEVGDINRFHSPGALAKYAGCAPREHSSGKTIRWRKTRSGNRRLNRAFHRMALSQISRSGNDAARQYFKRKISEGKTKAQSLVCLRRQLVNVVWMMMKHKTEYRPPVGEAGYPQKND

SEQ ID NO: 355876 - protein, 476 aa, unidentified
MKNQNIYRNNNYALKETLSNYKPEQLLYIPIEVGKFNHKASIVNFFGDIVVKLFEFPNKKHGLDFFVKKLNFATTSSNAQKIFLDCESCGHSHLNLVHHLKQLNFPIEIINPRDTRKENPNKNSKTDNIDLGAIARVLISNKGGRQIVPEGVYYNLQRAARTRRKFVQRKTSSKNIITGLLDRIFPGLWDKDAPIFSDRWGKASMLLLERYPHPHRIIRLGEQRLARFLRKNNTKLGIDSAHKIIDAAKDSLTKPLAELHMDIFALKSHIKCLNLYNETIAQLEQEIACLLVQTPGIYLLSIDGISVIFAGEFTAEVGDINRFAYANQIISFAGSCSKVFESAEYQAQGLHISGRGSKFLRSTLNQVALALNAWCEPFHLYYTNKALQKPDKPGIARIATGNKFVKLAFALMKYEQLYKPRGLLLDEKNYYSNLWSKIIRKLSGFNLTNISQENNYLLKIKKYLEEKYALTLSTKL

SEQ ID NO: 355877 - protein, 397 aa, unidentified
MIAVGIDVSKSKSTVAILNGDGSIRAKPFDVHHVADELQALVDYIKRTSEPPTILMEPTSHYHYPLLKAFQEAELPVCLINPYQMKKYGDTELRKAKTDKRDSLRIAQYALEKSYSLIPYTPQDQKYEDLRFLSRQYSQRISTLTVAKVQLLSLLDETMPGITTILPLKSRDPDNCVLLRFIKRFKSFDVIRKMGKTRFLDSYQVLVKKTKDRFAGSKGLAIYEFVLNSVTTRGENPLSAMTQDQCVDLVSTSQKAADEINLQMRIIAETMPEYKVLRSMAGVGDRLGPIILGEIGDIRRFHSGKALNAYVGNDAPPYQSGQFESRNRHISKRGNPALRKACFEVMQALKLTKPQDDPIYLFLLKKEQEGKPYNVAKMAAVNKFLRIYYARAMELYK

SEQ ID NO: 355878 - protein, 364 aa, unidentified
MYDSMTTVTVGLDVHAHSIRLAAVRADELLEERTLPYDHGALERVLRRWPLVRCCYEAGPTGFGLYRYLVERGIECAVVAPGLVPQRPGDRVKTDSRDARKLARLLAGGLLQPIHVPTAELEAARDLVRAREDARLDRMRDRHRLSKFCLRHGRALPTSSWTVVRRKWLGEQRFEFAAQQQTFDTYVHTVDLVDARIEALERSIRETAEQESWRVLVARLRCLRGIDTLTALALVTEIGDFSRFRTAEEFMAFVGLVPSERSSGEQRRQGSITKVGNSHVRRLLVESAWHARRRPKVGYELARRQRGQEAAVVERAWRCQQRLYQRWQRMAGRGKPQQKIAVACARELAGFVWAIATEQPLRTI

SEQ ID NO: 355879 - protein, 345 aa, unidentified
MTYYTGIDVSLRSVSICVVDDKGEVCLEAKVAAEINAIVHRLRRFSSDVKSVGFEAGTLTQYLTYGLQAAGFEVICLEARQVSVTLSAMRNKTDRNDARGLAQILRTGWYSRVHVKSLHSHQVRALLASRKAILKKCVDLENELRGLLKVFGIRLPSRVGHGSFDAELRETVSSDEMLACALVPLLDARTVLYKTYLKLDNAVKGLVRVDPICRRLMSIPGVGPVTALTFKAAVDDPNRFKSSRTVAAHFGLTPRRFQSGETDNPGHISRAGDADVRSALYVAAHSLLTRNAQWSTLKAWGVRLAKIRGHRRAVIAVARKLAVILHRMWIDGSEFRWGSPAQTVA

SEQ ID NO: 355880 - protein, 353 aa, unidentified
MSKILAIDLGKNNSAVCIFDRSSLKCKYKTLRTRKQVMHDLFVEYQDQIEIVLFETGSQMGWVADILWALNIPFKVANTNHQAWKWKNNPNKSDRKDAQRLAMMYHTGFFPTVHVPKREVRQKRSLINYRDDVVKRITKMKNSIRAILGREDIHLPSSKKGWTIKALRPIRKMAMPLKEITDLEDLWKGQLHSELNQLDNSVEELKDMESKLNSLGEADEKIKQLRTIPGVGPRLSEAVVAIIDDPHRFKNGRHVSSYLGMVPRRWQSGQVDITGRISKCGNKLLRTLLVEVSWLGLREPWMREIFNKVKHGDKKRAKVAIVALARKLLVICWAMLKNGTTFDANYAKRFVKC

SEQ ID NO: 355881 - protein, 357 aa, unidentified
MSYDIILAVDYHDENTVIRQFDERRKVESTCTVPSSAAALLQVVQEARKQRWRGGQVVWIQESTSGWARVQALLQDQVKFQLANVVQMPRLPKGHRQKTDRTDTARILREYWNGSLPQAHQPSAWWRQIRRLVCLRENLVNRRTALRNWINRYLAHETWESRVGLWSAKGMVRLRHYAKGLPEWDHIVVGIKLTELEQLEVPLSRVEAQMHEVYRHWPEAQQLDAVKGIGVIAAVAIAARIGPVQRFRNAEALIAFAGLAPGVRQSDATRRTGRIGGGGTDFHLRHYLIEATVWARALPRYRPTYERVAKRRGTKVGRLVVARLLLRSIFKVLRDGQRFNGEASNQAVPIDLTPATP

SEQ ID NO: 355882 - protein, 323 aa, unidentified
MKKFVGIDISKETFDIYFEQEDKGCHVKLHQTEEDYKVLLHLIGSDSICIMEATGNYHLNLANYLHQADIKVVAENPLKIKRFSQMSLQRTKTDKADAKLIYEYGRLILSSTELHFWQPDKTEIGHLKQYDTVRHQLLKQRTALNNSEEALNALTNLNDEVTEVLSDMVAAIDKAIKQLEKGMLKLVKEHHAETFDLVTSVPGVGAKTATMMICLTDGFNKFSHDQVKQFISYIGMSPRTFESGTSVKGRAHISKVGNSRMRSMLYMCSWTAKTKNYQCATLYERLSGKGKPEKVIKVAIAHKLIRQIFGVIKSGVPFSKEYA

SEQ ID NO: 355883 - protein, 367 aa, unidentified
MTVTIVDAARPVTGGVDARLDLNVASRLVTGGVDTHLDLNVAAALDPVGGLLGVAEFPTTAAGHRELLGWLSGFGPVARVGVEGTGSYGAGLARFLRASGVEIVEVYRPNRQARRRSGKSDPLDAVEAARAALSGRASGAAKSRDGNVEAIRALVVAKRSARSAKIQALNQIRHLSFTAPEQLRQRLAGVSRHHLAARAAGLRPATGAGADPVIAATKTALRILGRRVLALDEEKARIDALLTGLVTQTAPQLLAVFGVGVDTAAALLVTAGDNPGRLRSEAAWAHLCGTAPIPASSGKVTRYRLNRGGDRQANCALWGIVITRLGNDPRTRAYMTRRLAEGRSKPEVIRVLKRYVAREVYHRLPRT

SEQ ID NO: 355884 - protein, 386 aa, unidentified
MHHATTLPVPEQTCSRGDCATLFVSLELSRSTWVATALAPGSRKMSKHTLVGGDGRKLLDLLARLKTRAEQRIAAPVKVVTIHEVGLDGFWIHRLLEANGVESHVVDPASVAVPRRHRRAKTDAIDGETLLRTLMAWRRGEPRVCAMTVPPNPSEEDCRRISRERAVLLRERIRHTNRIRGLLFGQGITNYNPLRKNRRECLEELRTGDGHSVPARLKAEILREIDRLELVLRQISEVEAERDAMLQPAEASSPAALLMQLKGIGAEFAAVLYLEGLFRHFENRRQLAAYAGLAPSPWKSGSIDHEQGISKAGNPRLRTTMVELAWMWVRYQPDSALSCWFRQRVGSERGRTRRISIVALARKLLIALWRYVTHGEIPAGAVTKPV

SEQ ID NO: 355885 - protein, 311 aa, unidentified
MTDDTIGIDISKATLDIHRLSDGKMMSFSNCPAAFKALSKFCAQTAVIRVVYEATGAYHSGLERALGAHLPLVKVNPLQARRFAQAQGVRAKTDAVDAKMLAVMGDAFALEPDEPATKIQHDLSELRTFRSGLIKDRTRIMSRLKTQTLSIICRQSKARLVDINKQIAEIDTEVDRLINSNDTLAHSMKILRSIPGIGAICASTILIEMPEIGSMDRKQVASLTGVAPMTRQSGQWRGKSFIQGGRKVVRDALYMPALVAMRHNPDLKAKYQAMIKAGKPPKVALTALMRKLIELANALIKANRNWVKKEA

SEQ ID NO: 355886 - protein, 355 aa, unidentified
MDSKKYIGMDVHKESISIAVRNAAGKVVMECVIETKASMILQFIDGLRGDLHVTFEEGTSAAWLYDLLKPHVTKVVVCDPRKNASMREGNQSDKIDARRLAELLRLNHLNPVYHGEHGLRSLKELVRSYLTITKDLGRVMSRVKAIYRSWAIPCTGKQVYAPRYRAEWLGKIGEPGVRRRAEFYYQQLDALRTVRQQVRRELLAEGQKHQAWKRLCQIPSIGPIRSAVLLGILQTPHRFRTKRQLWTYSGFGIETQSSADHRSVNGQLQRAKKQISIRGLNRNCNHDLKNLFKGAAIVASSKPGPFQEFYTALLTKGIRPEMARLTLARKIATIVLIVWKTGACFDAQHLKPQTA

SEQ ID NO: 355887 - protein, 403 aa, unidentified
MNAVGIDVSKGKSTVAVLQPGGVVVRKPFDVSHTGGELKSLASYLLSLNGETRVVLECTGRYHEPVLHTLSDAGLFVSAVNPHLIKNFGNNTIRKVKSDPADSRKIARYALDNWAELRQYSSMDTTRTQLKALNSQMTFFMNQKVTARNNLISLLDMTYPGVNRLFESPARPDGHEKWVDFATSFWHVDCVRKIGIKSFTERYQAFCKREGYNFQSGKPQEIYDAARELVAVYPKEKPYKDMVLMSIDQLNLASAHVEQIRSEMNALAASLPEYDTVLAMRGVGPTLGPQLMAEIGDVSRFTHREALTAFAGVDPGVNQSGQMNSRSNRASKCGAAKLRKTLFLVISTIIQTGPSDDPVYKFIDKKRSEGKPYLVYITAGANKFLRIYYGKVKECLAHKAQTD

SEQ ID NO: 355888 - protein, 450 aa, unidentified
MMEPTVIQDEEHEQILERVAAVDVAKATGMVCTRVPDEARPGRRVSKVWEVPATTNAIIELGEYLAGLGIQKVTLESTSDYWRPFYYLLEAAGLDVQLVRAQDVKQAPGRPKSDKLDCVWQAKCTERGLLRPSFVPPPEIRQLRDYTRLRVDLTRERSRHAQRLEKLLEDALIKLSVVATDIMGVSGRAMIEALIAGERDPQVLAGLARGRMKVKHAALVQALTGQFDDHHGELARMLLDQYDALSGQIARLTARIEELIAAIPAARGVDAGGATGPGAGEAPDAAVRSAIARLDEIPGVGRHGAQLILAEIGLDMSRFPTAAHLASWAKLCPRTIQSGARSRGGRTGKGNPYLKGLLGEAAAAAAKTDTFLGERYRRIVKRRGKLKALVAVARSILVIIWNLLADPAATFHDLGAGYYAARTDKDKKLKNHIRQIEALLGHPITITKAA

SEQ ID NO: 355889 - protein, 312 aa, unidentified
MTTIICGVDVSSLHLDARIGLDGPALRCPRDAAGIAALAAFCREHQAALVVLEATGGYERLPFALLWAEGLPCALANPRQVRRFAEAMGRLEKTDRIDAGLIAHFGAVKALAPQAPAHDSQRCLEALTVRLRQLTSARVAQANQRRLVEDATVLGSIDRISAALTQEIRIIEAEIDALLDADPLWRSLAQALRTIKGVAGRTVATVLAHLPEIGTLSNKAVAKLVGLAPLANDSGQRQGRRPVRGGRTPVRSLLVLVAAVVARHDPDFRLMHQRLTAAGKPKMVVRIALARKLIVRLNAIARDARRQIPITP

SEQ ID NO: 355890 - protein, 339 aa, unidentified
MLHYQNLGIDLAAKSFRVCLKVKNEDLNVKIKGQRKFDNTTSGFEALNSWLKKKVDTGLTLTVTMEATGVYYERLAYFLHGAGYKVHVLLPNRIKGYMKFLNLKSKTDKLEAKALAELGLGTKLPEWKPASPQMYTLKRLSRERNNLKEEKTALSNRLHAEESCQKPEKLAIKRLKQRIALIDKQIGQVEKQMHQLAAKDQELQSRIENICKIKGVAFITVLAVIAETNGFELVEHKSQLVSYAGYDIVERESGSSVKGKTRISKKGNRHIRHALHFPAISVVKYHEEFRSLYERVFDRTKVKMKGYVAVQRKLLVLIYTLYKKNIPYDPAYYKTLAVG

SEQ ID NO: 355891 - protein, 319 aa, unidentified
MSTIIGVDVSKDSFDTAFEKDTKKFVQGKFDNCSEGFCLFYDSLPQGDRVIVMEATGPYYLKLSYFLHEKGEKVAVVNPLKIRRFAQMRFERVKTDKADARIIASYGKSEELKLWEPLEEHIIDIRQICSVMERMVKDRTAWQNKQEALKNDPKHSLMAMREIEEMIAYITRKLEDLENKLDEIVKDHFDDQNKIIRSIPGIGPKTSIMLLALTNGFTRFDTYKEFISYVGLSPRIYDSGTIRVKAHICKLGMSRARQLLYMAARAASKYNNTCKLLYERLLEKGKAKKLALIAVANKLVKQAFALTSKSELYAKDFAL

SEQ ID NO: 355892 - protein, 493 aa, unidentified
MVDKTINKSKVCLPHPLERSEPVDKGGRRTGFSFRSGLTDGDTHCQEEPVMSRKRRTHLRGKRGQAFADKIRGIPLDRILCVSLDIHKYFHVVMIHNALGEIVTPTFEIDIFQTGFYQLCQAVDEATVRTKAQVVLTGMEPTGHYFENLARHLCQRPQPVTLVNSYAVKKNRDQQMMHREKDDEIDTAAIGDLLRRGEGTPFNPASGVYLQLQHLDRVRFSKVKIRTMLQNQVLGHLDRIFPGLVIIAKEAKARYKPLFATNFWSCQTLQHLIRVCPDPRQLAAMSPQDLIDAFHAHHYAMGPVTAAKIITYAQKVLLPDAELIAIRCELLAHDLALLEEVEGHIAQLEARLRTLLAETPYQMWVKLKGLSDIQVASLAAAIGDPANYAYAAQVFRRSGLVSGRNDSGIRQRKGKGKRVVKVGDVYLRRALMGALATLLLHQPVLLQYFNKLKKSKPAGVARVATARRATGILWATLRDQHANTLILKKGAAM

SEQ ID NO: 355893 - protein, 386 aa, unidentified
MHHAATLPVSEQTNNQGDDAILFVSLELSRSTWVATSLALGSRKMSKHTLAGGDGRKLLDLLARLKSRAEQRIAAPVKVVAIQEVGLDGFWIHRLLEANDIESHVVDPASIAVPRRHRRAKTDAIDGETLLRTLMAWHRGEPRVCAMTVPPSRSEEDLRRVSRERATLLRERIRHTNRIRGLLFGQGITNYNPLHKNRRKGLEELRTGDRHPVPPHLKAEILREIDRLELVLRQIEEVEAERDEMLRSAQAASPVALLMQLRGIGAEFATVLYLEGLFRRFENRRQLAAYAGLAPSPWQSGSVDHEQGISKAGNPRLRTTMIELAWMWVRYQPASALSCWFRQRVGSERGRIRRISIVALARKLLIALSRYVNHGEIPAGAVVKPV

SEQ ID NO: 355894 - protein, 415 aa, unidentified
MGMRVLYARCAGLDVHKAIIVACVLLSASSAKTSKQVRTFATTTAGLQELAAWLASQGVSHVAMESTGIYWRPVFNLLEGRFEVILVNAQHMKAVPGHKTDIKDSEWIADLLRHGLLSASFIPPKAIRNLRDLVRARKTLVRQRAQAITRVQKVLETANIKLSSVATDVLGKSGRDMLEAMLSGVSDAESLAELARGRLRKKLPALREALEGRVEATHRVLLRQLLEQIDFLQGQIDALSADIDHLLRPYEPLLARLMQITGIGRLAASAILAEIGTDMSRFPSAKHLASWAGVAPGNKQSGGKRLKAHTNKGNTHLRAVLAEVVWVISHTHDTYLSAQYHRLARRIGKKKAIVAVSHSVLVIIYHLLRDEQDYHDLGPHFFATLDSTRQRDSAVRRLQALGYQVTLEELKEVRG

SEQ ID NO: 355895 - protein, 415 aa, unidentified
MEELGLRALHRRVAGIDVHRMLHVVTVLIEQPDGSMQRQTREFGGFRRDCRALAAWLAELHVELVVMESTGIYWKSVFTHLENAGITAWVVNAHRIKHVPGRKTDMADSEWLAVLARFGLVKASFIPPRDLRELRLVSRYRRKLSAMCASEINRLHKILDDGGIKLGGVVSDINGVSARAMVSALIAGQPIEQMLGLARGKLQQKREELGASLDGDLSARHLFVLGHIEAHIQTLQRELAEIDRYLLAAMRPYAWAHQLLQTIPGIDEIAAALIVIEIGDDMARFGRAQSLACWAALSPGNNESAGKRKSGRTGHGNSTIRFILCECANAARMTKSTLAAKYRSLMVRKSHKKAIIAVAHKMIRLIFVMLSRRQPYLDQGIDYAAMSAKKNAPRWIRQLKAIGRWPSPNSAAASA

SEQ ID NO: 355896 - protein, 338 aa, unidentified
MIHVGVDLHQRFCYMTALEARGKIVQAGPVTNEKRALRRWFRQFRGQAVEVAVEACGFWPAFREVVEPEVKRLVLVHPQRVKAIASAKLKNDRVDAETLAHLLRCDLLPESWKADRETQARRQQVRLRTTLVRQRTRLKNQVHAVLHQQGLRSPVTDLFGRRGRGWLSQVKLPEMARTSVEACLRMIDHYGEEIQKQNLQLREKAQGDERVAWLETIPGVGEVSAMMLLAEIGDLGRFATKEALCSYAGLVPRVRESAGKTARGSITRQGSSALRWIMVEAAQAATRSSPAAKRYYERLLRKKHKHVARVALARKLLIAVYALLHEDEAFDEERFAAR

SEQ ID NO: 355897 - protein, 318 aa, unidentified
MTMLSFCGIDVSKDRLDVMVLPGQQSFAVRNDAAGWAELVARLRGVTIAAIGLEASGGYERGAMRAMLAANLPACQVNPFKLRQFARASGVLAKNDPLDTRMIASFVAAMPTRPAQPRPPAIERLAEMLAVRRQLNAEKVAVENAARLPEDPMLQRLSRRRAARVAADIDMLDRHLIKIVESDAALAHRYRLLTSMPGVGLVLACTLVALLPEPGTMSRKQVAALVGVAPYAFESGKFKGRRCIWGGRALVREALYMAAMSAGNWNPVLKAFRKRLKGAGKMAKVLIVAVMRKMITMLNAMVRDDVVWAHLLHGQLPR

SEQ ID NO: 355898 - protein, 391 aa, unidentified
MIYIGIDVAKDKHDCFITNSDSEVLFKAFTIFNNLDGFNDLYQKIESVMDDVTKVKVGLEATGHYSYNLLGYLIDKGLPTYVINPLHTNLYRKSLSLRQTKTDKVDARTIASMLMSDVNLKSYSDTSYHNEELKSLTRYRFDKVKERAKLKTSVSRLVCILFPELEKLVPTLHMASVYALLSEFPSAKHVATAHLTRLTNLLSKSSKGRYGKDTAITFRDSARASIGSNMPAKSLELKHTIKLIQELDSEIDEIENEIKIIMDEINSPILSIPGINYRMGAMIIAEIGDFNRFDSPDKILAYAGFSPSTYQSGQLDGAYAHMEKRGSRYLRYALYNATKYVCHWNPTFAAYLAKKRAEGKHYNVAISHAVKKLVRVIYHLEKTKQQYIKAA

SEQ ID NO: 355899 - protein, 402 aa, unidentified
MNCVGIDVSKGKSMIAVMRPFGEVVVSPFEVRHTASELSELARLLKNLDGETRVVMESTGNYHAPVAWLLHGAGFYVSVVNAMLVHDYGNNSLRRGKTDKKDAVKLANYGLDHWLTLPRYVPEEDTRLMLKTCYRQYQQYSKVQTMLKNNLISLLDTAFPDANRLFTSPPRADGSEKWVDFVATFWHCECVCGLSKKAFTAKYQKWCRKHGYNFSQDKALDIYASACGRFGVMPKTNTAKLLVEQAISQLQTTSAALAALKQEMQSLAASLPEYPVVMEMFGVGPTLGPQLIAEIGDVRRFHSKKALVAFAGIDAPPYQSGQMDIRSRSISKRGSASLRRTLFLVMGVLLQCAPMDEPVYQFMNKKRSEGKPYRVYMMASANKFLRIYYASVKAYLDSLEHD

SEQ ID NO: 355900 - protein, 334 aa, unidentified
METLLKQSVGIDISKDTFMASICCIYQSGKMDFITTEPFKNVKTGFNQFVKWVRKNSSKEVQITFLMEATGVYYEQLAYHLHKLSFHISVLLPSKVKNYAKCLNIKTKTDKVDAKVIARMGAEQNLSQWTPPTPVYQQMRLLTRYYQELKKQKTALQNRVEALNHSVFTDDFVAQSYLEQLSLLDKQIELCEKKLKTLVKEDEELASKFENVETIKGVGFITIAIVVAETQGFSLITNRKQLASYAGLDVIERQSGTSVRGKSKISKKGNSHIRAALYFPAMVSSVRNISLRNDYQRIIKHKPNKKIGLVAVQRKLLLLIFTLWKNNEKYQERE

SEQ ID NO: 355901 - protein, 349 aa, unidentified
MRTFTPPAGTRFYAGVDLHARALFLVVLDQDGRVVVARNLPAAPEPFLRAVAPFRDGLLVACECMHCWYWLADACRDHHINFVLGHAWGMKAVHGCKTKCDRKDAEAIARLLKGGNFPPAYAYPRERRGLRDLLRARLRLVRQRAELYGHVHTARRQANLPPVSNDVKYKCKRAGCTADIADPFVRRRVETHLALLEPLDTTIRRLEAEIEDAAQQIFPTELAVLQSTPGVGPVLSLTILLEIDTIDRFDTRQQFCSYARLCGAVQTSDNKRTGEGNRKAGNAWLKWAFSEATVLSAQKDERIGGLLNRLAAKLGKAKAYSALAHKLGRAFYHMLHTKEVFDVNRFVRH

SEQ ID NO: 355902 - protein, 398 aa, unidentified
MYLNIGIDVAKNIHEACLVNDSGEQIGKFMKLRNSRKSMDKFREHIKSVSEELKAKPRIGLEATGIYWYSLYSEISRDYEVSICNPAQIRGFASVNIRGSKTDKIDAKTIANMLRFGDAPKTDYQNRQRLELREYARFYVKLSKKKANLKKRFRRNLHLVFPGYDQVFKNVFTKTSKEILAQSPTPDDILEMGEAKLLELMKKASNNYIDHGKARELIEKAEDTIPSEILKESALFELQILLDIIENIEKHILALESKMLAIWGEVKSNHYIQTITGISEIRAAIIWAEIGDIENFKHPDQIVAFAGLDPKVKKSGNKEVIGGPTKRGSSTLRWALGWAVQESKNVNPVLASYFKKKITEGKHYNTARCAAAKKLVRIIWSVEKNKKSFQIPGNLQSS

SEQ ID NO: 355903 - protein, 415 aa, unidentified
MHVQLPADRQVTVGVDTHADQHVGAALDPLGRLLGTQAVPSTAAGAAALLAWARRFGAVERVGIEGTGSYGAGLSRWLRARGVVVVEVARPKRPARRGRGKSDPVDAEAAARAVQAGTATARPKAGTGPIESIRALQAARRSALKARTQAANQLRALVVTAPDDLRARLRRLGLARLVATAAAFRPGAPSTPSAATKLALKSIAARHRRLSAEVAALDAHLGRLVAAAAPDLVALKGVGTDTAATLLVTAGDNPDRLRSEASFAHLCGVAPIPASSGKTVRHRLNRGGDRQANRARHLLAVRRLRWDPATVAYAARRRAEGLSKPEILRCLKRYIARQLYPLLAGHAALGPATLGPGGPRSGPPATPLSGGAAVTRQGRSVAEDPAAGGVDGRRGRSHRVPTPPAPAPRPPIHHP

SEQ ID NO: 355904 - protein, 351 aa, unidentified
MEIIAFDAHKRYTLSLVEDRKGRVITEARIPHVRGAVKQFLNKYTEGSTVAVETIGSWYWIVDEIEEAGMKPALVHARKAKLMMGMINKTDRLDAHGLNTLQRNGTLPEVWIPPADLRDRRDLGRTRMVFSNTRTRIKNRIHSVLSKYALHNFDGVSDIFGKKNRARLEEHIEELPSETKFTTRCLLEELDSVQEKIDRIEKRMKEVFKNTAEIKFLMSIPGIGFLLAVVIANEMGDVNRFPQPSSFAAYSGTTPRVHASGGKVRNGRLRPDTNRYLKWAFVEAANTICMHRHQKATRHASRLYNRIRKKKGHATAIGAVARHLAEAAYCVVKKRENYRDPALKEASSRKA

SEQ ID NO: 355905 - protein, 480 aa, unidentified
MNVKTNKTKKQANVENQAVNLLSKEELCKRIEGVEKELKSYTWRELKTNGKFAKNDKLSFITDDMLIVGCDIGSETHYIRAIDIRGRELSRKAFEFGNTAEGFEAAKAWMLELAVQNRKSQIVLGLEPTGHYWFTLAAWLITAGISVVQVNPYAVKQSKEIEDNSQLKDDRKDPKLIANLVKDGNFGMPYLPEETYADMRKLSMFRDQLTEDRIRNINRLHRELKIYFLEYMDAFGKIDGTFALEVLKVSCIPSEITELGTEGLRNIWHEAKLRGRGYSRASEIVEYAEKSVGLKDGSSVGRETVKWFAKEIMKLDEQLAWIENTLHKKCMEIPYAENILEIKGVGENILAGIVAEMGDISRFDDVKEIQKLSGMSLVACSSGKHKGQTKISHRGRKRLRYWLFQAARSAVSHAEEFKELHVYYTTRADNPLKKMQSLIVIACKILRVIYTILKTGKDYDPQKMLKDIKRPKAALAAKAA

SEQ ID NO: 355906 - protein, 401 aa, unidentified
MIFVGVDVGKRSHAVCFMDAAGQQVARPLRVPHTGAGLRQVQARLHGLPGPMQVIMEASGAHWMGLARRMRAEGLAVQVVNPLQTAGLRKVGIRKTKSDQKDALVVADLARIGRARPSYVPEDGLLELREVERFRWHLADQLGDAKRRVLGVLDKVFPEFAEQVGDPFGATGRALLERCASAVEFAAVDLGDLEAWIHTASRHQLGRQRAESLKAAAQDSLGLDCLGTAARLELQALLAQLTLLEQQIATADAELEGRVAALASHVLSVPGARGLLAATLLAELGDVQRFDRVEQVVAFAGLDASVFESGDFHGTRQHISKRGSPHLRRALYLAAFNAIKTDSELAAYFQRKQAEGKPFRVALVATSRKLLARVYVVLRDARPYRPPSSALSSTDHALPSP

SEQ ID NO: 355907 - protein, 470 aa, unidentified
MSQIKIKQKRKKKEAKVLQLPVIREDAAGIDIGATLIHVAVGPGRDEEPVRTFETFTRDLKAIAVWLRTAGVKTVAMESTGVYWIPLYELLESEGFKVLLVNAHHVKHVPGRKTDVSDAQWLQYLHSVGLLQGSFRPTEDICAIRSLGRHRESLVQTSSQCIQMMQKALTQMNLQLHNVISDITGASGMRILQAILDGERDTEHLESLCDKGIKAKPEVIMGSLEGNYRSELLFILGQNLKRYKDLQSLIGDCEKEVGRLIDAAPAKVNLADKPLPPATKRGSKRSASAPPCLPDLREKQYRMLGVDLTQVPGINTQTVQDFIGEVGPDLSRFRSASAFSSWITVCPHNKISGGKKLHSKTRKSKSRAAKAFRLAAQSLAHSDEALGEFYRRMRGKFGPPKAITATAHKLARIVFHMVTTAEPYDASVFTRAQEKHRLHQENRLRANARKLGFQLIPIQLTSDNQGVVVP

SEQ ID NO: 355908 - protein, 343 aa, unidentified
MQTVTTIGFDIAKSVFQVHGVDAVGQVVVRRQLKRRHVLAFFEKLPPCLVGIEACASSHHWSRELQALGHTVRLMPPAYVKPYVKRQKNDMADAEAICEAVTRANMRFVPTKTPEQQSCLMLHRTRHMFIRQQTAVINSIRAHLAEFGIVAPVGRKGVTELLQIVADPNDKRVPEVARACLAALGNQLLRLKEQILGFDRLIMAWHRSNQTSKRLHYIPGVGPMLATALVASVADPRTFRSGRNFSAWIGLVPKQHSSGGRERLGSISKQGDRYLRSLFVAGALAVIRYAKIHGVGHRPWLTALLARRPTKVAAIALANKIARMAWAMMARGERYKQPAALAR

SEQ ID NO: 355909 - protein, 422 aa, unidentified
MRSVALDVHLDFCEVAIVEGGEVRSAGRIETKPEQIQLFAGSLGPDDRVALEVTGNAWEIARLIEPHVAQILVVSPSDTGIRQARAKTDRLDARTLARLLAAGSLDAVWMPDRETWVMRRRLSRRSQLVRGRSRAKNEIHAVLMRQLVGRPPVSDLFGVKGRKWLADLQLALEERETVDAAMRQIEFLDTEIAEVERLIASDALSSAEIKRLMSVPGVNVIVAASFLAAIGDISRFQNPRKLVGYLGLDPRVRQSGSGPATHGHISKQGSVRARHALVEACWSAVRQPGPLHAFYERVRARRGHSVAIVAAARKLCCLFWCLLTREEDYAYAQPSLTKKKLRRLEITAGAPRYSAKAAGIWHANEAVRQAERELAHQAEVAYARTVRDWHAVQANKVGASATLGRASNKPSKGKAARQTTSP

SEQ ID NO: 355910 - protein, 314 aa, unidentified
MNTQEMTYAGIDVSKKTLEAFHPSWSKSRSFSNNPSGHRLLIKALITDGAPILHFILEPTAGYEAPLVAFLHDQGLPLSLVNPVQARAFARACKTLAKTDPIDARSLAHFGSTHRPEPTPALSPAQCKLKAFSRRRSSLVAQRTKELANLDREGDSFVRADIKALIRVLEGRITKFERQIELLIASNEEAKQRQTRMLQLKGVGPVLANTLVAEMPELGLLNDKQIAALAGLAPYNRDSGKWKGQRFIQGGRSRVRRALHMPALTAVSHNPILKGFYQRLVGAGKPHKVALTATMRKMLCVLNRMIADPQFQPS

SEQ ID NO: 355911 - protein, 345 aa, unidentified
MESMYYIGLDVHKKTISYRVKDASGQVLQEGKIGATRGELDSWMKTLPQPWSVAMEATIFTGWIYDHLLPHAAQVKVAHPLMLRAIAAAKKKNDRIDAGKIADGLRCDFLPECHMAPTEIRDRRRTLRYRHLLVRQMVQLKNRVSGLLMETGVSYSKQRLHKVGYFRELLSSNEEIHSNIRPLLKLSRDAIVRLQKTEYALVSSLQRDPLLADRIKRLRTVPGVGPITALTWALEMGEVSRFPSIKQAISYCGLCGDEKSSADKVIRTPLSKQRNKHIQRVLVEAAKLAPKENHELALVYETEKQKGNANRATLAVARKMVAYLLAVDRGQRDFVPAEDHRGAAA

SEQ ID NO: 355912 - protein, 409 aa, unidentified
MSVTPIGSPARVCAGVDWAKDDHVVAIIDGDGEVSDRFSVTHTLAGLKTLTRRLLAAGVVEVGIERGDGPVVDTLLAAELVISPNQVKNLRSRYGSAGNKDDRFDAYVLADVVRTDRRRLTPLTRSTPATVALRSAVRGRRDLVEHRVGVANQLRAHLQLVFPAATSLFAAIDFPISLSFLERFPTQTKADWLTTDRLAVWLGKVSYSGRGTPQLLHQRLLDAPRGTTGPDADTHAALTLAYVTVLRTLSAQITALTDTIADQMDQHCDAHIMTSLPRSGMLRAARLLAEIGDARGRFPTADSLACLAGVAPSTRQSGKVKAVTFRWSADSQLRDALCDFAGDSRHANPWAADLYNRARARGHDHPHAVRVLARAWTDIIWRCWQDSLPYNPDHHRALQRILNNTALAA

SEQ ID NO: 355913 - protein, 353 aa, unidentified
MKVYYILGIDISKDKFDVCLRHPGQDHLLAQHQFPNRPAGFKQLQRWLRKHGVTHVHACMEATSRYGEALALFLHQQEQQVSVVNPRRIRKYADSLLVRTQHDALDADIIARFCATQKPRLWTPAPPEVRQLQDLTRLRQFMVSQCTRLQNRLHTESKTLARLLRRHIRQLDRTVEEIEAAITTFLQDHDELNQQVALVDTITGIGPITAAVAVAELPPPGQLEHAGQAVALAGLDPRKKDSGKSIRGVAHVSKMGSRPLRAALYMAAVAASRSNPIIRAQTQRLRARGKNGKTVICAAMRKLVRLIYGVLKHRQAFDPKYQGLNRAVPCAEAEASGDGGRQPAIAPPPVAAA

SEQ ID NO: 355914 - protein, 371 aa, unidentified
MKQRSTKEALEVVGLDVSDRSSTVCRMSMTSGEILERTPIATSATGMESYFATRARMRVALEVGTHSPWISRQLEEYGHEVLVGNAALFQASVSRRKSDRSDAEGLARVARLDPSLLHPVRHRSAAAQRDLAVVRTRDALVRARTRLINECRGQVKSYGHRLPSCSAEAFAARVGAALPEDLRPALDPLLEVVAQLSAQIRAMERTLETLTRQRYPQTLRLRQVRGVGTLTALSFILILDDPHRFPRPRQVGAYLGLVPGRRQSGERNPHQPITKQGDPLLRQLLVQAAHYILGPFGSDCDLRRFGQRLIERGGAGARCRAAVAVARRLAVLLLHLWKTGDEYDPFFVEHRLARTVVPAAASAATTISTHV

SEQ ID NO: 355915 - protein, 354 aa, unidentified
MLHVGLDLSRRRVDVCAIGETGELVGQFRSPVDRDGLYGLSRRLEPYGEQVRAVVESMNGARFVHDELTAYGWRVLVADAQRVKGLAPLACKTDKVDARVLAELSWRDLVPAIWLPTAGVRCERERARYRMHLVKHRTTLKNRVHSTLIAHGHQAPVSDLFGAQGRRLLASLELPDPWAGTTTATLELIDDLDRRIAGIERELQRAGAEHRYVPILMTAPGIGWILAYTIAAEIGEIERFPTAKRLVSHTGLCPRVHQSGEVDLRGRLSKHGPRYLRWALIDAAAHASRHPIYTERYQQIKRRVGRQRGSKVAQIDLARRLAEAIWHMLTKNEPFTPFTPTGATRPLAATTAPH

SEQ ID NO: 355916 - protein, 433 aa, unidentified
MQDVQDEPLFAERVAGLDIAKAEVEVTLRVPSETTAGRRQQETRTYGTTRRELDSLADWLHCWAVTRAGMEATGEYWKPVFFLLESRGFDCQLYNAGQVKALPGRPKTDRADSIWLAKITERGSVASSFVPPEPVRRLRTHTRYRRHLTQARTAEKQRVEKLLEDGHLKLSSVISDIHGVSGRAMLEALAAGQRDAKALAQLARGTMRGKIRRLEEALDCSFFTAEHAAVLAMMLAAIDCYTAQIEALTARIETLTEPYLRQVEQLDQIDGIGAICAQDIIAEIGADMTLFRTASHLVSWARWSPQVKQSAGKRKGSNATGRGNPYLGAALGEAVICAGRTQSYLGAKYRRLARRMPKKKALVATGNSMLTIVHTLLSDPAASYQDLGADYYEQRMHARRQARNHVRSLERLGYKVTIQALNPDTGEFLTPAG

SEQ ID NO: 355917 - protein, 411 aa, unidentified
MDRIYDNCCGIDVHKKLIVACFRKGNKQEIREFGATTRELLEMADWLKDGGCEMAAMESTASYWKPLYNILESSGLNAMVVNARHMKAVPGRKTDVRDAEWIADLLQHGLLQPSYIPDKEQRELRELVRYRKSLVGERTRELNRLQKMLEGANIKLSGTVSDINGKSARNILEYLLTGASVDGPKYDEMYEQKIIAHNLKATKEQIIDDLNGVMSPLQRRMMKELLAHLDELNIHIKNLNDEIDSFMKPEEKQASHAIQDVTGIGNTSAQAIISVIGTDMERFPTDRHISSWAGLCPGDNESARKRKSGKTRKGNSLLRTTLITCAHSAVKNKKSYFHAQFMRISSHRGKKRAYVAVAHSMLIAIYHILKDGVVFKDLGADYYNQFNKERKINAYLKKLKALGWEAPVVAA

SEQ ID NO: 355918 - protein, 355 aa, unidentified
MQRYVGLDVHSKNSVYVIQDAEGQVVGRGKVPTTADGFKDMRDRLELRSGTPVALESGAVAFVVADYLNDLGLRPIVVDAREVRVKASRPRQKSDFRDARELCEGVRRGMYRAIVSVPPREIRTLRETLSRRRHFVRVRTAQVNAAKWLLRSNGKGALARSLQLESGWNTLIAALSDTPALQAFVRQHQAVWRCAGEQVTLLDLEIRRLGRTWKKELTLLETAPGVGTIVGSTALAVLFDPHRFPSAKHAASYAGLVPTTDQSGDREHYGHITKRGSSELRAMLCEAAQHARRTNHPLHPYFAKVWVRRGYRMAVVAVAHRLCRILFAMLRDGTPFRPDNAGIERSVPTYRLRRA

SEQ ID NO: 355919 - protein, 400 aa, unidentified
MLSIGIDVSKGKSTVCGMKPGGEIVYAPFEVQQTREGMLELVSLLRSSGEEVRAVLESTGSYHCPVVAALLENGIFVSVVNSLRMKRFCSQSIRKVKTDRIDAMQIALYGLAYWQELQPTKLPEDTYRELQLLARQYYQMTSLLIKAKVDFNALCDQVLPGMQELMSDHAGRHKLSDFVLRYRHTTHILEMGETRFRKDYCKWAEKKGYRNCERMAALIFATAQNGIPVLPNAPSTQIVITEAIRVLHTVEASRDAILTQMQALAKTLPEYSLVREMPCIGDTLAPRLIAEIGDVRRFHSKRALIAYAGIDAPPYQSGKFCANNRHISKRGNRYLRKTGYEVMQSYVMHKPANDPIFTFIEKKRGEGKSGKLAMVAGLNKFLRVYYGKVTELYRSLPAIE

SEQ ID NO: 355920 - protein, 371 aa, unidentified
MAALTIVAQTRPFVIGVDCHARTHTYAILEASTKRPVACEQFPTTSAGISRALAWVGRRTDGDTACLWAVEGSGSYGARLARAVADAGYDVAEAPRMNARGRRGIGKSDPLDAAAIGTAVLALEESQLRIPRRDEGTRAGLRILSAARDQLTRDRTVNVNALIALPRAHDLGIDARKPLVPAQIATITRWRERQEQIELSIAREEAVRLARRVQEVTTQLTANQKRMTELIQQSPAAPLLEMVGAGAVTVATVLTAWSHPGRVRSEAAFASLAGVNPLPASSGNTFRHRLNRGGDRRLNRALHTITMTRMVHDPGTRDYVARRTQEGRSCREIRRSLKRYIARILYRQLNALYATAEPARSHVAVADPYPG

SEQ ID NO: 355921 - protein, 415 aa, unidentified
MFPTCCGIDVHKTFLVATIIETKGYEPNYQKKRFSTFNKDILRLKQWLIQNNCFDVCMESTGKYWVPVYNLLEDKISVTIASPKWVKAVKGNKDDAKDSKWIGNLFRLGLVPGSYIPEKPIRILREYTRYRSKLVGCRSSEKNRFQNSFTVCNVALDSVVSDMFGKSASAITDYLIKTDDFDPEHCKSLLHWSMKAKGDAVVESISGYEITEAQKERMLMVRSHLDFVERAIERLDSKLDELVASYENHIALLCTIPGVDRQSAITIISEIGVDINQFSCSKRLCCWAGLTPGNNESAGKKKSVRISRAGVYLKPALVQAAHAAVKSNSSPYYQNKYERISKRRGKKRAIIAIARMILTAIFNMFKNGEVWNPSDLCKVDMPPVLQEKQKQKAIQNAIKLLVSQGILKQTGITAA

SEQ ID NO: 355922 - protein, 361 aa, unidentified
MSIVYYGGLDVHQASIVAFLFSPETGEYFEDEVPNDRKHLEHAAKRWRKRGELRLCYEASSAGFVVKRWLDELGIPCEVVAPAFIPKGPGDRIKTDRRDARRLAILYQSGMLRPVRVPDEREEMVRSVVRHREDLTRDMTRTKNRILKFLGLLGLRYTEGRNWTEKHRKWLRSLNLEPLQAMVVESHLRVLEQLEAERREVDQKIAEIAETPFYREKVQRLMCLRGIALHTAMVLITEIGDAHRFRGAPELMSYLGLVPQEYSSGERRRSGKITKVGNSHARWVLSEAAWNQARPPGRSDRLAKQRRNQPPEVVAISQKAERRLYHKFWKIAVRKDRNTAAIAVAREMAGFVWALLTLDAA

SEQ ID NO: 355923 - protein, 427 aa, unidentified
MSYRVAAVDVHKRMMAVVVADVEGEGNYQFERRKFGATQGELHVLAQWLDQQGVEEVVMESTAQYWRPLWGTLEQFWRPARQQREGASQMSGTLHLCQAKSNHGPRGRKNDFLDAERMVKRLVAQELVLSFVPDPEQRLLRTVTRRKHQLTRAKVGFKNQLESLLEQGHIKLSSFVSDLLGVSARRMLKALAEGESDPAALAAMADRGLHATPEQLRDALGASAHLSKVYRRLLKLALEELQLIETHIEQLDREAMELLKGHEDVVQRVAEVPGFGPDSAVQMIAEVGTQAANFPAAKKLSSWVGVCPGNEESAGESQSTRSPKGNRHMRRLLNQAAQSAVKVKGSIFEVTFHRLLPRLGYKQAIWAIAHRLCRLLWLILHKGVRYEERGPAVSAKSKRTRTARMIRELKKLGYRVEGGPIPAAAQA

SEQ ID NO: 355924 - protein, 312 aa, unidentified
MNKICIGIDIAKNTIEISVRPSGEHWTATTEPNELLQTVDRLTALEPTTIVMEATGGYEIRVASLLSTAGLPVAVVNPRQVRDFARATGVLAKTDAIDARVLALFAEKMEPECRPVPSDDEQTLKELITRRRQLVDMRTAELNRRQQSISQQVYKSITTLIASIDHELDTIGREITTRIKANPGWRAKDKLLRSAPGIGDTTASLLIAALPELGSLNRRQIASLAGLAPMNRDSGTFRGRRMIIGGRAAIRAGLYMPMLSAIRCNPQIKSFYDRLIADGKLKQVAITACMRKMLTMLNAILRENQPWHPIPA

SEQ ID NO: 355925 - protein, 399 aa, unidentified
MISVGIDVSKGKSTVCILKEYGEVISEPHEINHTEADLKALVESISELNEETRVVMEATGAYHLPLLTYLKNHGIFVAVINPLIMKKYSAIGLRKGKTDKLDSIKIANYGIDNWFKLTDYEATDEVYSELKLLGRQYSHYIAMRIESKLVLSNLLDRTMPGIKNLLKNRSDKPEKDKLNDFVKEYWHYDNITKKNEKQFINSYFKWAKNKGYHQSETKAKQIYALAQEGIPTLSSSTPSTKMLVLEAVRVLSEIDRTLSMILSQMQELASSLKEYNVVRNMPGVGDTLAPRLIAEIGDLKRFYNKKALIAYTGIDSPPFESGQFVANKRRISKRGSALLRKTGYEIMKCIKSAKPKDDPILLYMLKKEAEGKPKKVAKIAALNKFLRIYYARVKEVYNT

SEQ ID NO: 355926 - protein, 338 aa, unidentified
MYYTGIDLHKFTSYLTTVDSSGRIVKQQNLKNVDHNFVQYFSNLGTEHITTVESTMSWYWINDLLTSLNITLVLAHAKYVKAIAYAKVKTDKVDSHTLAQLLRMDYIPAAHKISKDKRTLRDALRARLKIVQRHTSITNSMHLLLAKYNLSSPEVLTGIAKYQYEQLTEVEELLDAQALDLEKQLYPDLIPNNEVQRLLWIPGIGKMNAFTISLEVDDINRFPDEKHFFSYCRLVPSTRASAGKSKQRSSKDGNKYLKVVFMDAATHAIQYYPVIRKYYNAKLRKKNKQIAKAIIAKEIARIVFHVLKNKTCFNNRFKGKDLEHTKSLQWPRVVNPYA

SEQ ID NO: 355927 - protein, 330 aa, unidentified
MSTRNDSKPGNAVNGKPAFAGIDVSSKSLDIAILPSGSVTRFDNDDKGVAALVKHLAPFAPERVVIESTGVYHQAVVAALQKHNIQVSVINPRQARDFAKAQGKLAKNDRIDALCLARFGEVFAPRQTPAVSDSMRKLDALVTRRAQLVEHRAIEHTRLAQTLDKRSRKSIDQVIEFLTGQIEDIDAECAALIDADEEMKKTDEIIRSVPGCGPVTSAVLITQLPELGSVHRVIIAALAGVAPYDNDSGGSRGHRSISGGRANLRSALYTPIIVAMRHNPVIAAFAARLKAQNKAFKVIAIACVRKLLTILNSMVAQKKLWNPEFASKNG

SEQ ID NO: 355928 - protein, 313 aa, unidentified
MDAHPFVGIDVSKERLDIGVGEAGAFWQAGNDEAGIHSTVERLSGIQPVLVVVESTGGLEWPLVSELAARRIGVALVHPGRVREFAKSLGLLAKTDKLDAHLLARFGEAAHLQPTLLPDEAVQKLSALMGRRRQLLEMLVIEKNHLLSTRLSLRAGVQEHIAWLQAEIDQLTAQIQNELQETPGFRDKDRILRSAKGVGPITSLTLLSDLPELGQLNRQQIAALVGVAPFNDDSGNRRGARRIKGGRASVRQALYMAALAASRFNPLIRMFYQRLVAAGKKKKVALVACMRKLLTILNAMIRDMQPWKDLIPS

SEQ ID NO: 355929 - protein, 304 aa, unidentified
MNVTTYGLDLAKRVFQVHWVESDTGEVKRKTLARAQVRGFFAGRAPGVVALEACGSGHHWGRVLVELGHEVKLIAAQFVRPFVKTNKTDAADAEAIWEAAQRPGMRFVALKSEEQQAVLGLHRIRAQCVKMRTMQAHQVRGLLYEFGVVVPQGWRALLAQTEPVLADEAHGAVPGVGRLTATALVATIGDARTFRSGREFAAFLGLVPRQSGSGGRVKLLGISKRGDPYLRTLLIHGARTVLTQQSRADRSLDPWLKGLLSRRPKNVAIVALANKMARTVWALLAHRRDFDRGWRSITPTPAML

SEQ ID NO: 355930 - protein, 345 aa, unidentified
MQDVTLIGIDLGKHSFHVHGQDRNGKALLRKKFSRKQLIEFLATFQACTVVMEACAGAHHMARLLADDGHEVKLISPQFVRPFVKSNKNDFIDAEAICEAACRPSMRFVTPKTESQQCLSAVHRVRESLVRERVKASNQIHGFLLEFGISLPVGHAVIRRLPSVLAEHALPARLVTLLERLHSHFKYLDEQIADIEKELSRQLQEDDLGQRLMSIPGVGPITASVLAAEVGDGKQYRCGRDFAASIGLVPRQYSTGGKNKLLGISKRGDKNIRRLLVQCARAYMQRLERQSDRLAQWVRSMLMRRHSNVVACALANKLARTAWAIAAHHTEFKRQEAVMVGMTAS

SEQ ID NO: 355931 - protein, 403 aa, unidentified
MNAAGIDVSKGKCMVAVVRPFGEVAVKPYEVHHTSSELRQLARTLKSLDGETRVILEHTGRYYEPVAQTLHDAGIFVSAVNPLLIKEYGNNSLRRVKTDKADSLKIARYGLDNWAELREHTPMDTIRYQLKNMNRQYSLYSKNKTALKNNLIALLDQTYPGVNALFDSPVREDGSQKWVDFAASFWHVDCVRSLSEKAFTERYRKWCKGHRYNFNTAKAAEIHALAKELIAMLPKDPCTRLLVREAVAQLNAVSKTVEIFRSEMRRLARQLPEFPAVMSLYGVGDSIGPQLMAEIGDVRRFSHKGALTAFAGVDPMPNQSGDYEAKSTSSSKRGSPDLRKTLFVLMTILLQKAPSEDPVFQFLDRKRSEGKPYHVYMTAGCNKFLRIYFGRIREYLNSLDSAE

SEQ ID NO: 355932 - protein, 344 aa, unidentified
MNITTIGIDLAKSVFQIHGVEARGKAVLKRQLRRDQMGSFFANLPVCVIGMEACASSHHWARKLQGLGHTVRLMAPQFVKPYVKTNKNDIADAEAICEAVGRPNMRFVPVKSVEQQSVLSLHRVRQGFVKARTAQANQIRGLLGEFGLIMPKGIVNVAKRVPELMDKAGDQLPAPLRQLITRLLCHMKELDRQVAELEAQIKAWHRNSTLSQTVAKIPGIGPLGASALVASIADARSFDNGRQTSAWLGLVPRQNSSGGKSKLLGMSKRGDTYLRTLLIHGARSAILAAKRKTNVDPWLAGVLGRRHPNIAAVALANKNVRTVWALLAHDREFRPDYVPTPPAV

SEQ ID NO: 355933 - protein, 339 aa, unidentified
MYYAGIDVSVEESSVCAIDGSGKIVREGKVPSEPEALIAWLRSLGVEFTRIGLEAGPLSQWLSAGMQQAGLPVELLETRHVRTAFKIMPVKTDRKDARGIAELMRLGWFRPVHCKSIEAQETRAMLTARKLVQKQLHETEMSLRGILRGFGLKVGKTTPRLFEGRIRELVAGHPILEKIANALLSVRTTLWRELDGFEKRLVAIARSDVRTRLLMTTPGVGVIVALTFASAIDDPSRFTSSKSVGPHFGLTPTRYQSGETDYTGRISKHGDSSVRTALYEAAHTIICKPLKGCTALKSWAMRLAKRAGKKKATVALARKLAVIMHRMLADSTPFSSQPA

SEQ ID NO: 355934 - protein, 335 aa, unidentified
MPGVTSAAGLIHLGMDTSKNTIVVGVLMPGEEVPVIDRIWYEEGSVRHLVGRLGDPAGLRACYEAGPCGFELHRLLASMGVACDVVAPSLIPRRAGERVKTGKRDASRLARLHRAGELTAIRVPAGAEEAVRDLVRARAALLADRKRTQQRITAMLLRHGRVWRSGSYWTQAHEQWIAGQRFGEPALASALAHYRAALDTRRAELHAVEDELVPWAGREPLGPVVARLGCYRGIAGLTGLTLAAEVVDWRRFPSARAFMGFTGLVPAGYSSGERTRRGPGHQGGLRTGPHGADRGGLVLPVPAPDRPHLAPPPARRGPAHPGALLAGAAPAARSL

SEQ ID NO: 355935 - protein, 482 aa, unidentified
MEKRNIYLNQSQELLSLFEDAGNNSKVMCIPMDYAKKDHIVMFCDGNGHIIKKPFSVRNNPEGIEYLTDQVTRSCLRRQIKHKHVFFGGEDIGSYAANFVDTLRSGGWIVAGVNAHDAKKQRANLQASTDRLDLMGIASMLLNRRANCSPAQSGIYHNLRTLVRHRRKLVGMSTEEKNRMHAVVDRLFPGFLDEEKSGICPFSEASLYLMEGRFSPHQIRRRKQSKLIEILHRYGTKKPENTAKKLQNYADCVLGTPSEYISTFQLSLTQHVKHFRCLRDSIEQLEHEIAVWLAQTEGAFLTSIRGIGIVLAAGITAEIGNPHNQKPVKNLVSYSGIIPRVKQTGGTQGKTHTGKVSKRCNRILKDYVVQSANHLGLHGPEDLMTDYKRREAAGQHADFGIARRYLRTAMCLMRKPQIYLPPEFRNAKTKPEERAGYYLMAWPALRDKWKKTGALETAFDDNHFLGRWRNMVQELYEIRLKL

SEQ ID NO: 355936 - protein, 402 aa, unidentified
MTTDQLWAGVDVGKEYHWVCVVDATGAVVLSRKLLNDEQAIRAVIAEIDTLGKEAVWTVDLSMAYAALLLTVLADAGKPVRYLAGRAVWQASAIYRGGEAKTDAKDARVIADQSRLRGADLPVLHPDDDLIAELRMLTARRADLVADRTRTINRLRQQLVALCPALERAAKLSSDRGWVVLLARYQRPKAIRQSGITRLTKILTDAGVRNAPTIAAAAVAAAKSQTVRLPGEEVAAELVAALAQEVIALDDRIKQTDADIEGRFRRHPLAEVITSLPGFGFRLGAEFLSAVGDPTRIGSADQLAAWAGLAPVPRDSGKRTGRLHTPKRYSRRLRRVMYMSALTAIRCNPQSRDYYQSKRAEGKQSIQATICLARRRTNVLYALIRDNRTWQPDSPPITESAA

SEQ ID NO: 355937 - protein, 391 aa, unidentified
MYSDGSKHSSFSVPNNRNGAKIIVDRVTSVLLLQDIPQVVIGMEATSVYGDNLMRFLRESGSLGRFERSLHMLNPKQVKKFRDAYSDLPKNDHVDSYVIADRLRFGRINKEVYMDDYKYQALKMYTRARHQLIQELTREKHRLLNTVFISFSGLTQEKIFSDKFGATSMALIEEFSSLDELAYMSTDELVDFIRKKGKNHFDDPEEIAEAVQRAAKNSYRPPQVIADAAKQMLAISMNTIRLLQKQIKEYDKAIEKMLEAFPQTLTSIKGIGNIYAAGIIAEIGDINRFPSQASLAKYAGLVWTQHQSSDFEAEDKRMIQGGNHHLKYYLCEAANALRRCDPEFKRFYALKYKEANKHNHKRALALTARKLVRLVYTLLKTNRLYIPPEEY

SEQ ID NO: 355938 - protein, 400 aa, unidentified
MDWADEFDQVWVSDADGNKVTEMKVLQNAPGLSDFGRWLHERKAQAIELWAAIEKPHGRIVDFLLSHGVVVYPVNPKALDRARDRFRMSQSKSDSFDAYVLADFLRTDHARLRALEPDSAPAQELKIITRDHQRIMRQKNRLLNQIEVTLKEYYPRPLEVFGNLETKIALDFLKAYPTPQALSKLNHRGWNRFAKRQHHLSEARANELWEKLNTAQLAVPEHVVRAKVRLLAALMVQLEAAIQAVKQYEEQVKGFFASMPAADLVKTLPGGKSGTTVPLLWAELGDAKSRWESFRHLQAEAGAVPVTQSSGKSRFVQFRFACNKHLRYAIYWFSFNSLNRCEWANKYYRDQRAKGHSHPQALRALGAKWLKIIFVMWRDHKPYDENYHLANIARQQMRAA

SEQ ID NO: 355939 - protein, 411 aa, unidentified
MHNRQNYLYVGVDLHKEHHTAVMINCWQEKLGEIQFDNKPSAFSKFLLEVETYVSDGLSVVFGLEDVGGYGRALAKYLVDHERVVKEVNPALSFLERKSQVMIQKNDSWDAECVARILVNKFNQLPDAKPNDLFWSIQQLVSRRNALVKAQSALKNQLHIQLNHHYPSYKKFFSELDGKTALAFWQQYPSPSCLEGTNIKRLTAFLLDVSNNTCSVKKASDILKLVKEDGQTMKEYQEMRNFLVRSIVREIEFKKKEMKYIERELKQLVKLLDYQLETMPGIELVTASALIAEIGDVRRFPNANKLARFVGIAPVYFGSGGKGKTHKSKQGNRALHALFYNLAVQQVQVAKGSKMPRNPVFHAYYQKKLKEGKTKGQALVCIMRRLVNIVYGMMKYKTAYELPVVEEKEVV

SEQ ID NO: 355940 - protein, 329 aa, unidentified
MNSDATSGIDVSAKTLDASVLRANSDKRRRRKFSNDGQGHQQLIDWLRLHAVTRVVCEATGVYHLDMAFALTDAGIPLMVANPRQVKRFIEARARNTQSDVIDADELAEYARRMDFVPWKAPPINGFELHKLGRAIGQLTKRHTAMLNRLHAAGASVHTPESIVKSAKREIQFIERERVKLSKEALRLVKADPELARKFELLISVPGIADVSALAILAELIVLPPNLAGKAWVKYAGIDPMSKRSGTSINTSPHIAKRGNARLRGALYMPAMTARQRDPHMHDFADRMIANHKQPIEAIVAVQRKLLLSIHAMFRNNQAWIPQPTQKTA

SEQ ID NO: 355941 - protein, 303 aa, unidentified
MSIVSCYVGLDYHDETIRVCVLAEDGELIVNRNVGNDPAEVRRLVQLRGASVRGVAIEACCGSADFAAELVAQTGWSVKLAHPAAVQHLKKNRDKTDHGDAWLLADLLRVNYLPEVWLADSHTRQLRRLVRHRQGLVAERKNIKLRIRSLLREERMPRCSGGNAWTKAWMAWIVTLPLGPESRWVLNQELQRLAQVEEAIGQVDQRFAEATQGDPLVEKLLALPGVALVTAVILRALIGRFDRFRNGKQLSRFCGLTPCNASSGKRQTRGVVPAQFGQVAQNCGNHQGGCRRNRGAHSRPPEV

SEQ ID NO: 355942 - protein, 391 aa, unidentified
MVCVGIDVAKDKHDCCILDSDGMVRADCFTIPNNMDGFKQLLQTIRNCTKKSDKIKVGLEATGHYSYNILGFLLDNDLAVYVMNPLHTNLYRKSLSLRKTKTDRVDARTIATMLLSDVDLKSYTDTAYHNEELKSLTRYRFDKVRERAKLKQSVSRLVTILFPELEKLVPSLHIASVYSLISEYPGAKQVSEVHLTKLTNLLTTASKGRYGKDKAIQIRDAAKTSIGSVMPAKSLELKHTIKLIKELTSEIDEIEDSIQQIMDELHPPILSIPGVGIQSAAMILAEIGDFSNFESPDKILAYAGCSPSTYQSGKLTNCYAHMEKRGSRYLRYALYNATKYVCHWNPVFAKYLAKKRAEGKHYNVALSHATKKLVRLIYALQKSGKAYLTAA

SEQ ID NO: 355943 - protein, 378 aa, unidentified
MIEHTPEALDVWLTELHQKVKGRIAIAVELKKGPVVYALQKYPFITVFPVHALSLARYRQAFSPSGAKDDPQDAELALELMLRYPQKIKAIEPDNADIRLLQQLVEQRRQLVEDKRRFVNRLINSLKQYYPQPLEWFSHRGSLLLCELIIRWPSLQQLKRARRDTIRNFLNAKGGRAMALTEQRVVSIDNAIPLTTDPSVIEANALMATALATQIKVVSEIIKTYDERIETLFDTLPDAGLFKSLPGMGPCMGPRMLAALGDNRDRFNSAEEIQNYAGIAPVTERSGQKSWVHWRWQCAKFVRQTFVEWTAKTVNSSYWARLYYQGQREKGKSHQSAIRALAFKWIRIIYRCWKTRTRYDEAKYLLALEARKSPLLKP

SEQ ID NO: 355944 - protein, 341 aa, unidentified
MSEVAMIGIDLAKRVFQLHGACANGAVVFRKKLTRIQLLAFMSQQSTCVVAMEACATAHSWGREFEKLGHTVRLIAPNYVKPFVKRQKNDVADAEAIVEAALRPTMRFVELKSEAQQARAMLFRTRQMFVGQRTQTINALRGHLAEHGVVAPQGAIQVKRLADAVADETLGLPAGVRELAKVYLVQIEDLSAQIAALDRQMKGAAKEAEAARRAQTMPGVGPITALAIETFAPDLNCFRRGRDFAAWLGLVPKQTSTGGKPRLGKTSKMGQRDIRRLLISGAMAVLQAVERFGKPHNGWLISMLERKPRMLVAVALANKMARGLWAMVTKQEDYRNPATMA

SEQ ID NO: 355945 - protein, 312 aa, unidentified
MTQATIGVDISKDSLDVHRLPEGKSRRYRNDRTGHRALIKWLRQGPVKRIIYEATGPYHRAFELALGTAGLPIVKVNPRQARRFAEAVGTLAKTDRIDAAMLARMGALLEPEPRPILSPILDELKDLRLAHRALTKDRTAARNRAKHLRLPLLKRHNAERIAQIDAQLKAIEAAMRTRIEQDEALKERFAILLSIPGIAELTAFALLIEMPELGTIQARQAASLAGLAPFTRQSGTWQGRAFIRGGRAALRQALYMPALVAARFNPDMTAKYKALIDAGKPPKVAITAIMRKLIILANALLKSRRKWQPTIA

SEQ ID NO: 355946 - protein, 348 aa, unidentified
MNVIGVDYHPSWQQICWMDTETGETDEKKLEHATGEAERFYRQLPGRALIGMESTGNCQWFVELLGRLGHELWIGDAAKIRASEVRRQKNDRRDAALILKLLVEGRFPRIWTPTSEEKDLRQLLIHRYKLVLIRAGVKNELQHLAMNQGVTKRQKLWSKTGEKVLRELPLAPWASRRREDLFKVRGMLDEQIALLDVAVKEAAEKNEKARLLMTQPGVGPVTSMAFVLTMGDVQRFRRGKHVASYLGLIPREHSSGGHQRLHSISKQGNRFLRMLLVEAAQSAVRYDPEFRREYLHRCHGKPRGVAKVAAARKLAVRLYWMLRTNTAYPGVVRVESSSRVPVVVRSNG

SEQ ID NO: 355947 - protein, 358 aa, unidentified
MKYYTSTTEFNCGIDLHSRQMYVCVMDRAGNKLVHTNIQGNEFAYFLKRVEPYRHSLTVVCECTFNWYWLADACQREGIRFVLAHALYLKAIHGGKNKNDRIDSEKLAHLLRSNLIPPSYVYPGAKRPVRALLRQRLYYVWRRAELLARIQCHQLAEGHTPVKQSRPNRDPWEERLLASYDNPLHKTALEIDLHMIRAYDEMLLRLERELLAATRELASRDYALLNTVPGIGRSLALTILYEIDLIERFPTVKDFCSYCRLVKGSVASAGKLKGTRGAKLGNPYLRWAFGEAAVIGKRDHPLLRAYAQQLEAAHGKFRGNAILAHKLARAVYFMLKRGTGFDVEKLVATSVGGPVNAA

SEQ ID NO: 355948 - protein, 407 aa, unidentified
MEIEHHWFVGIDWATEKNDVCIIDIKGKKLLEFVFPNTPEGMSLLCKTMMERCSDINNIAIAIEIPHGAIVECLAERGFHVFSINPKQLDRFRDRHCPAGSKDDKLDAFVLADSLRTDQHCFRLIRIQAADIIVLRELIRINSDLGETSNRLTNRLRQQIFRFAPQILELSPSADDPWFWTSIEYKLNEDPSDPFTVEKLAEMLSTHRIRRLSGQEVFDVFQKPFLQVAPGTVPAARRHIISLIEHLRLIHKQRKAVKGELEDVIESMSESAEDGEHRDVAIICSLPGVGSTVVATMLSEGAQAIAERDYAALRAHAGIAPVTKRSGKRLNVIMRKACNGRLRNAMYHWCRVSVQRDPVSKAKYAALRAKGHSHGRALRTVGDSNLRLLFGMLKSRSLFDPTRRLAI

SEQ ID NO: 355949 - protein, 393 aa, unidentified
MILVGIDVASKKHDIVITDHLGEVFQKHFTIENSRSGYKKLLSEILLAKEFFKDSNVRIGLESTGHYSRNILHFLILKGYNVMFINPLLTNMDRKASSVRKTKTDAIDAKAICMFLIRNQNDFKPYTLSSYHIDELKILVRQRKSLKKQLNRTSNQLKAYIDQAFPEYHKIFKKTLSKASLSILSSYASLSELKRVRINTLTELLKKSSKGRHGLTKAELLKSLVKDSVGIDSESLSLSIKQSVQTIRNIEFQVSQINALLEHHITESKTTLLSIPGIGIQTGAIILAEIGDINRFKSDDALLAFAGLDPSVYQSGNYDGNFKISKRGSSLLRWAIFQAAKITVLHDPVFNAYYLKKLSEGKHYFTVMGHVTKKLLRVIRSILKNNSVYTVSH

SEQ ID NO: 355950 - protein, 345 aa, unidentified
MEISTIGLDLAKNVFQVHGVSPTGEVVLRKTLRRAQVLPFFAKLPHCLIGAEACGTSHHWARELTKLGHEVRLMPASYVKPYVKRGKNDAADAEAICEAVTRQTMRFVPIKSRDQQAALSIHRARSLLIKQRTQLVNMMRCLLAELGIAIPVGVEKALQMARKIVDGEAGLDLPDEAQNVIVALAEQMLQLHAQLRKLDLRLAALQRSDERARRLATIPGIGPVGATALAASVGDPAQFRSGRQFAAWLGLTPRQRSSGGKERLGRITKMGDTYLRQLLVVGATALIRSARSKPETVDPRFVALVARKPARVASVAIANKMARIAWAIMARGGVFERGHAPILAA

SEQ ID NO: 355951 - protein, 343 aa, unidentified
MQTITAIGLDIAKSVFQVHGVDADGQVVVRRQLKRRYVLAFFQKLPPCLVGIEACASAHHWARELQALGHTAKLMPPAYVKPYVKRHKNDAADAEAICEAVTRANMRFVATKTPEQQSCLTLHRTRHLLMRQQTSVINAIRSHLAEFGIVAPVGRNGVEQLLGVVADSNDKRLPEVARACVAALGAQLRVLKVQILEFDRMIRAWHRSSEASKRLDQVPGVGPVLATALVASVADPRAFRSGRDFSAWIGLVPKQNSSGGKERLGNISKRGDRYLRSLFTTGALAVIRYAKIHGTRHRPWLTALLARRPTKVAAIALANKLARMAWAMMAKGERYKEPAALAA

SEQ ID NO: 355952 - protein, 315 aa, unidentified
MAQTSTTTAGIDTSKDKLDIAVHGQSGCWEVAIDLPGWRRLVQLLTKAGVRRVGIEATGGYERGVVEHLRAAGFIVLVLQPIQVKAFGRARLRRAKNDKLDAALIATFTASLGQVRDAPDPRLAELAEQLTFLEQAEEDIKRFKTRLEHMTEPGLRRLVLDDIARLKARRLSQIHNIAKQLRAHHDLAARLDLVLSIPGIGERTALALLIRMPELGRISREQAAALAGLAPFDNDSGQYKGQRRIAGGRARLRRSLFAAALPAAFRWNKAVMALYARLTAAGKAHNAALIACARKLLIYANTVLQRGTPWTEKAA

SEQ ID NO: 355953 - protein, 388 aa, unidentified
MQTVADRHEGPNAIRTDLGAIFVSLELSRSRWLITSLSPDGGEKMSKHAVRGGDVSGLLERLAQLRKKARARTGKVFSFVVIQEAGLDGFWIDRVLRKEGIESHVVDPASITTSRRRRRAKTDGIDGEALVRALLAYKRGEPRVCAMVKAPTPEEEDRRRLCRERKVLIGERVRHVNRVKGLLFSQGISGYEPLRHDRRERLDTLQTGDGRLLPDHLKAQVRRELDRLELLLEQIKAVEAERDVLLAVQQGAAPAPAAMLLNIKGIGPEFAAILWSEGLFRHFDNRRQVASYAGLAPTPWQSGSVDREQGVSKAGNPRLRTTLIQLAWLWLRNQPQSALALWFKERVNRNGGRLKKTTIVALARKLLVALWKYVTAGVVIEGAIVKSA

SEQ ID NO: 355954 - protein, 320 aa, unidentified
MHERNSTVYAGLDIAKATLQLHLQNVQYVLANNPEGHAALLKKIRAFPGVQIVCEATGGYEKGIVAALHAAGQPVSVINPALVRHFALAQGQRAKNDPLDAAVLTAYGLALQPEPTTPREPARDELRALVQWRDHVKEQLMRTVQTVEHGVPAYVARQQKKLVAHLKKQMAAVEKECQSALARTPLIQAQVRQLEALDAVGTVTALSVLSHLPELGSLNRQEAAALAGLAPWVRQSGPWEGQRHIGGGRAAVRRALYMSAVGLARMKKTTLGKFYARLRAAGKPAKVALTAVMRKLLLQMNRVLKEHALQAQAKTKMQPA

SEQ ID NO: 355955 - protein, 463 aa, unidentified
MQRSGKKTSTAVREPDVEGLPVVRPNVAAIDLASEIHWVCAPSIDRRGREGEQFGATTPELERMAEWLKERKVESVAMESTGVYWIAPHEVLERHGLEILLVNTRELARVPGRKKSDHVDCKWAQRLHSCGLLVGSFRPNEQICMLRTLVRDRGNLVAASADWLRRMQKALDQMNVRVHRAVKDIDGMTGMAIIRAIVKGERDPVSLAKFRQPHCKKSEKQMADELTGHWREDHLFSLQESLKMYDAVQAGVADYDREILRKLAEMEREDCREQQAPKLKNANKARAIKTRGEEPLRQALYRMSGVDVTAIDAIGAGTVQVVLSEYGPDLSRFPSEKQFVQHATLAPHKPTSGGKALKKKKRNNGSTRVAAALRMAATSLHHSETALGAYFRRIARHKGKDIAVFATARKLATLIYRLLRYGHPYVDEGAEAYEKRYREDRIKSLTAAVKALGFELTPKACDA

SEQ ID NO: 355956 - protein, 370 aa, unidentified
MKKNNRNAKSPRRSTTTKLRQSDQVTIGMDWGDKTSRYCALNGEGEVLVEGACPTTKKGMAQQFGARARCRVAIEVGTHSPWVSRELKKLGHEVIVANARQVKLISQSSRKNDKLDAQMLARLARMDPGLLRPIRHRSEEAQKDLMTIRIRSALLEARTGLVNAARGLTKATGERLASCDADQMNVGKLEELPADLRETLKPLVEEVESLTEKIKESDRKIEQIARDRYPETKLLRQVNGVGPLIALTFILTIEDKGRFEKSRDVGCYVGLRPKQSESGERQPELRITKEGDVYLRKLLVQGAHGVMAERAPDTDLKRWGTKLAGRGGKNAKKRAIVAVARKLAILLHHLWVTGEVYEPLRNSQATAKAA

SEQ ID NO: 355957 - protein, 341 aa, unidentified
MQITTIGLDIAKNMFQVHGIDAAEKVVVRRQLRRGQVMKFFEAVPPCLVGMEACATAHYWARELTKLGHQVRLMPAKDVKAYVKRNKNDAADAEGICEAVGRPTMRFVGVKSAEQQGRLMQHRTRDLLMRQRTQAINALRAHMAELGIVAAQGREGLKELLAIIADERDERLPIDARASLIVLAAQLLALHTMIGSIEKRLIVQHRANEASKRLESIHGIGIIGASAIAATVTDPKAFRSGRDFAAWIGLVPREASTGGKQKLGPISKQGDRYLRRILVVGAHSVLRRAKQSPQKYPWLTQLLARRPFKVVAIALANKMARIAWALLASGGIYRAPRLAAA

SEQ ID NO: 355958 - protein, 310 aa, unidentified
MTLKAHTIIAIDIAKESLQIQSPDQAWSLDYEDGALKELIKRLKTLAPILVVCEATGGYERKLLTALHRAKLPVCLVNPYRVRAFASSEGIRAKTDPIDAQVLLRFAQEKKLHPTPPPSPKQLALAALLDRRSHLTSMIAQEKNRLKNSSPLIHSMVRKMIGLIETQLQSLEAKLKKGLSEDEEYRNIDKIIQSVKGVGPVTSWTLMAHLNEITSLGRNQIVALAGLAPFNRDSGKSRGKRCIQAGRGKVRKCLYMAAQTAARFNPVIRDYVNRLIERGKPYKWAMVAAMRKLLIHIQSLLKKNKLSLAS

SEQ ID NO: 355959 - protein, 354 aa, unidentified
MIIIGCDYHPAFQQIAFVDTETGELQERRLQHREEAEKFYRDLAAREMRVRVGMEASGHARWFERLLAELQFELWIGDAAEIRTKRVRKQKTDRQDAQLILKLMLKDDFPRIWVPSWENRDLRQLLWHRHRMVQARTRMMNQLQAVALNEGLRCKKRLWREQGRVQLESFRLAPWASRRRHDLLELLDRLNPTIAELSQAVEQEAEKCPEAQRLMTHPGVGPLTALAFVLIIGRAERFQCGKQIASYLGLVPLEDSSGNRRRLGHITKQGNSLLRFLLVEAAQVTVRSLPEWRSKYFHLAMRRGRKIAKVAMARRLAVRMYWMMRKGWNYEQLKKFGSHAGQPGHRDGVRLNTE

SEQ ID NO: 355960 - protein, 359 aa, unidentified
MTFVGFDLHKRYITACALDASGAPIAEIRQLATTIETVLDWLDALPTPVVVAMEATLYWEWLVARLQEAGHTAHVADAYQVKLIWQARSKTDIIDSRKLAELHRVNLLPTIWVPDLETRRRRQLLRGRAFLVRERTRIKNRIHGHLTAENLLSPQSDLYGKAGRAWLETVALSPMLAAEVQRLLHLHDMLTKEIRRLDAQVQRAARSDPTAQRLATVPGVGVFGALFLQAEIGPIDRFQSSHQLAAYAGLVPTTRSSGGKTTHGPLAKMSNHWLKWILVEIVQTLKLAPGPVGAYYRHLLRAKGKPKATSAAARKLCCYLYWMLKQEWTYTEWLQQHLQQHQQVRRPEVRPTQRLGALA

SEQ ID NO: 355961 - protein, 331 aa, unidentified
MDEMRRFVGIDVAKAALDVFLGCAGTAFTVANDEVGIRDLVKQLMPADFVILEATGGLETPVASALAAAGIAVAIVNPRQVRDFARATGRLAKTDRLDAEVLAHFGEAVRPAARPLADEQAQALEALVTRRRQLVEMLTAEKNRRARAPKVLHRSIDEHIRWLEKRLLVFDDELGELIRNTPLWRERDELLRSVPGVGKVLSSTLLAQLPELGMLNRKQIAALAGLAPFNRDSGSMRGRRCIWGGRAQVRRVLYMATVAGVRSNPAIRTFYLRLRANGKHAKPALIACMRKFLVILNAMLHHKTHWQTPALASPTSSFSPLLGAVTEHGCC

SEQ ID NO: 355962 - protein, 402 aa, unidentified
MNAVGIDVSKGKSMVAIMRPFGEIVSAPFEIKHTASDIHSLVELINSVEGESRIVMEHTGRYYEVLAHQLLEANLFVSAINPKLIKDFDNDSLRKVKSDKADSVKIARYALDKWQNLKQYNVMDELRNQLKTMNRQFGFYMKHKTAMKNNLIGILDQTYPGVNTYFDSPARSDGSQKWVDFASTYWHVDCVRKMSLNAFIDHYQNWCKRKKYNFSQSKAEEIYGKAKELVPVLPKDDITKLIIKQAVNQLNSASTTVESLRTLMNETASKLPEYPIVMAMKGVGASLGPQLMAEIGDVSRFTHKGAITAFAGVDPGVNESGSYEQKSVPTSKRGSSDLRKTLFQVMDVLIKTHPQDDPVYQFIDKKRAQGKPYYVYMTAGANKFLRIYYGRVKEYLSSLPES

SEQ ID NO: 355963 - protein, 469 aa, unidentified
MICSVGIDLHQGQHRARCLDDRAQPCDSFSFQTTPEGLATLEERVFRDGANPVIVLEPAGLPWLIVAVYLRSRHSDCRLVKARTQKVAALRRYLRGPVKSDRLDALTLAKMPFIDPEQLDEIYLPPAEIHALQRLTRQRKRLESDVSGRKIRISAIVDGYLPGVRRAFDEVWSSPFKAFLRSRISPFSVVRDGEEALHVYLSKASPRSKWSKVQTRQVFLACQSVATVCELSTAATTVNEEFFAELQDEIARELRVMEMDEAESESLAHRIDGLYRKLHPSDNLCTIPGVGEHTAPIFLASVGDPTRFRNQSAFANWEGVVPGARQSSNMEAKGLRMTKAGPSIMRMALFQAGDIGRRWDPQLAAVYYREMVYHGKNHRQAMGAVMSHLGARVLRVLKEDRPYELRNVEGKPIDKNEAKKLILSQYQVSQDIRRERRRRNSKNRRIRLTLGDSDLQDTRGSKAPQPVEV

SEQ ID NO: 355964 - protein, 367 aa, unidentified
MSSMTAEGVSTQPVYAGVDTHKDTHHAGIVDDDGRQISDAEFGTDRAGNEAMLEWLAQWWVHQVAVEQTGSYGLGLTTVLREHGYTVKELNRPDPTVRATVGKSDPVDAYTAAQAARTGRADITPKDHSGIVESIRMLSTARASAVKARSVALNQIRDLVITAPVLREKLTGLTTRKMVAVIWSWRPNRGESGDPVQGAKLALRGIAGRVRDLDTEIKAYDTQLNTLTRRAAPRLRARPQVGPMIAAQLLVTVGQCPDRIGSDAQFARLAGIAPIPASSGKTSRMRLHRGGDRHANSAVHLVVIGRLRKHENALAYREKRRAEGMADKDIIRAMKRLVARELFYALKADLKDLDHTTKTSPRPLDTL

SEQ ID NO: 355965 - protein, 379 aa, unidentified
MNYTQNEKIEQVSDATLVIGVDIGSQLHYARAFDNRGKELTKKVFSFGNDIEGFNSFDQWTESLKTANNKTKVLIGCEPTGHYWFALGKYLNDHKKTLVMVNPFSVKKIKELDGNSPKKTDAKDPKTIAKLVIDGRYSIPYMPEGIYAEIRDLVYSRDRIVKQHNISANRIQRWLAIHFPEYLGIYTRFDASSGLAVLEKAPLPKDVMLLGVNGIRKLWHDKKMRGRGVTEDRAKILVEAAHNSIGLDGGAGTRSELHMLLEEYRLWESQLEAVEKALSDAVLKVSHVEKLLAIKGVGSITIAGFIAEVGDVGRFKSPKQIQKYAGLELVENSSGKHKGRSRISKRGRRKLRKILYQVMIPLLAIIVDLSEFFVACDII

SEQ ID NO: 355966 - protein, 386 aa, unidentified
MVYCSTGVRKIQPQEYDVFLGMDVDKRSIVGRQVDHYGTEHGVRMPYDAATLLHYLEHHLAGQRVALVYEAGPTGFGLADTLLAAGFACMVVNPAQVPTERGKRLRTNRLDAQKLAYQLRGGGLKGILVPSEIYRHLREYVTLRKQQMTESARYKQRIKALFLRYGWAWPDPRDGAFWSKALLAQLRDYPCAPALQFKLGSLVESLMFARGQALKAQQDMRRFVEATPELAESVRYAMSLPGIGWIVATYAVARLGDWRELRSSHQTASFMGLVQTEDSTGDSTKRGAITKAGDPVLRSLMIEAAWTTIRHDPELAACYERIKATHAKDKAARIAIVAVARKLATRLHCVLTERRVYQVHSGDGAMSGGSGSPEGERPRPGGRARR

SEQ ID NO: 355967 - protein, 372 aa, unidentified
MLYPGMDQHKSQITVNLRSEDGEIVLQRQVSTRWKKIRTFFDNLTERAAREGGFMAIVEVCGMNPWLIEILEEYNCSELVITQPENRSKQKTDRRDANGLSYLLWVNRHRVTGGQQVPGMRRINPPTPQEAEDRQLTTMRQTLTQKRTAVLNALHKILRKHNFEQDRPTKHFKTKKVREWLATMYLPEIDRLEADQLLAQWALLDEQLGELDAKISERVQGNEEVRLLQSMPGLGEYSALAIRSRISNIERFKRPDSLANYFGLTPGCRNSGEATQRLGSITKQGSKIVRHLLGQAVVKVLQRDGTMRKWYKRIKKRRGSKIARVATMRRMVTILWHMLKKNEEYRCASPANRFEEFDKFSGEPEAAQKAVG

SEQ ID NO: 355968 - protein, 525 aa, unidentified
MTIRVPSSRRRRQSPSRSKYRLQKPKGSISPRVKEVGGEHFAIVCVDPAKHRSEWMMADYFGNVLIEPHTLEHQAAFFKAAVALIRQAQREHDIQDLIVVVERTGNYYLPPKRAFADAGFETRVLHPFATKQYRQPADPGNKTDRNDLAAQHRAAAAGFGLCEPPLEPPYHTLKLKVRHRRNLVQKGASLACQIREHMHLSLPGYAALFDHLFEHKTAMAVGHDCDSPARVLELGHDGLARLLREHGLRHLPKTIDKILAWASQAVGPSIPDGPLHHAIWTDLEELYQHFQRRISAAEVELAGQLVHTPYVRLLAIPGINLVLAAELAGELGPITRYGNANAITGRCGLYPSRSQSDQTDHDRGPIIRQSNRRLRSALMRIADSLASHCAYYRGQAGADEARGIDKRATRVKIAKRFSRLAFACLAGNEPMRHRCFQQADSILEKLRAFHHEHHTPLDRMLADLQAAVSQLPGNTCRREAEIVAAVLERQSHRHRGGVAIGELLPAVLARLESRAKQEHEHRGRS

SEQ ID NO: 355969 - protein, 361 aa, unidentified
MIVQGTSVGLDVHARSVVAHAIDEDTGQVIRQTLVPDAATIVSWLQGLAPPVRVAYEAGPTGFGLARAITAAGMGCVVAAPSKLQRPAGDRVKTDARDAAHLAKLLRLGEVVAVSVPEVGTEAARDLVRAREDARSDLMRARHRLSKLLLRQGIVYSGGKPWTGVHQRWLQRQRFELPLLQAAFDNDLDAVLSVTARRDRLDELIEQTAATDPWQAVVTRLSCLRGVSTLTAFALAVEIGDWSRFSGATIGSYAGLVPSEYSTGGTRSQGSITKAGNAHVRRLLVEAAWQHRRPYATPGQTMRRRWEAASPAARARGHAGNRRLHKRWQQFDRRSKHPCVANTAIARELAGWCWSLAVLDD

SEQ ID NO: 355970 - protein, 348 aa, unidentified
MTVYIGVDFHARQQTISYLTTEDGEIQRLQVEHEQPGEVRRFYQQFAGQRVVVGFESSGRAAWFEELLEELDCEIWIGHATAIRLFARRRQKNDRRDADLILDLLVRGDFPRIHRYSAESRAVLQQLRYRQRLVKMRTMLLNSLVFMAASRGVVLRSQLKTKRGLERLRQIDLPPALREQRDELCQLLLELKPKIDKVESSLAATAESDIRVRRLRTQYGIGPLTGLCLAHTLEHPERFANPRKVTAYVGFDPVEDSSGGRRRIGSISKQGSRLLRFLLVEAGQIAVRRDRELARVYQRVLVRRGHAKAKVAIGRRLLVRAFIMLRDEIDYAEFQRRGVAARSSREIA

SEQ ID NO: 355971 - protein, 349 aa, unidentified
MTKSYAGPEQFVGVDLARRRSVIARMDAGGGVVDCVQIDNSAKDLVAEVAKAGAGAPVAVEATYGWYWAVDALQGAGFEVHLAHPKGNASMHNRRVKTDARDATELARLLRMGDLAESWIAPPRVRARRELVRHRHKLVKTRASVKASVHAVLAKCGVLLPLDDIFGPVGLAELARVQLAEPYASRVASQCRLITALSTEVDLVETAIAAEFKDDPGYRALLSINGIGPVFASVFVAEIGDVHRFGTPQALASWAGLTPRLYASDVKARRGHITKQGSRLLRWAATEASQRIREPYLADKRRLITDRRGRAAANISKVAAGRRLLHVVDYTLRDGHARCLDRPPSSAAS

SEQ ID NO: 355972 - protein, 338 aa, unidentified
MKNIKYFIGLDVHKERTSYCVRDKLGNILTEAETATLYSELETRLKPYLAYSLIALEASTTYYTLYQTFLKKGYSIKVANTIQLRQLIAKNDKLDAQRLAEMLRLGTLPCSYIPEEKIQHLRSMIQMRHALMQEKVRCNNRIQAFLDRNGVIMPPVKAFSKKWKHALMQHLGTGTASMELRYEYNHYVYLEKTNEQADQEIIGYTKTYWKQEYTLLRSITGFGALLPCYVIAFVHPIERFLSNRKLRRYAGVIPLSKESGDTTSPGRIPKTTSKALLRWALVQAANTIGKTNTRLGRYYRRKKNQKKKSGIAKIAVASTLVDIIYKVLTTKKPYVSTC

SEQ ID NO: 355973 - protein, 343 aa, unidentified
MKITTIGIDLAKSVFQVHGVDARGHVVVRKQLRRDQMAAFFANLPACLVGMEACGSAHHWARKLQGFGHEVRLISPQFVKPYVKSNKNDAADAEAICEAVARPNMRFVPIKTVEQQTVLSVHRVRQGFVKARTAQANQIRGLLAEFGLVLPQGITNVLRRVPQIIDGAADLPASMRQLIDRLLENMKVLDRQVKELEAQIKAWHHGSELSRKLEKIPGIGPLAASALVASIADARSFKNGRQVAAWLGLVPKQDSSGGKPKLLGMSKRGDTYLRTLLIHGARSAIVAAQRTGKPNGWLSGLLTRRHPNIAAVALANKNARTIWALLAHEREFRPDYVPRPVTA

SEQ ID NO: 355974 - protein, 342 aa, unidentified
MAAAAIGVDTHKDTLAACLVDQLGLAREERAFGNEPAGHAAFAAWVTGLAEPDVRIGVEGSASYGAVLARHLVAAGLDVVEVPPQLSRRERGRTRRPGKSDPGDAFAIARVTLAEADLPPVRLADRTRDLQLLAEARATAVVAQTRARNRLHAHLRVLVAGYSATVAHLVTGRELAQVRRLLRGHLGIEADLARAELAEVVRLGRRADALERQIRPLLGDDPLLAIPGCGLLSAAVIRGEAGDVARFPSHDALAMFAGVAPLPASSGKTSRVRYNRRGNRRVNRAIWTIAVWQAKFDPRARAYLARKKAEGKRSKEALRCLKRHLVRHVFAALVAGQLPAAI

SEQ ID NO: 355975 - protein, 347 aa, unidentified
MSHTNIVTIGIDLGKNTFHVVGVDATGAIILRKKRPRNQLEQSLANVPPCLIGMEACAGAHHLGRKLEKLGHQVRLLPAQYVKPYLKGHKNDFPDAEAIAEAAQRPTMRFVPLKSAEQLDLQALHRVRSRLVTQRTAVINQIRGFLLERGLPVRQGAAALRLALPQILSMLSDNLSPRVVRLIQDLAEDWRFLERRVASITKEIDELADQDAHCRRLMSAPGVGPIISSAMIAAIGTGDAFHKGRDFAAWLGLVPKQLSTGDRTILGRISRRGNRYLRTLFIQGARAVLLRRQSWPRHGFGAWLEAASKRFHSNVLVVALAAKLARLAWSMLAKGRDCDANFMGHAA

SEQ ID NO: 355976 - protein, 345 aa, unidentified
MHIASIGIDLGKATFHLVALGEHNKVLLRKKFSRPQLLAYTANLPASLIGLEACAGAHFMGAALRGQGHQVRLIPAQFVKPYRKSNKNDFIDAEAIAEAVTKQNMRFAQLKTQEQLDWQAMHRVRDRLMRRRTALINEIRGFLLERGITFAAQPIHLRKNLPTVIEDAEQNLSPRLRWLLDCMWQEWKQTETEIQQITDEIERISNEDARCRQLRQIPGFGPLVSTATVAAIGNGSAFRRGRDFAAWVGVVPRQYSTGGKQKLYGISKRGNVYLRRMLIHGARSVLFRVKYDTGGFGQWVRRLAQRAPHNKVVVAIANKLARIAWAVLSSGQDYRHPPLQQRAAA

SEQ ID NO: 355977 - protein, 414 aa, unidentified
MVEVINKACGLDIHKLFFIATILSRSGEKQQQYFSRTPDEILAFKNWVISDKCDVVACESTSDFWVPIYDALIKHLPVIVGNARDMKAFTHKKTDKIDSEFIAQLALNNMIQPSRVFPKNHRTFRSCIRLRHNLVQKRTDIKNEAHAILAPEMFNLKNVLTDIFGKSGRAILSGICSGKSVDQIIASLSPNVRKKSDQIRETLDREISQGAAFRLQICLDIIKHLDNEIKILEKEIFNYAYKNHKQEMEILMSVPGIGELGAATLIAEIGDFKDFSSGDKLASWLGIVPNVYQSADKYHNGRITKRGSKEARWILTQIAQAAARTKNSRLKEFFNRKKKSIGHSKAIIALARKIATIIWHLITNEEMYEDETGYKKGEIQKRKIVETEIFSVDERIKIMSEIYVIARNEEREST

SEQ ID NO: 355978 - protein, 327 aa, unidentified
MAKRTTICAGIDTGKRKLDVALDGSSEQLQIDNTPEGYKVLLDWLRCHRVKRIGIEASGGYEQAVVAELRRKRVVVVVFQPAQVRAYARFHLQRAKNDKIDAALIAACTAAVKKIHPPPDARVLPFAEHLTMIDQIGEDIALLKNRLETCRNPRIQQVWKEDLARLAKRERIEFKALVAAIREHRDLAERLDLIYSVSGAGLPTAVAILVRMPEIGQLTREQAAALAGLAPYDDDSGKHVGVRHIDGGRERLRRALYTAALPASFRWNPQLITLYKRLIAAGKGHKRALIACARKLLIFVNAVVARGIPWDHERPPTVAATALPQTG

SEQ ID NO: 355979 - protein, 336 aa, unidentified
MSHYCGIDLHSNNHVLVVIDEEDKRVFEKRLNNDLSLTLEALSPYRETLQGIAVESTFNWYWLVDGLQEQGYDLQLVNTAAVTQYDGLKYSGDHHDAFHLAHLMRLGILPTGYIYPKEQRAIRDLLRRRLSLLRTASTQLVSVQSQIWRSTGIRIRSRELRKLEFVPPLVDDYTLQAVYAGLAVYQALQREIDALEQTAHHAVKLTEAFQILQTITGIGKILGLTIMLETGDIHRFAGPGNFASYCRCVDSQRTRNGKKKGAGNAKAGNKYLSWAFSEGAHFAVRFEPLAKRFYARKKATTNGIIAIRAVARKLARASWMMLKHQVPYDAKLMFPG

SEQ ID NO: 355980 - protein, 361 aa, unidentified
MDKYIGFDIDSNKTSVCIVQKGKADRYATIGPDVGSMSKFLVDQKKDGSRVHLTFEISGQAGFLYDSLVGCVDSIKVANPDKMTWIYRTGKKNDRIDARKMAVLLSIGEIPAVHMPSKEVRQWRMIVCHRRKLLGMLVMAKNRIRALLRGQGISRPLHKGGWWKISNRLWLKGLCGAGFDVNNMWRMQLSNLLDELQMNEKQIALVTDYLDQYLDKQAGGRLLMSIPGVGPRTAEAVLAFTDDVERFAGGKEYCGYFGVTPKLDESGGSRRLGHISKKGPSVVRWVLCESSWKVVRYSRSMKDFYQRVMAGQKSRKKIAIVAVARKLLSIMRAMLLTGAMFEEGLVSSLDYGRIEGLKKTA

SEQ ID NO: 355981 - protein, 344 aa, unidentified
MDHFAGLDVSVKETSVCVVDDAGKIVREVKVASEPEALLAVLKSPAYHFKRIGLEAGPLSQWLYSALAEAELPVVCVETRHMQALLKAQINKTDRNDARGIAQMMRVGLYRPVHVKTLRSQKLRMLLTHRKLLQSKAIAIENDLRGTLRNFGLKVGMVGNVKFEARIKELVENLPDLAVLVEPLLVVRRVLREQFVMLHRRLLAIVRDDEVCRRLITTPGVGPVVALTYRATVDVPARFRKSKAVGAVFGLTCSKYQSGEIDRSGRISRCGDEMMRVMLYEAAQSMLHSKKWSWLKAWAMQIARRRGMKKAIVALARRLAVIMHRIWVDGTEFCWTREQATAAA

SEQ ID NO: 355982 - protein, 342 aa, unidentified
MAIAIVGLDLAKHVFQVHAVDETGRAVLRRQLRRAGVEAFFKTLPPCVVGMEACASAHYWARRISALGHEVRLIAPAKVKPYVQRGKKNDANDAAAIVEALMRPHMVFVPIKNEEQQAVLMLHQTRDLLVRQRTMLVNAIRAHLAEFGIVAAQGRRKVKDLITGLDNTEIPELARLALWQIADQIDECDNHIDTLERRILAWHKSDEASCNLATIPGIGPITASAIAATVPNPSAFRNGRQLAAWLGLVPRQNSSGGKDRLSGITKAGNPYIRRLLVIGATSVIRYARSKAPGTAEWLKKLLDRKSARLASVALANKMARIAWSVLTRGEVYRNTYPIPKPT

SEQ ID NO: 355983 - protein, 360 aa, unidentified
MFTERTSVGLDVHARSMVGAGLDAVSGQVVTRRLVPGSASVLAWLGELPQPVAVAYEAGPTGYGLARSLTAAGIRCEVVAPSKLVRPAGDRVKTDTRDAIHLARLLRMDQFTAVAVPSVEQEAARDLVRAREDCRGDLMRARHRLSKLLLRQGIVYSQGSAWTGEHDRWLRRQRFELAGLATAFDEGYEAVVSVKARRDRLDAAIAAMADDSVWTPVVHRLGCLRGISTLTGFALAVEIDDWSRFTGSTIGAYLGLVPTEHSSGQSRAQGSITKTGNGHARRLLVEAAWHHQHPYRPGKVLRDRWALADPAARARGHAGNRRLHQRWVDFRLRRKPGVIADVAIARELAGWCWSLATMTD

SEQ ID NO: 355984 - protein, 337 aa, unidentified
MGMDQHRAQISAEWIDTITGEISRARVAPADRAGVRKFLAQFKGVGLEVALEATTGWRFLVEELERVGADVHLAEVVQTSGLKGRGKRAKSDWADARHLRELLLIGRLPESWIAPAHLLDLRARVRCRHTLLHQRTEWQQRMQAVLYHHGAPHARGLLKLENRERVAALKLPDAAREQLTIALSMIDAIDLQLAPFDQALRACARKQPGCRTLIEEIYGIGELTSITILPELGDTRRFQNSRDAVRYAGLDVTVHQSDQRRAAGHLSRQGPPALRWALYEAAQAARRPGSPDRDYYEQLAARIGGNRACIAISRKLLKRSYHLLRALGDQALEPVTA

SEQ ID NO: 355985 - protein, 320 aa, unidentified
MSDSLDIGVDVDSKEFVPAVADRKAGDRIANTRAGIAQWLNTLPQRCRIGMEATGRYYELLARMAGQAGHVVYVINPRLIKHYGRATGSRGKTDAMDAEAIARYVKKENDRLREYVPRTDEQQQMHDLLRKRQTLVKTRARLEQSFGVSKSAPGELSDLFCALAGTLSELESELQRLGRDGEHGTLYKRLLTIPGVGPAVAAHLIYYMTRWPLANANAWIACTGLDPRPNESGGRTGRRRLSKQGAPVLRQMLYMAAMGLKRCRQGQPLYDELSKRGHPSTAVFNILARKLARIAWGVFKSGRDFDPAMLKVGQACFQQA

SEQ ID NO: 355986 - protein, 358 aa, unidentified
MKYVGIDVHKKMCQAAVLNEGGAFLDEIRFPNDPDGIEEFAGKLTTFRDEVKAVVESTCNLWIPVHDRLEEHGFDVALSNPAKTRLIAEAKVKTDKVDARTLAALLRADMLPTCYVPGEELRSRRELLRHRLNLVKIRTGVKNRIHSLLDKHGLRMPEATPFSIGNIAWLRERDLGFMDDAILRSDLALLETVDEQVERIEEKIAALAAEEWRVRLLMTMTGIGYFTAMLILTEVGDIGRFRGDKAFASWMGLAPSVHQSGERTRIGGVSGPGNKRLRWVLVECAQAAVRYDPRFRGLYERVSRRRGAGCAVVAVAHEMARIMYFMLSRGEPYRGENRGLTERKLKNMSRKAYDGLRS

SEQ ID NO: 355987 - protein, 344 aa, unidentified
MVAKTHVLQAQRGGQPVERQYIGVDLHSAFFQACAVTETGERTWEDRFPRTDEGLSAFRARCTSRTAVAVEASTPTWHFVDAITGGVDRVTVVDAFRTRLKAGYAAKTDRLDARRLADALRRDSVVGIYVPPPLVREWRELCRYRQTLVRTRTALIQRIRAVLLRHGHVEAGRLNRAAALRTLDRFALPGRAGGAVTGLRTLCLAVQEQLAPIDQAVRDEAMQDPVVTALTTIRGIGPVLGLTIRAEIGTIHRFATAPEIASYAGLVPRVEASASRVYHGRITRRGSPWLRWALVEAAIQRGRQTDARGRWARRLAVRKGALKARVALARRMCEEVFLIWRQAE

SEQ ID NO: 355988 - protein, 375 aa, unidentified
MGDHSEAFVAFDTSKLRNAVAIAEGGRDGEVRFFGEIDNTAEATAKLVRKLAAKYKRLTFCYEAGPTGYGLYRQIEGLGHTCNVVAPSLIPKKPGDRVKTNRRDAVSLAKLSRAGELTAVWVPDQGHEAMRDLTRARETAMIDLRSKRQQVSAFLLRLGRHYPEKRKTWTKAHMKWLASQKFEYPQQRFVFEEMMLAVRQAQERLARLEEAIRGAVPEWSLAAVVTALMAMRGIDVIAAATLLAEIGDLSRFRTPHALMAYLGLVPSEDSTGDTVRRGSITKAGNRRARRMLVECSWSYQHPPRVGAHKQHKVDAAPPVVREIAWKAQCRLYKRYRALIRRGKLKTVAITAVARELAGFIWAVSREITTAQVAAS

SEQ ID NO: 355989 - protein, 423 aa, unidentified
MSERKSLELRVSVDVGSRRHSVAIGLPDGRVLEEFEIMHRPEGFQEFFSRIEKHQKAQGCGVAVAMEGYNGYARPLDSLVRQRGYRLYNINNLKLARFKEIFPGAAKKDRIDARKGLELFQLRDHLPLAKKVLQEVTGTPKENEILKRLTRRRRRLINERVRVVNNLQADLQAVCPGLLEITTEASNQWFLNFLLSASTLPQLARLRKSTLLTIPAVGRKYASLIQDWQKRAHFSSEVEWVGEMIHEDAQRCLELEEKIKTLGTKIEQVARDSKIAKILLSIPGFGPVCTSELAGEIGTVERFGKEGSLALYLGMSTLDNSSGNYHGTKQPKHVNTRAKAAMMTALDRHRKYVPESQRYYEKKRSEGKKHNQAIRALGRHLCRIIYKMLTEERDYQIRPEKGNTKTKVSSRSCVKTKIRRPKF

SEQ ID NO: 355990 - protein, 386 aa, unidentified
MTQSTRSPECTPASPRTLYVAFELGSTKWTLGFAPAPATRPRVRTIPAGDLAQLEREVLAAKVRFGLPLDAPVQACYEAGRDGFWLHRWLTRQGLANVVVDSSSIEVNRRARRAKTDRLDVGRLLQLLLRWAGGERQVWSVVRVPSEEAEAARQLTREIDTVKADRKRVRNRLHGLLATQGIRLRLERRFPEHVGDARTGDGQPVAAAYVERLQREWTHLEAIEARLTALTTQRDAAVATGTDRVSVVARTLCTMKSIASTSASVLSAELFATRTFQNGRQLGALTGLVPVPYRSDQMVQDQGISKAGRGELRALAVQLAWLWVRWQPASALTQWFLRRCAGAGARSRRIAIVALARKLLIALWRFVTHGVIPDGAVLKPATLTAE

SEQ ID NO: 355991 - protein, 408 aa, unidentified
MELIYTICCGLDVHKRSIQACLRRLGPDGRIHQEVRSFGTMTRDILEMADWLAAAGVTHVAMESTGVYWKPIYNLLEGRFTLLLVNARHVKHVPGRKTDVKDCQWLAQLLQCGLLKGSFIPPRPQRELRELTRHRTQLVAEKTRAANRIQKVLEDANIKLASVASDILGASGRDMLRALIAGEQDPGKLADLARRQLRSKIPQLGLALEGQVTEHHRFVLGELLDHLGYLESQIERFTRRIEEVSHPFASAIDLVTQLTGFEQRAAQNVVAEIGADMSPFPSEGHLASWSSVCPGSNESGGKSKSGKTTKGNRWLRSTLVQAAWAATRKKDSYFQAQYRRLAARRGKKRAILAVAHSLLVVIYHMLKTGSTYKDLGGDYFDKLNKNRLLPFLVKRLKDLGYQVTLEAA

SEQ ID NO: 355992 - protein, 376 aa, unidentified
MSKSSNVYVGLDVHKESIAVAVAHAGRGEATYYGEVPNTPAAVGKLVKRLAREGSVLDFCYEAGPCGYGLHRQLTGLGQHCAVVAPSLIPRKAGVRLKTDRRDALGLARLHRAGELTPVWVPDSEQEALRDLTRAREDMKAIELKARQRLGAFLLRHGRVYGGKSRWTQAHWRWLETVKFASPVQQIVLQEYIEAVKEAQRRVAGLEAQMRAALAGWSLEPVARGLMALRGVSLITAMTVLAELGDLTRFASPRELMGYLGLVPSEHSSGGTRRQGGITHTGNGHARRVVVEAAWNYRFAARKTRAIEKRAEQTPPAVQAIAWTAQKRLCGRYQALLCAGKLKPQVTVAVARELAGFLWAIACEVQGKAHGSKALA

SEQ ID NO: 355993 - protein, 346 aa, unidentified
MSHKTAATVAHTIGIDTGKNTLHLIGLDDQGAIVLREKIARGRIAARLANVPRCLIGIEAGMATHYVARELSALGHDVKQVPPAYSKPFRQGHKNDFRDAYAVAEAVQRPSTRCVPVKTDDQLDLQALHRVRSRLVGQRTAVINQIRSFLLEHGIAVRQGLRFLRQQLPDILAKRSDVLSLRMIRIMEDLSGDWRRLDERIEHVTKEIEVLAHGSKSCHQLMTVPGIGPLIASAMVAAIGNGAAFAKGRDFAAWLGLVPKQMSTGDRTILGRISKRGNRYLRTLLMQGARVILLRPANWAKHSFGPWLTAAANRLHHNVLATALANKLARIAWTVLMQARSYEARV

SEQ ID NO: 355994 - protein, 342 aa, unidentified
MKLMRIGVDLAKSVFQIHGVDCQERPVWRQRLSRERWLQAILEKAEPDCEIGLESCGGAHHWARQLEARGFRVKLIAPQFVKPYVKSNKNDANDAEAICEAMSRPSMRFVAIKTVEQQDIQAAHRIRAGLIEQRTAKANQVRGLVAEHGLIAPKELCALRRAIPCWLEDADNGLTLRFRHLLDGLWRDLRMLDERVKELDCEISGIAAKEPSAQSLQQLRGVGPMIATALVAAIGDARQFANGRQFAASLGLTPRQHSSGGKDRLLGSKRGDAYLRTLMIHGARSVLRTAPSKDDRLSQWAVRLAERSHTNVAAIALANKTARMAWAMLRNGTAYQPERAAA

SEQ ID NO: 355995 - protein, 368 aa, unidentified
MDRPRSIWMWERAQVYTLEGEPLAMSVVTIGLDLAKSVFQVHGVDAAGHTALRRRLSRTDLLPFFAKQAPCVIGMEACSSAHHWARELSRLGHQVRLIPPQYVKPYVKRNKTDAADAEAICEAVGRPNMRFVPIKTIEQQGILALHRVRALLVRQRTSAVNAMRGLLSEFGIVAAKGIRRIEELRERMNRAEPDVLPTEAREAISILFAHLDGLQERIDKVETRILAWHKASEASRRLTSAPGVGPLTATAIVAAVGDGRQFKSARHFAAWLGLTPRIQASGGKEHIGRISKGGDRYLRTMLIHGARAVVGTAFRKDVRPRPWLKELLRRRPVNVAATAVAHKTARSLWAMLTRAELYRPRSAVMAAA

SEQ ID NO: 355996 - protein, 349 aa, unidentified
MVEYVGLDVSLKETSVCVMDGAGRVEWRGQCKSTPEAMAATVRKRAPSAERVVLESGTLSTWHWHGLKALGIPVVCVDARQAKAALSGRPNKSDELDAEGLAQLARTGWYTEVRVKSYASHRVRSVLVARAKLVGMKRTLSNTIRSLLKTFGQFTQRARGQSFADRVRSLVADEPLLGKGIEGLLASWEAVSRQIRDLDRLLSGLARRDPVCRDILMTAPGVGAITALAFKAVIDEPTRFRRCEEVGAYLGLAPKRHQSGETDRMGCISRCGDALLRGYLFEAATVALTRVPRENDPVTWAKAVAKRNGANKARVALARKLAVILFTMWRRNEAFRWSDQKSEPQAMAA

SEQ ID NO: 355997 - protein, 420 aa, unidentified
MAGTVGIVYPVCCGIDVHKSFLVACIATTDERNHTTHQIRRFSTFTGDLRKLAEWLAVNNCRDVCMESTGKYWIPVFNTLEKTCNVCLTHPKYVKAIKGKKTDKKDAKWIAELFKCDLIRSSFIPPLDIRQLRDLCRYYVKLTYMSTSEKNRAQNCLTMCNFKLDDVFSDLFGMSATRILNQLLEHRGGDFDAAPLIDPRCKASAEDVQAALDGELTFAQAEKLKFIRQHREYIVCLQDTLEGLIRELALKYQPQIDLLLTVPGISEPLTAIRILAEIGADMSVFETSKQLCSWAGLTPQNQESAGKKKTTRIGRAGAYLKPLLVQIALSCGKSGKYPELKNKYQALKKRRGGKKAVIAIARKLLTAIWHIFSKNEPYNAELYRKADNPPANRELSPELAFALLRSRGYIIREEESVAPA

SEQ ID NO: 355998 - protein, 329 aa, unidentified
MTNESQESVFVGVDVSKAVLEVALSDKGASERFDNDKHGIAALIESLKQVHAGLVLMEATGGLERKLAQALYLQNFDVMVVNPRQAHDFGKAMGYLAKTDHVDARVLSHFARTLHQSERRDKLLLKLPSQQQQHVAALVMRRGQLVQMRVAESNRLEQAHPLLAKSIAAMIKALDKQIDVLDDDIGGRLKMHFKRQTELLKGLKGIGPNTQAVLMGMLPELGQLSRREISKLVGVAPLARDSGKSRGKRSIWGGRADVRSALYMSTLSAMRHEPVIMQFRDRLRAAGKAPKVVIVACMRKLLTIVNAVIKSGQPWSATYSQAGNALQTA

SEQ ID NO: 355999 - protein, 419 aa, unidentified
MESKIENIVAFLGIDWADQKHDLHLSSPSGEKLEYRQIQHTPEVLSEWLTQLRQRFPQGHIAVCLEQSKGSLIYHLMSYNFLILYPLNPKALARYREAFKTSGAKDDKPDAEFLCELIRCHRDRLRPWSPEDEQTRNIAALAEARRRSVDERTRVSNKLKSTLKGYFPQSLQLVGENLYDPLSLAFLKQWPRLEEIQRIRDAKIRKFYTSQGSRSEQRIAERIKVIRDAVPVTKDMAVITSAIITVQMLTDILATLNASIEKYEQKLKELIASHPDNDIFSSFPGAGDALTPRLLAAWGTDRQRYEDANEMQQYSGVAPITKRSGKTTVVQRRLACPKFLLQTFHEYARCSLLKSIWAKAFYNMLRERGKSHHTALRSLGFKWIRIMYRCWHDRTCYDEAQYIQALQRAHSPVLTYMAQ

SEQ ID NO: 356000 - protein, 465 aa, unidentified
MGNSRTQQKKLSSQSKGTGMLSKLNLNAAGIDIGSEEHFVAVPEDRDEQPVRKFRCFTADLHALAQWLKACRIDTVAMESTGVYWIPVFQILETYGFEVKLVNARHVKNVPGRKTDVCDCQWLQNLHTYGLLSGSFRPEDQICVLRSYWRHRDNLLRYASSHTQHMQKALTQMNIQLHKVISEITGVTGMRIVRAILAGERNSLVLASMKDRRILCSTEDIIKSLEGDYRQEHMFALKQAVELYDFYHQQIDACDRQIENCLAQFDSKVDIKTNPVPPSKKGNRKPRRNEPKIDLHTHLYRIIGTDLTKIDGLDVMTVQSVITEVGLNPGSFPTEKHFASWLGLCPDNRITGGKVKSSKTRKVVNRAAGAFRMAAESLHHSASALGAYYRRMRARLGAPKAITATAHKLALIFYKLWKNGESYLDPGQDYYEQRYKERVVKNMKAKAKQIGYSIILEPLADSAGS

SEQ ID NO: 356001 - protein, 362 aa, unidentified
MQSTPLIAFDQHAATTVAAVLLVGQRTPALHTLTSDSPAILRFVKKVQHETGPVRCCYEAGPCGFELQRALTADGIACDVIAPALIPRRPGDRIKTDRRDASQLAVLYRAGALTAIHVPTEQDEAVRDLLRCREDIRADLLRARHRLGKFLLRHGRRYVATKSTWSQRHHAWLRAQTWPLPALTQTHEAYLRAVDEAVARLRTVDTQLQDLVMLEPLRGRVQRLRCFRGMDDITALTIAAELGDARRFPSARGLMAYVGLIPSEHSSGPRRARGAITKTGNAHMRRVLVEAAWHYRHHPFIGKQLRRRQAGMPPTALIPAWHAQQRLYRRYQRLAARGKPKQHVVTAIARELTGFVWATLTQ

SEQ ID NO: 356002 - protein, 343 aa, unidentified
MDIVVLGIDLGKNSCSLAGLDASGRVILRRRMRRSSVESFVKGLGRCIVAMEACCGAHHLGRVFAAQGHETRLMSPEYVRPYVKAQKNDELDAEVIAEAATRPTMRFVAVKSQYQSDVQALHRARERLVSERTALINHLRALLLERGIVAPQGRRKLQEELAVFADENGIEALSPRIRLLIEDLRSEWRALDERIAAFDVEFVRMAREDEAVRRLTTIPGIGTINATALAAAVGNSRAFRRGRDMAAWLGLTPRQMTTGGKPRLLGISKRGNRYLRKNLIHGARAVLPYLVERETPLGRWARGLLARAHKNIVVVALANKLARIAWAVLARGCTYEAAGEAAA

SEQ ID NO: 356003 - protein, 430 aa, unidentified
MKSNTQNKKIEAITEKTLVIGIDVGSETYYARAFDYRGIEYSKKPFKFSNTEAGFVTFKEWILDLKEKHEKDKVVPGMEPTGHYWFNLGKYLQDNEMKPVLVNPHHVKKSKELDDNNPTKNDRKDPKVIAGLVREGRYMIPYLPDGVYADLRTASNIRFQLQSELTRIQNRISRWFNIYFPEYKTVYGKPDAKSGMLILKEAPLPEDILTLGIDGVNQIWRDAKLRAVGKARAKTLIEAAEHSVGSKEGAVSARMEIRMLLEDYESRNMRLQEVMVLIEELVKQIPMAEKLLEIKGVGIKTVSGFLAEVGDISRFNSPKELQKLAGLALVENSSGKHKGETTISRRGRKRLRYLLFEVAMSLVAKNPEFRELHNYYTTRRLNPLKKMQSLMAIAAKLIRVFFAMLTKGVDYDPKKMVSDIKRPAVYLQAA

SEQ ID NO: 356004 - protein, 372 aa, unidentified
MSIVGGFDVHRRQLRIEYLDTVTGELRVGRVAPADREHLRDWLARFAGQEDAHFALEGCTGWRYVVEELLAAGVEPHLAEPADTAALRGRKRHAKTDKTDSRHLRIHLLAGDLPECWIPPQHVLEVRAVVRLYKDLLDERGAWHQRIAATLFHQGVPAGIGSMCTAEGRAAVTGVDLSAAGRQAVQTGLRQIDRLTGELDPLRRQLGMLSRRQPGCAALRAAHFGIGPVTSVAIWAELGDVRRFPSSDDVVRHTGLDITVYSSDTKRSGTCPGRAPPCCAGRCMRPPRAPPGLPRPITRTTSRPGTGATPGWPPCRWPASSPAASTTPCATSGRTPCGPQPKPSQSARHPRQGTPSPMNVRPAPGQRSAART

SEQ ID NO: 356005 - protein, 343 aa, unidentified
MQAVTTIGLDIAKSVFQVHGIDAEGQVIIRRQLRRRYVLAFFEKLAPCLVGIEACAASHYWSRQLQALGHMVRLMPPAYVKPYVKRQKNDAADAEAICEAVTRANMRFVPTKTPEQQSCLMLHRTRHLFIRQQTAVINAIRSHLAEFGIVAPVGRHGVEQLLNIAADLSDERLPDVARRCVAALGAQLKVLKAQILAFDRQIMAWHRSNATSKRLDDIPGVGPALATALVASVGDPKAFRSGRDFSAWIGLVPKQRSSGGKDKLGSISKQGDRYLRSLFTTGALAVIRYAKIHGTQHRPWLTALLARRPTKVAAIALANKIARMAWAIMVRGECYKEPVALAA

SEQ ID NO: 356006 - protein, 429 aa, unidentified
MNSTRNKKIEQVKETTMIVGIDIGSEKHYFRAFNWRGIELTRKPVAFSNSMEGFNSFYNTIVELIQKSELEEALVGIEPTGHYWFDLGQFMGEKNIKFVMVNPHHVHKSKELDDNSPSKNDRKDPRVIAGLVRDGRYFYSYMPTGVYAELRNASNRRFVLVEEQTRAKNRMQKWIAVYFPEYKGIYTRIDAKGGLLVLKQAPTPEEIVRLGVEGIIKIWKDAKLRGNGYKKAMLILNAAMKSIGLKAGLTEARMEIQDLIEDYELQTKRLERVNDLIKELCQQIRYADKLLEIKGIGITTIAGFIAEVGDITRFDSAKELQKLAGLELVADSSGKHNGKTKISKRGRKRLRYLLFEAAISVVGKNKEFKEIHRYYTTREKNPLKKMQSLIAVACKLIRVFHVILTKGISYDASKMLKDIQHPGEPLKAA

SEQ ID NO: 356007 - protein, 316 aa, unidentified
MQTPSVCVGIDVSNARLDVAVHPSGEQVSVMQDEQGLVTVVQWVRQRQPTRIVVEATGGLERPLVRALVDAALPAIVVNPRQVRDFAKATGQLAKTDALDAQVLARFAAVIQPAVRALPDPQTQELAALLARRRQVLAMQQAEQNRLDRAPARVRKRIEVHLRWLRAELARLDEDLDDMIQQSPVWREREDLLQSVPGIGPVMSRTVLAELPELGLLNRKQIAALVGVAPFNRDSGRLCGHRTIWGGRAPVRTALYMATLVATRWNPVIRPFYQRLRAVGKAPKVALVAAMRKLLTILNAMVHHGTPWRPVVAPDA

SEQ ID NO: 356008 - protein, 353 aa, unidentified
MRIVCALDVHRRQITYAIVDVRSGEMSRGRITPATRESVREWLARFDGVDEVGFALEGTTGWRFVVEEVERAGHRAHLADPAETAAKRGRKRRAKTDRADCDLLLRLLSARELPESWIPPAQILELRTRVRLRKSLVDERTAWQQRLQAQLFHQGVPRGLRPRTRAGREALAKVELSPAGLELVALALRMIETIDDELAPLDRALSLYARHQPGCRALIARLYGVGPVTATAIVAELGDARRFGCSDDAVRHCGLDVTVHQSDRKRAPGHLSHEGPELLRWALFEAAQQACRSASPDYDYYRQVARRIDHNRACLSVARKLCRRAYHILRELGDEALAPIETPDREEVIAAAA

SEQ ID NO: 356009 - protein, 355 aa, unidentified
MDVLLPVTLARCCGIDVHKKTLTAGLLTTGASGEATQQLRVFRTVTAALQELARWLAQAGCRHVALESTGVYGKPVFNVLEKAGVEVVLVNAQHIKNVPGRKTDVKDAEWIATLLRVGLLRASFVPPAAIRELRDLTRYRTQVVRQRAGECNRIQKLLESCNIKLASVASNVLGASGRDMLKALTEGVDSPQVLANMARGKLRDKVPELEEALRGVMSETQRWLLREQLLKVSELDDGIARLDVKLAELCLPFGQALALLDQIPGVDQRMAQVIVAEIGLDMSRFKSAAQLASWAGMCPGNHESAGKQQSGKMRKGNRWLRQALVEAAWAASHTKGTSLRATYDRLKGRRGGKPG

SEQ ID NO: 356010 - protein, 329 aa, unidentified
MTTNPPQIVFNHIVAFEVSKEKLVVHTLPDNEQWTIDNKPQAVRRLIKAEIKRNRKKQLGQMLVICEATGGYERHVLDVALEMGLSVHRAHGTRVRHFGHYRGLLAKTDPIDARLIAQYGLKTENLRLYSPPPPDTAALRALHARRTEIQQMLIAETSRLDHAQHKSVLKSLKAHIASLKAALAAIEADIAQLVEGSEMLRKKVALMQTVIGIGPISAMVVLAYLPDIGQLTKGQAARLAGLAPINNDSGKKRGARHVEAGRTAIRRALYMAAGVAMRANPILKAFSDRLRGKGYPFKYVVTAVMRKLIVILNAVLRDGQSWKGAQMGA

SEQ ID NO: 356011 - protein, 418 aa, unidentified
MWGHFILSNGSFIGKPFKIVHSDPRSRDLAVAKIKEAQETYSLKSRCFLESTGIYHIPLLCFLRDKGFDCSVINPIITKNSTNINIRKLHNDKFDSKKAALVGLNVSLKTSIIPDDSVVDLRNLVRDYYYFKDLQSAVALKLTAELKVSFPAYAKVFSKVTTQSSLKLLSSYPLAEDMLAASKDDIVKIIRSTARFGEAYALRKYDTIIAAAQDAAVFGRALPSNAVRIRLYIDTYQEYQKHLDALLKALHETVDRLQDTLIYDQICLLQSLRGIGFLSAIVLIAEMGDFKLFSSPKKLYAYFGLDPAVKQSGKLNGDKVHMSKRGSSLARRVLHMVALNNVKVDKGSGTPVNPVVYDYYTRKCSGKKKTVAMGAVMHKICNIIFAMLRDNKPFEVITPEEHCRRFAAEHPDKIRKAA

SEQ ID NO: 356012 - protein, 453 aa, unidentified
MKKEKPKMGIVKMGNGLPVFNAFAAGIDIGDTLHCVAINDGKGGHEVKTTSAFTCDLYEIVDYCKCNGVTTVAMESTGVYWLVLYLLLEEAGIEPYLVNAKHAKNVTGRKKDDTDSIWLQKLHTCGLLQKSFQPDNEIRLLRSYTRQRKNLILLGSDSIRRMQKALELMNIKIHTVISDILGKTGMGMVKAIITGERNPEILCSLCDPRIKASREDIIKSLQGIWKEEYLFMLEQAVENYEFLQMQIKSCEEKIQQQLLKQVAIIKDGDITGLEETPPKKSKAKAKKNQFDFSLLPYLIAIAGVDLCQIPGISEVTALEYISEVGVDMRKWKSSKHFAAWLNLTPNTKISGGKIISSKMMKKNNKAGQLLRQAASCLITNKTAIGDYYRAMRARLGGKGAALATAHKLARIIYAMLLKKTEYNSGIIVDNQEKIKEEKIQKLEKQLARLKQAA

SEQ ID NO: 356013 - protein, 391 aa, unidentified
MSTYFVGIDISKYKHDCCIINAADQSIVAKFTIQNDKDGFNELLTSLQSLSTPDDIKIGFESTAHYALNLELFLEKAHHSFMEVNPVLISEYKKSTSLRRTKTDSIDCESIARWLMTVEYKPHSKGFYHAYSLKSLTRLRDRLIRQRSFYLVKITNVLDHTFPEFKPFFQERFSKTALYLLENYGSAEKMAHMNSASYDNLRRISRGKFTPQKFLELKALATNTVGVNNSIFDTELTCLLTLYKEAAKQISVLETQITGLIEEVHPHYMSIPGIGPLSAAVIYAEYGDISNFSSPAQMLAFAGLEPGISESGTESHKGRMIKRGSSQLRYTLMNCALPLIRFDMTFATYYAKKRSEGKPHRIAISHVTKKLVRVIFALERQNTDFVATALH

SEQ ID NO: 356014 - protein, 346 aa, unidentified
MNETTTIGLDVAKQVFQVHGVAVDGTVTVKRQLRRSEVIRFFDRLPRCRVGLEACGGAHFWARELTVLGHDVRLIPASYVKPYVKRGKTDAIDAEAICEAVSRPTMRFVPIKTVDCQAGVMLLKTRYLLVKQRTQSINSLRGHLSELGIIAARGTGKVETLIAIIRDKTDERIPAVARRALEMLAEQVEALVRRIATLENEIVSEVRRDDTMRRLATIPGVGPITAATIVALVPDPGAFNSGRHFAAWIGLTPKMHSTGGKERLGRISKMGNPVLRSLLVVGATAVSRHARRGATVSPWLTGLLARRPAKVAAIALANKMARVIWALLTKGGVFTRRPATAAQHAA

SEQ ID NO: 356015 - protein, 355 aa, unidentified
MDSVKYIGLDVHRDTISVAVVDQGGRLVMQSVIPTQASAILDCVSGIQGSLHVTLEEGTHSAWLYDLLVQRVKRLVVCNPRKNALLKSGSKSDAIDARKLAELLRAEMLSPVYHGENSALEVQHLARAYAMLTDDTTRTMMRLKAVFRSQAVVCTGRKLYGKRHHDDYLKELDQDGPRRRAEYLYQELDGLQKLRRQARHELIVACRKHPAAKWLQSVPFLGPLRTAVLIGRVKTPHRFRSKRQFWAYCGLALETRDSGEYCVVNGQVERRKRPVLVRGLNWNHNHELKNLFKGAATTASAGSGVFQQFYLGLLNKGMQPEMARLTLARKIAAITLKIWKKGEAFNPEHLKSQAA

SEQ ID NO: 356016 - protein, 350 aa, unidentified
MSHQELYVGLDVSLEKTSICVVDYQGATIWRGSCPTDAAAIADAIRAHAPSVARVGLETGQMSNWLTLALRRRGLPVICLDARHAKAALKLQLNKTDANDAWGLAQIVRTGWFREVAVKSMDAQQLRMLLVARSQIVGQRQAIANNIRGLMKTFGIVIARGAKGLFAVRVRQAGEGNHIVMAIVDPLLAAWQSLREQTAVFDRQIMARAKADPVARRFMTVPGVGVIVALAYAAVIDDPARFKHSSAVGAYLGLTPRRFQSGEIDVSGHISRCGDGLVRSYLFEAATVLLQRYCRPCALKSWGLALAKRIGMRRAKVALARKLAVIMHRMWVDQTDFHDRQVLDGQVLDA

SEQ ID NO: 356017 - protein, 338 aa, unidentified
MRTYAGIDLHSSNCYLAVIDEEQRRLFSKRLPNSLDHILSALQPFKEELSGVAVESTYNWYWLVDGLQEQGYRMHLANPSAIRQYEGLKHTDDQWDAFWLAQLLQLGILPQGYIYPKAERPTRDLLRRRLLFVRHRTAHILSLQSMLDRCGGRRLSANKIQQLSPSDAEALFLDTQLGFTARCQVEAIGFLTQQIRSIEKAILPKVKLRPEFVILLTIPGIGKILALTIMLEVGDIGRFAKAGNYASYCRCVKSQKISNAKKKGEGNRKNGNRYLSWAYVEAANFAVRYSPRAKAFHQRKCAKTKKVVAIKALANKLARASFYILRDQCAFDEKRLYG

SEQ ID NO: 356018 - protein, 411 aa, unidentified
MHNRQNYLYVGVDLHKEHHTAVIINCWQEKLGEIQFDNKPSAFSKFLLEVETYVSDGLSVVFGLEDVGGYGRALAKYLVDHEQVVKEVNPALSFLERKSHVTTQKSDSWDAECVARILVNKFNQLPDAKPNDLFWSIQQLVSRRNALVKAQSALKNQLHIQLNHHYPSYKKFFSELDGKTALAFWQQYPSSSCLEEANIKQLTAFLLDVSNNTCSVKKASDILKLVKEDGQIMKEYQETRDFLVRSIVREIEFKKKEMKYIERELKRLVNLLDYQLETMPGIELVTASALIAEIGDVRRFPNANKLARFAGIAPVYFGSGGKGKTHKSKQGNRALHALFYNLAVQQVQVAKGSKMPRNPVFHAYYQKKLKEGKTKGQALVCIMRRLVNIVYGMMKYKTAYELPVVEEKEVV

SEQ ID NO: 356019 - protein, 486 aa, unidentified
MPSPIADGKGQPSLTLHRYGVGVDCHSRFFQVCVLIPNGTEIVKIERHVPAVWPELHAAKEWILRTLKEHGIELSPSDLRYTCESTGQYHMPLCLAWRGRPAIINPSDTGHVRRKTDRLDAEKLAQHSLHGLWRESWMAPDEIQELRVLANQRSKLVAERSRLTNRINSDLLRFGHVVGQLGKINGPVVRALIEDFCANGSVAVHRDHFSETRIPAGVVRVFDQRWKRIDALDQEIKMIEDLCIKQADDLTWRIGEGRTASGRQLRANLESIPGVGPQTVITWLGEIGDITRFGSVNKLLAYGGLDPSDQISAGKVTGTKTRKGNARLHGALRNAARAMLAHAPSCKFATWARAYMGRHSRAGKSKAVHALARRIGKALYYCHLKNEPFDDAGYHALLNESNYPLCPVEEMGLSAGVVRILKGSGLRTSRQVVDAFYSDLGRRPGCGKVTVQAVATWINSYRNRSQERTRKPKGTEASGNPPPAEG

SEQ ID NO: 356020 - protein, 318 aa, unidentified
MDKDVYVGIDVSKTELVVAVRPSSESFTLAYHLAGLQQLVGRLGELKPKLMAVEATGGLQRQVVAALWTGGIAVAAVNPSWVRSYARGGGLLAKTDRIDARLLALFAQREQPVPRPPLDAETQALQELATRRDQLLEMRVAEQQRLKRSSAQVRKELRQHIAYLEGRITQIDDDIDKTVRRSEAWRRKSEVLRSFPGVGKVFCTTVLSKLPELGTLSGKAAAALVGIAPFPDDSGARRGRRVIRGGRFPVRSKLYMCALSAIRFNPLLKQFYERLLARGKLEKVALVAVMRRIIVILNAMLKTNTTWRQPCAVALDKN

SEQ ID NO: 356021 - protein, 333 aa, unidentified
MHRRQLTFEYLDTVSGELKRGRVVPADREHLRAWLARFAGLEDVHFALEGCTGWRYVAGELAAAGITPHLAEPADTAALRGRKRHAKTDKTDARHLRVHLLAGDLPECWIPPEHVLEARALARLYKDLLDERGAWHQRIAATLFHQGVPVTPSMSTAGGRAAVPAMDLSPAGRQAVDTGLRQIDRLTGELDPLRGQLGMLSRRQPGCAALRAAHFGIGAVTAVAIWAELGDVRRFTSSDDVVRHTGLDITVHSSDIKRPPGKLSRQGPQLLRWALYEAAKCAARPASPDYGYYTMARDRRTAGLATLSVARKLAPRCYHTLRELGEDALAPAA

SEQ ID NO: 356022 - protein, 416 aa, unidentified
MNAVGIDVSSRKSTVAVLRPLGEVVCLPFDVTHDIAGLASLVEKLKAIDGETRVVMEHTGRYYEAVAKALHEAGFFVCAVNPLLIKEYGANSLRRVKTDKADAVKIARYALDNWADLRDFTPMDAIRYDLKTLNRQFQLASKQRTASANNLIALLEQSFPGIRKCFDSPVRSDGTQKWVDFAHSFWHVDCVRKQPFPAFCERYRKWCKRHAYLFKLSNAEEVYALAKRAVVLTPKSKVVKVLVQEAANQLSSISRSVEVYRAEMDRLAAMLPEYPVVMAMYGVGKSYGPQLMAEIGDVRRFERKQALVAFAGIDPMPNQSGDKNVRSNKSSKRGSPYLRKTLFNVIRTYLQCAPQDEPVFQFLNRKRAEGKPFYVYMLAAANKFLRRYYAKLRDYFASLDTLQPVAPIPTILKATL

SEQ ID NO: 356023 - protein, 389 aa, unidentified
MVRYIGLDVHKAYIRGYEFRPHCSEGKQERHFRFPNTPVGWSQFISGLDPDVQIALEVTGSAFEIHDILAPHAAQVVVSNPVAMRRLGSGRHTDREDAVRLAHMLALGTLPVVWVPPHPVREVRRLLEVRERLGSYRRALTNQARAVLRRHGILLPKGPTALRQVTEAVVCKLPQEEQAILASVLSAARALEEQENALTAHIASRVVEEPAVHLLMTIPGVGMLTAATIWAKLGDPHRFPRPKQVARYAGLDPSVEQSGERDRRGRISRNGDRLLRRMLVEAAWAVARHDGGPLGDFYRRKAKQLGAKRALVALARKLLIVAWRMLCTGEIYRGIQQGTLRRKEVRLAKLLQQVPDWEEKLLNLLEGMGNNHGERRCRAEGVRGQLHSK

SEQ ID NO: 356024 - protein, 344 aa, unidentified
MEAQKLSVGIDISKDGFSVCAKAYGESPVVKTKGSRKFKSDLPGFTELEEWGLKRNPNKDSICFIMEATGVYYENLAYFLHEQGYNVYVVLPNKVKYYARSLNLKTKTDKVDAAMLAQMGIERKLTLWKPMCATYRILRDLCRERLSLLKEINRSSSQLHAMKYAHGKLDFVIEMKESQLAFYRKQVQEIEDEINRMIDTDPVLKAKLRNISQIKGLQRITIISIVCETNGFLLFNNIRQVISYAGLDIVMNESGNFKGKTRISKKGNSRIRHCLYMPALSATVHNPTIKPFYERIVEKNPTIKMKGVVAAMRKLLVQIYILWKYNKAYDVDYQWNKKEAKIAS

SEQ ID NO: 356025 - protein, 354 aa, unidentified
MNTTQVFEKRKIAVAIVIDLAKDHCDVVAYNADNKICFTKANWAYPHLMEWLANAQPAVVLMESCKGCHVRARDIADLGHDTRLVKGADVKALRNVCQKNDIRDADYIARLLYVPGTKFVFVKNQRQQSLQFLQNEYKSIQELRIQVGNQIHAGLEEFGCPGSKSKKFIQSRMMAHLEKNAEPISDEVMSSFLRRREMWLNLFEQEEEAKKRMEEIAKTDDDAQRIMTVPGVGAQTAVGMLVHIGGDIGRFKNSGQFAASIGLVPKQNSTGGNTTLNGITKCGPKRLRANLVQCGQVILMHADKLKGNFGDWVRKLRDSGKKRGVIVCAIAAKIARIVYRLMKDKVDYTPVPSR

SEQ ID NO: 356026 - protein, 355 aa, unidentified
MNQEKYIGMDVHQATISVAVRDSSGKLIMECILETKAATILEFIAGLRGTLSLTFEEGTSAAWLHDLLKPHVSHLVVCDPRRNALLKDGSKSDRIDARKLAELLHGNKLHAVYHGEHGLRTLKELGRSYLTITKDLTRVMSRIKALYRSWGIPCSGTTVYAPGHRAEWLAKIPEPGVRLRAERLYEQLDLLQPVRQGARRDLLVESHKHPAVKLLRQIPAIGPIRAALLVALLQTPHRFRSKRQLWAYSGFAVETHDSGEYRFVRGKPVRNRERITVRGLNQNHNHDLKNLFKGAAISASTRPGPLCDFYVALVEKGMRPTMARLTLARKMAAITLTIWKKGVEFDAKQLNRQAA

SEQ ID NO: 356027 - protein, 364 aa, unidentified
MSEDRRAVVVGLDVHKSSVRLAAVSGGELLRETTLGYDHAQLLAEVRAWPGARVCQEAGPTGFGLHRALVAAGVESVIVAPGLVPSRPSDRVKTDKRDARRLAGLHAAGLLTEIFIPTPEHEALRDLVRAREDARLDRMRARHRLGKFCLRHERTMPTTCWATTRRAWLGRQAFELPGQQQAFDDYLFAVDQVDRRIEGLERELDRLAAEGPHRELIARLRCMRAIDTLTAIGLVAEAGDFTRFKTAEQFMSFVGLVPSERSSGESRRQGSITKAGSAHARRLLVEASWNSRRRPTVGYELSRRQRGQDPQVLERAWRCQQRLHRRWSRMAGRGKPHQKIVVACARELAGFVWAIATDQPLRTR

SEQ ID NO: 356028 - protein, 344 aa, unidentified
MSEAARVYQLFVGVDIAATSFAASWMLARGVRERAVTFAQTPEGFAAFEERLQTLGVVPADTLVVLEATGSYWVALAVSLHTVGFAVSVINPAHAHNFARSLPRRAKTDALDAQVLVQFAAERQPACWTPPPQVYHELRQRLVARDGLLEMRQQVRNQRHALLQWPVVVPSVRAHLDQVIVELEAHLRTLDAEITQNLTEGAWAESATLLLGISGIGMVTTAWLLVGTLNFEGCASAEAAAAYAGLVPLAHESGTSVRGRALIGHGGHGRLRRALYLATLTAARFNPAIKAHYERLRAAGKPMKVARCAAARKLMHIAYAVVTKRQPFDANYQQRHQAPAVVTS

SEQ ID NO: 356029 - protein, 344 aa, unidentified
MTYYAGLDVSLRSTNICVIDDQGELIAEGKTDAEVSDIVRFLDDYRTQISEVGLEAGTLTQYLTYGLQFAGYDVVCMEARQVKAALSAMRNKTDKNDARGIAQLLRSGWYSRVHVKSIESHQVRALLSSRKAVLAKCIDLEQEIRGLFKVFGIKLPARLGHGAFDPKVRPLIEADEALSQSLLPVLDARLVLYRTFRELDNRTRHLANDDPICRRFMTTPGVGFITALTYKAGVDDPTRFRRSRTVGAHFGLTPSRFQSGEIDFDGHISRAGDADVRATLYVAANSILTRSSKWSSLKAWGMKLAKSRGHKKAVIAVARKLAVILHRMWIDGTQFRWSAEAARS

SEQ ID NO: 356030 - protein, 428 aa, unidentified
MNPSLNNDHTQNNYAVFIAIDWADQKHAYCLKVAGETKKETGTLEQKPEVIGPWVAKLRERFGGRAVAVAVEQSRGALIHALLAYDFIVLYPIHPTTVARFREAFKFSGAKSDPLDTDQILEILTQHLQLLKPLKPDTEQTRLLGRLVEDRRKAVDLRTSHIQALLAGLKEYFPQAIELCNGNLTSRLAADLLMKWPTLEAFQQAKPSTIKRFYYGHNIRSPQLIEKVLSLAASAKALTTDPAIVESGRPLSQMHAQLIQTLNPVIDDYEQRIEKVFHDHPEFPLFSNLPGAGAAMAPRLLSFFVTDRSRYQKAENAQTFCGISPVTKSSGKSRVVYFRRACPQFQRQTFHEFARLSVATCQWARNYVDYYTAKGKKYNTIIRALAFKWIRILFRCWKDRTPYDDNKYMEILKKRGSIFATLHLEQKT

SEQ ID NO: 356031 - protein, 376 aa, unidentified
MKQFIDIYVGLDVHKDTIAVAVVRGLRTKPSYFGEIPNTPAAITKLLKQLSPDGEVLNFCYEAGPCGYEVYHQLTRQGHSCDVVAPSLIPKMPGVRIKTDRRDAMSLAKLHADGSLTAVWVPDKEQEGIRDLSRAREDFKQTETKARQRLGAFLLRNGKVFTGKSKWTVAYWRWMETLTFETPTQHIVMQEYVEALKEASRRVLGMEKQILLAVRGWSLEPVLNSLLAMRGVNTITAVTLLAELGDITRFDNPKQLMSYLGLVPSEYSSGGKRQQGAITKTGNGHVRRVLIEAAWNYRFPARKSRTIEMRAEKTSERVQAIAWEGQKRLCGRYQKLLTSGKLKQKVCTAVAREMVGFVWAIACEASGRVHGSRATA

SEQ ID NO: 356032 - protein, 341 aa, unidentified
MGEYIGLDVSLKETAISVRRDGKRIWRGKCPSDPSLIAEVVRKHAPEPKRVVFETGPLSVWFYHALSAEGLPAICIDARHAKAALDMAPNKTDANDADGLAHLAEVGFYREVRVKGYDSMLVRTLVAARSRLVQITTELSNQIRGLMKTFGLVVPRGKGATFEAEVQRLLVGQDELARIILPMLEAWRSVRTRASALGRQLLACARQSAACQQLMSIPGVGAITATSFTAAIEDPANFKTSRSVGAWLGLTTRRYQSGEVDYDGHISRRGDAHLRGLLYEAATVILTRTHADSDLRRWGLMLRERIGFKRAAVAVARKLAVIMHAMLKSGEVFNRAVSAPA

SEQ ID NO: 356033 - protein, 404 aa, unidentified
MWYVGLDWADTHHDVDVLDEAGKHVGARRFSHSQEGLHDLKQFLLSFTSQPEELACILETNHGLLIAFLLSAGLPVYPVNPKTINGLRKVAGGKTDRIDARLLAKAGYFNLAELHRLEPDSPTVQELKMLTRDQDALVQMQTRLVNQLTACLKEYYLVALKLFSKLQQPSTLRFLQAYPTPQAAQRASVEEITATLRLGTFPNPAQAAASMVEELHHPQLVASEVTVRAKSRLMLSLVKQLLVVIEDLASYEKAIQTLFLTHKDHAIWSSLPRAGKRLAPRLLAEWGDDRTRYADANSVQELAGTAPVPYQSGNYAKAHKRFACVKPWRNDLYQFAWQSTLSEPWAASYYQRKLAEGKTHSMALRALANIWVRIMYRMWMSETCYQAETFEAAKLAHAPRQRAA

SEQ ID NO: 356034 - protein, 400 aa, unidentified
MISVGIDVSKEKSMVCILRPYGEVIASPYEITHTADSIIVLIERIRYLGNETRVVMEATGAYHFPLLSSLKQSNIFVSVINPLVMKKYASVAIRKGKTDKLDSVRIANYGIDNWFHLKDFQVLDAAYEELKILGRQYSHYVKMKVESKIALGNIIDRTMPGIKKLLPGNSDNLTKDKLSDFIREYWHYDNITKKTEAKFVSNYCQWAKKKGYHANEAKAKAIYAMAKAGIPTLSSSAASTKMLVLESVRVLGEVNQTLQTILAQMQMIATNMDEYEVVRSMPGVGDVLAPRLIAEIGNVKRFHSGSALIAYAGLDSPPYESGNFSGSKRKISKRGSSLLRKTGYEVMKCLKTVKPSNDAAVYQYIIKKESEGKPKKVAKIAGLNKFLRIYYARVMEVYQN

SEQ ID NO: 356035 - protein, 345 aa, unidentified
MKYFAGLDVSLEETAICVVDESGRVVKEGRAASEPQALSEALRKVDLPLERIGLEACSLAAWLHDGIRAEGLPAICIETRQANAAMKTMPNKTDRNDARALAQIMRTGWYRQVHVKSQQCRLWRSLLVARRTVLNEMRTIENVVRSILREAGIKLGTPSRAAFADRVRELIGADTVVMALVEPLLAIVATMLREFGRLTKQVLNIARKEQVCRRLMSAPGVGPITALAFRATIDQPDRFRRSRDVGAHLGLTPARYQSGETDIQGKVSRCGDELARTALYEAAHSLLVLSKKWSSLRAWGMNVARRRGMARARVAVARKLAVILHRMWSDATEFRFGKEAGPASA

SEQ ID NO: 356036 - protein, 446 aa, unidentified
MMAPVTIERVTEKAPNLSRRSHQMKNSTARKLKQVPKGYLVMGIDPHKKRHAAVAMTQDFTTHSKFKFNNSKEGFEVALERIRAEMVRTGSKGVIFAIETGGHYWRNLAYFLDERGIPFRFINQFTLKRRREGKDLNRRKNDYRDSEVAAQLLCTGEFTDTKLQHGIYAELRAAHNAYRRLVKERTRITNLIKGLLDGIFPEFTQVFKDPCGLTALSVLSICSMPGIIAQMMGEEFVNVIRAKHQGHLMRKKLRALHYAAQVSIGIEAGAWSVSSEISFLVEKHRLIKRQVRSIDETLARLVDETEEGKYLLSIIGLNYTSVAGLLAELGSFRSYQSAKQLIKMAGSNPTESESGGKRRAHTPMSKKGRPVLRYCAWTAVIPMLRFNPDFRTWAKNLRERPVHANPLNGREVVGAALNRLLRLAFALVKNHTFYQVPRLEIAPVVV

SEQ ID NO: 356037 - protein, 326 aa, unidentified
MKAFIGVDVSKKTLDVAAVVANKIVFQAQFGNNKKGIADLIAKAARKLKAYELVFGCEATGVYHELFAKMVHQAGFSVAVINPRLVHYELESMGRKTSTDRIDAQVIAYRLSKEQDGLWEPVDADQKLLRDLILRRDQILRTIKAEKSRLDRFPEGNRVRKSVKRIIKTLEKELAEIEKEIESTVESSAVLKERTDIARSVPGVGKLVAASFVAVVGDIGRFENAGQLTSFLGLCPKQKISGTSVNRSYLSRSGDGLFRRHLYMGAVSTLARNNVYHDYYDSLIGRGKCAKQALSAVMRKMARAVYAVLRDNEPFSMEKYGINPTT

SEQ ID NO: 356038 - protein, 357 aa, unidentified
MLIIGCDYHPGFQQIAYVDSETGELQERRLEHPEEAEKFYRELAAQGMKVRVGMEASGHARWFERLLAELNFEVWIGDAAEIHRKRERKQKTDRQDAQHILRLLLKDDFPRIWVPSWENRDVRQLLWHRHRMVQARTRLMNQLQAVALNEGLRCKKRLWPEAGRQQLEAFWLAPWASRRRQDLLELLDRLNPTIAELTQAIEREAEKCPEARRLQTHPGVGPLTALAFVLIIGKADRFRCGKQIASYLGLVPLEDSSGSRRRLGHITKQGNSLLRFLLVEAAQVTVRSDPGWRSKYHHLMMRRGRKIAKVAMARRLAVRMYWMMRKGWNYEQFKKFGSHAGQLVPGDGVKVEHRVID

SEQ ID NO: 356039 - protein, 385 aa, unidentified
MTDHSAAAATAFDHDSTLVLALELSGKGWEVGAVLPGVTRRARRGLAPRDLPGLLKQIERWKAEAQRAGRTIHRVVLTYEAGRDGFWIARHLLAHGIEVRIMHPASIPVERRGRRAKTDRIDLDMLLRTLLVWLRGEPRVCSMVCIPSEAEEDMRRPERERERLVGERIALENRIENLLCLHGVAGFKPRLKKAAERLAELRGYDGNKLPPRLLEELHRLMARHGVLSDQLRQIEAAREQATQLAEPDRATRKIQMLARLVGLGLATATGLTREVFCRAFADRRAIAGFVGLTGTPFNSGRTEREQGISKNGNPRVRRLLMQLAWRWLRFQPDSALSCWFAERTAGARGRIRKIMVVALARKLLVALWRYVETGELPAGVRLAAA

SEQ ID NO: 356040 - protein, 342 aa, unidentified
MEINTIGLDIAKNVFQVHGIDAAEKVVVRKQVRRGQVLAFFEALPPCLIGMEACATAHYWARELTRLGHRVRLMPAKDVKAYVKRNKNDAADAEAICEAVRRPTMRFVQIKSVEQQGRLMLHRARDLLMRQRTQVINALRAHLAELGIVAAQGREGIKELLKIIASEDDARLPVDAQASLIVLAAELQAMQTMIGSIDKRIMAQHRSSEASRRLESIPGIGVTGAAAITATVPDPKVFRSGRDFAAWIGLVPRQDSTGGKQKLGPISKRGDRYLRRILVVGACAVLRYARQQPQKYPWLTQLLSRKPFKVVAVALANKMARIAWALLAKGGTYRAPALTAAA

SEQ ID NO: 356041 - protein, 346 aa, unidentified
MNYVGIDIHKRYSVLVALDERGRELKRCRINGNTAFGFDQFFSGLDGKSKVVVEACWNWGRIYDLLGEIEQVEEVVLAHPLKTRLIADAQIKTDGLDAHGLATLLRGDLVARAYVPSKPTRQRKEVLRQRLYWARLRTRVRNRIHALIDRQGELSMPQCSDLFGRKGLNALNKLCLNEPDATLLREELALLELIQSQIKAQEARIVEFNSKDETTLRLQSIPGMGKILAAVAAVEIDCVERFSSAAKLCAYAGLVPRTHASGGRVYQGPLVKSRNKWLQWAFIEAAWVAIGCSAYFGGLYRQHRARGKNANIAITSIARRSAKSALHCSKKGEILLKLSPVAPQLD

SEQ ID NO: 356042 - protein, 456 aa, unidentified
MKIPQSTIRLLTGRLVKILLNREVSTMKSNTQNAKIEAITEKTLVLGIDVGSETHYARAFDYRGVEYSKKPFKFSNTEAGFVTFKAWVLDIKEKHGKDKVIPGMEPTGHYWFNLGKFLQDNEMKPVLVNPHHVKKSKELDDNHPTKNDRKDPKVIAGLVREGRYMIPYLPDGVYADLRTASNIRFQLQAELTRIQNRISRWFNIYFPEYKTVYGKPDAKSGILILKEAPLPEDILTLGIDGVNQIWRDAKLRAVGKARAKTLIEAAEHSVGSKEGAVSARMEIRMLLEDYESRNMRLQEVMVLIEELVKGIPMAEKLLEIKGVGIRTVSGFLAEVGDISRFNNPKELQKLAGLALVENSSGKHKGGTTISRRGRKRLRYLLFEAAMSLVAKNPEFRELHNYYTTRRRNPLKKMQSLMAVATKLIRVFYAMLTKGVDYDPKKMVSDIRRPEAYLQAA

SEQ ID NO: 356043 - protein, 328 aa, unidentified
MKTKGGADISARWFDICVIVKDEGRHRRFDSNKTGLQKCITWLESLGVTDLEIAIEPTGRYGDLVAEYFLRRKYRVLQVQPFLFHRYAESVDMRGKSDYKDAFALAQYCQERGSKLRDWRPKTELEWELRDTQLLLRSLTKRTVALQCQLQCKLRSGFVQKALRSELDRCEQQLDEALEYAKKLVEGHPVLAHDFQLLLTIPGVGEKSAMLLVTLIDFRAFRSSRSLACFLGLSKKKHESGTTVRGKEHISKRGSKLIRGALFMPARTARIHNPALREFSERMAAQGKHDWTIQMAAIRKLVTVAWAVVTRQAEFDRAYVNPHEGRPI

SEQ ID NO: 356044 - protein, 361 aa, unidentified
MTDGICFAGLDVHARKTAAAAVQLGSGEVFKAQLPGSAAAAIEWLQSLPGPVRAIYEAGPTGFGLARAARGAGVEVMVCSPGAIPRQPGDRIKTRDALKLARLHAAGQLRPVVVPAPELEALRDLVRAREDLRGDLMGARHRISKLLLRRGLVFDGPGQTWSARHLTWLSKVRFEQPLVELVFGEYLAHHEVLLARRDRLDGLLGEQSLQGSWAPLVARLRCLRGIDTLTAVGLVAEIGDVTAFKHPKQLASYLGLVPSEQSSGERRRQGSITKAGSSHARRLLVEAAWHYRRPPRVSLTLKRRQAGQPAAAIDAAWRAQIRLHRRWAHLDAARAKKRTTVAVAVARELACFVWEVAQQPD

SEQ ID NO: 356045 - protein, 369 aa, unidentified
MSSVAAPEGAIHLGMDTSKKTIMVATLMPGEQIPVTERIANQEAAVRRLIARLGDPSRLRACYEAGPGGYDLYWLLASMGVACDVVAPSLIPKGGSDKVKTDRRDACRQARLHRAGELTPVRVPARAEEAVRDLVRVRAGLLSDRKRAQQRLTAVLMRHGCIWCHGSYWTAAHRAWIAAQRFTEPALTAAIAHYRAALDTREAELAAIEAELGPWAHREPLAGPVARLGCYRGIAELGALTLASEITDWRRFPAARAFMSCTGLVPAEYSSGERTRRGHITKAGSEPVRTTLTEAAWACQHGPAIGATLRRRQAGAAPGTLARSWKAQRRLHARYRHLTSRGKAPGEAVTAVARELAGFAWAEMTADPA

SEQ ID NO: 356046 - protein, 418 aa, unidentified
MKVVFPTCCGVDVHKSFLVATIIKTQQDSLQPSYQKKRFSTFNSDLNRFADWLHENNCLDVCMESTGKYWVPVFNILEKRGIRVVIANPKWVKAVKGNKDDTKDSKWIGDLFRIGLVKSSFIPDKDIRILRELTRYRYKLTSMRSSEKNRFQNAFTVCNVALDSVVSDMFGKSATAITDYLTSDEDFDAQHCVSLLQRSLRKKADDVLQSIEGYEITAEQKTRIGIVRDHLHYIDALIARIDICINTMIDKYEGYIVLLRTIPGVDRSSAITILSEVGVDMTQFGSSKRLCCWAGLTPGNNESAGKKKSVRISRAGVYLKPALVQVAHAAVKDKLSPYYALKYERISKRRGKKRAIIAIARMILTAVFVMLSNLEEWNPVDLYRVDMPEHLKEKQLSKAVKQAIHFLKTQGLTVLDSA

SEQ ID NO: 356047 - protein, 421 aa, unidentified
MESQKIDYAALIGLDWGSEKHAICLKPADSIAVEHYTLEQKPETLHSWFMNLIARFDGRNLALAIEQTRGAVIHFLLGLASVHIFTINPKSLKNYRDAIHPSGAKDDPSDAKLLLQFLTLHQHSLKPWIPDKPEVRLLLRLVEFRRKMVGKRVRLTNELMQLLKEYFPAALDCAGNLDKVMACDFLSKWPTLEKLKKSHPETIRKFYREHGSRRRNVIENRLNQIRSALPLTTDAPVIEPSVFLVQSLAPQLRSVIDAIAQFDQRIGEIFEKNPDAELFSSFPGAGAALAPRLLAVMGSDRSRFSSSQEVAEYAGIAPVTERSGKKIWVHRRFACARFVKQSFHEFSAASILFCDWARCYYDQKKKEGKSHHSAIRALAYRWIRIIYRCWKDRIPYEEDKYMKVLRQRKPDWLQSSPLNEP

SEQ ID NO: 356048 - protein, 383 aa, unidentified
MKSVCGLDVHKDSVYLCILSEFGELIEKVFGVLTYQLEEMRDLMLHHHVVEVSMESTSVYWIPIWRVLSPHFKLNLANPYFIKQLPGRKSDVKDAQWIAECTMKELIRGSFVPPEIIQQLRQYDRRIFDLNEEIVRKLSKLDAVLQRCNIRLSNYVSNVDSKSYKAVVRAISQGITAPEELVRLIHGRIINHHGVDVITASLKGVVSLAEIDMISQLRDELDMAEAHKEKCQARMLEICEREFPEDLKRLQTIPGIKERAATSLIAEIGTDMNKFETANHLASWSGLKPRNDESNKKIKSRSITHGNVYLRKTIIECAWAASRTKDCFFSRFSYHQTQVRKKNKMKVLVAVARKMLIAVWHVLHDNTIYIDFTTDRKTSQTRG

SEQ ID NO: 356049 - protein, 400 aa, unidentified
MRFYTRQHRFYCGVDLHARSMYVCILDAEGTVLVSKDIAAEPAPFLELIAPYREDLAVAAECMFTWYWLADLCERERIVFVLGHALYMRAIHGGKAKNDRIDAHKIAALLRGGMMPQAYVYPREMRATRDLMRRRNYLMRKRAELLVHIQNTNSQYNLPAFGARIAKPHLRREVAGHFPEVAVRKSVELDVSLLDHYDRELPALERYIESAAHGHDPVALALVRTVPGLGEVLGLSIVYEIERIERFARVQEFLSYGRLVKPTKSSAGKVLGHSGAKIGNAHLKWAFSEAAVCFLRGNKRGQALRAKLAAKHGKGKSLSIIAARLARAVYFMLKRRAPFDEERFFAQSGSAGAKGSSPNVLTGATPKGARPAQSSTEVIVPSSTAGELGRKRMRPAAQPR

SEQ ID NO: 356050 - protein, 353 aa, unidentified
MNRDKYMGIDLHQATSVVVVLDSEGKQVLETIVASEAPAMIRLFQSLSGPLHVTFEETTQAAWLYEVTRAHVADVIVCDPRRNKLLSEGSKADKPDARKLAELLRAGMLRSVYHGHEGTRTLKELVRAYETLSTDCTRIMVRIKALYRGRGIRTPGRGVYPAAERQEWLKRLAQPGLRQRVELLYDELDHLRPLRKRAKQAMLMESRKHRAATLLQTIPELGAIRCALIVATVDNPHRFRTKHQFWSYIGLAVVTHMSSEYDIRDGRVVRKKKPLATRGLNRNCNRRLKEVFISSATGGAQTEPYHSYLQGLESRGVRPQMARLTLARHIAAIALRIWKKGETFDPTKLNWAK

SEQ ID NO: 356051 - protein, 355 aa, unidentified
MTSEKYIGLDVHQATISVAVMDAKGKVVMESILETKATTILEFLAGLRGTLSVTFEEGTWAAWLYDLLKPHVANLVVCNPRKNALLKHGNKSDKIDARKLADLLRLNDLEPVYHGETGVRMLRELARSYLTIVKDVSRVMNRLKAIYRSWAIPCAGRDVYYTRHRRAWLGKIPEAGTRRRAEQLYQQLDMLQPLRQQARRELLAESRKHTITAKLRQIPSLGPIRSALAVALIQTPHRFRTKRQLWTYSGLGLETRDSGEYHYVQGQLRRRKKQVSIRGLNKDHNHDLKGLFKAAATRASVQPGPFQDFYQRSLAKGIKPTMARLTLARKIAAITLTLWKKGENFDVAKLKSQAA

SEQ ID NO: 356052 - protein, 452 aa, unidentified
MEQGNKGLSRGDRNRNARLAALRAMAPRDHAILGIDLAQSRQAAVLADHDSRVIARWRPRCSPWKLGELLERALRKALAAGFAGITVACEPTGHRWMVIAQLAAERGIPMVCVQPLVVARAREAEDYTRGKSDDRDAVLIARLASQLHCYLPEQAGQEWARLRHLGVRRSRLIESATACRQQLRDLLEVAWPAVLAAAADPMESATWLACLQAALARCDGDLAAVRALGQDAFTAQARAELGAFGARRVCRRIAAGVYAALGDGAGVAAQRPGALERAFRVLGDWSVTRAELGDVSARMLQSLDAMGLLEVAGSIPGVSALQVAAILAEAGDPSRFATSRAMVKHAGLAPCENSSGNHAGETGISRRGRPALRLAAWRAVWGALRHNRVYAARHAELTGRAKDPLTDQQARAAIAAALIRQIHAIITRRVPWDADIAAGRRRPGQEVTAQAA

SEQ ID NO: 356053 - protein, 329 aa, unidentified
MQIVRIGLDVAKNVFEVHGVDAQDKVILQKTLRRDAVPQFFADLPPCIVGMDACSGSHYWAKVFADLGHEVRLISPQFVTPYVKSNKNDRNDAEAICEAIGRPSMRFVPPKSAEQLEIQAVHRIRQRLVSDRTRLVNQIRGLLAEHGVVVARDISRLRHALGQIAGGSDNNLGNMILELVRDVREELDELDHRIAAYNNRIRHLFRSNEMCQRIGKIEGIGPITATALVAAVGDRTCFRNGRQFAAWLGLVPKQRSSGGKSRLFGISKRGDPPFPNIRCKDRTNLFHQNRTVSWLTSKPRSCSRSSTVRSESGNRTHIMTARWIISGLL

SEQ ID NO: 356054 - protein, 613 aa, unidentified
MSLVMLGVDPHKQSHTATALVAGSHQQLATLRVPASPSGYRQLLGWARQFPQRRWAVENARGLGCHLTQWLLARGESVQDVRTTATARVRELSRGRGRKTDALDAAAAAGIAALQGDAAQLQPEDETVVLAVLEERRSNLVGQRTRSVNQLHALLRELIPGGAPRKLRADRAAALLRTVHPLTAADRARKQVAWDLVAEVRGLDRRLAMIGIRIQDSVAALGSRLPETVGVDPVIAGRLLGRTGRASRFPTAAHFASYTGAAPVEVASGERARHRLSRAGDRQLNHALHLIALVQVGTPGCAGTTTSGAHWPRARPPGKPCAASSAESPITSGESCAATNRPATTANPRRLDRQRRPRSVGVNSADAAWALAMHRSDRLVQLQQVSPVMAGDGLGGQAKARRPALLVDAQPVPPGHRGPPDQHQVGGAQRHEGRQQLRNWRPGKRRPRLLVIVDQRRPVPGQNDPCPEPIGDLGIPQMAQQFRHRPLPSRRSPGKRLPCERPGPLVDRRRGGGQHLHRVAGSQQCQQLPLIALGVGHRVGGDDALLHLASLAGPAPQPSGRMPCPPSRRHHRGPGDPAGQHAGGAVSPGRFSAFPTEGDTGGPRNSPSLTQHA

SEQ ID NO: 356055 - protein, 416 aa, unidentified
MSHILFVGIDVSSKNNVVCCLPEGDSAKPLSRFTVSNDEPGVLTLHERIFALMQKHNLSSIRFGLEATGCYSSHLARYLESVLSFSPCEHSVYVFNPSLIKVFKKSHFLDAPKNDRVDAWFIAAKLRSGHLPRAFTWSESLAALQRLCRTRFHVTQCLTRETNFLLTNLFLKFSSYSAGPFGKKTSATSLAVMEHFASVENIIDMSVDDLVAFVARCGKNRFENPQDVAQALQKAARSSYRLPKAMADAVNLAMASNIRIIRSLQEQAKSLQKAIEEHLATIPQTLTSVPGIGPIFAAGILSEIGDIQRFPNQMALAKYAGLAWTESQSGDFKGVESRLIKSGNRYLKYYFTEAAKSVQVHDTVFAQYFSLKAAEPAKYAEKRALALTARKLVRLVDYLLRTNRLYEPREVIRQHG

SEQ ID NO: 356056 - protein, 427 aa, unidentified
MNYTQNEKIMSINEGTLVIGIDIAKDVQYARAFDYRGIELSKVVSFENTADGFEIFEKWIKTLAKEKKKSSIVVGMEPTGHYWFNLGHFLKDIKVRIVLVNPYHVKRCKELDDNSQTKNDSKDPKTIAKLVIDGRYSEPYIPEGIYSDLRIAMDMRESISKNLNKVKNKVTQWLDKYFPEYNDVFSDWEGKAGLISLREFPTPEKVLSTGADKIVETWRKDIKRAVGIKRATKLVEAAKTSIGIRTGLRMAEKELEANLEQYELYLRQQEELEIEIEEMALQVPGVKEMITIKGVGIITAAGFIAEVGDIKRFVHPSQIQKLAGLNLIENSSGKHKGRTSISKRGRSRLRALLFRVIMPVVAKNNEFKVLHEHYTSRKENPLKKKQSLILLCCKLIRVIFTIVNKQVEYNPQKLIKDTGFNLELKVA

SEQ ID NO: 356057 - protein, 400 aa, unidentified
MKQSNATQPAIVERTVAQRVSAASNVHAAYIGLDVHKASISVAIAEAGRQAPEFRGEIPNEPQAIDKLVRQLSQRFDGQPLLFSYEAGPCGYGVYHQIQASGHDCEVVAPTLIPQRAGDRIKTDRRDAKMLARLSRSGELTPVWVPTPEQEAIRDLTRAREDMKAAELRARQRLNAFLLRHSKIYPGKSKWIPAHFRWLETVRFDTPVQQVVLQEYVDNVKDAQRRVAGLEKQMRAVLPNWSLAPVVEAVQAMRGVSLITAMTVLAELGDISRFDSPRQLMAYLGLVPSEHSSGGSRRQGGITKTGNGHVRRVLVEAAWSYRFPARKTRIIEQRAEKTSPTVQAIAWEAQKRLCGRYRRLAATGKAKQQVTTAVAREMAGFLWAIACEAMGKPHGSRATA

SEQ ID NO: 356058 - protein, 392 aa, unidentified
MTVVVGIDVAKDKHDCFIMSAEGEVLEDVFTIPNTLEGFNLLLSKIRVCTGNQDKIKVGFEATGHYSYNLSGFLLNNGLATYVLNPLQTNLYRKSLTLRKTKTDRVDARMIASMLLSDIGPKPYTDTAYHNEELKSLTRYRFDKVQDRAKLKSSVARLVCILFPELEKLVPTLHMASVYALLEEMPGAKQIASANLTHLKNLLSSASRGHYGRDKAVDIRNAAKASIGSRMPSKSLELQHMIRLIQELDREIEDIEAEIQKIMDDLDSPITTIPGVGPQMGAMILAEVGDFSNFDSPDKVLAYAGLSPSTYQSGQLKNCYPHMEKRGSRYLRYALFNATKYVCIWNPTFAAYLAKKRGEGKHYFVAISHAAKKLVRLIFALEKTRQAYRQAA

SEQ ID NO: 356059 - protein, 412 aa, unidentified
MSLSVPAASFFAGIDWAAETHAVCVLDSFGHVKAQFTIAHSAAGFASLIQRLAHLGDPAGTPVAIERPDGRLADALLDAGHPVVPVKPNAIKTWREGEVASGAKSDAGDALVIAEYLRLRQHRLRVAAPHSGQARALRTAVRTRSDLVEMRVAATNQLAALLDAHWPGAKAVFADVESPIALNFLTRYPTAASAARLGEKQMAAFCARHAYSGRRPAAELVARLRAAPAGTTDQALTQAVSDAVLAMVAVLRALASSIKALTRSVTMRLGEHPDGKIFTSLPRSGQINAAQMLAEWGDCREAYDSADAVAALAGLTPVTKESGKHRAVHFRWACSTRFRVAVTTFADNSRHASPWAAAVYAGATARGHEHQHAIRILARAWTRVIYRCWLDATPYDPERHGNATKLSRAIAA

SEQ ID NO: 356060 - protein, 347 aa, unidentified
MNFYNNTHPYYCGIDLHAKTLYVCIIDQEGNTCLHKEIVANPDKLQALLEPYIGNIVVGVECMHCWYWVSDFCEDLGVDFILGHALYMKAIHGGKAKNDRIDSFKIASLMRGGNFPLAYVYPKEMRATRDLLRRRMKIVRHGANLKAHVGNTTSQYNLPPNKVNLKNISAREQLRSTFPDPVVQRNIDLDMAVLECYAKELSKIEWFLEQQAKQHNPVHLHILKSVSGIGRILALTIIYEVGDIHRFESVQKFASYARLVKCKAESAGKSYGTQGNKIGNAHLKWAFSEAAVLYLRGNKKAQKYLQKLQKRMTKAKAISVLAHKLGRCVYFMMKNERVFDESRFLKG

SEQ ID NO: 356061 - protein, 410 aa, unidentified
MEVMFDRVAGLDVGKDSVTVCVRTPGPRGGRRSETRTFKTMFGSLRVMRDWLVEAGVSIAAMESTSTYWKPPFYCLEEVMVVWLLNAAHMKAVPGRKSDVRDAEWIAQLLEHGLLAPSFVPPPEIRRLRMLTRYRVQLMGDRRRDLVRLELMLEDASIKLSSVASSLKTVSARAILTAMINGESDPVRLADMAKGKMRRKIPDLAQALTGHFDANHARLARSMLRRLDLVEQALAELDAVIAEACQPWRHQIELLQTIPGVGPKVAETIVAETGADMTRFPTAAHLAAWAGVAPAMNESAGRQSPAGKRHGNKWLTAMLVEAAGSVGRMHGKNYLAAQHARLTRRRGMGRAQVAVAHSILVASYWMLKRDEPYHDLGADWHSRRSDEAHTRRLIAQLEHLGHTVIIDPAA

SEQ ID NO: 356062 - protein, 343 aa, unidentified
MQTITTIGLDIAKSVFQVHGVDAGGRVVIRRQLKRRHVLAFFQRLRPCLIGIEACASSHHWSRELQAVGHTVRLMPPVYVKPYVKRQKNDATDAEAICEAVARANMRFVPTKTPEQQSGLVLHRTRHLFVRQQTSVINVIRAHLAEFGIVAPVGRHGVEELLGIVADPSDKRVPEVARACLAALGAQLRVLKAQILEFDRMITAWHRSSETSRRLDDCPGVGPALATALVATVADPKAFRSGRNFSAWIGLVPKQHSSGGKDRLGSISKQGDRYLRSLFVAGALAVIRYAKIHGTKHRPWLTALLARRPTKVAAIALANKIARMAWAMMAKGERYKQPVALAA

SEQ ID NO: 356063 - protein, 340 aa, unidentified
MTVLMGLDQHRAQITGDWIDTDTGEVRRGRITPGDRDGVKRFLARFGDRDLEVALEATTGWRFVVEELRQVGAAVHLAEPAQAAALKGNKKRAKTDRADARHLRELLMAGRVPECWVAPDHLLDLRARVRLRHTLVDERGEWQQRIRAVLYHHGLPARPDLQLLRTEGRAWLTDAEVAPVAREQTTIALEIIDALDTRIAPLTKQLQAYARRQTGCQAVMGHYGIGPLTAVAVLAELGDCRRFSSSRQAVRYSGLDITVHASDQRRAPGHLSRQGPPTLRWALYEAAQVALRPGSPDRDYYLQAAARVGHNRACLAVARKLLKRCYHTLKDLGEDALAPA

SEQ ID NO: 356064 - protein, 360 aa, unidentified
MNTKHDTLPSFKNQDFFIGIDNHKNQWTFCIFSMNMLLKKFQCIDPSPSVLVKYMHKHYPDGNYYAAYESGFSGFWAARQLNDLGINCIVIHPSDIPSSQKERMNKNDRIDSRKIARSLSNGELIPIYIPEKISEEYRYLNRHRLKTIKDQTRLKNRIKGVLHQFGISIPLPYQERRWSGAFIQWLLTVKFDTEYAQFAYNDLVDQLIQIRTRITTHLKKMRTLAKEQTPFSTLIPSLLSVPGIGFITALTLATEIIDMNRFKTLEKLASFVGLVPSIQSSDEKEVNFGISPRRNKYLRTMLIEAAWKAVKIDPALTMKFNQLSRRMNRNKAIVRIAKILLNRIRYVWKNQKPYVLSVVN

SEQ ID NO: 356065 - protein, 343 aa, unidentified
MELYVGMDVSLKQTSICVVDGSGEIVSEGTVISEPPAIATFIKAKAGSAARIGLETGPTSTWLWHELRALGLPVICIDARHAKAALSMQINKSDRNDAVGLARIMQCGWYKEVQVKSLSCHEIRAVLSSRAQLVKAKLDIDNQIRGLLKNVGLVIGAGKGNVFRRRVEALVDEQGLLWEAVRPLLEVREMLRREIAGLYRKLVSLARNDADTRRSMTVPGIGPITALAFHTAIDEPSRFRRSRSVGAYLGLTPRRHASGEVDWSGRISKCGDAMLRTYLFEAAGVLLTRVPQWCKLKAWGHRLWKRIGFKKAKIAVARKLAVILHRMWRDGTDFQWSDKEAKA

SEQ ID NO: 356066 - protein, 430 aa, unidentified
MSNDFYLSVGIDVGADFSFMSIALPNQTFAGKPFKITHANPASLEKAVLTIKEAEESNSLKARIFLESTGIYHYPLFCYLRDKGFIVSIINPIITKSSTNINIRKVHNDKFDSKKLALIALKPDLKVSVIPSDLVLDLRNLSREYYNLMDCRSAYVNKLQGELRMAFPQYIGIFSKLTVETSLALLEKYAIPAAFLAAKKKAVIKLISSTARFGMTYAERQYQAIIAAAEAATGFGHALPSNDKLIKLYVSFIKKYDEEIDGILAAMHELVDTHPDETFVKQIHLIETFKGAGFLSAVTVMCEIGDFSVFKSPKQLFAYFGLDPAVKQSGKFNGTNIKMSKRGSPIARRVIHTMALVSIGRTRKGVANNSVLRDYYLSKCQSKPKMVALGAVMHKVCNIIFAILRDEKAFTVISPIQHKLNYLQSRCPAA

SEQ ID NO: 356067 - protein, 412 aa, unidentified
MKRIYQRCCGIDVHKATLTACVRVHGAGRKLSQEIRSFGTTGDELLSLHDWLMTHRVSHVAMEATGVYWKPVFYVLEQGFTLLLVNPADVQRMPGRKTDVSDAAWLAQLLENGLLRPSFIPPRAIRELRDLVRYRSELKHDHTRVANRLHKVLQDADLKLSSVMSDILGVSGRQILRQLAAGHSEPAALAELARGSLRAKRPALRQALTGRFSEHHAFLIGQALTELDNLEESMSALAARVEQHLVPFAQQIEQLTTIPGIKRVAAAVILSEIGTDMSCFPDTAHLASWAGMAPGNHESAGKRRRAKARHGNRWLRTILVECGHAAGRTRDTALAAIYRRMIIRAGRKHAAFVTGRHILNIAYHLLTKHDTYRELGPSYFEQRRAEQLKRRCLDQLRNLGFQATLAPLPTAA

SEQ ID NO: 356068 - protein, 421 aa, unidentified
MKFKVQDKQNQLIENITVSHLVIGVDIAQEVHVARAVSFRGIALGAPLEFENHREGFKLFERWVQDLIKTHNLSHIIVGMEPTGHYWFSLARWLVEQGIEAVLVNPHLVKKNKENRDNTPSKSDRKDALVIADMIKNGYYSPVRFHPEAYEELRILMANRETVTKRLNSAVNQIHRWVDIVFPELRQVFKILTCTSAIATLRLFPLPSDISQLSTEQVLSGWKQYVKRHAGVKRAELLITLAKSSVGATQALHAYKLHLGHLLEEYDLAQRQLEQIEHELNGILNRIPYAKKLLEIRGVSATCLAGVLGETGDLSGYSHGNALLRHAGLNLAEASSGKWRGKMVLSKRGRPRLRHFLYLMTMCMVMTNPEIQALHRNNVEEKKLKKMKSIMKLCSKVARLLVGLAKSSESYDSTRVFPQAA

SEQ ID NO: 356069 - protein, 389 aa, unidentified
MALTSSEIHVSLDIGSKQHNVAIGLSSGELLDEFEMLHQSSGFSEFFQRIKAQEDKFKLPVAIAMEGYNGWARPLDKLVLEKGYKLLNINNLKLARFKEIFPSPAKTDYIDARKGLELFQLSSHLPLIKGALQEVPHQPKTNEILKRLTRRRRRFVNEKIRYMSTLQVDLQAVCPGLLTMTKDAENMWFLRLLGSVKHLTKLATLKETALLKIKGVGKKFAQKIQDWQPTAFFSHDIEWVSDMILEDVQHILNLKEKIKALDTDILNHSNNSDIASYLNSIPGFGATSCAELAGEIGTIDRFNKESSLAIYLGMAPLDNSSGKFNGAKQPKHVNTRGKSAMMCAVDHHRKGSVRSDTYYQKKRAEGKKHNQAVRALGRQMIKVIFKMLR

SEQ ID NO: 356070 - protein, 343 aa, unidentified
MNSTTIAVDVAKAVLEVAVSEHAGQVRERHRFSRERFRRYLGEQPPATILMEACGSAHYWGREAQTRGHRVVLLPPHAVRPYVVRNKTDRTDAKALLEATRNDEVRPVPVKSETQQALAALHRLRSTWLATRTARINTVRGLLREFGVVIPIGARHVVPALGLLEDADGGVPSLLRPALAEAAREIRELEGRIRTVEHQLDAVAEQTPVVSRLCSIPGVGLLTATVLVAAVGDVQRFPSGRHFASYLGLTPRERSTGQHRHLGAISKRGDAYLRMLLIHGARAVLCHAKTKTAPTPDRLRAWALHLERFRGHNKAAVALANKLARIAWAVWKYDTDFTAAPTA

SEQ ID NO: 356071 - protein, 341 aa, unidentified
MSEIMTVGIDLAKSVFQLHGVDERGVVKLRKRVRRAELLRTVAQLPTCTIGLEACSASQYWSRQFTRLGHQVPLMSPQFVKPYVKSQKNDQADAEAICEAVQRPNMRFVLPKSLEQQDLQCAHRVRQGLVSERTALINRMRGLLAEYGLVIARRPATVRREVPQLLGDARNELTPVMRELIADLHEHFVQIEQRIARVEDLIDRLGSTQEIVTRLRTVPGIGRLTATALFAAVGDAKAFRNGRQMAACLGLIPRQDSSGGRSRLLGITKRGDKYLRFLLVHGARCIATLATRKPSEANGWINGVLERRGKQRAYLAQANKMARVAWAVMTSGQNYRLPATV

SEQ ID NO: 356072 - protein, 406 aa, unidentified
MRTVIGIDVSKNKANIAVVKDLVVIQELVISLDVLGFNELKHVVLQFGSNPEIVFEATGVYSRRLEYFLQQEHLGYHILNPLVAKNRIATGSRLRKNDKRDARRLAITEFTEHLNPYLLAYKQDPIYRELTDMNRYYDQLNEDKKRARNRAHRVLQLVFASFVAPKGGFDFDTKLAWEILTLFPHAQIVREIGDLNELEEQILDANFKGVGPKRAHDSARKLWKLAAQNGDAVPVTSDNTRQMKELAEHVLALEAAQNRQVLRMTDLGKSLPEYELLQTIPGIGGSTAIRLISELGDMRRFHTRQQLNSYVGIDTTEVDSGDHHSARHITKHGNPHARRILYWTVILMVNPKMNDNHIRDAYQKRREATSSKKKLIVRQMDRLIKTILYLIKTNQPYSYELAPQSK

SEQ ID NO: 356073 - protein, 321 aa, unidentified
MTKYKEIYGVDISKDVFDVFGSLNGHFQFKNTESGFVAFAKALPENVLVVMEATGYYHYRLAQFLDKDGIAVSVVNPLSVKRFIQMKLAKVKTDKSDAKAICEYGSINEVPLYSALTDVQAECLQLFRLLDSYLKKSTATKNKMHGETVLGIPSPFVFRSLRRDLKHLKKEIKGIEDRLLKLVKADQQEQLTLLKSIPGMGVKTALFLIVATDGFSKFERAGQLCSYVGITPTIRESGSSVRGRSRISKVGNKKLRNLLFLCAFSACKYNKACKEIYERIVAKGKSKKLALIAVANKLLKQAFAIAKSGRPYDENYRSTLA

SEQ ID NO: 356074 - protein, 387 aa, unidentified
MQKPHDNSKASPAAFMQDNTLIAVIELSLSNWLVAGLIPGVSREPLKKLEPNPEDLLKLLHGWRDEAIKAGRPITRIAVAYETGRDSFWLARWLRERGIDAHVIHATSVTVSREHRRAKTDRLDTAMLKRGFLGWLRGERGHCTVAIVPTMEEEDAKRPHREREGLVHEQTRAVNRMKSALIQFGVRNFNPKLRKASVKLETVRTPEGKSLPPNTIAALRRDMERLKIIKEQIKAIEQARLQQFEQKPEALANRMVYLLVRIYGLGLETADLLAHELLSRTLRDRKAVARYAGLTGSPDESGSKRREKGLSRSGNARVRKIMIQLAWRMVKFQPDSALVQWFKQRTESTKGSRKPMIVALARKLIIALWRYANDGVIPEGFRLHSAA

SEQ ID NO: 356075 - protein, 423 aa, unidentified
MMKLKYSICCGLDVHKNVIVATIVITNADGISEYKQKSFSTFNSDIRKFHSWLIENNCYHVCMESTGKYWIPIFNYLENDIEVCLTHPKYVKAIKGKKTDKKDSKWIADLYKFDLVRCSFIPPKEFRQLREIARYRFKLVCMKSSEKNRIQNCMTVSNVGIAGVLSDPFGKTATEIMSYLLTHSSDSIDERAVRKLIKKGAKAKSNEIIEAIKGYNIESDQVKKLELAYSHLEYLDGMIAQSEVELYVRMKPYYKFVELVSTMPGMTELSSTIVLAETGVDMGIFDDAKHLCSWCGLSPTNNESAGKKKSVRISKAGDYLKPVMVQCALAAIKSKKQPYFAIKYGRVKKRRGHKKAIIAIARMMIVCIYHMVSEEKPFNPIDYEELMSPKNQIERVILNENNVFDYLESLGYDSSKLVKRNDN

SEQ ID NO: 356076 - protein, 395 aa, unidentified
MPQSNDLSRSLAALNQDSTLIAVIEMSQSSWLVGGIVPGVNRQPLKKLAAAEGELLRLLHRWRGEATQAGRTINRIAVAYEAGRDGFWLARWLRRQGIEAHVIHPTSVAVSREHRRAKTDRLDTELLKRAFLGWLRGERGHCSMALIPTPEEEDAKRPNRERAGLVGERTRMVNRIKSALARLGIRGFKPTLRRAPERLAGLLTPEGGPLPPNTLAELRRDMARLRFVVDQIREIEAARRQRLEQHPEQGSHAMVRVLAQVIGVGIETADMLVHEILSRTLRDRRAVARYAGLTGASDESGARRREKGLARPAPGSEQGAGNARVRRGMIQLAWRFLMFQKDSALAQWYRARTADARGTTRKTMIVALARKLLIALWRLVTTGEVPPGVVLRATA

SEQ ID NO: 356077 - protein, 428 aa, unidentified
MKYNTQNAKIASITEKTLIVGIDVGSETYFARAFDWRNYEFTKKPFEFSNNEAGFLSFKAWVENLLEKNGKSVVIPGMEPTGHYWFALGKFLQDNGMRPVHVNPHHVKKSKELDDNNPNKNDRKDPKTIASLVNEGRFSYPYIPTGVYAEIRSLSNMRFQAQEELTRAKNRIARWFSIYFPEYKDVYRDFKAVSGRIVLQAAPLPEDIRKLGVEGVNRIWRGAKLRGAGMKRAKTLVSAAEHSIGSKEAPEAARIELRNLLNDMDVYASRVEELLGMIEEKLKEIPYIDKLMAIKGVGLLTVSGFIAEAGDIRRFEDPKQLQKLAGYAIVANESGKHKGESRISYRGRKRLRYVLYEAALSLIGKNAEFKEIHEYYRTRKENPLKKMQSVVAVACKVIRIFYVILTKGVDYDPEKMMGDIRRPQIQAA

SEQ ID NO: 356078 - protein, 368 aa, unidentified
MNDCIYVGLDVHVQTVSMATAGWDEEPVFVGTFPNKPAKILEHLAALGDPAALRVCYEAGPTGYGLARMLLAHHIACTVVAPSLIPITPGRQVKTDRIDALKLARLLRSGDLTAVVIPTPELEAVRAVSRAREAIRRDTHRAMMRLVTFLRQRAIGEPTGTRWTKKWWRWLDELALPYQADQIVLTQLAAQIRFLGTQNASLVTALETTAGASASFGAGIDALQRMHGVGLITATGIVAELGDLTRFATAPQLFAYAGLVPREHSSGGRQKQGAITKTGNKHVRYLLVEAAWRIVRPFKPDTLTADDPIGQIAATARRRLHKRFWRLIAKGKNRNQAIVAIARELLGFLWSMACTVAAAPAAPAALAA

SEQ ID NO: 356079 - protein, 411 aa, unidentified
MKLFVGLDVSSFDIKVCFLDGEGEKLKSFTIENDLPGATQLRDTILDTVKGQSVDVLRIGLESTSVYSFHPSMFLHNDEFMRGLGAKVFVMNPKQIANFKKSYSDMDKTDEIDAFIIADYLRFGRLPMSIVKEEQYVALQQLTRARYQLIRQVAQEKQRFLQHLSFKCNTFTEEVESSVFGKAMMDLFLERYSLEELAQMSLDELAAYLRSKGKNRFNDSEQVAKSIQKAVRSSYRLDKVMEDSIDTILATSITVIQTFQRQIKEIDKSITRIMAGLQQTLQTVPGLGPVFTAGIIAEIGQIERFEDETKIAKYAGLYWRKKQSGRFTAEDTSMTRNGNQYLRYYLVEAANSIRRRVPEYGAYYTKKYKEVPKHQHKRALALTARKLVRLVDALLRKNQIYTPKGALIHEA

SEQ ID NO: 356080 - protein, 341 aa, unidentified
MHITTIGLDIAKNVFQVHGIDEAEKVVISKQLRRGQVLKFFASLRPCLVGMEACASAHYWARELTKLGHEVRLMPAKDVKAYVKRNKNDAKDAEATCEAVRRPTMRFVGAKSAEQQGRLMQHRTRDLLMRQRTQVINALRAHLAELGIVAAQGREGLKQLLAIIADEKDARLPIDARASLVVLAAQLQALQTMIGLIERRLLVQHRANEASKRLESVPGIGLIGASAIAATVADPNAFRSGRDFAAWIGLVPRQDSTGGKQKFGPISKQGDRYLRRILVVGAHSVLQRAKKNPEKYPWLTQLLARRPFKVVAIALANKMARVAWALLARGGSYRVPALAAA

SEQ ID NO: 356081 - protein, 458 aa, unidentified
MSNRSARRLSRGDRRRNERLARLRAVITRESAVLAFDLADDKQVCALCDQDSQVLARRTLRAKAWQLSEAVAWGLARAAEAGFTSVVVASEPTGHRWRVLDQIAAEHGVQLVCVQPLLVARAREAEDFTRNKNDDSDATIIARLVTELRCYLPERAEPAWARLRHLGARRIDLVLAAGTARHQLRDLLECAWPAVWRAAVEPLESASWRAALTVVLDRVADTGDLSVIRRSGWSRFAAAVRRELPRHGTSRWHSPIVRAVFDAATDPAQAGVGVLEQRAGALERVRFALDDLAHARAELAVVEARMVAVLDALGLTELVTSIRGLSAVGAAAILAETGDPRRFSHARALVKHAGLCPRDNASGSYQGRTGISGRGRAQLRMAAWRAVWAALHHNPVLAARYAHLTGRPDRPLTDAQARVAVAGSLLRQLHAVITTGTAWDPAIAAGTIGAGEEAASAA

SEQ ID NO: 356082 - protein, 353 aa, unidentified
MWIIGCDFHPRYQQIAALNLDTDELVERRLSHEGKEAAAFYEALPRGALIGMEATCTAQWFERLLERCGHTLRVGDAAQIRASVVRKQKTDTRDALHILDLLLTDRFPSVWIPTPAERDARQLLLHRHTLVRWRTAVQNQLHALARNQGLLPHTSFWTRTGRQQLESLALDPWAHRRRQDLLCQLDHLNSQIDELTEQVRQQARQRTDTAELMQQPGVGPIVSLAFVLTLGTAKRFPRGKQVASYLGLNPAEHSSGGKQRLGHISKQGNRMMRWLLVEAAYVAVRKDPELKRIYQRLAFRRGRKIAAVAVARKLAVKLYWRLREVQEQRTAPPAPMQGCPGSGLVKAVSSPSV

SEQ ID NO: 356083 - protein, 323 aa, unidentified
MKCIQKSIGIDVSKLKLDIFIKGQTDGNCAISKEVPNSPAGFRVIRDLAIKYGATVCCEPTGGYEHWLVEYMLKAKIPVAYTPGHLVRYYAKSQGKHYKNDKIDSKMIAEYAEHSELRLITPKDALVDRLCRKMRLYNSFIESCRKLSGLLESEYDSDSKKLLAHELKHSRQVAAKLLAECEEIVKSNPQLDNLVSRICMIKGVAMLTAISVISELPEIGRLPDSKLFAMAGLAPLEKQSGNMEWQRKIYGGRKRVRNTLYMSAISGIAYNPIFRAYYRKKRDEGHPAKWCIVPVMRKLLSLMNTIARKPEFTPIAMPRVKNR

SEQ ID NO: 356084 - protein, 352 aa, unidentified
MKKPQQHEVILGVDTHLDKHVGVAIDGFGKYLDTLSIETTPTGYQQLLRWVQSFGSIRRAGVEGTGTYGAGLARFLTEQNVEVFEINRPDRSMRRFRGKSDPTDAESAARTVLSGNACAIPKSQSGAAEAMRITSVARRSAVKARTQAINQLRGLLISSPDKIRAKLWKSKPAECVEACAKLRTLGESSWMINLATTLRLLAKRWLYLTEELKELDKALDNLTADAAKRMRKQFGVGPQTAAILLAVAGDNPERIRSEAALASLCGVNPLEASSGKTARHRLNRGGNRAANNALWTIAMVRMRSDPRTKLYVARRTAEGKSSKEIHRCLKRYIVRELYPLILADLNDSRAAA

SEQ ID NO: 356085 - protein, 346 aa, unidentified
MEHPTTIAVDLAKSVFEVAVSTEPGRVCQRRRLTRGQMASFFANRPPATVLMEACGTAHFWGRQIASFGHRVLLLPAQHVCRYRLRDKTDAADALALLEAHRNEKIVPVPVKDPAQQAISSLHRIRSGWIATRTARLNAVRGLLRELGINIPLGAKLVLPRLSEALSQSEGSIPETLHPVLLAAAAEIRSHEQNIKDVDRQLEMLSRSLPAAASLRSVPGIGLLTSTALIASVGDPSRFRNGRRLASFLGLVPREHSSGSSRRLGAITKRGDSYLRTLLTHGARAVLWAAKHDQNPDALRRWALTLQKRRGHNRATIALANKLARIAWAVWSKNTVYQPRTTEAIS

SEQ ID NO: 356086 - protein, 470 aa, unidentified
MRIIGLDLAITGPHKAIVMDETGRYVGPVFKLRTWPTELAGLLEQARQATGPDEPVVVIMEPTGHAWLPVASYLGRQAGVTVYLVNTQQVADLRRYYQKHAKSDRIDSRVLTKIWLVSPEKLHRLALPPGAMLSLKQACKHLDYLTGQVTALQNQVTALDRTIWLGGWAGLVFKQAFSPTARWARTHYYDPSLVLQTGAQAIEQHWHQTGLAQTEPSQWPTFLVNLAQQVIAIYGDPAPYVDFAAWQAEVGLKLEALAFLEAQRDQLRLQVVRPLYRRLHPSRQLETLRGVGQDSAAVLLSFVGDPQRFASQRPFRGWSGLVPRSAQSGQSESKGLRISQAGPNLLKKFAFLDANVARLWDPQLAKIYYDQMVYKGRHHTQAVCAVATHLLDRVLVILKHQRPYQLRDVDGSPVSQAQARQIVIERYTVPDEVRQRNNRRTRQARADKRAEQKLARRQPKQGKSASLVRG

SEQ ID NO: 356087 - protein, 371 aa, unidentified
MKETITSYVGLDIHKDSIAVAVAEAGRSAPRFVGTTPPDLATLCKALTRCSKRSTTLVVYEAGPCGYGWARHLNAHGWRCEVISPAHITRKAAEKRIKTDRLDAVLLARESRAGNLVKVAMPDTRDEAIRDLSRAREDACAARLRARLQLKAMLLRLGRAYYGKTSWTAAHERHLAGVHFDHSAQQIAFDEYRQAVKDAHERVERLTQALREQCEQWRMKGVVNALMCLRGLDFTAAASFIAELGDLRRFAHPKALMKYLGLIPSEFSSGNTRRQGGSITKTGNKHARRILIEAAWTYRFNPRVSRPIQVRQEGQPKAIRDIAWRAQLRLAYRFRKLNAGRKMTQNKCCVAVARELAGFIWDIARQVKIPA

SEQ ID NO: 356088 - protein, 399 aa, unidentified
MVSIGIDVSKGKSSICFLKLHGEVLHKPFEVEHTESSLSHLVNLISLIGQDVRVVMEATGIYHLPVLDYLKSNNIFVSVVNPLIMHKYASLSIRRGKTDPLDAIRIANFGLDNWFKLTNYSPNEEIYDELKLLNRHYLNYISMRIKAKLTLTNLLDRTMPGIKTLLLNRSTEPDRDKLCDFVRKYWHFDNITKMSENAFIKSYNIWAKKKGYQTSEDKAHKIYTLASDGIPTLTSSLPSTKMLTLEAIESLHHIDTTIANILLQMKQLASTLKEYDVVMAMPGVGQILGPRIISEIGDATRFHSAKALVAYAGLDAPPFQSGNFIATKRSISKRGSASLRKTGYEIMKCLKTAKPKQDSAVYDFMIKKELEGKPLKVAKIAALNKFLHIYYARVKELYQ

SEQ ID NO: 356089 - protein, 429 aa, unidentified
MDEVDDVELLVQRVAALDLGKAVLEACVRVPHPQRPGRRMQELRGYGTATAQLLEMVGWLRHWHVQRVVMESTSTYWKGVYYLLEAEGFDCWLVNAREVKNVPGRAKTDRADAVWLAKVAERGMCRPSLVQPPEIRRLRDLTRYRRALVQDRTREQQRVEKLLEDAQIKISSVLSDLHGVSGRVMMDALIAGERDPRTLARLAKSGARKKTDQLEEALRGFFTDHHATILKMMLDNSDRISAQIAALDARIEEAIGPFSDQADRLADIPGVNSVTAAELIAEIGVDMTRFPSAAHLVSWAKFCPQTHQSAGKSMNKGRGKGNPWLAGTLGRIAFAHSRADTFLGVRYRRLARRRGKQKAIVATGNSVLTVVYHLLSDPDARFCELGSGYYESRINKHRRTRDLATQLQALTGQHITIRDGKAVITDTAA

SEQ ID NO: 356090 - protein, 356 aa, unidentified
MNEITTVGADLAKEVIVVCAGDSQGRTQYFKQLSFEGFARWAATLPACTFGMEACSTAHHWARFLASHGHSPRLMAPEFVVPFRKSQGAKNDRNDAQAILTAVRQPDMRFVSVKSIEQQAMLAWHRSRSGFIVDRTALLNRVRGLLAEFGVWVGRSSSVLLRQLPQLSEDPRLPELFRPMLSSTLEHLRRLEQCIADCDTRNHAHVRHSESAKRLRDVTGVGELTASALLATISDARDFKNGRQLAAWAGLVPRQNSSGGKQRLGQITKRGDSYLRGLLTQGARSTLQVALKREPLRRSRLEQWIVSLHGRVGYHKSLVAIANKHLRILWAILAHGESYDPNAWRRHTPQRSAVAA

SEQ ID NO: 356091 - protein, 424 aa, unidentified
MHKLKAKHMKNWKDLTHYAGFDWAKDHHAIVIVNAEGRIVADFEFAHSLEGWKSFAEETSAWPNLAVAIETSQGAAVDQLLQREYIVYPVHPVSAQSYRERKAPSGTKTDHLDAWGLADALRVDGHGWKPLQPMDPLTQQLRLLCRDEVGLIEQRTALVNQLQQALAEYYPTALEAFDDWTDAFTWEFVLAFPAPRALVEAGKRRWEKFLHTHKLWRPETAEKRLKLFAQADQFKASEPIVRAKSQLAVSLCKLLCTLGQQLKLYRKQIEALFREHPDHDLFGSLPGAKKVLAPRLLGAVGNDPSRYGDHEVLQCIAGTAPVSYQSGKINKVRIRWSCDKFMRHTVHLWADCFRKASAWGQAYYLKKRDEGMSHACALRCLGQRLLKILFRMLKERTPYDAELHARNQQKHGSWVIKLVNESSA

SEQ ID NO: 356092 - protein, 437 aa, unidentified
MTSPCQFYDYKFQEVILLSFKIFRKNCCGLDVHKTWIYACIGITDANGRTDYKQARFSSFSKGLKELCDWLAKYNCSEVCMESTGKYWIPVFNILEKADNSIILAHPKYTKPQKGTKTDRKDAKWICDLFMCDMIKPSFIPPADIRHLRDLVRYRFKLTCMVTGEKNRAQNCLTISNLKLDDVFSDVFGKSSRSITEHMLTHPGELFDVTPFVDGRCKTPVEEIQAAVDGAISPEQAIKLRQCLDHIDELDKHLEEIEREILRLSDKYQAALDLIRTVPGFDKNPITAIQILSEIGGDMSVFPTAKHLVSWAGCCPRNDQSNKKIKSTRISRAGTYFKPILVQVANALLRSKKHPEITNRYKRIKAHRGHKKAIIAICRMLLTAIWHILSDLKPYTAEGFLESRPVNESKVLTTSQALNLLKQRGYIIKDDVIPTMN

SEQ ID NO: 356093 - protein, 451 aa, unidentified
MEGSFAGVDWASEKHDVVVQNAAGEELLAASFAHDEAGLRSLCRQLVRLKVELVAIERPDGVLVERLLDAGLGVLALHPNQVTAARPRFRVSGGKSDGFDAFVLCELARTDHRRFRVLEPDSDQTKALRALCRGREDLVRTRTALSNQLRAELERFWPGAVKIFRSLDSPIALAFLEKYPSPIEARALGEQRLAAFLRHQHYSGGKTPAELLRKLRSAPEGRAGEVEIHTRRQLVLALVALLRPLVAQVKQLERQIAQALAEHPDGELFRPLFRDPKSAITAAELVSKIGDCRARYPSGDALAGDAGQAAVAIESGKRKVARYRWACNKRLRDAVCTLADSTRHWHPWAADHYARAIARGHDHPRAIRGLGRAWCRVLWRCWQDRTPYDPARHRALQQHCTVTVPTPSGPRPDTAATQRMLGAAVTPQGRAEGTSAKRLTASRHPLPRPGG

SEQ ID NO: 356094 - protein, 444 aa, unidentified
MSRKQRKHIRGKRGEAFLQIVRGIDRARILCVSLDVSKYFHLVMMHNAYGEIVTPSFEIDIFRSSFEHLCHVINETAAGIEAEVVLIGMEPTGHYFENIARHLHARYEHVYLVNSLAVKENRRQKMMHYEKTDEEDAAAIGDLLCRGEGTPYRPVQGIYLEMQHIDRVRIAKLKMRSALKNQIIGHLDRIFPGMIISDKEAQQRHPPLFTTPFWACQMAQHLVRVCPDPRRLSQMTPHALIDAFHEQGYRMGPRWAAKIIAFAQQTLHPDPEIIAVRNPLLQRDLALLEQVEGHINQLEERLCALLSLTPGYIWTRLKGISSIQVASLVAAMGDPAHYDYAAQVFRRSGLVSGRNDSGTRQRKGKGKHVTKVGDVYLRRALINLVETLSLHQPILADYRSRLKGVKPHPGVARVATVRKANGILFAIQRDQRINDLRIKEEPPM

SEQ ID NO: 356095 - protein, 367 aa, unidentified
MRTMAHVGMDVHKVETRVALLPEGEADFLDQCRLETSAKALREYLHRWADRFELRCYYEAGPLGYTPYRWLTQAGIACEMIAPTLTPRAPGDRRKTDVRDARVLARQARAGGLVAVHVPTPEEEALRTLVRYRAVCQQELLAAKHRVLKLLGVRGRYYLEGKQWTQAHWRWLRSQSLPETYAEWVLEQYRAEVCYRQERLTEADRQLVEVSQSAAYAGRVGRLCCFRGIAVLSALVILAETIDFGRFPSAPQYMDYWGLTCGEHSSGGVRRLLPITKCGSGFLRRIWVEAAWHYRHKPAVSEGLRRRQEGQPPEVIAHAWKAQLRLHQKYWRLATAKSPTIAVVAIARELAGFVWGAMRVGPNEEGR

SEQ ID NO: 356096 - protein, 391 aa, unidentified
MSKKNTRNALDTSLSYAVIGLDLAKADCAVAAVPCSDDELGLIDRMDYESLFEQAEKLEPTLFAMEPCCGYSQISLRLQNMGHEVKVISGHAVKNWIATHKSNQKTDLNDATALAKLALYDHDLQPIRVKNVEECRIASVQAIRIQLRTQATKSLVCFKSLCQCWGIVIRRGSSNTKKMAEAVAAVEKLLGAEVASSLMILRDAYKFTMKQINALDKLLDALVEANEQARTMKTVLGIGTQTAARLAVTTGDIKRFPMPRSYVAYFGLAPRNIITGHSGTPSPSKRGALKPVSSRGQGKVSRRGDRVARSFIIQGAATIYMLYCKDMLPECQLRRWLHEQIKRGKPYGKIIVSLAAKLLRIVWALLTYGEKIRQSQSGRTTLGACGYGKAP

SEQ ID NO: 356097 - protein, 344 aa, unidentified
MQSMYYIGLDVHKRTISYCVKEVSGRIYAEGSVPATRLDLNRWMKTLPQPWTVAMEATVFSGWIYDHLRPHAVDLKVAHPLMLRAIAAAKKKNDRIDAGKICDCLRCDFLPECYMASTAIRERRRTLRYRNLLVRQMVQMKNKIAVLLMEAGVSYNKQRLHKAGYFRELVASNPDIDEGLCSLLRVCREMVVRLERTESALVRSLERDALLRDRVERLMTIPAVGPITALTWALEVGEVQRFSSIKKAVSYCGLCGEEKSSANSVQRTPLSKQRNKHLQTTLIEAAKMAPRYSAGLALLYDKERRKGNANQATLAVARKLVAYLIAVDRRQRQFEVVEASRTAA

SEQ ID NO: 356098 - protein, 428 aa, unidentified
MSYRIAGIDVHKKMLAVVVSDVEIESEFQFERRMFSSNPEQLRSLAAWLVEQKAEEIVMESTAQYWKPVWETLERYWKPLCEKREGTRRRSGTLHLAQALSNRGRRGRKRDFVDAERLVKRLVARELTLSFVPDPEQRLWRTVTRKKYQLRRDVVRLHNQLEALLEEAHIKLSSLVSDLLGVSARRMLKALADGETNPAALAALAHERLRATPEQLCDALGACTELKPVYRRLLKMTLEQLQILEQQIGQLDHELATLLHPHQDAVERLAEVPGFAVDSAQQIIAEVGPTAATFPSEKCLSSWVGACPGEEESAGVNYSHRSPKGNRHMRRLLNQAANAAIKVKGSIFEVVYRRCVPRLGHNQTIGVIAHRQCRLIWLILHQGTRYEERGPAVTMRSRYQRTWRMIRQLRQLGYRIESPSPQPGQAHA

SEQ ID NO: 356099 - protein, 438 aa, unidentified
MAKVITFEQVNAHAAAIDIGAAKVFVSSDGIQVRSYETFTADYHLLVKDLQDAAVERVCMEATGVYWIALYELLEEAGMEVCLVNPKEVKQAKGRKTDLKDCRWIQRVFSAGLVRQSYVPAGKLKELRMMVREREDILQMGSAYVNKMQKCLELMNIKLTGVLSQVHGASGIRLIEAIIAGQRDPHQLLLLCDKRIITSKSERVLKALEGNYNDSWIFLVAQNLKMWQLHEAQILVLDRKIEELLAALEAGKPEVASNAPVKAIRHHAPRVKELHQKMLNIYGVDGNTLSGINDYTLLRLLGEVGHDMSRFPSAKHFVSWCQLAPAFNNSGKMNRRIKIKSGSKAGQIFRDVAHGLLNSKHIAIGAFMRRIRGRKDSKIAVKAGAAKLAKAFYNLLTKGAAYVEQGVKKYEQQLQEREKTFLYKLAQKHNLQLINISD

SEQ ID NO: 356100 - protein, 407 aa, unidentified
MDLQHPKCAGLDVHQHTVVACARVVTGASIRHERRTFGTTTAELLALSDWLTAQACTHVAMESTGVYWKPIWQVLEGQFTLVLANARHIRNIPGRKSDVNDATWIADLLAHGLIRGSFVPPAPVQELRDLTRTRKQLVREITQHTLRIQKTLETANLKLTGLLSNILGMSGRAILHALVAGETDPERLADLVHGRLKASRADLVAALHGRLTAHHRFLLQLHLAQVDALEQAVHDVELRLGHALVPFRAALDRLITMPGVSETVARVMVAEIGFDMTRFPTAGHLVSWAGLCPRLDESAGKRLSTRTRPSNPWLKTTLVQAAWAAARTKDTYLRAQFLRLKSRRGPKKAILAVASSMLTAAYHMLKYDLDYRDLGADHFDRRDKTKLAHRLLQRLQALGLTVEVRAA

SEQ ID NO: 356101 - protein, 455 aa, unidentified
MSGNVVSMSSDQTWMMIGSSELPLSVESAAGVVSEAAGVCVSVLGVLPAHAVRPNSRSTARARARYTDNGRQSNRGYRIQWEATMNSILYVGMDVYKENYTLCCYSFDRDKVEYRQTVPSDYRLILKYLEQVHGKYLEEVEFICGYEAGCLGYSLYHQLTDHGVKCIILAPTTMGITNTNRVKTDRKDAANIARCLAFHTYSAVYVPDGEDNAVKEYLRMRDDQKLALKKIKQQITAFVLRLGKQYTGSKSLWTENHLKWLRGLDLTLLEKETLQEYLITYDYLTDKLERLDARIEELARNERYGERVRRLGCFIGIKPHTALSLLVEVGDFRRFEKAPNFAGFLGLVPGEDSSGGGRTRLAITKAGNSHLRRLLVESSQSYSRGTIGFKSKELKKRQEGNPPEGVAYADRANERLRRRYYRMTLKNGTKRNVAIVAVARELACFIWGMMTDEIA

SEQ ID NO: 356102 - protein, 423 aa, unidentified
MKYALVRVLPEVPPGGVCAGIDWASADHAVCVAVLAGRVRDRFTAVHDRAGIAGLIARLRGSGAAEVAIERGDGVLVDALLAAGLTVVVIGSRQVKNLRSRYGSSGAKDDRFDAFVLADTLRTDRARLRPLVPDSPATLALRAAVRARRDLVAHRVSACNQLRAHLAVAFPGATGLFSELDSPLSLAFLAAFPGQQAAARLDEQALAAWLATVPRRGNTAPAGVLAARLAAAPRGAAGADAAQAAVTAQLAAATAGLAGRVRALEAEIAAQLAAHPDQHIFTSLPRAGTLRAARLLAETGDCRARYPDPWSLAGLAGVAPVTRRSGTYISHEFRWNLNRQLRDAICDFADGSRHASPWAATVYAAARDRGKDHPHAVRITARAWVLIIWRCWQDGTSYDPAKHRALQDVLTRQAAAGTPQPHR

SEQ ID NO: 356103 - protein, 348 aa, unidentified
MRNQPLGAVVYGIDLGKTSFHVVGLDGSGRPMQRITLSRTSVFRFFGNASAALIGMEACPGSQWLARKLQALGHTVRIIPAQFVKPYVKSNKNDTIDAEAIAEAVSRPTMRFVQVKQTEQVDLQALHRARDLAVNTRTRLICQTRAFCLEYGITMRSGAGVFKLDLPKVLADEANDLTPAMRQLVRDLWEAVQQLESRIHALTREIEAIAHRSDLARRLVTVPGIGPIGATALLAAAGDGKQFRRARDLSAWLGLVPAQHSTGGKATLLGISKRGNSYVRRLLIHGARSCVIHLDRNRDRLGVWLNELQRRMPINKVVVALANKLARIAWVILTRPGALYERRDPRFA

SEQ ID NO: 356104 - protein, 310 aa, unidentified
MERIIIGIDVSKDRLDVAVRPSGEAFVVERNARGLAELVARLRTLAPDIVALEATGGFETVVAAALAGDGLPLAIVNPAHIRAFAKALGKRAKTDPIDAAVIAHFAEATGLTPRPLADEATRLLADLVARRRQIVEMIGAERQREQRMTGPRLKKSIGRLLKALEKELATLDGDIDDAVRGSPAWRAKENLLESVPGVGPIIARTLIAELPELGQLGRKEIAALAGLAPFTRQSGQWRGKSFIGGGRTAVRCALFMGALVAKKHNPLLKAFFDRLVAAGKPKMVALIAVARKLLTILNAIIRDNRPWQTA

SEQ ID NO: 356105 - protein, 438 aa, unidentified
MSNKVIFNVDELFISVGIDVGADFSWMSIALPNQQFVGKPYKILHNSMDSLTAAVSKIKEAEELYSLESRIFLESTGIYHYPLFCYLRDKGFNVSVINPIITKNSTNINIRKVHNDRFDSKKAALVGLKPDLKVSLMPSDLALNCRNLCREYYDLMDNRSAYVNKLQGELRMAFPQYLGIFSKVTVNTSLTLLETYTSPAAFIEADRQEIIDAIKSTARFGLTYALNKYNAIIQAANEANEFGYIIDSNIKRIRLYIGFIRKYDEEIKGILGSMHELVDANEATDFVRQIHLIETFKGAGFLSAVSLMGEIGDFSAFSKPKQLFAYFGLDPAVKQSGKFEGTKTQMSKRGSAIARRVVHTLALQSIGTSRTGEAKNPILRDYYLKKCESKPKLVAMGAVSHKVCNMIFAILRDNKPFEIITPQEHIKKHNAAKCDIAA

SEQ ID NO: 356106 - protein, 425 aa, unidentified
MSHYAGLDVSLDESAICVVDGTGRIVEMRVPSEPEALVAALRETGLDFERIGLEACSLTAWLHDELRGAGLPAICIETRQANAAMKTMPNKTDRNDARALAQIMRTGWFRQVHVKSRPCRLWRSLLVARRTVLNEMRAIENVVRAVLRETGLKLSTPARTAFAGRVRTLAGDDPAVMPIIEPLLAILDTMLAELARLTKQVLKLARNEEVCRRLMSVPGVGPITALTFRATIDRPERFRRSRDVGAHLGLTPARYQSGETDIAGRISRCGDELARTALYEAAHTLLVRSRKWSSLRAWGMKVAKARYGTGPRGGRPQARRHPASDVERRDRVPLRQGTRSRCGLNQEERAITLRPNGRTGSCPWGTRSKVISLRVQSLWASARKVVRQIEMPCSPDPIMRRPCADREEKRATRGSDKIRTRMKQE

SEQ ID NO: 356107 - protein, 344 aa, unidentified
MSEVITVGLDIAKHVFHAHGVDDQGRALFSKRISRGKLLDFFAAQPSCTVALEACGGAHHWARQLTQLGHEVRLIPPAYVKPFVKRQKNDAIDAEAICEAAQRPNMRFVAMKSEQQQAAGLVFRTRDLLVRQRTQLINAVRGHLTEYGWIAPKGPSHVAELAHLIEEKRMAGSLPEAARAMFRLMLDQLASLNGRIAVLDKEIARRAREDEVSRRLMTIPGIGPISATAIAALAPPVETFAKGRDFAAWLGLTPVQRSTGGKQKLGATSKMGERTLRRLLIIGSSAVVQQASKRGAAKGSWLEQMLARKPRMLVTVALANKMARIVWALLVKREVYRAPVAANA

SEQ ID NO: 356108 - protein, 343 aa, unidentified
MSKVTQSVSYGTSNGPLWTLENFVTFVGVDLHKHTVTLAAVDPRQDLIGHLTISTKCTDKIQEFLAGLPRPVWMAVEADGFIEWFLDRYGPVVDLLSIADATELALRRGKRRKNDLNDAKDIAERLARGECPLGWIADPETARLRKLGRHWHQLSRTLTRVKHCMRSILNAANLPGPSTLDGALTQRWLLGFGHVLKTVPGIDEIWACVIAAEIGDFDRFPNAETLEFWAGLTPDNELSAGKARSGNITKAGSRVLRWVLGKAALVLCRSDRAQEKIRRRLIRTTGKKAKANVAMARRLLHILFAMHRDQKTYTVREPAKHEVRANRVRAKKRRRDAAGKEAA

SEQ ID NO: 356109 - protein, 391 aa, unidentified
MVCVGIDVAKDKHDCCILDSDGMVRADCFTIPNNMDGFKQLLQTIRNCTKKSDKIKVGLEATGHYSYNILGFLLDNGLPTYVINPLHTNLYRKSLSLRKTKTDRVDARTIATMLLSDVDLKSYTDIAYHNEDLKSLTRYRFDKVQERAKLKQSVSRLATILFPELEQLVSSIHGTSIYALLGEYPGAKQISEVHLTKLTNLLTTASKGRYGKEKAIQIREAARASIGSVMPAKSLELKHTIKLIRELTSEIDEIEVSIQKIMDELNPPILSIPGVGIQSAAMILAEIGDFSNFESPDKILAYAGCSPSTYQSGKLTNCYAHMEKRGSRYLRHALYNATKYVCYWNPVFAEYLAKKRAEGKHYNVALSHAMKKLVRLIYALQKSGKAYLAAA

SEQ ID NO: 356110 - protein, 408 aa, unidentified
MVVGVDPHKKRHAAVAITQDFTTQAKFKFDNTREGLEAMLDRAKVEMVKSGCRGVMFAIETGGHYWRNVAYFLDEHGIPFRFINQFTLKRRREGKDLNRRKNDYRDSEVAAQLLCTGEFTESKLPQGVYAELRTAHNAYRRLVKERTRITNLVKGLLDALFPEFTQVFKDPCALTALSVLSICPIPRVIAGMTEDEFEATIEAQHKGRRLMRKKLRALHYLARTSIGIDAGACSLSSEISFLVDKLELIRRQICTLEPTLVRLVDETEEGKFLLSIRGLNYIAVAGLLAELGCFKAYRSARQMIKMAGTNPTESESAGKKRARTPMSKQGRPVLRYCAWTSVIPMLRFNPDFRAWAKQRRERPVHANPLGGREVVGAALNRLLRLAFAMVKNQTYYQVLKPELTPVAV

SEQ ID NO: 356111 - protein, 429 aa, unidentified
MTAMDPETFQQQYTLFLGFDWAMKDHDVVGVDASGRIVLDMAVEESAKGWAGFREALHKVAGEDLSKVAVAIETRNGPAVEHLLELGCRVYPLNPKAAKRYRDRKSPSGTKTDRLDAWSFGDGLRTDGHGWRMLSAEDPLAQELRLLYRDEVSLIQQRTALVQKLEAALHAYYPAALRAFDTWTSPGAWSFVERYPTPQKLAAAGTRRWEKFLHTHKLAHPKYYAQRLEAFAEATALCGSPGVTRAKSRLALALVGQLKVVHKQLAEYRKAIKSLFAQHPDHDIFGSLPGAGEKTASRLSAEIGTLRERFEDSQSLQTYGGTAPVTKQSGQTRYALFRRACNKRLRSAVNFLADHSRATCVWASVYYQQKREQGCSHSSALRCLGHRWLKIIWKMWQTRSLYNEALHLRNQTRHGSWVVCLASNQEGTT

SEQ ID NO: 356112 - protein, 405 aa, unidentified
MITAGIDSGRRIISVSYVEDGEEIAYKEYENSFTGYRELEEDMRDTGVEVVCIEGHGDSSRQAAVYLYEKGYKIYEINPLMLLKLKESMTEKKTDHIDAYVCGMFPFIRKDMKPLVLSIRVQDLKRLVRLYEKISKQVVRYKNQLHGELHQVFGCKYREVFPRINRTSLAFFSTFSTPEEVKEADIEEIHEVLKAGGSCMYRGKYGRDKAAHIKEVLTEGYDEELKLSTEVGGTMIKTLCRILISLTKEKEEIKRKIERYVEELYPGYREHFRGIRLSSLRFGQIMAEIQDIDRFPDDGHLASYAGQAPVQKQSGDRNMMKNKKKYYNRHLAHVIHLLACSNVQKGAKYHEYYSILKKKFKKPLRALKTIKRKLIRDLYYGLVNYSSNLHQTDTPSNRPYSLTGS

SEQ ID NO: 356113 - protein, 398 aa, unidentified
MVWVGIDAGKASHHAAAIDADGRLLWSVKVASEQRRIEELVARAAGSGGQVRWAVDLVSPMASLLLAVLLTSGQDVVYVPGRMVSGLAGALGGEGKTDAKDARVIADIARMRRDLAPITASDELVVELARLTSHRADLMADWVRGVNRLRELLGSIFPALESAFDYSTRSALILITGFCTPAEVRQAGQDGLATYLREHGAWRKGISSMAATAVQAAAGQTVTLPGEATTAALVRQLARKLLDLDREIKDIGKLITSRFRAHPQARIIESLPGMGPILGAEFLAATGGDARAAFGRPARLTSYAGLVPIPKDSGRVTGNWRRPRRYNRTLRRVFYMAALSSLKPDGPSRTYYQRKRAENRIHTRALLALARRLVDVLRALLRDNRAFSPAPPAITAAA

SEQ ID NO: 356114 - protein, 344 aa, unidentified
MQSTTIAIDLAKNVFEIAVSRHPGKVAERHRLSRAKFLRFFAQRQPSHVLLEACGSAHFWAQELEKLGHEVVLLPPHLVRPYRRRHKKTDRTDAKALLEAARNEEIEPVPIKTVEQRSVTALHRLRSAWMSTRTARLNGVRGLLREHGHFIPQGANKVVPRVHELIADAENDLPDPLRLALAEACKEIRDLEQRCATVCEQLEALAPTIPAVEHLKSVPGIGTLTATAMVALVGEIYRFPSSRHFASYLGLTPRVHSTGRSRRLGHISKQGDEYLRWLLLHGARSCLLAAKRSPNSKPLYTWALQVEERRGHNRAAVALANKIARIAWTVWREDRDFTIVRPAA

SEQ ID NO: 356115 - protein, 404 aa, unidentified
MHDPTEAFGGVDWATDDHAVCVVDGQGQVVVEFDVANNAAGLAALCRRIETAGARRVAIERPDGPVVDALLEAGLEVVVVSSRSVKALRERYGTAGNKSDRSDAYVLADCLRTDGHRWRNLEPDSPATVTLRSHVRARKDLVETRVATANQLRAHLRVVFPGAVGLFRDLDSPISLRFLERFPSAGRAAWLTDKRLATWLRANGYCGRKDPAELYTRLADAAHGTAGDEGDARAAITLAYLTVLKTLRAQINELDTRIAELLDAHPDAPIFRSLPRSGTIRAATLLAEIGDCRARFPDPESLTCLAGVAPSTRASGRHRAVTFRWSSDKKLREALCDFAGDTMRASPWADHRYRSLRAAGKSHPHAERILARSWAHIIWRCWQDSVPYNPNHHGAAQRLNHQAA

SEQ ID NO: 356116 - protein, 348 aa, unidentified
MSEAPDIVVAVDPHKASWSAVVADARHRVLGEIRVAASRDGYRELRRFARPWPEARWAIEGVRGLGQPLARRLVNDEIEVIDVPAKLAARVRQLATGHGRKTDRVDAYSVAVAALTGTRRAHEWDDDAESLRLLSEHRDDLVRRRTQVVNRLHALLTHLVDGGAPRSLTADIAARLLRKVRRPTGAAATRRQLALALIGEVRHLDHQVTAADTSLTAAVKESQTLLVELHGVGPVLAARIIGRCGAITRFKTSDHFASYCGTAPLEVSSGDVVRHRLSRAGDRQLNHALHIIALSQIRHGTQGRAYYDRKRAAGKGHREAMRCLKRRLADVVYRTLTADYTAATLTTP

SEQ ID NO: 356117 - protein, 347 aa, unidentified
MRKIAYLSMDVHARNCVLGDMDGNGKFRGNRSFTTCEINIINTLKAVKAKRKYLVMEAGPLSNWAAQVANDHVTEAIICDPRKNALIYKSSNKRDKVDTKKLCRLLRLGEYKAVYRPENDQRAIFKAAVQHYLDLRDQLIALKHKIKATYRQWGLIDVFTQSVYSASGRDRFLNQLQHHPIKLQLKRLYDLMDLTADTKQAAEKSMKALGRNYPEIKEFKKMAGMGPIGAHTFDAYIQSPHRFAKRSRLWRYCRLGVVDCSSDGKPLGYKRLDKSGVGELKALSYRAFLSAMKGDNEVKRFYLKSLQRTYNRKHARLNTQRKILSVMLSIWKKGQPYRPELFLDPSI

SEQ ID NO: 356118 - protein, 368 aa, unidentified
MGRKSSKLFVGMDVHKESIDITLAEEGGEVRHYGRIGGEQSALIRTVRKLESLGKSLVFVYEAGPCGFWIYRLLRERGHQCWVVAPSNTPRRVRDRIKTDRRDSLKLAGLARAGELTPIYVPDAADEAMRDLVRAREDAVATQRQARHRLAALLLRNDIRYCGKTAWTEAHRRWIARLHLPGAAQRIAFEEYVLTVNEATASVQRLTDSMEQELGHWRWQPVVHALQACRGIQLIHAVRIVAEVGDLSRFSHPRQLMAYLGLIPSEDSSGERRRQGPITKAGNRSARRALVEAAWAYRHHAAMSPIIVRRQTGLAKPVLDIAWKAQLRLCARFRRLSARGINRNKIVVAIARELAGFVWAIGQRVKLN

SEQ ID NO: 356119 - protein, 392 aa, unidentified
MFYCGIDIAKYKHEASVIDINGKTLLDSIPFSNDKQGCGKILAVFEKFEIAPDDVIIGMEATGHYWLSVYAFFLELGYTVKVINPIQSEAFRKMYIRQTKNDSKDSYIIAQIMRFGEYSATSLSEENIIALRQLSRYRLALVDACGDCKRRVIALLDQVFPEYDKLFSDTFGSSSTELLLNCPTPEDMLAISTRKLTNILNKASHGKFGKEKAEELKAAAKNTFGIAFAKDAFSFQIKQLMQQVVFLEEQISNLLHETNQYITTITGIGDVLGAIIVSEIGDINRFERPNQLVAFAGLDVTVKQSGEFSGTKNKISKRGSPYLRRAIWLAAQRAAFCDPVLSEYYQSLRARGKHHLTAVGGVARKLCNIIFVILKENRPYLPTPTKNPKNLS

SEQ ID NO: 356120 - protein, 342 aa, unidentified
MQITTIGLDIAKNVFQVHGIDAAEKVVVRKQLRRSQVLAFFKALPPCLIGMEACATAHYWARELTKLGHQVRLMPPKDVKAYVKRNKNDAADAEAICEAVRRPTMRFVQIKSVEQQGRLMLHRVRDLLMRQRTQVINALRAHLAELGIVAAQGREGIKELLKIIAGEEDAGLPVDAHASLVVLAAELQAMQTMIGSIDKRIMAQHRSNEASQRLESIPGIGVTGATAIAATVPDPKVFRSGRDFAAWIGLVPRQASTGGKQKLGPISKRGDRYLRRILVVGACAVLRYARQQPQKYPWLTQLLARKPFKVVAVALANKMARIAWALLAKGGTYRAPVLVAAA

SEQ ID NO: 356121 - protein, 340 aa, unidentified
MSLYGGIDLHSTNSVVVLLNDRDEVIYQKRLPNDLPTILEQLAPHHAEIQGLVVESTYNWYWLVDGLMDADYRVHLANPAAIQQYSGLKYSDDHSDARWLGHLLRLGVLPEGYIYPKADRAVRDLLRKRAHFVRQHTSNVLSVQNIMVRNTGSRCSVKRLHELTKKELNGLLPEAEQALAVTSSLGVLDGLGQQIKTLEKAVTQCLKHTPSYEQLLTVDGIGTILAQTIALETGHIGRFPSVGNYASYCRCVDSTKISNGKRKGKGNVKNGNPYLAWAYMEAAQFAIRFNPRAQRFYQRKLAQSNNNTILARKSVAHKLSRACYYIMRDLVPFEAMKAFG

SEQ ID NO: 356122 - protein, 341 aa, unidentified
MTVIIGIDPHKATHMAVAIDSDEHAIGRLEVRADRVQTQRLLAWAAPLGEDRMWAIESADGLGKLLSQQLLAAGEHVVDVPPTLSARVRLLGSTKAGKNDDNDALSTAIAGLRHCGLRAVRGDDHSTVLRFLVGRYDDLVGLRTQAACRLHAVLRELVAGGAPRRLSADRAAKLLRGVRPDDLIGSERKRLATDLLGDVRRLDRELAAIKVRLRDAVAMSGTTLLELHGVGPIVAALILAHVGDPARFATPARFASYNGTAPIEASSGPRKRHRLNPRGNRKLNHAMHLIAVTQIRHDTPGRVYYDRKLAEGKTKKEALRALKRRISDAVWRQLQVDLTAK

SEQ ID NO: 356123 - protein, 363 aa, unidentified
MRFYKNQHQFYIGIDLHARTMYICVINNIGETVFHKNMECSRDNLELVTNTFGKDIVVGVECIFTWYWVADFCAEQGIDFALGHAYYMKSIHGGKTKSDKIDSEKIANMLRGGMFPIAYAYPKAKRAVRDLLRRRLFFVRQRAELSVHLQNTNHQYNINEPLTSSRMRSEVYRNTIPQKFSDPATLKMVNADLAMFQAYHDIITKLEFQIEDSMEVQDPVSYSIINSVPGLGFILSLTILYEIDDIHRFSDVGKFISYCRLVKCSHESAGKKEKGGHNKIGNVHLKWAFSEGAVLFLRNNERGQRWHDKLVQRYGKAKAMSIIAQKLGRTVYYMLKRREAFNPDKFYGDKKIENKDSGGEHLA

SEQ ID NO: 356124 - protein, 342 aa, unidentified
MKLTTIGIDLAKNVFQVHGADEKGKAVLKKQLKRTQMLPFFANLTSCRIGMEACGSAHFWARKLQALGHTVQLIAPQYVKPFVKRNKNDAADAEAICEAVTRPNMPTVPIKNASQQAILSVHRARQGFVKARTAQANQIRGLLTEYGIVIPKGIGHIAKRVPEILEDGENDLPGSFRLLIQRLADHLKELDRQVGELEVQIQLWHRDNSASQKLAKIPGVGPMTASAMVASIGDARNFKNGRQLAAWLGIVPRQHSTGGKSTLQGISKRGDTYLRTLLIHGARAVIRVAERKPNADPWLKNLLARRHKNVAAVALANKNVRTIWALLAHDRDYQSGYARAAA

SEQ ID NO: 356125 - protein, 423 aa, unidentified
MSYRIAGIDVHKKMLAVVVSDVEVDGECQFERVRYSSSPEHLRFLAQWLIAQRVEEVVMESTAQYWKPVWGALERYWKPICRERADAGPKSGTLHLAQAQSNRGRRGRKKDFPDAERLVKRLVADELVLSFVPDTEQRLWRTVTRRKYQLTRNHVRLQNQLEGLLEECHIKLSSLVSDLLGASARRMLKALAEGETNPVALAAMADRNLRATQAQLCDALGACAELTPIYRRLLKMFLEELQFIEQQISKLDQELASLLSRHHDAVVHLAEIPGLGVDSAQQIIAEVGAGATTFPSAKQLSSWVGACPGEEESAEVSKSHRSPKGNRHMRRILNQAANAAAKSKGTIFEIVYHRLVSRLGHNQTIGAIAHRLCRLIWIILHRGVRYQERGPLVNAKTRRHRTNRMIRELRNLGYRVEPLVNTA

SEQ ID NO: 356126 - protein, 327 aa, unidentified
MTTTQTVVGVDVSKATLAVCHQVGAHLQHLEVANTPVGFRQLVRCGGAASLYVLEATGPYYLAVAYYLVAAGAQVAVLNPLVVKRFIQMHLGKGKSDRKDAQWLLRYGQQQATPRWQPEEAVLVECRQVEQVVELLIRQKTMVHNALEALKAQPVVSPAALAQLRQTLLRLEEQVQQLETKLLTTVEARYPSEMHLLCSIPGIGRKTAAYLLLFAGGFTSFENYRQLIAKVGLCPREFSSGTSVRGKARITKMGGALIRSKLFICSWSARKANGACRALYDRLVAKGKNGKVALIAVCNKLLKQAFAIVKSGVPYQADFTSKLAANA

SEQ ID NO: 356127 - protein, 323 aa, unidentified
MQGKVTLAPNAPLDIHVGIDVCKAWLDIYLHPVGLRFRLANDDGGLKRLKRELGGFRVVRIVMEATAKYHRLASRSLHDSGFCVAVVNPARARFYASALGTLAKTDAIDARVLALFGEAIDPRATTPRPQALEDLQELVGARQSAVADRTALANQLGAAATAFLRAEMKRRIGALERHIERLETQIAKLIEADPAMARRVEILESIPGVGRATATAMAVGLAEMGACANKKIALLAGLAPVACDSGDSVGQRHIKGGRGHVRSAIYMAAVTAARCNRDLKTFHDRLVANGKKAKVALTAVMRKLVSLANTLITENRLWTPTRP

SEQ ID NO: 356128 - protein, 342 aa, unidentified
MGTITTIGLDIAKSVFQVHGIDATGEVVVRRRLSRGRILAFFEKLPRCLVGMEACNTSHYWARELIALGHDVRLMPAQYVKPYVKRGKNDAADAEAICEAVARPTMRFVAVKTPEQQSTMMLHRVRLMLNRQRTQLSNAMRAHMSEFGVVGPVGRRGLEHLMAVIADREDLRIPADARVCLEMLAAQLAVVKEQILENDRRIRASARETEVGRRLMEIPGVGPLLASAFVASIADPTVFKSGRDVAAWIGLVPKQNSSGGKERLGSISRAGNRYLRQMLVVGAMAVIRHVERHGTKRRWLIQLLARRAKKVAAVALANKTARTIWALMTNGERYREPTVTLP

SEQ ID NO: 356129 - protein, 420 aa, unidentified
MSFKIFRFNCCGLDVHKTWIYACIGITDSNGRTDYKQARFSSFSKGLKELCDWLAKYNCSEVCMESTGKYWIPVFNVLEKANHSVILAHPKYTKPQKGNKTDRKDAKWICDLFMCEMIKPSFIPPADIRHLRDLVRYRFKLTCMITGEKNRALNCLTVSNLKLDDVFSDVFGKSSRSITEYMLAHPGELFDVTPFVDGRCKTPVEEIQAAVDGAISPEQAIKLRQCLNHIDELEKHLEEIEREILHLSDKYQAALDLIRTTPGFDKNQMTAIQILSEIGGDMSVFPTAKHLVSWAGCCPRNDQSNKKIKSTRISRAGNYIKPILVQVANGLLRSKKHPEITERYKRIKSHRGHKKAIIAICRMLLTAIWHILSDLKPYTAEGFLESRPVNESKVLTASQALNLLKQRGYTIKNEIVPIMT

SEQ ID NO: 356130 - protein, 358 aa, unidentified
MAVTEGTGGIVGGVDTHKDLHVAAVVDEQDRVIDTRCFATTRQGYRQMLAWMRSFGELQRIGIESTGSYGAGLLRFMHQAGIAVLEVTTPDKQDRRRRGKNDDLDAQNAAHAAFAGQRTVTPRSRDGMIESLRVLMACRKTAVSARRVALQMIHNTIVCAPDDLRDQLRSLTRMQLVRTLAAWRPDLTAYRDLDSAYRIGLKSLARRYLELHDEIADLDAMIAAIVDELAPNLVARNSIGHIGAAQLLLTAGGNPERLRSEASFASLCGVSPVPASSGKTVRHRLNRGGDRAANSALHIIAIGRLRTDQRTKDYVARRIAEGHSKLDAIRALKRYLAREVYTLIARRRREINATRIAA

SEQ ID NO: 356131 - protein, 346 aa, unidentified
MNKVMAGIDLHSNNLVVGVVDSDGKRLGCRKLDCDLKEVEQFLRPFKSRLQQVAVESTYNWYWLVDGLQALDYPVALANPAAIQQYNGIKHADDTHDAFFLAELSRLKILPTGFIYDATLRPVRDLLRRRLMLVHQRTALMLSFKALYTRTFGRQMSLSQLKDLEVKEAQAIYEHPANQLIAGVQIQHIEQLSQSIEQIEKVVLAAAKELPYYPKLTTLPGVGKILGMTISMEVGEIKRFAGSGDFASYCRTVAAKRISNQKQKGENNSKCGNKYLAWAFIEAANFARFHDGQCRKWYDRKAARTSNVIATKALACKMAKAAWYLMAEQTDYEAQRMFGPPATTKE

SEQ ID NO: 356132 - protein, 336 aa, unidentified
MDRRYVGIDLHRCRSVIYAMDAAGEKLFCERIANDSLRLLEVVSAAGEGAEVVIEATYGWYWAVDVLRNAGFSVHLAHPSGNDWGKRRVKNDERDARDLADLLRLGRLAEAWIAPPPVREARELVRYRARLVQLRSGLKAQVHAVMAKEGVLPGVTDMFGPKGQALLDAMELADAYLVRVESLRDLIEVYDREVVMLERRIHELLRDDHGYHAIQALDGVGRTIAAIFVTEIGDIHRFRSPEALCSWAGLTPRHRESDTKVVRGKITKQGSKLVRWAALEAIVRYHGGAALRDTFHRVAERRGTNKARIATARRLMTLVYYGLRDGEIRCLQRAVA

SEQ ID NO: 356133 - protein, 336 aa, unidentified
MKMKHFIGIDVSKETLDITWLGQDGKQIGYKKIKNARKEIVALSKELKKSCGIEFETTVFCMEYTGVYNLPLLDYFSDNKANIWMESGRQIKLSMGAVRGKDDKVDSGRIAMYAFANRHQIKLWKAPREVIVRLKDLVTYRALLAKQKKGLGVAFKERAAFKPKAHTMPIKASASKLVKGLDNEIKSIEKQITALIKGDEKLSRLYKLVTSVKGVGFVTAVHVIVTTNEFVSITDPKKFGCFCGVVPFKHRSGTSVRGKDRVSHMANKPLKTLLHLCATSAIQAKGELRDYYHRKLEEGKNKMLVINAVRNKIVLRIFACVKDNRMYQKNYSTSLV

SEQ ID NO: 356134 - protein, 391 aa, unidentified
MREPIRMDEEVKPTTKNGDKHMKKTDKYVGLDVHQDTTVIAVADCGRVGEVRIYGTIPSDLQALAKVLGKLGGEGVRLHVVYEAGPTGFVVYRRLKQLGINCIVVAPSKTPQPKGVRLKTDRRDALQLARLHRAGELTGINVPDEVDESVRDLTRARADAVHDLTRAKQRLKAFLLRQGYRYPGKANWSEAHQRYLRKLTLALPALRSVLEEQLLAIDQVTERVKRLDELIEVQVPQWRYYPAVQAVMCLRGFQLNAATVIVAELGDVRRFAHPKNVMAFLGLVPKEETTGNTRRLGSITKAGNAQARWCLIEAVQKALTPPKVSARLSLRQEGQPAAYRELAWKIQVRLHKRGWHLLQRGLMKAKVNVALARELAGFLWDLLRQVPAPEA

SEQ ID NO: 356135 - protein, 366 aa, unidentified
MLYLAIDQHRKQLTVNLRDEDAQVLVQRQVSTRWQAVREFLQDIQERGRQAGGWLVIVEVCGFNDWLLKLLVEYGAKEIVLLHPEERRRQKTDRRDANRLGELLWLNRHRLATGLRVQGLRRVVIPTADEQLDRKLTTLRWRIGRERTRLLNRIKNILRRYNVEQECPTKAVTCQTGLRWLRQLAVGELDRLDLDQLLARLETINTERAALGQKIRERQERNPAAARIASVPGMGAYISLGLACRIGDIRRFPRPRSLANYWGLTPSARNSGENKQRLGSITKQGSALARFLLGQAVLHVLRKDSVLREWYKGIKRRRGSKIARVAVMRRLATIIWQLLRKEQNYVPGGPRRQEKRRAKAAQAAVA

SEQ ID NO: 356136 - protein, 345 aa, unidentified
MQESIYVGLDLGSSRCYQSVIDADGTLCGSRPIPTSEQHLRSAFAKLNGAVQVHLEAGELSSWVASIIEPLVQSVIISHPRSLAWIGKDSQKDDKVDARKLAELLRLGRVHQVFRQTDDSRRTFKYLVVHYEQLSREQARFKSKIKARLRTLGIIRQDARLFSMTGQTALLDAIKSVSIKQMLTQSFTVLNQMLASFDEAKRAMIEFSKQFREVQLLQTAPGVGIITACRFVAYLQTPHRFSNKRKLWRYCRLGVSRRESNGKRLAHPRLDSAGVGSLKDVSRKVFEAARRTKTDNCFKRFYEQSLANTKNAVHARLSTQRKILATLRAMWISNQPFRNDLTEIG

SEQ ID NO: 356137 - protein, 411 aa, unidentified
MSRRCIGLDVHRDFCEVAIWEVGRVRSAGRVRSRPEALEEFAANLGAGDEIALEATSGAREVARILSPHVNRVVIANTHRLAAISESKKKTDRNDARTLAQLLAAGVLEGSWLPGEQTRALRRRVSRRHNLVVARTRAKNEVTAVLHRNLSERPPMSDLFGVAGRKWLGALDLPDDEIETTSAALRQIDFLGDEIGGLERELARFAASSAEARRLITVPGVAMVTAVTFLAQVGEIARFESPRQLVGYLGLDPRVRQSGNGAAFTGRISKEGSGLVRHVMVEAAHSAIRTPGPLRAFYERVRSRRGHAIAIVATARKMVALFWQLLTNEQDYRHSIELVTRKKLRKVELLAGAPRQRSGGRCVGPNRDQRRELDRERAQAAEADYRKLVAARAPDPQGKETQDGLQMSQTT

SEQ ID NO: 356138 - protein, 349 aa, unidentified
MNIIGCDYHPGFQQIAFVDTETGDCGEQRLEHSEGAEKFYRDLAAQGKKVRVGMEASGHARWFERLLAELNFELWIGDATEIARKRERKQKTDRQDAQHILQLLMENRFPKIWVPSGENRDLRQLLWHRHRMVQMRTRMMNQLQAVALNEGLRCKKRLWRQHGREQLESFRLAPWASRRREDLLQLLDRLNPTISDLTQAIEQEVEKCPEARRLRTHPGVGALTALAFVLIIGRPERFQCGKQIAAYLGLVPLEDSSGNRRRLGHITKQGSSMLRFLLVEAAQVTARSIPEWRSKYFHLAMRRGRKIAKVAMARRLAIALYWMWRKGWNYEQSRKFGSHAGKLGTGDGV

SEQ ID NO: 356139 - protein, 345 aa, unidentified
MSLMFFLGVDVSKKTLSVVLTDHKDKTLWSNKSIPNDEVGFKKLVETVIKNTSKKAGKEEYSIAAGMESTGVYGERLAYYLNGNSHNGRIVTYVLNPAAVRAFGTSVMAPNKNDSADAQLIASYLSMAVTKEQISPWKAPSPEGRALRELSRRREELTELHASECNRLEKLECMQEPPEAIVRNVRELISYLEDSIHNLEKEIEEHIDDDPGMREDIELLRSIPGIGDVTSVTLQGESDGLINFASVKGLVSFVGIAPREHSSGTSVFKKSQISRRGNSRIRHHLYMATLVAARVNPVIKEYYERLLNRGKGKKLALVACMRKMLHIIWGVMKNRKRFDPCYSLK

SEQ ID NO: 356140 - protein, 374 aa, unidentified
MQKISQFVGLDVHKDTIVMAVAPGGPGMEVKDLGSMAHDLPTLLRRLKPLGEPGQVHIAYEAGPTGFGLWRALRDAGYSCVVVAPSKTPKASGDRIKTDQRDAAKLARFLRAGELVPVAPPERDAEALRDVLRARDDAVFAQRKARQQLSSFLLRHGRRFEGKSTWTQKHLLWIRGQRMDSEAQQRVLEDYVREVERLTKRVADATEHVETLAPATQSCAAVFRALQALRGVGTIVAATLAAELGDLRRFRKASQLMSYVGLVPSEHSSGDTVRRGRITKAGCPPARWKLVEAAWHARLRPAMTKHLLRRCEGVPQPILDIAWNAQKRLHKRYWAMVNRGKRSQVAVVAVARELVGFVWAIGQALSQPTAPTAS

SEQ ID NO: 356141 - protein, 353 aa, unidentified
MIVIGADVHKRTHTFVAVDAVGKQLGSTVVPATTAGHRTAMQWAHARFGTEVLWAIEDCRNMSARLERDLLGADQKVVRVAPHLMAEHRRTGRERGKSDPIDALAVARAAAREPDLPVASHDAVSYEMKALVDYRDCLVRERTSKINRVLWRVHQLDPEYHIKKGGLTAKKHQKALQTWLEPHSSVDARLAGKEVAAIYDLTVEINEVEKEITKKVSDAVPTLLAMPGCGALSAAKLLGESADITRFPGEAQFARHAGIAPVPVWSANPGRHRLTRSGNRQINAAIHRIALTQARMPDTLGHAYYEKKKAENKTPREAMRCLKRRLTRVVYNHLTTDHHARTRKADNPTPAAA

SEQ ID NO: 356142 - protein, 349 aa, unidentified
MGEVSTIGVDIAKSVFQVHGVDADGTVVIRRRVGRAKILEFFSKLRPCLVGMEACATAHHWARELKKLGHDARLMPPAYVKAYLKRGKNDAADAAAICEAVTRPSMRFVPIKSVEQQSTLMLHRTRDLLIRQRTQLINALRAHLAELGLVAAKGREGLRQLVTVVTECGDERLPSNARFACQAIVGQLHAVQTQISGLDKRITQTHRANPDSKRLDAIPGFGVILSTAVVATMTDPKAFKTGREFAAWIGLVPRQNSTGGKDRLGSISKQGDRYLRRLLVVGAISIVRTARMWPDKYPWLIELLGRRPAKVVAVALANKMARVAWAVLAKGETYRAPTRLSNAAITVAA

SEQ ID NO: 356143 - protein, 410 aa, unidentified
MTAVYSVGIDVALRSHRVAVLGGDGEAVGKSFTIESTAGGFAALVETLHARGAGAAQSVIGLEATGHLWENLEAHLTRVGYRVVVLNPVQTRRYRDVLRRKAKTDDIDAYVIAGLLRSGAAAASYVPAETIQSLRELARLRARLMRDRQNYLRQLGAQLSVVFPEHADALGDLLTARPRGILREWPTAYHLAAATPRTIHHAAHSAGARGFTREDATRVRDLGRASIYSGKAATARGNVVRTLVTQLERLTAAIEDLDTAMAEELPPPAGGGPPSDAELLHTLPGVGTHTVATLLGELGTLSRFTSSKALVAYVGFYPQLAQSGERAAAPHLVRLGSRLVRRTAYLMAVNAIRGSAEFRTLYLRKKAQGKKPKQALIVVAVKLLHTMYAMVRDRHAYTAGRVLVAPPAGA

SEQ ID NO: 356144 - protein, 321 aa, unidentified
MNKNTIFVGIDISKDVFDVYSPEEGHQQFTNNVYGFKSFVKTLTPSHWCIMEATACYHYQLSLYIFEKGHRVSVMNPLIIKRYIQMKLNQIKTDKSDAKMICQYGQEQSLLLWHPDPEYVEECKMLQTVTQLYFKQTTAIKNKLHSLGSKGHTKGLMIRSLKRQLKQLQKEINLLETQMELLIKTHEPELFTIITSIPGIGKKTAMLLIITTNSFKDFESCKQISSFLGLAPNERSSGSSVRGRSRISKTGNPIVRNHLFLCSFTASVHNPQCKALYERIVAKGKSKKLALIAVCNKLIKQAYGISKSRIPYDKNYVSKLN

SEQ ID NO: 356145 - protein, 358 aa, unidentified
MKKVYYIGMDIAKNVFQVFLADQRGRELGNRKLTRKQLTSFFSNLPPCTVGIEACGTAHHWARTLIELGHEAKLIQPIRVKAFLGHRNKTDAADAKAICEALMHPGTRFVTVKTIAQQVMKHYLSRRERLVRNRTELINQTRSFLSEYGISLPKSRSQFEHNFTAVISTYWEKFSDDLKRILEDNYSEYQVIQEKIMDMDRHIKNNAQKNEQCCRLQEINGMGPLTATTIVSNVGDAKQFKNGRQLAAYLGLTPREYSSGGKQHLSSITKRGRREVRTLLVLAAHAAILGITRRKVDEAGRPLRLSRLDNWILALKERIGMFKTTVALANKMARIAWVILAKGEHFNPARAVALETAK

SEQ ID NO: 356146 - protein, 543 aa, unidentified
MVVGSRLCSLFSLDIFAWYNKKKLTFYYTHNPLFVKFGILIYVNIIRSPPPGIEIQISLKSISGRYTMKNQNIYRNNNYALKETLSNYKPEQLLYIPIEVGKFNHKASIVNFFGDIVVKLFEFPNKKHGLDFFVKKLNFATTSSNAQKIFLGCESCGHYHLNLVHHLKQLNFPIEIINPRDTRKENPNKNSKTDNIDLGAIARVLISNKGGRQIVPEGVYYNLQRAARTRRKFVQRKTSSKNIITGLLDRIFPGLWDKDAPIFSDRWGKASMLLLERYPHPHRIIRLGEERLARFLRKNNTKLGDETAHKIIDAAKDSLTKPLAELHMDIFALKSHIKCLNLYNETIAQLEQEIACLLVQTPGIYLLYIDGISVIFAGEFTAEVGDINRFAYANQIISFAGSCSKVFESAEYQAQGLHISGRGSKFLRSTLNQVALALNAWCEPFHLYYTNKALQKPDKPGIARIATGNKFVKLAFALMKYEQLYKPRGLLLDEKNYYSNLWSKIIRKLSGFNLTNISQENNYLLKIKKYLEEKYALTLSTKL

SEQ ID NO: 356147 - protein, 304 aa, unidentified
MIVEQNGVVDESTRFVGLDVHRRYATVAAVDSQQHVVLTARRIDFNDFDEWVRKHLRRTDVVTLEATSNAWHLYDMLVPLVASVTVANPIQVALIAKARVKTDPRDALTLARLLAVGMLPSVWVPPVEVRELRALGAHRRRLIKQRTQARNRLRAVLYTHNLFPPAGEAFGPANRPWWEGLDLPSSEKLLVRHDLAILDSLEPLVKGVDAELVRQSSLAPWAEQAAYLVQLPGIGVHSAMQLLAAIGDIARFDAPHKLVGYAGLGARVHSSGEEHYGGRITKQGRRDIRCTMVESAWVAVESHP

SEQ ID NO: 356148 - protein, 400 aa, unidentified
MISVGIDVSKEKSTICILKPYGEIVSRPFEVCHTEKELSELASMLLRLNDDVRVVMEATGIYHLPVLCYLKEKGLFVAVVNPFEMKEYRCQGLRRVKTDKQDAITISNYGIDHWYRLKNYEAEESVYAELKLLGRQYRHYMRMRVESVLELTHLLDYTMPGIKTLLKGWNETNGKDKLGDFAEEYWHYDNITKKPEEQFIESYLKWAKEKGYHQSQDKAVKIYALAKEGIPTVSSDTPSTKMLVQEAVRVLREVDNTLMTILTQMQALAKSLPEYPVVRAMGGVGNVLAPKLIAEIGDVRRFHSGKALIAHAGIDAPPYQSGQFIGTERKISKRGSSSLRKIGYEVMRCLKTQKEPEDAAVYRFILKKEKEGKSKRAAKIAGLNKFLRIYYARVMEVYQK

SEQ ID NO: 356149 - protein, 417 aa, unidentified
MQYDPPMLTAQPANGLTCGIDWARDDHVIAIVDCNGRQVHRSTVEHSSAGLRELVAVLARTGATEVAIERPDGPVVDALLSVGITVVVISPNQLKNLRGRYGSAGNKDDRFDAFVLADTLRTDRARLRPLVPNSPATAALRALCRARKDLVIHRVAVANQLREHLNRVFPGAVRLFADLDSAISLKFLTRFDCQDRADGLSPKRLGAWLKSVGYTGRTDPVTLHARLTGAPRGATGEEGAAHVHITRALVATLTALVEQITVLSQQIDVQLAAHADAHIFTSLPRSGTVRAARLLAEIGDCRARFPTPEALMCLAGVAPSTRQSGKMRSVGFRWSCDKQLRDAVCDFANGSRHANPWAADVYDRARARGHDHPHAVRILARAWLYVIWHCWQTKTAYEPAKHGALQALQKRHQQSAA

SEQ ID NO: 356150 - protein, 373 aa, unidentified
MDYSTVYVGMDVHKETFSVCCYTNEKEKAEYCQTIDAHYSKVLNYLEAMKFHYGNDVLFICGYEAGCLGYTLYHQLTDHGITCVILAPTTMLKPSSGKKIKTDKRDAALIARCLAHNDYKAVHIPTDKDEQIKDFIRMRNDHNLALKKIKQQILAFCLRHGYRYDAGKSYWTQKHLVWLRTIEIDGLYKEILDEYLLTYHTLMDKIDRIDRRIEELAYDEDYKDKVNKLVCFIGIKTHTALAVIAETGDFKRFKDARSYSAYLGLVPGEDSSGQKRCGLSITKSGNSHIRSLLVEAAQSYTKGQIGHKSKALKERQRSNPSEIITYADKANERLKRKYYGMTLRNGKRANVAKTAVARELSCFIWGMMTENYN

SEQ ID NO: 356151 - protein, 387 aa, unidentified
MSQVDDLSRSLAAFDQNTTLTVVVELSEASWLVAGLVPGVDRRPLKKQEPDPRALLRLLERWRAEATKTGRMIERIVLAFEAGRDGFWLARWLRARGIEVYVIHSTSVAVSREHRRAKTDRLDTGMLMRVFLGWLRGERGHCRMVAIPTLEEEDAKRPSRERESLVGERTRIINRMKSALARLGIRGFKPALRKAPQRLEALRTPEDTPIPPNMLDEVRRDMIRLAVVREQIDAIERARLVRLEQAPASGSHPMVRLLARVIGVGIETADMLVQEVLSRKLRDRRAVARYVGLTGSPDESGKRRREKGLAKAGNARVRRGLIQLAWRFLRFQKDSALAQWYRARTEGPKGVRKTTMIVALARKLLIALWRLVMTGEIPVGVVLRAAA

SEQ ID NO: 356152 - protein, 378 aa, unidentified
MHKDSVYLCILRENGEKIERVYGVLTPQLDSMRDFMAENKVSEVAMESTSVYWIPIWRVLVDSFELKLVNPYFIRQLPGRKSDVKDAQWIAECVMKELIRGSFIPSPLVQRLRLYDRRIFEINAELVRKYSKIDAILQRCNIRLSNYVSNTDCKSYKAVVKQISEGVTSPQELLRHVHKRIINKHGEDTILAALTGVVSNSEIDMLAQYVAESAILEDNKNKCIEKMREICNTEFKEQMKNLQEIPGVSERSALTVLAEIGPDVNAFPSAKHLVSWCGFNPRNDESNKKIKSNKITHGNRFIRIASVQCAWAASRTKECYFSKFYASHTQVRKKFKLKVVVAVARKVLVCIWHILKFNVPYKDFEPQKPVAKDCTQLA

SEQ ID NO: 356153 - protein, 340 aa, unidentified
MSSATIIGIDLAKSSFQLHGASADGAVMFRKKVSRDRVLAFLGAHPKALVALEACASAHHWAREIAALGHEVKLIAPIYVKPFVKRQKNDAADAEAIAEAASRPTMRFVEVKSPDQQGQGMLFRTRDLLVRQRTQSINALRGHLAEFGIVAPKGPARIDRLALAVDDNATALPGTVRRLAKLLLGQIGALTAEITVLEKDIRRRAPRDPEIARLMTIPGVGAICATAIRAFCPSMEQFNSGRDFAAWVGLTPRQNSTGGKTRLGRTSKMGQRDIRRLLIIGASAVVTWAARKGPAEGSWLARMMARKPRMLVVVALANKMARTVWAMTIRQEDYRNPAAV

SEQ ID NO: 356154 - protein, 433 aa, unidentified
MGKGEHHAVGLDVTGKRLFDKALPNDESRLRALFEQLAARGPLLIVVDQPNTIGALPVTVARACGHDVAYLPGLSMRRIADLYPGQAKTDARDAHIIADAARTMPHTLRRVDTGDETLTELGVLVGFDDDLAGEATRTSNRIRGLLTSIHPALERVLGPRIAHPAVLEILSRCGGPAGIRAAGKRKLTTIATTHAPRMGTRLVEEILATLPAQTVTVPGAKAAEIVLPKLADSLKTVLLQRQSIAADIERMLDDHPLAKVLTSMPGIGVRTGARILLEVGDGSAFASAGHLASYAGIAPVTHRSGSSIRGESPARSGNHKLKRALFLSAFAALHDPASRTYYNRKRGEGKKRNAALICLARRRCDVLYAMLKTRQPYRNPLAPASTCSVSSRREQRGTVGWTDPAQSRHRAQPRRRLAAGISRVLRNRKTDAE

SEQ ID NO: 356155 - protein, 407 aa, unidentified
MEVVYRCCCGIDVHKKVIVACLVNGGEQELREFGTTTSEIKTLANWLTESGCEMIAMESTGVFWKPLYNLFELMDLDAMIVNAAHMKALPGRKTDVKDAEWIADLLRHGLLKASYIPNREQRELREITRYRKSLTEERCREVNRLQKILEGANIKLDSVVKDITGKSARKLLQRIIDDDIPDSDEVSKLVHGRMRPKLDQIVASIEGITTPLQRKLLAQIIDHIDDLNRRIGELDKLVQEYMAEYEAAIEAIDEIPGIARRSAEVILAEIGLDMGRFPSAAHLCSWAGVCPGNYQSAGRRKHGKTTKGNKALKTILTQCAKSAKTVKSSYFFAQYQRISARRGKNRATLAVAHSMLIAIYHILKNKTAFHDLGSDYYDSFNRDRKINSYLKRLKALGWEPDAIPSSA

SEQ ID NO: 356156 - protein, 410 aa, unidentified
MRYYLGVDWADQTHAVWVVDESGTKITARAVPHTAEGLGAWGRELDEWRAQGIDLWAAIERPDGRVVDVLLDHGVVVYPVNPKALDRARDRFRQSGAKSDPFDARVLADFLRTDHGHLRALQPSSEAAQELKLLTEDCQRHIRQQTRLVNQLTATLKAYYPRALEVAELTSALAREFLPAYPTPEALTALTERQWQRWARAHRLPEARAGELWAVLRQPQLPVPAHVVRAKARLMRALVEQLMPVMAAVAQYRKAIDDFFASLPAAQWARTLPIGKHGITAPTLWARLGDAPGRWESFRHLQAHAGTVPVTKRSGKLQRVVQFRFACDKALRYVVDQVAFLSLLSSAWARAYYDQQRARGHSHRQALRALGAKWLKIIFVMWERHVPYDEQYHLATMARQQLRPRQQKIA

SEQ ID NO: 356157 - protein, 460 aa, unidentified
MKAYLGIDVSKGYADFTLLNEQKKELETVFQLDDTRLGHDALKELLQKFITAHQISLIYCAVESTGGFENNWYAWLTKLSNVLPLKISRLNPSGVKNNVLAGLERNVTDALSSRYIAAYLVSHADKVVYDVADATYSSYRSLHKHILLLKKQNTQLINELKMVLYSSFPEMMRYCKQGVPEWVLSILKKHGSSASIAKLKLHQLAKFKGVTDDKAKAILDKATKSVSSRNNSMQEFLIKSLAKQISDKQELIEEHKTFLTENCKGNEVAIVDSIPGIGTYSAAAIMIEIENIHRFATPAHLASYFGLHPVIKESGDKKFAYRMSKKGRATMRASLYLCAQTAVMHDAHLKSIYHRHRSNGKSHKQTIGIIMHKMLRVIWGLLTKKEMYNAVTDKENQNKKVTAPKENKREEIKTKRRYQTLDTQAPVSNIQTKKRKVYIESQVSSAEQALDHQCTPDVNL

SEQ ID NO: 356158 - protein, 357 aa, unidentified
MPSSDVKYIGLDVHKEAIAIAVLNGAGKLVMESIVETKASTLLDFLHGLRGELHVTLEEGTWAAWLYDVLKPHVLEVVVCNPRRNALLKEGSKSDKVDARKLAELLRSGMLRAVYHGENGLRALRELARSYEVVSKDLKRVMNRLKALYRAWGIPCTGTQVYSRRHREQWLKKIREAGVRRRAELFYQQLDGLQVLRRTVRGELLAESRKHQAVKVLRQIPFIGPLRAAQLVALMQTPHRFRSKRQLWTYSGLAVETHDSAQYRYVDGQLQLSKKPQLVRGLNQNHNHAMKEIFKSAALSATGRAGAFQDCYAGLLAKGMKPELARITLARKIAAITLTLWKKGECFDAGYVKRQAA

SEQ ID NO: 356159 - protein, 322 aa, unidentified
MEMLSFGGIDVSKDRLDITVLPDEQCSSVSNDAAGWAELIEQLRGSLITAIGVEASGGYERGVVRALLAAGMSVRQINPYKLRQFAKASGILAKNDRLDARMIASFVAIMPTRPAQRQTPMIEQLAAMLTVRRQLSDHKVATENASRLLEDAMLQRLSRRRVARLTADIDLLDQRLVEIVTADPALAHRFRLLTSMPGVGAVLACTLIALLPELGQMSRKQVAALVGLAPYDFDSGKLKGRRCIWGGRARVRHVLYMAALSASNWNPALKAFHDRLEATGKKPKVVIVAVMRKMITTLNAMLRDGTAWVDRYSGRRSASTAR

SEQ ID NO: 356160 - protein, 401 aa, unidentified
MHYVIGIDVSKATSQVAVAVDGKVTQHFKITHDVLGFNQLNTIIMQFNEFPDIVFEATGIYSRRLKSFLDWHNYPYTYLNPLAAKKQLDQLRPNKNDLNDAKNLAETQFILARAKSYVQNPIYIELQDMSRFYQQINHDIVSTKNRLHRILQLTFPEIEGLFSATDSPHYWELLTIVPHAIITRRSRQALMDTIQGGISGHIGHERLRKLVDQLMSMGQISAPAVAANSYNVAQVIYYAKRLIELHGTKGDILTAMVDKAKDLPEYSIYQSIPGFSDKTVVSLIAELGDLHRFRTANKLNAFVGIDLRFNDSGDYKSTGFITKRGNSTARKVLFRAISNIASTASYGHPSHINDWYQKKKQSSLSKGTKKIAIGAMSRLLRTMHYLVINHQLYDYKAASKH

SEQ ID NO: 356161 - protein, 340 aa, unidentified
MSEVSIIGLDIAKSVFQVHGADASGRALLRKKISRVKLLPFFAELPSCRVVLEACGGAHHWARELAKLGHNVQLIAPAYVKPFVKRQKNDAADAEAICEAAQRPSMRFVPVKTEEQQAAAVIFRGRDLLVRQRTQISNSIRGHMTEYGWVAPKGLAHLSRLSALLDDPQAIPQGARSILMILLDQIAALDSQIAILDKEIARRAREDETARRLMTIPGIGPITATAITALAPPPGTFAKGRDFAAWVGLTPRQHSTGGKQKLGAISKMGERTLRRLLIIGSSAVVLQACKRGAPKGSWLEQMLARKPRMLVTVALANKTARIVWAVLTGKEVYKAPVAAA

SEQ ID NO: 356162 - protein, 411 aa, unidentified
MLVAGIDIGAEVHHVAVVDEAEAAIVKPTPFPENVSGYQKLLELLARAGARGGEDLPLAPASAQALQILVVMEATGHYWQNLFAALVAHGFAVALVNPLRTHRFAGEELARTKTDRVDCLQIARFGAQKRPAATDVPDTLVEELRELVRLRSRLVQDAVERVNQLHRLVDLGFPEFNHYLGELNTQLATAILRQYPTAQAFHRLSRHRLAHLCYDGRHRVGAELAQQLIDAAKISVGSQHSAAHQLGVRYACEDLQTLRARLKQLDGDIAAKLQQHEIGKLLTTIGGIGDNTAACLIAELGNPARFESARALAAYAGLCPRHNQSGKRRPKSSALTPIGNRRLRQALWMPTLTAVSRCNPWLQTFYRRLLERGKPHKVALVAAMRKLLAAVYSVAKHRRAFVPFVISTQGL

SEQ ID NO: 356163 - protein, 364 aa, unidentified
MSAFYVGLDVHSKMTEYAIQEVDGTVVRQGRVPTTREGLQSIAKILGVGAGTRVGLETGTMARYVANELRELGLQPVVIDAHEVRLKAHRPRQKSDRRDAYEICEGLRCDVYRTIVHMPPAPIDRLRITLAQRRHFVRLQSAQMSATKHILRSSGLGQKSRHLKSKSGWQQLISSVKNPVRSRIQAHHAVWLVAGDQVALLDQSLLEQSKPFKEDFLRLQTAPGVGPIVALTAIAAFSDAKRFPSAKHAASYAGLVPSTSQSGDRDWHGHITKQGSSELRAMLCEAAHHASRKTSAFNPYFSSLCARRGYKMAVTAVAHRLCRVLYAMLRDHSKFDVHKLGVEVGPFEKKVVTPYRLRRKPVKV

SEQ ID NO: 356164 - protein, 379 aa, unidentified
MGQDITWAGIDAHKDSLSVAVSLPGEEEIRQWRTRADRLAIARLIKKLKKLAPGQIVCCYEAGPCGYELQRQLDSEERIRCMVVAPSLVPRKPGQRVKTDRRDARHLVGQLRAGELTEVYPPSREDESARDLCRYRDQVRRDLMRCRHRMLKMLLRRGVVYRAGKHWTHRFRRWLDTVRFEEDAAQAVFDHMLVELTQLEERMRSLDARIEELASSDRYSEVVGWVRCFRGFDTIGAMIVVAELYAFFRFRSPRHLMSYLGIVPSEHSSGESHCRGGITKTGNSYLRRILVQAAWNYRHLPKVTPELARRREDQPAWAIEIAEKAQHRLHRRYRHLALSRRKGKNKVTVALARELTGFLWALLHRGLVEKAQAPQSRAA

SEQ ID NO: 356165 - protein, 351 aa, unidentified
MNNATARKRTQITIGLDLGDRRHTYYVLDGAGKMAREGSLGNTREPLATMARSYPGATVVMEAGTHSPWVSRFLQELGLRVIVANPRKTRAIYQNERKSDRRDAMMLARLARMDPTLLHPVEHGSQEAQQDMLQLKLRDSLVRARVALINALRFTLKSLGYPVSNPSSERFPKLVLSEIPESIGEMIAHNVAAIAELTQRIKALDISISRLAAERYPETIYLQQVSGVGPITSLYFVLKVGTPGRFQRTRDIGAFLGLCPRRDQSGETDKELRISKCGDQYLRGLLVNAAQYILGPFGTDSALREHGLRLAQEGTARAKKRAVVAVARKLAVLLLTLWKSREPYESFPTMA

SEQ ID NO: 356166 - protein, 425 aa, unidentified
MNQTSNPTKPPSADPLIVGIDWADSKHDLTILQGSKVQHFRITSDTEDVAEMIDRITKIADGRPIAVCLEKGRVRIIYHLMLHEGLTLYPVDPKQAARYRESFASSGAKDDRRDSYYLARLLAERPSDLRPMKPDDPLTRKISLLCQTRRQLVDDKTGVIQQLHAVLKMFFPLLFALPGARLDCGLKQEILRRWPDPRKFIKLNRQTLEKLLRRHRCGSDEQIAGWIEMIRTARLPSTDASLIEPLLIRVRTMSEQVKAIDKGIEQLEKEIATAMNQHPDAKLFTSLPGAGAALAPRLLAAFGSDRDRWSDAGELGSYSGILPVTRQSGKAKHVSRRRACPAYLKQTFHEFADCARKHCDWSGAYYRLQRDRGMAHHAAIRKLASRWQRILWSVWRHRQPYDDDRYTEIMKRKLPELTAFLPTAQ

SEQ ID NO: 356167 - protein, 339 aa, unidentified
MNHYVGIDVSLEASSVCVVDGTGKIVCEGKIASEPDALITWLKGRKLELTRIGLEAGPLSQWLYAAMRQAGLAVELLETRHVRNALKTMPVKTDRNDARGIAQLMRLGWFRPVHCKSIPAQETRALLTARKLVQVKLHDIEMSLRGILRGFGLKVGPTTPVRFEGRIRELVAGHPSLEAIAQSLLAVRVALRREFDRFEKQVHAMARCDTRARLLMSVPGVGAIVSLTFAAAIDDPARFKSSKQVGAYFGLTPTKYQSGETDIDGRISKIGDAGVRAVLYEAANIILTKPLKGCTALKSWAMKLAKRSGMKKAKVALARKVAVMMHRMLADGTSFRSAV

SEQ ID NO: 356168 - protein, 319 aa, unidentified
MAQNDLVVVGIDVAKDKVDACIRALTLRQTYPSTTQGQRKLVVWLRKHHVSKAVMEASGGYERAWAKVLREAGIDVRIVDPKRVRSFAQSAGRLAKNDAIDAEMIAWFAETFGDAPSQRHDAAREELQALVKARLGLVNLRMRLEGQSEHAAPRLVQKAHACILKSLANEIAKLEAAISAKVKSSPDLTERAEIIESVPGLGETSATNLVAGMPELGQVSDKIVAALIGVAPYDDDSGKRRGERHVKAGRRWVRNAIYMPCVGAATLNNPVLKAYYQRLLAKGKQPKVALIACMRKLIVILNTMLARQQKWDPSRYALS

SEQ ID NO: 356169 - protein, 371 aa, unidentified
MSESSKTLFVGLDVHKDTIAVAYAPEERGAEVVSLGMIGTRQHDIDKQIRKLESKGATLAFAYEAGPCGYWLYRYLTRRGLTCSVVAPSLIPRKPGDRVKTDRRDAVTLARLLRSGDLDSIYVPTVDDEAIRDLSRAREDAVRDLKRSKVRLKAFLLRQDIRYEGRANWNAAHLRWLARVVCPTPAQQIVFQEYVHTVTEQTDRLRRLEGELHTAEKTWRLHPVVEAVQALRGLDLTGAVTLIAEVGDLTRFDTPRKLMSYLGLTPSEYSSGASRRQGGITKAGNGHARRALVEGAWAYRYPAKVSRHLQLRLEKVPTEVRAIAWKAQVRLCKRYRLLSARGKHVNQVVVAIAREMAAFAWAIARTVPIAS

SEQ ID NO: 356170 - protein, 421 aa, unidentified
MGKLIERCAGIDIGKRFLVCCVMTGAAHEEPRSETRRFDTTVPGLKRLRNWLNEERVTDVVMESTGSYWIPVFNLLEGHVTVVLANPEEVKNRKGHKTDRKDAEHLADLLRHNHVRSSYIPAEPVRQLRDLTRRRVQLTQDATRERNRVQKLLEQVNVKIGSVLTDVFGVSGLHMLLALLDGRAAPEEIAGLARGSAKRKTPQLIEAIEGNRMSDHVRFLIRGCLRHLACLEEEVEELDAEILRRMQLSTFQKAFTLLQTIPGVGQLSAATILAETGPDLDSFPTIEQMASWAGLCPGNRESAGIQKGPQTTHGNPYLCTALVQCAWAATRKRDSVFRSRFQRLAPRRGEKRAIIAVAHHMLIILYCMLKRGVPFHGAEHAPKQRRGERRAHHHLRCLRRLGFSVEIRLSSESTPPATISR

SEQ ID NO: 356171 - protein, 315 aa, unidentified
MSSPVFVGIDVSKAELQVAVRPGDEQRTFANDPSGLGQVVAYLGPQPPTLIVLEATGGYETAVAGALAGAHLPVAVVNPRQVRHFAQAVGTLAKTDRIDAGVLAQFAEAVRPEPRPLPDALTQALQALVTRRHQLVNMMTAEKNRLAGTSPPIRRQIKAHLAWLQKQLAQVNQDLDQAIRESPVWREREQLLRTAKGVGPVLASTLVADLPELGALNRKQIAALVGVAPLNRDSGTHQGRRSIWGGRSRVRAILYMATLNAIQHNPLIRPFYERLVAAGKRAKVAIVACMRKFLVILNAMVKTNTPWNPKATTGP

SEQ ID NO: 356172 - protein, 395 aa, unidentified
MFIVGIDVAKRSHEVCMITSDGQTVQRPFSIRNNCTGYNLMLEKIRKHTNIKSQIVFAMESTAHYWLALFTRLRKDGYHVILLNPIQTSAMRDMFIRKIKTDAKDSFIIAELIRFGRYAESNVAQDRLLALKELCRNRFYLVDMAGDLKRKLIALIDRVFPEYEAQFDTIFCKSSVAVLKKYPTPQKLSNAHLDKLTELLWNSSNGHFGEWKARELRELARNSFGVEDCDGAYSTLILLMLDQIQSLSGKADALEKEISRLFQSFDTTVTTIPGVGPIIGAVILSEVGDISRFSSADKLAAYIGVDPSVNQSGEFQAAHAHMSKRGSPYLRRCIWMASQVAVQRAPMFRAYYEKKAAEGLKYMTIIGHVTRKMTAVVFAILRDHKVYEPILPTAA

SEQ ID NO: 356173 - protein, 344 aa, unidentified
MKSSKIIGVDLAKTVFQLALADEHHHVTQSKRLNRTQFREFFVKHPPVHVIMETCGTAHYWARTLVAMGHNVTLLPAQYIRPYVRRNKTDANDALAIVEAARNQSIHTVPIKSEYQQALQSLHRLREQWKHTRTARINALRGVLREFGVLVPMGPKAAITTTRASLESLPVWLHVSVQDVLDELTDIQTRITSLEKQLKQMVKADPVIQQFMKINGIGLLSATAMRASVQSPAQFKNGRQLSAWLGITPREYSSGDKRYLGRITKKGDKYLRTLLIHGARSVMARNKIRLRENEKLTGLQQWAIQLEQRVGHNKATVALANKMVRILWATWMHQREFDGDYAVR

SEQ ID NO: 356174 - protein, 451 aa, unidentified
MAKKKLEMDIINPHCAGIDIGSRSHFVATGQALEDVKEFGVYADDLIEICEHLNARGITSVAMESTGSYWQNLYVELVKHGFDVVLANGKFTKNIKGKKTDVKDARWIQKLHSIGLLTGSFLPDDQTETLRTYCRQRQNWLDLAVEATHKMQKYLKLLNFRLDVVVRDVCGLTGMTIIKDICKGNLNPQELAKHRHFNCRKSQDEIAKALKGNNRTDYLFGLKQEFESYEFYQKKIAECEKMIAAFLKSEINTNPQKKKLKTTDKQHKRLNKNAIKGIDLNQASFQYFGGVDLMAIEGLGHSTVLSIISEVGPEGFSKFETAKHFTSWLRLAPNNKISGGKLLSSKTPKGSNRLKIALRNAANAIGNLKDTHLSNFFNRVCYRKGRTVAVSATARKLAVIIWNMVVKQIPYQPPTQYLFLDEKRKLGMVKRIRKQMDKFKLSNADLGFATT

SEQ ID NO: 356175 - protein, 312 aa, unidentified
MTPIICGVDVSSKKLDARVGREGRFARFDNNPEGVAALAGFCREQGVALVVMEATGGYEKKPFALLWSHGVKAALVNPRSVRRFAEAMGRLEKTDRIDSGMIAWFAESKGVEPTPPATEIQGRLAALVVRLSQLTDLKTAQNNQRRLVEDPTVRKGFDGLMLLITRQMRALERHIVELIDSDPLWSRLNQAFRSIKGVADRTVARIMAQLPEIGMLSGKIISKLVGLAPIARDSGKTTGKRAVRGGRSGVRATLYVIALGVCRFDPDFAAFRDRLVAAGKPPKVVRAALAHKLLVRLNAKAREVRMSLAHAV

SEQ ID NO: 356176 - protein, 443 aa, unidentified
MKHARKRYVGLDVHKDVVEYCILDAAGKKIDGGRIICEQSVLELFAMKTLSPKDHVALEATANTWSVVDIIEPHVAKIVVGNAVKTKAIAEAKVKTDKIDAMILAQLLRCDFLPTVWIPDAKTRVLRRLSSFRKSLVQDSTAAKNRIKGILNHLLIKHAVVWSKNGLDELKKLELPLHERTIMDCEIAMLEHLRMQIEKVELEIKKLAYEEDNVRLLMTLPGIDYNTATAIVAAFGDVSRFKDADHAASYLGLVPRTKQSANTCRQGSITKAGSSLARSLLCEAAQYLSRNEGPLGVFVRRLLQKKTWNKAIVAGARKLATIAYHILKNKEPYRYAPVARTQMKLGRFRNSVTDKRPEYPRYRFDEKLSEHIENRNDVSVRFIPPIADVYAKEGLPPSRSFDKLSVGEQRAIKEMGLTEQVRKTETVQVIVKPKKANEPLHKG

SEQ ID NO: 356177 - protein, 589 aa, unidentified
MAAVMIGVDPHKASHTAVAISAAEEPLGELRVRACVAQAERLLAWAAAWPQRTWAVEGAGGTGHLLAQQLVSAGERVLDVQPKLGARVRLLAAGDVNKNDPNDARSVAVAAMRSAGVQEVRADDHAAVLKIWSKRYRDLGRSRTQVVCRLHAVLGELIPGGVPKAITAARAARVLKAIRAEGAVQAARWELAAAFLEDLRGIDAGIRETRKKLAAAVAAAGTSLTGLFGVGPVIAAAVIGDVRDVSRFPGRDHFAAYNGTAPIEVSSGQRKGLPAEQAREPPARPRHPHGRDHPDPQPAQPGPRLLRQETDRGQDPQRGPARAETASQQRHLRLPAGRRPARRSPCEGPGRAAGERLCRQRGRLTPQAPALRTSHSRTRSPHYDRHRRPAAWSRPRPGQSWPFLDRCHPAAGDAAGPGGAPAAKRGRTTWRCGETTATLGCEEGHGSNSAGKETAPEGHLTSRGKDRRNSLTQRGIRYGRGGTSQRLASGPRISITLSRRCLSALTPRRTTAAAHPAPGVRPVLTKPTHGRAESEPWSAGRLAGAVMGGVERHARNVGVRIPASLQRVFSFPRPASGTLGPPRISDPGQ

SEQ ID NO: 356178 - protein, 355 aa, unidentified
MKQEKFIGMDVHQATIAVAVRDSMGKLTMECILETKAATILEFIKGLNGSLSVTFEEGTSAAWLHDLLKPHVSHLIVCDPRKNALLKDGSKNDRIDARKLAELLRGNQLSAVYHGEHGVRTLKELARSYLTISQDLVRVMIRVKALYRSWAIPCSGKQVYGVRHRSLWLDKIGEAGVRRRAEFYYQQLDALRSLRQQVRRDLLTESARHQATKRLRQIPSIGPIRAALLVALLQTPHRFRTKRQLWAYSGFGIETHDSGEHRYVDGELRRSKKKATVRGLNRNYNRDLKNLFKGAATQVTAKPGPLQEFYTALLAKGIRPEMARLTLARKIAAISLTIWKKGVDFDPKQLQRQAA

SEQ ID NO: 356179 - protein, 428 aa, unidentified
MDEFNRNRLEEFRQFKREIRGSEEHLIVGIDIAKQRHHAFYGTATGRTFLRRFVFSNDYEGFRRLLDQTEALRVRHGLERVVYGMEPTANYHKPLGEYLITQGRTVVLVSGVTVKRNRESLDGRWDKHDVKDSANVADLISQGKCLYYEHPSAELRGLRGLLSLKRRLKKQEHGYRVRIRNHLIAQYFPEMDQEYERLGAEGLSIVRWCFLPSQMTELDVDPFIERVTSRRIRMEKRRRLEGIWEKAGESIGCDGVPGVEHEAKVMVEGLRQIREMIKETEDKIEELCKEFPEYPYLLTIPGYGPDLSARVLGALGEADRFENGKQVLKPAGLDLSADRSGKDSDKAIPKIPKRGKADLRYVLYQAAFIASTKNPYFMRYYTNKLRGREKEKGIHTKMIVKLSAKMLLIAWTLMKKKEAFDPAYLNVE

SEQ ID NO: 356180 - protein, 412 aa, unidentified
MNPVIGLDVSKGESHVQAFLDKGKPYRKSFSITHNLEGLGRLLDFLQDVEKAALGTQPSVVLESTGHYHTPVIQFLEEQKYVYILVNPLISHRAKSSSLRKVKTDAIDAYHLCELYYKEELQPYKKRGIQLLNLRNLTRQQESIAEISAKTKIQLHSLIDQVFPEYRGVFGSLYSKISLLTLLEFPTSKAVLSVSEKELTDKIASLCKNRSVSWAEEKAQMLIEAALRNPFQNNLYESHIFNLEILIKIVLQYQEHLSKIADEINALAKEIEEYCILQSIPGIGEKIAATIISEIGEIDRFNDAKKLVAFAGIDPSVYSSGRFTASVNRITKRGSCRLRHALYMAVQSGIRDSRKKKTTDEIIPRNRKLREFYDKKREEGKPFRVAVIACLNKLLHWIFALLKKRTTFQDID

SEQ ID NO: 356181 - protein, 406 aa, unidentified
MEAIVERCAGLDVHQATVVACLKVGAAGAKPRKELRTFGTTLPELEELRDWLKTNGCTLVTMESTGVYWMPVYAVLEDHFEMVVGNAHHIKNVPGRKTDIRDCDWISELARHGLIAKSFVPPRPIRELRDLTRYRRKLVQSTASERNRLLKLLESANIKLSSVASDVFGVSGWAMLQALVEGTQSPAEMAQLARRRMRRKLPELERALQGRLEEHHRFLLGVQMRRIETMEADVAELDKRLREKLAPYSKPMRRLMQIPGVDWVIAEIGVDMSVFVNAAHLASWASLCPGNHESAGKQRSGKTRKGNVHLKTALVTAAVAASKAKGTYLADKYRRLKSRRGALRAAVAIGHKILVIAYRMLADDSDYQELGDGYLDQLNTRRNASNMVRRLRQMGYDVQISLKEAA

SEQ ID NO: 356182 - protein, 386 aa, unidentified
MTHSTNILPRSVDYDQTLVLAIELSNKSWVLAAQVPGLSQTKAKRTIDPNKNDLLAAIDCYRTRAAAAGRSVRRVITSYEAGWCGFWLARWLMAHDIEVHVVQPSSVPVDRRMRRGKSDGIDAELLLRTLLAWLRGEPRVCSMVPIPDEADEDARRCIRERSELVSERVGLVNRIGAVLATLGADDYNPLLQSRRRRLTELRTGLGDPLPPNALAKIVRLLTRLELVLAQIVELELERDAVARTDAPDQAGKMIQQLISLRGIGVQSATVLVREAFVRRFANGKALGSYAGLTSTPYSSGGIDREQGIGKAGNRRLRTMMVELAWLWQRYQPGAAQVVWFRERVGSTGRRVRKVMVVALARKLLIALWRFVIDGVMPEGAVTKPSI

SEQ ID NO: 356183 - protein, 423 aa, unidentified
MMRLVYPICCGLDVHKKVIVATIVTTDNAGISTYKQRSFTTINSDLNNLHDWLLANDCKYVCMESTGKYWIPVYNYLEADIDVCLTHPKYVKAIKGQKTDKKDSKWIADLYKFDLVRCSFIPTKDFRQLREIARYRFKLVCMKSSEKNRIQNCMTVSNIAIANILSDPFGKTATEIISYLLEHTSESIDEKAVRKMIKKSAKAKSDDIIAAIKGYNIESDQAKKLNLARDHMDYLENMITQTEVELYVRIKPYFEYVEYISTMPGMTQLSSTIVLAEIGVDMNVFEDAQHLCSWCGLTPRNNESASKKHSTKIMNAGTYLKPLIVQCALAAIACKKQPYFAIKYRRIKYRRGHKKALIAIARMMMVCIYHMVKDKKPFTPCDYKELMDPNNHHQKVVLNDASVFEYLQSQGYDISSLVKCNDN

SEQ ID NO: 356184 - protein, 337 aa, unidentified
MPKRNVPRPAAVYGIDIGKNIFHVVALGSDGTVVQRVRFRRDTLLQFFERAAPAIVGMESCAGSQWIARKIQALGYKVRLIPAQFVKPYVKSNKSDIIDAEAIAEAATRPTMRFAALKTEEQTDLQALHRVRDQMIGTRTRLINQMRAFCLEYGVALRQGASLFKLDLPEALKDPANDLSPAMRKLLGDLFDDLRQLEKRIADVTREIEAIADREDAARRLMTIPGIGALGATALLAAIGNGRQFQKARDLAAWLGLVPREYSTGGKQKLLGISKRGNRYVRKLLVHGARSCFRHLDRTRDRLGSWLDGLQARMHPNKAVVALWPDPIGWSGFNLSS

SEQ ID NO: 356185 - protein, 448 aa, unidentified
MAQWPKRRPSNPFSTINPHAAGIDIGATHHVVAVGPDRDLTPVRTFCTFSGDLHALADWLQALGITTVAMESTGVYWIPVFEILEARGFEVVLVNARDVKQVPGRKTDVNDAQWLQQLHQYGLLRGSFRPRESVVQLRAYLRLRERLIEYAAAHIQHMQKALMQMNLQLHHAVTDITGVTGMRILRAIVAGERSPEVLAAHRDVRCAASDATLRAALTGHYRPEHVFGLQQALELYDFHQDKIAECDAQIETALRALAAARTAPATPLPAQRHAKGRNEPAFDVRTVLHRLLGADLSQIHGLGPYTVLRLIAECGDDMTRWPTAKHFTSWLCLAPANKISGGRVLSAATRRSSNRSAALLRIAAVNVGRTQTALGAFYRRLAARIGKAQAVTATARKLAVLFYKALRFGMAYADPGVSAYETRYRQRVIQHLERRAKSLGFTLVAKAG

SEQ ID NO: 356186 - protein, 343 aa, unidentified
MQTVTTIGLDIAKSVFQVHGIDAEGKVVIRRQLKRRYVLAFFQKLAPCLVGIEACASSHHWSRELRALGHKVRLMPPAYVRPYVKRQKNDAADAEAICEAVTRANMRFVETKTPEQQSCLMLHRTRHLFIRQQTAVINAIRAHLAEFGIVAPVGRNGVEELLGVVADASDKRLPEIARACLAALGAQLRMLKAQILEFDRMINAWHRSNETSKRLDEIPGVGPALATALVASVADPRAFRSGRDFSAWIGLVPKQHSSGGKDKRGGISKQGDRYLRSLFTAGALAVIRYAKIHGAKHRPWLTALLARRPTKVAAVALANKIARMAWAMMARGERYKEPVALAA

SEQ ID NO: 356187 - protein, 326 aa, unidentified
MNKELDLLPALGIDVSKDYFHVELGLNEKRRNRKFANRAAGFAELSVWLGKQKVPQVHACLEATGIYSEELALYLQQQGHRVSVVNPVQVKAFGKSELLRNKDDRPDASLIRRFCEQKRPLAWTPPAAELRQLQALTRHLEGLLQTRQQQMNRLESARSKEVVKSLRKLVQYLEKEIAQTEKQISGHIAGHPELKQQSELLDSIKGIGERTIGILLGEINFKQYRTARQVAAHVGLTPQNNRSGTINGKTRLSKIGNARVRKALFLPALVAKRHNPLVNSFCARLAANGKNKMQVVAAAMRKLIHIAFGVLKSGQPFNPNHELEIA

SEQ ID NO: 356188 - protein, 292 aa, unidentified
MLVGIDVATAELVVATRPGGERWTVSNDERGVRTLVERLRGDGVELIVLEATGGSELLCVAARAAVSLPVAVVNPRQVRDFAKATGQLAKTDRIDADMLALFADRVRPEVRTLPNAEAQELEALLARRRQLLEMLQAERNRLGQVVGRGNAPVKKSLKAHIAFLERELRMADTDLGAQVRQSPAWRERDDLLRSVPGVGPVLSFTLLAHLPELGRLSRRAIAKLVGVAPLSRDSGTLRGRRFVQGGRASVRGVLYMGALVAWMRKLLTILNTMIRTGQRWCAAHPDRAVIHA

SEQ ID NO: 356189 - protein, 368 aa, unidentified
MPRMAEQAGPVTGGVDTHADVHVAAVIDPVGRVLGTQAFPATAAGYRAALAWMKLHGELARVGVEGTGSYGAGLARYLADCGVEVAEVIRPNRQARRQRGKSDTADAVAAALAALSGEASGMPKSRDGAAESIRALKVARAGAVKARTQAGNQLRDLILTAPEPLRQQLAGLPTGRQVETAARFRPGDPARPAEGAKAAMASVARRHQQLTAEVTRLDTMLDELVRHAAPEQFLAKRGVATQVAATLLVTAGDNPARVGREASFAALCGASPVDASSGKQIRHRLNRGGDRQANSALWTIAMTRLAHDPRTKAYAARRTTEGKTRKEITRCLKRYIAREIYKALCRPSGPGRPSTPQIKQDLSVPVLT

SEQ ID NO: 356190 - protein, 403 aa, unidentified
MIFVGDDWAEDHHDVYLMDETGARLTARRLPDGLTGISGLHGLIAEHAEQPDQVVIGIETDRGLWVDAVVAAGYQVFAINPRAVTRYRDRHHVSGAKSDASDAKLLADLVRTDRHNHRPIAGDSAEVEAIKVLARAHQSLIWTRTQHTHRLRSALRGYYPAALEAFDDLADRDALAMLDRAPTPEQGARLPLSAIRAALKRGGRQRNIDERARMIQARLRTEALAAPAPVVAAFAATTRAAVAIIAELNRQIGELETSLAEHFETHPDADIYLSQPGLGVILSARVLGEFGDDPNRYTDAKCRKNYAGTSPLTIASGKKRAVLARYVRNNRLYDAIDHWAFCALTVSPGARTFYDQHRAAGDTHHQALRALGNRLVGILHGCLRHHTHYDEHTAWAHRTATAA

SEQ ID NO: 356191 - protein, 353 aa, unidentified
MKIYYVGMDVHKATIVIAVLDVFGKVVSQSIIETSTQAVRDFFKSLRGEVDVTFEEGNHAAWLYDVVEPLVKQLVVCNPKHNHLLKQGSKNDRIDARKLADLLRLNALKPVYHGEHGTRTLKELVRCYECMVKDLSRVQNRLKALYNSQAIPNRRGELYHLSQRESWIQKQENAGRRVRAELLFRQMDELKVLKRAARKAMIAESRRHKAQSILSQVPELGLVRIAQIIATVDSPFRFRTKRPFWAYLGLAVETKSSADHELTNGRVSRRKMKIETRGLNEDYNRRLKSVFKSAATHACSCGVYKEYYEKLVAGGMRPEMARLSVARKLAAAVLAVWKKGQSFDEGMIMSRAA

SEQ ID NO: 356192 - protein, 403 aa, unidentified
MTTFFIGLDWASQTHAVCVIDEHATVVERFEVDHTAADLHGLIRRLARFGSAPVAIERPSGMLVDTLMQAGIQVVPIHPNVVKATRPRYRSHGAKSDISDAYLLADLLRTDGHRFTPLAPQSDEICALRALVRGRDDLVATRVQLANQLRGLLESFWPGAAEVFADIDSPIALAFIERYPSPECAARLGPKRMASFCAQHAYCGRRSPEELLERLHRPPQSVAAELEMEAKRTLVLSFVKTLLALTAQIRQLTARIEHDVAELDDGKLVMSFPRAGRVCAAQILAELGNVRERFDSDDHLAAEAGVAPLTYQSGKSRAVAFRWACNHRLRAAITCMADNSRHVHAWANNLYTKARARGCDHPHAVRILARAWVRVIWRAWTDRKPYDLEAHRGAQTLLKAAGG

SEQ ID NO: 356193 - protein, 407 aa, unidentified
MISIGIDIAKEKFTACALEQGSKIVRKPFDVHLNKTKVEEFFKKLNSLNEEVKIVMEATGKYHLPILYELKDKGYFVSVVNPLKMKQFCRVLNFRKAKNDNIDAIQIAEYGLMYWKELQEYKVDSENFRVLKKLNRSYQHYMDLRINQMNFIDQTISQTFPGIKKLIPHASGDFSKDKLLDFLEIWWHKNLVLEKPEEKFIEDFKNWAKEKRYHPNADKAKSIYKLAEESISTQPSNSSYIKTSIQEGIELIKHINQILHTILSQMMEIAEPLEEYQEAKKFSGISDKLAVQITAELGDLSKFKNKKSLISFVGIDSPPYESGNFKADKRKITKRGNAILRKVGYQAMKCMMSAKDTENDIYLYMIKKEKDGKAKKICKFAGLNKFLRIYYAKVMASKQEKKVLKVA

SEQ ID NO: 356194 - protein, 414 aa, unidentified
MALVRWVGRAIGLDVHREFCVVAICEDGKVRSAGRVPSTPEGLGALAESLLATDRVALEVTGSCWEVARILEPHVQRVIVVSPDDTGISSARAKTDKLDSRTLASLLWKGELDAVWMPDERCRILRRRLARREQLMRTRTRSKNEIQAVLQRRLQERPPFADLFGVKGRQWLAGLQLPVEERESVDAGLRQIAFMDSEIAAVDRLIAQQALDWPEIRRLMTVSGVNLICAASFLAAIGEPSRFLTSRKMVAYLGLDPKVRQSGEAPARSGRISKRGSASARWALVEAAWSVVKQPGPLRAFYERLRARRGHGKAIVATARKLTVLFWCMLTRGEDYAHQRPALTKKKQRQLELTAGAPARTKVAAGIWSTNRAILHAERALAEQAEVSYKRMVTDQQAGRPSRKAGASATPERA

SEQ ID NO: 356195 - protein, 285 aa, unidentified
MKKKNQPCGTQTQSTPKTTLQSGDLVCLGIDQHADCLVVVEQINACVPRPARKFPAQSQAFYRWVEERQKAGARVVACYEAGPCGYWLQRVLSARSVECLVVAPKWWAENGKTKTDSRDARVLCERLFQWVSGKTNVFTLVRVPSEEEERFRNLSRNRERLLKERKRLAQAGRGIALGQQMRLKGQWWKGKRWTELANCLEELLGPIREVLLSLETQIDKLTTKLESHAAAREARPAGLGKLTDAVLSAEVGDYRRFDNRRGPGAYFGLVPGEDSSGKRKRSLPI

SEQ ID NO: 356196 - protein, 345 aa, unidentified
MSVVVGLDVSLNSISICIVDESGGPVWQGKSLSEPAALIRALEGYRERIRLIGIEACPLSEWLYAALAESGFSIVCIETRHAQRFLSSRPNKTDRSDARGIAEMMRIGHFRPVHVKSGASQRIRTVLNAREKLVRQIIKIEQTIRGLLKVYGLKIGVVHRCTYAARVEALLADMPDLRLGIAPLLEVRNVMRRQKVLLDRKLSAMARQDEVCRRLMTVSGVGPIVSLAFKATIDDPKRFKNGKAVAAHLGLTPRIYQSGELDRSGSISKCGDKLMRHALYEAANSHLRIAKKWSPLKAWGMKLLPRIGAKKTCVAIARKLAIIMHRMWVDEVDFRFSEPGERIAA

SEQ ID NO: 356197 - protein, 414 aa, unidentified
MELVYERCCALDVHKRQVTACVHVPDRKGKRTELRAEFQTMTPDLLAMRDWLKGLGVSCIAMEATGVYWKPVYYLLEDDFELLLVNAQHVKNVPGRKTDVGDAQWLCQLLEHGLLRASFVPPKPIRELRDLTRYRKSLVWERAREANRLQKLLEDANIKLSDVASDVLGASGRAMLAALCGGNNDPAALAELARGKLRAKLPALETALQGRFSSHHALLLSHLLSHIDYLDHSIDSLSAEIEERLDPFAQQRELLCTIPGVAERTAEVILAELGPDMGRFPSHRHAASWAAICPGNEESAGKRKTGKTRKGDRWLRTALVEAANSAAGRTKDTYLRAQYLRVKRRQGHKKAIVAVAHSILVAAYYILRDQVPYQELGGDFFIRRQDQERLTQRLVRQLERLGQRVTLEPALQGR

SEQ ID NO: 356198 - protein, 438 aa, unidentified
MASSTAHLLDPALADATDPLAGYDPRAEPLEDRLYLPVGVDPHGDVCGVVFAHPYPQSKEVLTQRMIRNNNLQDMLWLIETGDRLAAPFQAHPAYVFEATNVFWRAQRNFLHRAGYATATVCGRQTNHARGTVTRAAKNDLKDAYNITKVFKQGESHATRILPEPLASLREYCRLHQFLTNYSVAIQNRMHCLRYQLHPEFDALFADPVCATTVALMAAELVQPQRLLHCDLGELTDLIHQASRGKLDAARAAELQQSARFTFATPYAVAGSSYSLKLLAQAYQHIHTQLLPPLEAQIQTTLAAKDFPIHHHLPEIKYFGPVVIGSFLSELGLPQWFPTVDSVVAWFGLDPAVSESANHPTGATHLTKRGTKYGRRTMWLVGRLWSQFMPEGRQLFLKERQEHQRPYDAAVCVVAAKLVRIAFAMVRDGSHFDLAKAF

SEQ ID NO: 356199 - protein, 409 aa, unidentified
MKLFVGIDVSSKDLVTSMISEETTEVVFHGNFVNDLKGATELKNMIIDTANSNHLDQVVIGMEATSIYSFHPAMFFQEDSDLKKLNTQSVVIDPKKTKRYHDVFAEDKNDQIDAFYIADFLRVGRYSVGIVRQENYIALQRLTRSRYELVQSLARAKQHFIENLYYKLNKLVISDELNTSIFGSTMMSLLTEDMTTDDLLNLSITDLADYLNEHGRGRFANPEALAKTIQKAVSASYRLDKVIANSVDTVLSVYAEEIKAFQKMIKDLDKAIEKVVQVTDEEQILRSIPRIGPVYAAGILAEIGQIERFDNEAKLAKYAGLSWREKQSGAYASDNTPLKRTGNAYLRYYLVEAANRVRIQDPVFGEYYRRKYQEVKHTPSKRALVLTARKLIRVIFFLLKNHQIYQEKR

SEQ ID NO: 356200 - protein, 368 aa, unidentified
MTNRTAIEKDVFWVGFDDHADKVVAAVLVNDEDKIHERFEVVPDEKGLRQLIKKLKTYEGEVRCIYEAGPCGFVLQRRLVKEGILCSIAAPSLTPRQAGNRVKTDRRDAKKLVFLFRAGTLTTIHIPDEEQEALRDLVRAREDAVEDARRARNRLGKFLLRHGYRYRGKTTWSREHWRWIRAIEFEQQHSRQALEAYIAAVVGSEDQLKSLDQQVSEAADTCEMIVKAYATLRGIDRLSAVTVHAELGDLKRFIGAPEMMSAVGLVPSENSSGNSQRRGSITKTGNAHVRRVLVEAAWHARHRPVVGEALRRRREQQPAKIVAIAKQADIRLHRKFTGLTWRNKRSTVAAVAVARELAGFLWAIGQAL

SEQ ID NO: 356201 - protein, 457 aa, unidentified
MRKKAKRTKGIEEARPFEGLSKVNENAAGVDIGATEIVACVPGGSEIQLVKAFGNYTVDLKAIGKWFHEHNIETVAMESTGVYWIPLFEELEREGFECLLISSRSLRKVAGQKTDVEDAQWIQTLHSYGLLRGSFRPQGDLVALRTLLRHRAQLLEHRAPHIQHIQKALLQMNIQLTQAVTDVMGVTGQKIIRMILAGEREPKTLAALREPGCKHSEEEIAKALTGTWRDEHLYVLKQSLELYDFYTQEISDCNDEIERQYGMVRPNWEMGELVAWRSKKSNSHSKNAPQNQEAIRKHLKRISGVDISLVYGFGVSLAQTVIMEVGTDMSRFPSDKHFCSWLGVAPKHDVSGGKTLNNKTIKTKNRAGQAFRMAAQSVKKANNPFGVLYRRLRARLGPAQATVATAHAMARVVYKMLKYKVEFDPLSVNEYQKKYEEQQIKYMKKRASKFGYQLIPA

SEQ ID NO: 356202 - protein, 415 aa, unidentified
MKGIEDTSQIKRYVALDIHKEYVLAGGQNAKQEWLMPPRQIKMAKFREWASANLQAGDAVVIETTTNVWDIYDIVAPLTTRTVVAHAGAVRQIAEARVKTDKEDVKRLIRLLIADIVPEVWIPPTEVRELRGMISYRNRLVKMGTMVRNRLQSLLHRHNILLPKGKLLDATWWQEQKMSTLEKMQIQQELAMLAELDRHKREVDAELGRQCLREPWGRQAVRLLQLPGFGVVMTMIVLSAIGDIHRFESTKYLVGYAGLGAGIHESGKEHIEKRITKSGRKELRWALVEAAWQAIRISAYWKDQYEKYLRRMRRPNQAIVVIARKLLVAVWQVLTKEETDVHASEEDLAYKMLVLAWDLDEDVRMGRTYKQFAKYALMKLGVETDITRFVRKNVPRRVAPREEVLARMEELGLTC

SEQ ID NO: 356203 - protein, 337 aa, unidentified
MRSWSVTVLSEQAVLKKFTQDPSPVALNKFLTNTYPEAEYYSVYEAGFCGFWIHWELCNLGINNIVVNPADVPTMAGERLRKTDAVDSGKLARSLRAGELKGIYVPDSVATEIRSLIRLRDSLTKDQTRHKNRIKSHLRYLGVDIPEEFQRPGCTWTNKFVLWLKGLELETDYGKKTLDLLIAQYEDLRAQQLKLMKELRVLSRTERFEEPLKYLMSVPGIGQLAGLTILSEVDDISRFKDASCFASYIGIVPMCHSSGAHDGIGDITVRRHAKLRWLIVEAAWVASRKDPVLSAAYVEYCRKMKPSKAIIKIARRLVNRIYFVMKHQQPYVNCYVS

SEQ ID NO: 356204 - protein, 350 aa, unidentified
MQIIGVDLHTRQQAVAMLNVETGEIVEKTLQHEGESVREFYSTLAGPTRVGIEATGSMQWFLELMEELGIDCQVGHPAKIRAAEPRKQKHDRRDAALVLQLLVENRFPSIWMPSREQRDVRSLILYRHQWVRIRTRVQNALQAIALSHGLRRGSSLWGKAGQQAIASLSLTCYTAERRTALQSLYRQLEEQIDDLNRKVEELAWQRPQARRLMTHPGVGPITALATETFLGEPKRFVDGKAVASYVGLIPSEHSSGGRQRFGRLSKQGNPLLRFLWCEAVGHAVRKDAELQRFYQHKLVQKGLGKAKVAAARKLGIRLWILLRDQIDYQEFCRRGQLRQKHGGAHAGMPA

SEQ ID NO: 356205 - protein, 384 aa, unidentified
MDANQVMGADAGNIVLAVSLELSAAQWKVALHDGLRERPAVHAVGAPQAGIRLQGVLDLIEQHKLKWALPIHVRVVVSYEAGQDGFWILRALSSRGIECYMVDAASIPVERHKRRAKTDRLDAIRLVTNLRAWLHGERDRMRVVRAPSAQDEASRQLIRDRGQLHKEVLQHRERMRKLLVTLGCWDEVDHRSFARRLAAGQLACHDGTPLPDELRERLQRETARLELAEQQLATLERTLEQHLPTPVRERITYLRRLRGVGHIGASRLMLELFWRQFSNRRQLGACVGLVPQPYDSGQSHVDQGISKQGNRRVRTQLVKMAWGWLRYQPDSALARWFNERTQGTGPNRRARRIAIVALARRLVIALWRYLRDGVIPEGARFKPV

SEQ ID NO: 356206 - protein, 342 aa, unidentified
MKIMTGIDLHSNNALCGLMDESGRRVLHKKLPCDLPAILQVLEPYKAQIAQVAVESTYNWYWLVDGLEDHGYPVVLANPARMHQYDGLKHTDDVSDAFFLCELMRLGILPTSHLYNRQTRPVRDLLRRRMLLVQLRTSLILSFKSLNERTLGQRVPLGLVKAMSIEAAQARFTAPADQLLSGEQIGLMGRLQESIAKIEKHILATTKEWPTFQRVQEVPGIGRILGLTIALETGDPKRFASAGNFASYCRCVKSLRQSNSKKKGENNRKCGNRYLAWAFVEAAHFACRHDQRCRRFYDRKKQQTNPVVATKALACKLAKASWHVMHDDAPYDPQRVFGGGKP

SEQ ID NO: 356207 - protein, 374 aa, unidentified
MTQIMRIGMDTSKSVFQLHGVDAAERPVLRKKLRRNQVLEFFGKLPPTRVGMEACGAAHHWAREIGALGHEAVLLPPQLVKPYIPRNKNDAADADGICEAMSRPRMRSVPVKTAEQQAALMLVGVRDQLVARRTQLSNTIRGYAAEFGLVAAKGLDKIEPLLARIAAARLPDLAKEMFATLGADYAELGMRLSRLEGRLRAWQRQDETSQRLMEVPGVGPIAAALLVMKVANPRAFRSGRDFAAWLGLTPKDHSTAGKQRLGVITRAGDEALRRTLVVGATAVIQQIRRGRGRGSPWLTALLARKPPKLAAVALANKTARIVWKLMVSGEHYDRERAAAARAERSAALAEGFALRSALAVTTVRGDAAATPRET

SEQ ID NO: 356208 - protein, 444 aa, unidentified
MGKPQVFDDQEQERVFERVAAVDVAKASGVVCLRLPHPAQPAGRRSQVWEVPATMHAVTELAGRLAAEGVQKVTLESTSDYWRIWFYVLEEAGLDVQLVNASQARNLPGRPKTDKLDAMWLARLTEMGLLRPSFVPPAEIRVLRGYARARTRLTHDRTRCFQRLEKLLEDALIKVSAVASKLTTRSVQDMIRAMIAGQRDPQVLAGLARTRMKAKHDALAEALAGLFTDHHAELAQLLLDQIAFLDAQIARLAMLTGEQLASIRAAGGIGADGTTGPSPGAIALPVIARLDEVPGIGAELAASIISETGLDMTRFPSPGHLASWAGLCGRTIQSGARTRTGKGQGNAWLRGYLGRAAIAAARTNTFLGERYRRLARRRGAARAQVAVARSILIIIWHLLNDPTARYHDLGPGHYQARTDKNRKARNHIRQLQALGYTVTITQAA

SEQ ID NO: 356209 - protein, 322 aa, unidentified
MAMLSFGGIDVSKDRLDIMVLPDEQCSWVSNDAAGWAELVEQLRGSSITAIGVEASGGYERGVVRALLAAGMSVRQINPFKLRQFAKASGILAKNDRLDARMIASFVAIMPTRPAQRQAPMIEQLAAMLTVRRQLSDHKVATENASRLLEGAMLQRLSRRRVAGLTADIDLLDQRLVEIVTADPALAHRFRLLTSMPGVGAVLACTLIALLPELGQMSRKQVAALVGLAPYDFDSGKLKGRRCIWGGRARVRHVLYMAALSASNWNPGLKAFHDRLEATGKKPKVVIVAVMRKMITTLNAMLRDGTTWVDRYSGRRSASTAR

SEQ ID NO: 356210 - protein, 383 aa, unidentified
MDVHYQCSTVAFRDHRAKLVGRERLDHRDRAALFRRLSRWPKGLPVVLEASFGRGWLSDLMVEAWLEVHLSNGLKVEQMRKARGIAKTYKKDAGLVSRLAFGSEAWWEVWRPPGAVREHRELLRYRADLVASQTQTKNRIHALFHRQGVFHEFSDLFGAQGREFLARLCREGSGYLSEMGRCVLEGHVRQLDRVRHELAEVGHRLHGRLTVDPLIARLKTVPGFGLILSHVLVAEIGELGRFPNQRHLASYCLLAPIARDSGEEDPQERPQGRRLGYRGNRTLKWAFIEAAHAAVRKDPRLRELFDRHTQGGKANRGRGYIKVARELVKIVYAVWRDERTYWMNPVTPPPQGPGQARSEASAGTQRHARSGTGRPKHPMVVVG

SEQ ID NO: 356211 - protein, 372 aa, unidentified
MGMINHVGIDVHMDRLTAAVAAEGSKECVYLGEIRHEQPAIKRMVLDLKKSRRHLRFYYEAGSCGYALYRYLTQLGVECVVVAPSLIPKKPGERIKNDKRDARKLARLGRAGELTAIAVPGIGQEAMRDLIRAREDAVRFSVTARQQLLSFLLRHGQRFSGKTNWTWAFYRWLEDIKFDTAEQRVVLQNCVDAVGFAKKRIEILEEQIRELLPDWPAKPIVDALMALRGFDVISAATIVAEVGDFRRFSSAPEFMSYVGLIPSEYSSGNSIKRGTITKCGNRRVRRLLIEGSWAARHAPYKTKHWKRKAQNASEAVCEIAFKAMRRLHKRYYRLAARRKEQCKVVTAIAREFAGFVWAVGIQAHAELEQCAA

SEQ ID NO: 356212 - protein, 366 aa, unidentified
MKKHTSKKQTTRKGTAKETFAFYIGIDLGDKKSDICVLDEQGELHDQFRLRMNAQELQTYFGSLARSRVAMEAGAQSRWVAEVIERCGHQVYVSNTRQVPYIHQSDAKNDPGDAYKLAELVRFQPRLLHPIQHRSQEAQADLSWIRAREVLVGSRTQIINAIRGMSKAFGERLQKCSTTSFTGKRGDQIPAPIRSAVAPLLETIDHLNEQISYYDQMIEQVARTRYPRHRLLDQVQGVGVHTALAYMLTIGDPERFDKSRAVGSFLGLRPKQKDSGERKPQMGITKAGDEYLRKTLVNCGHYILGPHGADSDLRRFGLRICERGGKNAKKRAVVAVARKLAVLLHRLWISGEVYEPLRNRQVAAAA

SEQ ID NO: 356213 - protein, 408 aa, unidentified
MDLTAMHKRVIALDVHQAKITACAVVEHDDGRVEVTKRDFGAFKRDRRALAQWALQIRPEVVVMESTGVYWKSPFAALEAVGIIAWVVNAHHVKTVPGRKTDMADAQWLATLARAGLLRASFIPPVDFRQLRLVARQRQKLVGMCSAEKNRLHKVLVDAGMRINVVVADIHGASARAMVKALIADKPMHEVLDCKGRLRASREELFEALSTEQFSDVHRFVAEEIMQHIEQIEQRIARMDQYLLQGLQPWQPQLRLLQTLPGIDEQGAAMLLVEIGADMNVFGSAQRLASWVGICPGNNESAGKRKSGRIRKGNAWVRRLLCEFAQAAARTRCALKAKFESLAIRKGHKKSIVALAHKMLRTIYAMLSSGTHYKDKTVDYEALSVARNAPRWMKMLRKHGFMTESAAA

SEQ ID NO: 356214 - protein, 391 aa, unidentified
MSMYFIGIDISKYKHDCRIISAADQKVVSKVTIKNNKAGFNELLTIIHSLANPADIRIGFESTAHYALNLELFLENSLLTFMEVNPVLISEYKKSKTLRRTKTDSVDCESIARWLMTVEYKPHSKGFYHAYSLKSLTRLRDKLIRQRSFYLVKITNVLDHTFPEFKPFFNERLSKTALYLLENYGSAEKMARMNSASYEKLRSVSRGKFSPQQFLRLKELASNTVGVNNSIFDVELNSLLSLYKSLVKEIDTIEKEINKLIEEVHPHYMSVPGIGPLSAAVIYSEYGDISNFTNPGQMLAFAGIEPGINESGTESHGGKMVKRGSSQLRYTLINCCLPLIRFDMTFATYYAKKRGEGKPHRVAITHVAKKLIRVIYALESQDIDFNAQKLR

SEQ ID NO: 356215 - protein, 406 aa, unidentified
MKVYIGIDWSENKHDVCFLDETGEVLLVKQIPHTIAGFRQLDQASQSLGVGRQEVIIGLETAHNLLVDYLWDQGYEQIYVLPPSAVKSAQKRYRQSGAKDDRWDAHLIANLLRTDQRCYTPWQPDQPLTRQIRAEVRFARQLGQEVVRDGNRLRAILLRYYPAILDAFPHLDSLVGLAFVQAYPTLSQAQAVSFEQLKNFLREHHHTQSRSWPKIYAGLHADHPVSHPDLEAAYAPLAMAQARILETLLRTRTACLTRLDKLFQLHPDHEIYDSLPRAGSLLAPALLAKLGDDRNRYPTPAVLQAVAGTCPLTKRSGKHSYVLFRTACDRDFRHIVQQWAHLSLEASPWAATYYHTVRPHCQTDNDAVRRLANRWLEILWRLWIDRKPYDEALHLKQHTVRNRIDY

SEQ ID NO: 356216 - protein, 333 aa, unidentified
MKPLSIPAIFLGIDVGKTDLFCHVILKSSTESARFDNTPDGVSALIAWLCKIASPLSILACLEQTGHYGRLVALALHTFGVRSLHLVNPRQIKAFGNQKLRRNKSDTADARLIAQFLKSEYDELRPWAPLPANHEKVKELSRYAESLTQDTARLKTKLEAVTLVDVKRSINRRIKNQQKELEAIRAKISKIVENDTRLKIQNSLLYSIPGLGEITCQILLAELPEIELFGDARQLAAWVGVTPRHFTSGTSGRSTTPITKVGSANLRRALYLPAMTAMRYNPLLKEFAQRLKENGKTGKQIVVAVMRKLLHQIYGILKSGQPFNPEKRGLKTA

SEQ ID NO: 356217 - protein, 328 aa, unidentified
MQKKFIIGADISKKTIDIHCFNKAGCLTISNGIKGFKELLKWLKKHVTCELKDSIIVMEYTGIYTYNFENFLHDNGLDYVKRSALDIKRSAGLKRGKTDKADAMMISKYGWQRKEELQPMKPLSQAQIDLQQLMSYRDKLVADKASYECRLKELAGQMGKKLNAHIVQSMQHMIEILKAEVKQAEMAIKELINKNEELKTNYELAKSVKGIGFATTVHMLITTENFTRFDARKFACYSGVAPFKNESGTSIRGRTTTSYLANRKIKSLFTMAAISAIMHDPQLKEKYEQKLKEGKAKMVALNIIRFKLIERIFSVIKRQSPYILSKAA

SEQ ID NO: 356218 - protein, 402 aa, unidentified
MNFFVGLDWASQAHAVCVLDATGQVCWQGSAEHSADGLAELRRQLARFGPPASLSVAIERPSGLVVDTLMDAGYRVVPIHPNALKASRPRYSAAGSKSDPGDAFILGDLLRTDGHRFRPLQPLSDATRALRALVRGRDDLVAERVALANQLRALLDRFWPGAAAIFADVDSPIALAFLSRYPTPHSAERLGEKRLARFLVQHAYCGRRPVPELLARLRSAPIAQTGELEAEASGEVVRALVAVLLPLVAQIQQLSAAIAAALPQHPDGPLLQSFPRSGSVNAAQILAELGDDRTRFPTDEQLAAEGGVAPVTHESGKHRGVAFRWACNKRLRQALTTFADHSRHASPWAAAIYAAARRRGCHHPHAIRVLARAWVRVLWRCWQDRRPYDVMLHCAAQRVAAA

SEQ ID NO: 356219 - protein, 360 aa, unidentified
MTSMEQDRSRRRVVIGVDTHKYVHVAVALDANGGVIDSRSFAADSGGYVQLVDWAIDLGGAILTFAIEGTGSYRAGLTSAVRRSGIGAVEVMRTDRRDRRLRGKSDTLDAENAARAVLSGGATAIPKTNDGTVEMIRQIKVAKDVAVKGRTSAIISLKSVIINADPALREQLQDLPKMMLIERCAGLRPGPVTSVAAATKHTLRAIARRWQQLNAEVAEHEKILTRLTRQIVPDLVAAHGIGPDTAAEMLIVAGDNADRVRSEPAWARLLGVAPIPASSGMTTRHRLNRGGHRQANAALYRSVIVRMQFHEPTKIYVARRTAEGKTKREIIRCLKRLLAREIWTLMRPFREASKVARIAT

SEQ ID NO: 356220 - protein, 348 aa, unidentified
MKKVVAGMDLHSNNVVIGIMDLDGKRVASRKVPCELKEVVKFLAPFKKRLERVAVESTYNWYWLVDGLEALKYPVVLANPAGMEQYNGIKHADDTNDAFFVAELLRLKILPTGHIYDAQLRPVRDLLRRRTTLVHHRTALMLSFKSLYTRTTGREMTLSQLKELEIKEARQLYDHPANQLIATVQIKQIEQLSDLIHKIEKGVLDSARELPFYAKLLTLPGVGKILGMTITMEVGEVKRFAGPGNFASYCRTVEAKRTSNDKKKGTNNSKCGNKYLAWAFVEAANFAKRYDERCRKWYDRKAAKTSNVIATKALACKLAKAAWYLMAEETAYDPARMFGPPAKSEMKT

SEQ ID NO: 356221 - protein, 364 aa, unidentified
MTAGTSSAQTRDDARVNEEREEAQVMIACGFDVHRAQITFDLVDHNTGEVRRGRIVPATREQLRRWLSGLETARLVVAVEGTTGWRFVAEELEAAGARAVLAEPGETRALRGPKRRAKTDRADARWLRELLERGELPLSWIPPEHLLELRCRVRLRQTLADERRAWLQRVHAQLFHHGVPVAGEFAKPTQREWLRTVALSPAARAVVETALATVDFLDGELASLDGELRRYARTHPATRALGRLYGVGDLTAVAIYAAIGDARRFSSARKVIRLAGLDVTVHESDRKRQPGRISRQGPPMLRWAAYEAGLAACRASSPDHADYLALRARLGHKTACLTVSRRVLRRAYHALVAVGDATLEPTPS

SEQ ID NO: 356222 - protein, 357 aa, unidentified
MIYVGMDVSSKSFVVHAISDKKRVVFKGAVEPSRVGLGQLMTRLGEETKLVVFEAGNQMKWIALWFKRRPDVHLHVVHPSEVKWISQSSGKTDKVDARKLAELARGNLLPRKVHIVEGHVRELRELLSARQTLQSKRVALINTIRAYVLQEGRKLPEKFFERRDWYAALERKKLSRPLLLIVQSFRGGIDGLKGAEQELTDRIAAIEDKRLDLLETIPSIGTISSRVLLSAIDEAERFDGKKEVAKYGALTPTIYQSGGITHLGHINRNGRQEVRRVLLQCAHTVVRMKSYSAAPLKAFYQRVMRRGGKKIAIVAVARKLLTVAYGVLKHRAAYDPAKLLATEIHKPVKTYRLVAAR

SEQ ID NO: 356223 - protein, 402 aa, unidentified
MNAVGIDVSKGKSMVAIMRPFGEIVSAPFEIKHTASDINSLVELINSVEGESRIVMEHTGRYYEVLAHQLSAANLFVSAINPKLIKDFDNDSLRKVKSDKADAVKIARYALDKWQNLKQYSVMDELRNQLKTMNRQFGFYMKHKTAMKNNLIGILDQTYPGVNTYFDSPARSDGSQKWVDFASTYWHVDCIRKMSLNAFIDHYQNWCKRKKYNFSQSKAVEIYGKAKELVPVLPKDAITKLIIKQAVDQLKSASTTVESLRTLMNETASKLPEYPVIMAMKGVGTSLGPQLMAEIGDVSRFTHKSAITAFAGVDPGVNESGTYAQKSVPTSKRGSSDLRKTLFQVMDVLIKTHPEDDPVYQFLDKKRAQGKPYYVYMTAGANKFLRIYYGRVKEYLSSLPES

SEQ ID NO: 356224 - protein, 386 aa, unidentified
MQKLNDLSRSLTALEPNGTLIAVIEMSLSSWLVAGIVPGVERQPLKKLAVDESALLKLLHRWREEAEKAGRRIERITVAFEAGRDGFWLARWLKARGIEAYVIHASSVAVSREHRRAKTDRLDTELLKRSFLGWLRGERDHCKMVEIPTMQDEDAKGPNREHDSLIGERSRIVNRMKAALVRLGIRGFNPKLKRATTRLDGLHTPEGEPIPPNALAELRRDMERRRLVNNQIRQIEEERLARIEQAPSDGPHVMVRLLARVMGVGIETADMLVHEVLSRNMRDRRAVARYAGLTGSPDESGRKRREKGLARSGNARVRRGMIQLAWRFLLHQKNSALTKWFRSRTENARGTRKPMIVALARKLLIALWRLVREGVVPDGVVLRAAQ

SEQ ID NO: 356225 - protein, 342 aa, unidentified
MSEQYEGRQYVGMDLHRRRSVLVRMTEAGDRLETVRIVNDPERLAAVMSRAGEAPEVVLEATYGWYWAADALAGMGAQVHLAHPLGVKAFSYRRVKNDERDAADLADLLRMGRLPEAWIAPPAARELREMVRHRAKLVHLRSGLRCQVHAVLAGQGVAVPVSDLFGVGGTSLLKAAPLSPMARRRIDSLLRLINVFDIEIDAAAKTTAARLAEHPGYAAVQTLPGIGPILGAVFVVEIGDVTRFPGPTQLASWAGLTPKHHESDTTVRRGRITKQGSRLVRWAAVEAVQRTGKNTRIGAYRDRVAERRGRNIGAVAAARELIELVYYALRDGTVRRSLSASA

SEQ ID NO: 356226 - protein, 361 aa, unidentified
MTGIVTWAGLDVHARSTYAAAINPATGELVRARFGPGVEQPVAWLRGLPGPLRACYEAGPTGFGLYRAAMAAGVSVEVIAPGKTPRGPSDRVKTDRKDAELLARLLLAGSLTAVVVPPVEIEAARELMRSHDACRRDLMTARHRVSKMLLRHGRVYPEPSTWTSRHRRWLSAQQFDEAASELVFADAIAAVDGLTARKAQIAERLSRLAQDEEWWPTVARLRCFRGVDTLTAFALHLELGGDWRRFAHASALSAWLGLVPSLHQSGESSHQGSITKTGSTLARRLLVESAWHYGRDPRIGATLQNRQLGQPDHVLQIANRAQQRLHRVYHRMRSRGKPHNVTVVACARELACFLWAAATID

SEQ ID NO: 356227 - protein, 309 aa, unidentified
MKEQLVYCGVDVAKAYLDTMIGKEKRHLPNNALGHRGLIQWIKQSGASVQVICEPSGGYERGLIRALVRGQIQVSLVPANRVRQFARAAGILAKTDRIDAGVLGAFGEAMKPPILTGSRLEQEKLRELESQRRHLSRLLVMEQNRGARLSDASVLRLNRSLVNQIKKQIEKLDLLIQNKINQSQELSTKARKLTAITGVGARTAALLLAQMPELGQLNRREVAALVGVAPFNRDSGKMRGKRAIYGGRRFVRHGLYMAALVAARHNPILRVFYQRLRAAGKPAKLALTATMRKLLIVLNSALKSDLTYA

SEQ ID NO: 356228 - protein, 377 aa, unidentified
MKKNIRFIGLDVHGETIAVGVAEPSSEVRSLGVIPNRPESVKKLVKKLGPASSLRACYEAGPCGYVLYWQLTQMGVHCDVIAPTLVPTKSGERVKTDRRDAQKLARSYRSGDLTPVWVPDPEHEALRDLVRAREAAKKDQLRARHRLQKLLLRRGLRPPEQMKPWTTGYLAWIKSLRLQPPALEATLLDYLSEVDHAGERIKRLERTIDQAIEAAPAAIRAVIDGLQALRGIARISAATIVAEVGMLSRFSRPKQLMGYTGVVSREHSSGDRIRRGAITKTGNAHLRRILVEAAWSYRYRPAVGPQLRARQARQSAEVKEISWKAQHRLHYRYARLVGRGKPKQQVVTAVARELAGFIWAVGVQVEKQLPIGNVRAA

SEQ ID NO: 356229 - protein, 442 aa, unidentified
MEVIHPKAAGIDVGSEQLHVAVADGPVRVFDTFTSSLYAVRDHLLAHGVRTVAMEATGVYWLPIYEVLEAAGIEVYVVNGAHVKSLPGRKSDIADCQWLATLHGCGLLRSGFVPEEAIRQLRDYQRLRQDHVQMASAHIQHMQKALDRMNLKIHEVLSDLMGASGMRVIRAILEGERDRERLLALCDVQIVRKKAQRMRHALHGHWKPEHLFALRQALQGWEFYQRQIVACDAEIEAMLNELAARTPPGPDGTSAPPLVHKRIHHNAPHITDLKRLLVRITGGHDLAALPAFTDYSILQLLAETGPTMSPWRTEKHFTAWLGLAPSCRQSGKRRRRERRFRNRAGRLFCVMARSLARSNTIALGGFYRRLRATRGAAIANVATARKLAVLFYNTLRHGLTFVEHGLHAYEQHHRAQSLKRLQATARRFGMTLIPRPTATANA

SEQ ID NO: 356230 - protein, 370 aa, unidentified
MSVRRILAKTINTDLEYEAIGIDLAKNCVSAALLTTDGEVVCIDRLDYSELEKSAQVLCPTTFAMEPCTEMNYLVQKLEAWGHRCLVIGGKNVQNYVENHYSGQKTDLNDAQALAFLAQDKQLRTIKAKDIEQQKYASLTTLREQYIKQYRQTIVSLKGICQAWGLNISKGISGKAQLKDLIENHAAFPEELKESLVDMVTHAQTAQKALNKITKTLEELAKNDKLCQLIQTIPGLGPVCSCRLRATIGDIQRFKNPKDFPAYYGLVPRSIATGHNEKKGRITHRGDKTMRSLMVQGAGSVVNMATKGKLKSKQLTKWILKKQKEKMPWGKLVCAVAAKLLRIVRAVLISSKPYNPKIAGVAKCSLPKGT

SEQ ID NO: 356231 - protein, 407 aa, unidentified
MRVLYPRCAGLDVHKDSIVACIRCVSAPSAQEVRTFGTTTSELMRLGDWLESHGCTHVAMEATGVYWKPVWHLLEGRFELVLANAQHIRNVPGRKTDVNDAMWIADLLAHGLIRSSFVPPAPIQQLRDLTRTRKQLVREISQHSLRIQKVLEDANIKLASVLSDILSLSGRAILSAIVSGGQDPERLADLAQGNARKKRALLIEALRGHVTDHHRMMIQLHLDLIVALESALRDVDDAVGKALAPISCAAELLTTIPGVSHIVANVIVAEIGADMSRFPSAGHLMSWAGLCPRNDESAGKRRSTRIRKSGTWLKTTLVTAAWAAVRKNDSYLRTQFLRLKSRRGPKKAIISVAASILTSAYYMLRDGAEYQDLGPDHFNRIDKSKTVIRLVRRLKDLGYEVELKNAA

SEQ ID NO: 356232 - protein, 344 aa, unidentified
MITFGVDAHKRTHTMVAVDDRGQAVGQTTVGTTSKDHFGLLRWAGQFGLERRWAVEDCRHLSRRLERDLLAAGERIVRVPPKLMAHIRDLARTYGKSDPIDALAVARTAQREPDLPVARLDGPDRDLRLLVDHRESLVAERTRLICRLRWHLHELDPGWEPKARSLDPKRTLIEVQVRLEDRSGLVARLARDLAERCVGLTISITRLAQEITQLAEQLAPTLLALPGCGPLTAAKIVGETAGVDRFKSRDACARYNGTAPLPVWSANKARHRLSRTGNRQINAALHRIALTQARWHPSAQAMIQRHRSNGDSGREAVRILKRRLSDAVFQALRTDQRELTTLAA

SEQ ID NO: 356233 - protein, 400 aa, unidentified
MSERRAQAWAGVDAGKGHHWAAVVDETGATLWSKKIDNDESAILSALGEILDLADEVHWAVDISGTSSALLLALLAAHGQQAVYVPGRTVNRMSGAYRGEAKTDARDAYVIAETARHRSDFTTIDVPAQLAADLALLTAHRADLVADRVRMINRLRDVLTGVFPALERAFDYSSHKGALVLLTGYQTPAAIRRRGRSRLTAWLAKRGVRGADAVAATALEAAQAQQTALPGEDVAAQIVAGLAEQILTLDDRLKRIDKQISETFRTHPQAEIIESLPGMGPILGAEFIVAAGDLAAYADAGHLASAAGLVPVPRDSGRRTGNLHRPKRYSRRLRRVFYMSAQTSMMREGTNRDFYLKKRGEGCKHVQAVIALARRRASVLWALLRDGRIFTSVPPLTQAA

SEQ ID NO: 356234 - protein, 318 aa, unidentified
MKETTTKACVCAGIDVGKASLAYAVAGGSGPLRCANTAEGRAQMVAFLMSQSVQRVGMESTGAYHFEAADDLRAAGFEVVVLQPMQVKAYAKFKLQRAKSDPIDADLIAQCTAATDTRRDAPDTRLAPLAEHLTMIEQIEEDIARAKVRRERYRDPRLKRMLEDEIKQKTALKRAELRLLLKAVRAHKDLARRLGLLHSIQGVGERTALALVVRMPELGSLSREEAASLLGVAPFIHESGRYKGQRRTGGGRARARTSLFAAAQAAARQWNPALIALYDRLIKAGKPHNLAIVACVRKMIIYANTVLAHDRPWQIREN

SEQ ID NO: 356235 - protein, 343 aa, unidentified
MYFIGPDVHKKTISFCVKDAAGRVYQEGKIAATRRDLDGWARTLPQPRMMAMESTIFTGWIYDYLLPHAEKVKVAHPLMLRAIAAAKKKNDKIDASKIADCLRCDFLPECHMVSTEIRDRRRVLRYRNLVVKQMVQMKNRVSGLLLETGVSYNKQRLHKVGYFGELMSTNADISDAVRPLLNLSRGMIRRSGKLEYDLIRSLERDPLLKERLRRLRTVPGVGSITALTWALEIGDYTRFSSNKQAISYCGLCADEKSSADKVMRMPLSKQRNKHIQKVLVEAAKLAPRESPELAMIRARELERGNPNRATLAVARKMVCYMMAVERRQQDFVPAGECIPTAAA

SEQ ID NO: 356236 - protein, 334 aa, unidentified
MKKRYFMGMDVAKATFDFCLLTGTGTCLWRGQWSNDRGSIERFFAQLRARSWKLCQFHFALEATGVYGKALVAALHQAGLAVSVLNPAQVKYFAFSVLRRTKNDTVDAEIIARFCRERKPLATRPLRPSEEQLKVLVHERESRVGEQTRERNRAKKDPFQIQLPTLIRRQRQQRLLQLAEEIAQLDAAIGSLIASDECLKNQCQLLCSIPAIAAVTAAKLLAELAGKEFQSARQLAAYAGLTPAEYRSGGYLYGKTRLSKIGNAFLRKALFLPAAVARRWCKPLQPWIAMLQSRKLHALAIRGAIMRKLLHIVFGVLKYQKPFNPLLVFIPKAV

SEQ ID NO: 356237 - protein, 373 aa, unidentified
MKTKIHIGLDVHKNSIVAAYALSDGSPPQHHGKWGGSNLAAERGLLKLLKKLGLEKGDARICYEAGPTGFVLARRLLQLGYDCIIVAPSAVPKAPGERVKTDRRDARKLARHLRSGDLEGIHIPDGRDEAVRDVCRARTDASQALSCAKQQLSMFLLRVGRRYGGKTSWTQGHMNYLRGITLPEGAHQIVLEEYITAVDAGVERVRRLEAHMEAVLETWPRKPAVEALTAFRGFKTVAAMTVVSELGDLSRFKSPRQLMGYLGMVPSEASTGTKRRQGAITKTGNGHARWMLVECASHYRLAPKVSAALSRRQGGASRAVKELSWRAQNRLGYRFGRLSARGLNRNKVVVAVARELCAFVWELDAVVREGAES

SEQ ID NO: 356238 - protein, 451 aa, unidentified
MAKQKVEMEIINTHCAGIDIGSRSHFVAVGQALEDVKEFGVYADDLVAICEHLKQHNITSVAMESTGNYWQNLYVELMRSGFDVVLANGKFTKNIKGKKTDVKDARWIQKLHSIGLLTGSFLPDEQTEKLRTYCRQRENWITLAAEATHKMQKYLKLLNFRLDVVVRDICGLTGLAIIKDICNGNLDPKQLAKHRHYNCRKSENEIAKALKGNNREDYLFGLKQEFETYNFYQKKIADCEKMINSFLKNQINTNPKKKKLKTTDKNHKRLNKNAIKGIDLNQASFQYFGGVDLMAIEGLGHSTVLSIISEVGPDGFKEFATAKHFTSWLRLAPNNKISGGKLLSSKTPKGSNRLKIALRNAANAIGNLKDTHLSNFFNRVCYRKGRTVAVSATARKLAVIIWNMVVKQIPYKPPTEYLFLDEKRRLGLVTRIKKQIAKFALTNTELGIVTD

SEQ ID NO: 356239 - protein, 309 aa, unidentified
MEAIIVGIDVAKDRLDVAVRPSGELFVVERNAAGLEQLTARLGALVPRLVALEATGGFETVAAAALAAAGLPVVVVNPAQVRAFAKAIGQRAKTDPIDAAVIAHFAEATKPELRALPDEATRLLADLVARRRQIVEMIGAERQREKRATARLKRSIARLIKALEKELVSVDTDIDDAVRASPAWCEKENLLASVPGIGSIIARTLIAELPELGRLGRKQIAALAGLAPFTRQSGQWRGRSFIGGGRTSVRTALFMGAMAARRHNPILKAFFDRLVAAGKPKMVALIAVARKLLTILNAVLRDQKPWQPA

SEQ ID NO: 356240 - protein, 415 aa, unidentified
MKRIKFVGLDVHAETIAVAVAEQAGEIRSLGMIPNREESVGKLVKKLGPVEELRFCYEAGPTGYALYWQLTRMGAKCEVVAPTLVPVKAGDRVKTDRRDALKLARNYRAGELTAVWVPDAEHEALRDLVRAREAAKKDQLRARHRLSKFLLRQGRRPPVGVTSWTVKYLEWVKRDVHFAVKAQEATLLDYLHEVEHMAARIERLDSAIEEAVKVAPAKMRAVIEGLQALRGIAQISAVTIVAELGEVTRFSKARELMGYAGIVASENSSGERQRRGGITKTGNAHLRRVVVEAAWAYRHRPAIGFTLRKRQENLGEEVKEIAWKAQHRLHARYGKLMAKGKNKGVVVTAVGRELLGFIWAIGVQVEAQHPCGKRPKKSLLEVRGSQEAAWVAVEGHTKENPRYTYAVGLALNPRY

SEQ ID NO: 356241 - protein, 422 aa, unidentified
MFDFTQTMFVGIDVSKDSNQMCLINFERKKLLNKSFKNNQEGALSMKNIIIDNLSKHKLSNLIIVLESTGIYSMHIANFLSNEAESICSNTRVYLVNPIISHNYSKTILGSNKNDSNDAFALADFAASNKTNKLEPFKPNQHFAIQSLARQRKHYIELLAREKVRILNYIFIKFSDFNNAKHQNKIFSNTFGKTAVQTILEFKTPEEIVNMPLENLVEFIKSKSKNRFEDCTEVANTLKKACNDSYRLDKLSYDSVNTNLAIAFSVIDTYKKVIKQLDEEIEKLIRGSSLSKDIDILCSIPGISNVFAASILSELGDVANFKSDDAIAKYSGIYWGQHNSGDFTSEDNRLKKVGNAFLRYYLIEATSSVISNNVVFKSFYDKKLNEVSKHKNSRALVLTSRKFIRLIYKLLKDKKLYEYPLA

SEQ ID NO: 356242 - protein, 345 aa, unidentified
MTTMPQPATTPVTVGVDTHADVHVAVATDSFGRRLDTTSVVTTPAGYAELLGWAQRLGQLQAWGIEGTGSFGAGLTRFLRAQGQVVVEVNRPDRQARRRRGKSDPLDAEAAARAAQAHQGSVPKAGDGQVEMIRSLRVARATAMKARTQAINALKGLLVTAPAELREQLRGLSAVRLVQAAAVLEPGPVTTPMAAARLGLRTLARRYQALSAELAVLDAELDRLTATAAPKLVALFGVGSDSAGALLVAAGDNPDRLRSNACFSMLCGSSPIQASSGKTRRHRLNRGGDRQANAALHRIVVARLRHDPRTRDYLARRIREGKSKKEAIRCLKRYVAREVFAALPR

SEQ ID NO: 356243 - protein, 282 aa, unidentified
MLIIGCDFHSRFQQIAMLDPTTGEVVERRLEHENGEAKMFYATLPSPARVGMEATCDAPWFERVLREHHHELWIGDAAEIRAAMVRKQKTDSRDALHILDLLLTNRFPRIWVPSLAERDLRQMLRHRHKLVRFRTSVMNQLHALAMGQGLCRRKKLWARAGRKELEGLVLDPWASLRRNELLQLLDQLDPWIATLDEAVMQAAESCPAADCLMQQAGVGPVTALGFVLTIGPVSRFANSKKLVSYLGLNPSEDSSAGRQRLGAISRVENLCAHAGLVARLTE

SEQ ID NO: 356244 - protein, 337 aa, unidentified
MKRYLGVDLHRTQFVVCTRWENEEQEIRQWRIGELARFVEQLQPEDQIAVEAMGTTARFYDAVVGRVSRVVVVNPHQFKVISESVKKTDRKDAAALALYLAKDLLPEVRMKPKQNRELMHLAETRDLLVKQRSALKGKINNLLAMQGIELKREALSSKIALERVLALPVSGMVQLELRVLVEQIRSLSESIAELDERLEEEGQQLPGYENLTSIKGIGSLSATVLLTVIGKISDFADENKLAAYLGLVPRIANSNESERSGRITKQGNKLARTALVQCGLVAKRYSPYLQRFYERIKQRRGGGKAKIALARKLVKIVYDTLKNQWVFEDFPSFTLAA

SEQ ID NO: 356245 - protein, 380 aa, unidentified
MAEITRALIARVGVDLAKTVIQVHAVDGAGRRVVARSFNREAFWAWCAQLPAGCMVAMEACSGAHHFARRLRAMGLDARLIAASFVSPYRMEGKGGKNDMTDAAAICEAASRPRMRFVPIKSCEQQGVMSLHRVREGLKKDRTACINQIRGLLSEAGLVFSKSPKALRAVLSEVLEDASNELSTMARLVLNRAFDHWRELDEHMRWCDRQVGLHVRSSAGAKRAAKVTGIGELGASAITASVGEFKQFNSGAQFGAWLGLVPRQNSSGGKASLGRITKRGDDYLRTLLIQGAKAAVMSAGKRDDPISRWLVQLAARVGWQKACVAMANKNARILWSVMTREQGYDAHHVSVKPPAKQPPAKQPDRAGAKCAVPAQQPCVA

SEQ ID NO: 356246 - protein, 349 aa, unidentified
MITIGVDFHKQTSVFHVLDAQGHKLQRRRLKNDPVLIREFIESFQGQKQLAMEATRSWSLFHDSVRDLVDNFDLGHPKKMKAITESETKNDPKDAEMTARLKHTGFLPKAHVSSLDTRQLRDLVRFRGFLVNQRRSVRNQVQTLIDRNVWPCHRPQTFKNLFCRRGLHWLAQLNLPEKERFILNQCLENYHQLNQKIAEIETFIQDHDCELPGLVHLRTVPGFKYSKVTAFVVLAETSDIARFRKARGFCHYAGLIPREFSSGDKHRTGRLVKGANMHLRTALIESTLSAIRTDAGLRTYYKQKKAQNGSGAAIIATARKLCCAIYHVLKEQRAYRPEPLNPPAAVCHS

SEQ ID NO: 356247 - protein, 358 aa, unidentified
MRIIALDVHRTFAQVAVLEDGKIRNAGRIDLEHSRLLQFAKTLKPDDEIIIEATGNTNVIVRLLSPFVGRVVIANPILVRAIAWAKVKTDKIDAAVLAKLHASGFLPEVWMPDEETETRRRVVAERAQLVSQITRLKNRIQSVLHANLIPPYKGILFSQRGRTWLTAQPLPEDQRRVILRHAGELDRLGAELAEVDKSLALRALEEPQVKRLMTITGVNATVAMSVLAAIGDIRRFSSQEKLVSYFGLNPRVRQSGDKPAYHGRITKQGRAHARSMLVEAAWVVSGAPGPLRAFFIRIRDKRGKHVAAVATARMLAVVVWHMLTKDEDFTWSRPALLQWKLRKLELKAGHPSRRGGQQ

SEQ ID NO: 356248 - protein, 447 aa, unidentified
MTSNLEHESWPLVSPNAAGLDIGASEIWACVPAERATPAVRSFATFTPDLETLADWLVSCRIKTVAMESTGVYWVPIFELLEARGLEACLVNAAHIKNVPGRKSDVQDCQWIQRLHSYGLLRASFRPEAEMVVLRSYLRQRAMLIEHRAAHIQHMQKALQLMNVQLTRVLSDITGSTGMQIIRAIVHGERRPQKLAQYRQGTCRHSEAEIAKALTGHYRAEQVFALKQALALYDAYTEQLQACDAEIERQYAAIRPRFDPDDPDQPLGPDEKRNTHSKNKPGFDARRPLFQLTGVDLTAIDGLDEASAQVLLSEIGTDMSKWRTEKHFCSWLGLAPHNDITGGRVVRSRTLKVRNRAAQILRLAAQSAGRGKSAIGAYYRHLRARLGPEQAMTATAHKLARIVYYMLKHRKPYHSLSAADYDEQQHHRELKALERRAAKLGMILSPA

SEQ ID NO: 356249 - protein, 329 aa, unidentified
MYAALDLGQRTIRAVLKRQDGKIVNELKIKKRADSVLKFLNGTNASVVMESGYNYQYLYDLLKSEGYNVKVVHPLMVKAIAYAKVKTDKVDARILADLLRTDMIPECYIPDGKIRNLRDLARRRHYFVNTRTMFKNKVHVELSKRWIDYNTDNSNSDLFTQKGREYLRSLKISGVKDCLDTIDFLDEKIQEMDNQIKILASKDKYAKHLITIPGISYYAALLISSEIADINRFPDYEHLSSYAKLVPGTHQSGETQYSKADMKGSQMLNWIMVQCTHTHVRCRNSSVTRHYNKIKSRKGSKIAIIAAARKMIRVIYVMLKEDRSFRPDG

SEQ ID NO: 356250 - protein, 341 aa, unidentified
MDITTIGLDLAKSVSHVVCCNQAGKIVRKKMLRRTQILHFFSELAPCLVGVESCASAHYWAREIAKYGHQVKQIAPQHVKAYVRGNKTDFNDALAIAEAVVRPEMRFVRTKTQTQQDIQALHVMRKKCERDRTANSNEIRGLLNEYGIILPVGISHVYKSLPELFDRQVENGLSELFKELLERHYQKLVELDEHLNWYTKKIKQLSQHEACRRLQSIPGVGPIIASALYQHIGNGSEFKNGRAVSASLGLVPKQHSSGGKHNLQGISKRGDSYLRTLLIHGARAVMRVSKHKETPLSQWIKRIEQTRGRNKAAVALANKLARIAWALLAQGGDYQPELTTA

SEQ ID NO: 356251 - protein, 357 aa, unidentified
MKIVGCDLHARQQTIAMVDTETGEFTEKTLDHEGNAVRAFYAALEGPVLVGIEATGAMQWFLELLDELGIECRVGHPAKIRAQETRKQKHDRRDARLLLELLSEDRFPEIWMPSTKLRDLRTLLRDRDQWVRMRTRVQHTLQAIALNHALRQGRALWSATGQSALEALPLPPYTSQRRNKLLGLYAQLQKRIQELDQDVEAQALQRPQAERLLTHPGVGPVTALATDVFLGEPSRFATGNQVASYIGMIPCEHTSGKRQRLGKMTKQGNSLLRYLWTEATMHAVGKDPELKRFYRRKLIQKGMGKARIAAARKLGIRLWIMMRDQIDYEEFCRRGKLRQGGEAHAGMPDNNSGPAQQ

SEQ ID NO: 356252 - protein, 247 aa, unidentified
MRNTVGLDISKLTFDASAMVGNAEYSAKFDNDSKGLNQFSDRLKSLGCQNLHICMEATGNYYEEVADYFAQYYSVYVVNPLKISKYAESRFKRTKTDKQDAKLIAQYCRSAQESELVKRQKPTDEQYRLSRMTAAYAQIKSECAAMKNRYHAAKDEEAAKAYAEIIKAMNEQLEVLKEKIKEQTEKPKCKEGVKCLETIPGIGRMTAAVLFHHLTSSKFETSNKFAAFAGLSPQQKESGTSVREKAN

SEQ ID NO: 356253 - protein, 344 aa, unidentified
MELQTIGIDLGKTVFHLVGLDPRGEVVVRKKFSRSQLLRFTANMRVELIGMEACGGAHFLGRALREQGHEVRLIPAQYVKPYVKTNKTDFIDAEAIAEAVGRPTMRFVPIKTDDQLDLQSLHRVRQRWMERRTAVINQIRGLLLERGITVRKGRCYLEAALPTILEDAERKLSGAVRSLLAQLKVELDQLTLRLEETDELIRQIAQDSEACQRLDAIPGIGPLAATAMIAAIGNGAAFRKGREFAAWLGLVPREHSTGGKQKLLGISKRGNVYLRTLFVHGARAVMQFKEKQSPGLKAWLAQLSSRVHVNVAVVALANKLARMAWAVLATGQLYLPPVRAASSV

SEQ ID NO: 356254 - protein, 373 aa, unidentified
MVYVVSDRSTNRKGGLAMNKISKLDFKDQQIYVGMDIHKKSWSISILTDNFEHKTFTQPPDVEVLVNYLKRNFPGGSYKSVYEAGYCGFWIHDRLQENGVQCCVVNPADVPTKDKERRSKTDRVDCRKLARSLRSGEIESIYVPSRPKVEDRSLIRTRHGMVKKQTRCKNQIKSILQFYGIQIPDELANSHWSKRFITWIETIRMERASGNFALKAHLEELNNVRKIIADSTRAIRALANSEEYRQNVRILKSVPGISTLTAMTLLTELYEINRFKNLDKLCSYVGLIPDTDSSGETERDTGITKRRNAQLRHILIESSWVAVRKDPALLMTFNTLCKKMPKTNAIVRIARKLLNRIRYVLKTQQEYVPAVVQ

SEQ ID NO: 356255 - protein, 339 aa, unidentified
MITYAGIDLHSSNNYLVVIDDNDKRLFEKRLPNDLEVVCSALEPFRESLSGVVVESTYNWYWLVDGLQEQGYTMLLANPAAIQQYKGLKHTDDKWDSFWLAHMLRLGILPKGYIYPKEMRAVRDLLRRRLLFVQQRTTQILSLQSMITRNLGRRMSGNDIKKLKVEDADELFDSPFLVFTAQKNIETILFLKGIIREIEKEVLAIAKLKKEFQVVKTIPGIGNILALTIMLEVGDIGRFANVGNYSSYCRCVASKRISNGKKKGDNNKKNGNKYLSWAYVEAANFAIRFSPEAQRFYQKKKAKRNGIVAIKALSNKLARASYFLMRDQVPYDVAYLFRK

SEQ ID NO: 356256 - protein, 333 aa, unidentified
MSNVTTVGIDLAKNVFSLHGVDERGQVVLRKTVNRARLLARVAQVPACTIGLEACSGAHEWARQFERFGHTVRLMAPKFVAPYRKSGKNDGNDAEAICEAVSRPSMRFVPLKTLEQQSALCLHRVRQGFVEERTATINRLRGLLAEFGHVLPQRAIEVRRGVPGLIEQLPSRAARCARDLLEHAHVLETKMREYEREIETHAKHSDLARRAQARRGIGPITASAIVATVGTAREFRNGRQFAAWLGLVPRQYSTGGKVRLGHITKRGDPYVRTLLVMGARSVLQRAARERDPLSRWALALKERRGYHRACVAVAAKNARIVWALLAKESPLAA

SEQ ID NO: 356257 - protein, 402 aa, unidentified
MNAVGIDVSKGKSMVAIMRPFGEIVSTPFEIKHTSSDINSLVKLIKSIEGESRIVMEHTGRYYEVLAHQLSEANLFVSAINPKLIKDFDNDSLRKVKSDKADAVKIARYALDKWQNLKQYSVMDELRNQLKTMNRQFGFYMKHKTAMKNNLIGILDQTYPGVNTYFDSPARSDGSQKWVDFASTYWHVDCVRKMSINAFIDHYENWCKRKKYNFSKSKAEEIYGKAKELVPVLPKDDITKLIIKQAVDQLNSASITVESLRTLMNETASKLPEYPVVMAMKGVGTSLGPQLMAEIGDVSRFTHKGAITAFAGVDPGVNESGSYEQKSVPTSKRGSSDLRKTLFQVMDVLIKTHPQDDPVYQFLDKKRAQKKPYYVYMTAGANKFLRIYYGRVKEYLASLPES

SEQ ID NO: 356258 - protein, 356 aa, unidentified
MNHVTSIGLDVHARSVTAVALDSITGEVRSQKFGYSPAEIAGWILQLDSPKAVYESGVTGFHLVRELREMGVDCIVGAVSKMHKPASDRRKKNDRNDAEFLARQLMAHNIVEVFVPDVETEGARNLSRALEDVRDDLTRAKHRLTHLLIRWGYIWNEFNEDGKRRGSWTRAHWEWIRGIELPDAAARESLDYYISEVRHIESQKKAIEKRVAQCASRPRWRDRVEALRCMKGIETVTAFALTVEAGVFSRFDSARAFASWLGLVPSEHSSGERASRGGITKAGNSHLRKLLVEASWHYARATKERKRSLYDESVPAPISNHAAVGVKRLVVANVATARELACWIWALGRMSEGALA

SEQ ID NO: 356259 - protein, 401 aa, unidentified
MNAVGIDVSKGKSMVCVMRPFGEVVLEPFEVLHTAQSLNDLAGKLKALDGETRVVMEATGNYHKPVAFVLHDAGLFVSVVNPVLIHDYDNNSLRRVKTDRKDAVKIANYTLDKWTRLRQYLPEDDTRLALKNCYRQYQQAVAVRTMLKNNLISSLDLTFPDANKLFSSPAKSNGCEKWVDFIGDFWHSECVSSLSSDAFAKKYLKWCQKHGYNFTRSKSDTIYACAVNAASLPKSPTSKLLIQQQVAQLKAVSQSVAAFQQEMLRLSQQLPEFDTVMEMYGVSPSLGPQLMAEIGDIRRFSSKKLLIAFAGIEPQPNDSGKIVGNDSGISKVGSAVLRRTLFLIMTVILKTQPQDEPVFQFMNKKRSEGKPYKVYMMASANKFLRIYYARVKAVMDSKHSK

SEQ ID NO: 356260 - protein, 390 aa, unidentified
MILVGIDVAKDKHDCCIINSDGEFPEEVFSILNNREGYETLYKRICSLAVDLAKVKVGLESTGHYSSNLLAFLLDKHLTAYVINPLRVNLFRKGQSLRRTKTDKIDSRNIAHLLMTDSSLKPYSLSSYHMEELKSLTRYRASMVRERTKLKTSIARLVTILFPELEQLVSSIHIHSIYAMLEKFPGAAYIAAAHLTRLAALLLKASRGRFGRETAIRIRDTARRSIGAVSPAKSMELQHTIAHLRVYDQEIGEIESEIEKIMDDVNSPITSVPGIGMQMGAVILAEIGRFRRFDSPDKILAYAGMSPSTYQSGKLTGSYSRMEKRGSRYLRYALFNVTRYVCHYDPGFTAYLSKKRKEGKHYYVAISHAVKRLVRVLYAMEISGNRYQTA

SEQ ID NO: 356261 - protein, 359 aa, unidentified
MGKSLLYVGLDVHKMSVDVAIAEAGPAGEVRFYGRIGGDLEALDKVTRKLQAQGAELRFAYEAGPCGYQVYRHLTARGLECLVAAPALIPRRPGDRLKNDRRDALALARLLRAGELTPIKVPDEDDEAMRDLTRAREDAICVERRARQRTVAFLLRHGRVYQGKTTWGRGHWAWLLQQVMDHPAQQIVLQEYLDAVREASARVLRLTGQIQDLIPQWRQAPFVAAYQALRGVSLIVAATVVAEVGDLDRFNNPKELMAYLGLVPSEHSSGASVRRGRITKTGNSHARRVLVEAAWAYRMQARVTRHLLKRQEGLPERVRQLAWKAQLRLCTRYRRLLARGKANHCHRLGPRVGSLSLGY

SEQ ID NO: 356262 - protein, 355 aa, unidentified
MSQEKYIGMDVHQATISVAVMDGNGKLVMECLLETKAETILEFVQGLRGTLSLTFEEGTSAAWLHDLLKPHVSRLVVCDPRKNALLKEGNKSDRIDARKLAELLRTNQLKAVYHGEHGIRTLKELGRSYLTLSKDVTRTMNRIKSLYRSWAIPCAGTSVYAPRHRAEWLAKIVEPGVRIRAERLYQQLDGLQSIRQQARRELLQESHQHPAVKLLRQIPSIGPIRSALLVALLQTPHRFRSKRQLWAYSGFAVETHDSGEYRYVRGKVQRNRERITVRGLNDNHNHDLKNLFKGAAISASTRPGPLHDFYVARVAQGMRPTMARLTLARKVAAITLTMWKKGVSFDPQQLSRQSV

SEQ ID NO: 356263 - protein, 407 aa, unidentified
MRDYIGVDWADEEDAVWVANDAGDKILSRRFAHTVAARSEWARWLRERQAEGIELWAAIERPHGRIVDFLLGHGVVVYPINPMSLDRSRDLFRVGGSKSDPFDAKVLALFLRSDHLQLRPLRPNSEAAQELQGLTRDYRRQVHLQTRLLNQLTATLKEYYPRALELSEDLTAGWAQAFLARYPTPAAAAALTEPDWQAFAHAHRLSPTRTAALWQTLQQPQLPLPAHVVRLKARLLQALLRELAPTLATLAEYWQALDDFFATMPTAEIARSLPVGKSGTTVPTIWAELGDHADRWASFRHLQAYAGSVPETDCSGKHHVVTFRFACNTTLRDAMHQLAFLSLPHSLWARAYYARYRERGHTHHQALRALGAKWLKIIFVLWTRQVPYSETHHLATMARQHLHQTAA

SEQ ID NO: 356264 - protein, 343 aa, unidentified
MHYIGMDCHITTLDFAVVDETGKVTKTGKVATSAKNFMEFVKSIRQPRIIFMEEGTLAAWALEVCVRFGEKLVITDPKKNRWIGSSGQKDDTIDALKLAQLARGGYIKEIHHPVGQRRRFRELMIAYHDTNRNVTRIKNKIKAKFRQNGVQCTGQTVYSKAHREEWRQKLPQDSTLLVILDGLWLQLDQTERTERDILSIAKAQGKQYPEIRLFEEIPGIGFINAATISAILETPHRFADKRKVWMYAGLGIVRRSSGGKLYTEKLTNEYNRLLKYTAKQAAQAAIQAKDNPFRRAYLEMTLIKGIAPHRAILTIARDILSTMWAMWRNGEKYNPDIDKKVKT

SEQ ID NO: 356265 - protein, 415 aa, unidentified
MNDLIRIGMDTSKSVFVLHGVDAAERPVLRKTLRRRQVIEFFAKLPPTQVGLEACGAAHHWARELGALGHEVKLLPAQRVKPYVARNKNDTADAEGICEAMSRQRMTFVPVKTAEQQAALMLAGMRDQLVARRTQLSNTIRGYAAEFGLVAAKGLEKIEPLLARITADESLPALARELFAVLGAEYHELKLKLRKIEAQLLAWHRQNELSRRLAEIPSVGPIGAALMVMKVANPRAFRSGRDFAAWLGLTPKDHSTGGKQRLGVITRAGDEALRRVLVLGATAVIQQVRRGRGHSSLWLVALLKRKPPKLAAVALANKTARIAWKLMVSGERYRGACATEVTHGNVCFEGASSQPRKPGAVLAAVKARPGSAAARRTGNATAGLDGGCARRPTTIAVGTKKRSMVEQRNESHGHD

SEQ ID NO: 356266 - protein, 403 aa, unidentified
MKIYVGLDWGSQQHAVCALDSQGERLTQFAVSHDQAGLTQLRQRLDKIALPQQIMLAIERPSGLLVDTLVEAGYNVVPIHPNAVKATRPRYAAACGKTDRNDAFLLADLLRTDEHRFRALTPESDDIKALRALVRTRDDLIDTRLALANQLRALLESFWPGAAVIFADIDSAIALAFLTRYPTPSCAAHLGEKRLASFLAQYRYSGRRSVIELLARLRSAPQGLCGALEREAKGELVRSLATVLRGLLEQLRHLNCRIEHEIATLEDGQRLMSFPRIGRINAAQLLAELGSVRARFPCEAALACEAGVSPVTRQSGKSRAVVFRWACNKRLRVALTTFADNSRHASPWAAAVYSRARARGIDHPHATRILARAWVRVVWRTWTNHQPYDPIKHRKAAPLLSAA

SEQ ID NO: 356267 - protein, 313 aa, unidentified
MPVSLSKPIVGVDVAKNELVIYQSDGDFLEEIPNTRTSIKQWLKALSGTVAIAIEATNIYHLDFADLAYEAGCTIYMVGGYELKHYREGVKIRAKTDALDAKLLARYLKNEAEELRPWTPPSPLYRQLLSLFRRRAALVQARVGLVQSWSNEPLLKAAFAEQVKSMQQLETLIEKTINDQLKEAGLLGQLKRCLKVEGIGFLTGARLITAFQRGDFRNADAFIAFLGMDLRVAKSGQKDARRSLTKRGDPEARRLLHNAAMSASRTKAWKGYYEEQRTRGFSTTQALVMLARKLARVVFALLKGQSEYQPKAG

SEQ ID NO: 356268 - protein, 414 aa, unidentified
MEVLHRRCAGMDISKRDAKVCVRIAGAGRQKTVETVTTWASMTNAILALRDHLVAEQVSLVVMEATSDYWKPFYYLLEDAGFEVLLVNARQVKNLPGRKSDISDATWLAQLGAHGLVRGSFVPPPPIRELRDLTRARAMMTRERGREIQRLEKLLEDAGIKLSSVASDITGVSGRLMLESLMSGQRDPAVLADLAKRRLRAKIPALTEALTGRFGEHHAFLARMHLDVIDQRTRQIAELNARIEVVIEPFRSFADLIRTIPGIGPRCAEVIVAETGADMDIFPTAAHLVSWAGTCPGSNESAGRVKSTATRPGNPYLKAALGTAALSVANTSGTYLSAKYRRIAARRGPKKALVAVEHAILTAIWNMAHTGALYDDPGADYYTRINPERSRRRAINQLRQLGYDVTLTQIGASA

SEQ ID NO: 356269 - protein, 377 aa, unidentified
MSKISFVGLDVHAETIAVAIAEPGGAVRSVGIIPNRLESIRKLLGKLGPVQHLKVCYEAGPTGYVLYWQLTALGVACEVVAPTLVPVKAGDRVKTDRRDAEKLARCYRSGELTAVWVPDAAHEALRDLVRAREAAKKDQLRARHRLGKFLLRHGRRPTQAGKAWTKKYLEWIKTHVCFDQPALEATLAHYLQEVDHAASQILQLEKAIDEAVAQADPEIRSVIEALQALRGVAQMTAATIGCELGSLSRFQSPRQLMGYSGLVSREHSSGNRIQRGAITKTGNAHLRRVLVEAAWAYQHRPNVTGFLLRRQKSLTLSEEVKQMAWNAQCRLHKRYLAFARRGKNKNQIVTALGRELLGFVWAIAVHTETQRKLAKAA

SEQ ID NO: 356270 - protein, 360 aa, unidentified
MNRGALDQQSIRPRDYDMFAGLDVDKRSIAATFVDHGNLIKSVKMPYDGGNLLSYTKKHFANKRVAFVYEAGPTGYGLYDQLNASGQKCLVASPAMIPVKPGNRVKTNRLDSKKLAESLRGAQIKGIRVPKGAYRELRHLTQLRNSYIKQIKATKCRIKALMLFEGISFPKAPAGSQWSKKVIKRLAELECSPSVRFKLDLLLESLEFNQEQALKSQKEVRKLCNEDADISDSIRYLMSIPGIGWIIASNALARIGDWRELKNVRELGAFFGLTPQEDSTGERSNKGPITRSGDPNLRAMLIEGAWSAIRKDAELAEFYKRIYRRHPKDRAARIAITAVARKLTSRMYCVLKERRLYVIN

SEQ ID NO: 356271 - protein, 350 aa, unidentified
MTIVETRAETRAITGGVDTHADVHVAAALDSVGGLLGVEEFPVSPAGYARLLGWLGGFGTVCLVGIEGTGSYGAGLARHVAAAGIRVVEVDRSDRQDRRRQGKSDPLDAVSAARAAQSGRARGAPKGRDGAVEAIRALMVAKRSAAGERTRTINQARALILTGPDDLRARFTRHTPAALVAGIASLRPRPGDVPGYAVRVALRELGRRAVFLDGQLERLDELIVPLVTARAPGLLALYGIGPNTAALLLIAAGDHPGRLRSEAAWAHLCAAAPIPASSGKVTRHRLNPGGDRQANHALWRIVFTRMGSDAATRAYVERRTKEGKSKAEIIRCLKRYVARQVYPHLRPDAG

SEQ ID NO: 356272 - protein, 376 aa, unidentified
MNESNVYVGLDVHKETIAVAVAQSGREEPEYRGEIAHTAQAIARLLKKLSPAGEVLEVCYEAGPCGYGLYRELVARGHRCTVVAPALIPRKAGVRLKTDRRDAVLLARLHRAGELTAVWVPGEEQEAIRDLTRAREDMKGIERTARQRLGAFLLRHGQVYRDGASRWTQRHWRWLETVRMGSPVQQLVLQEYIDTVKAAQRRVAGLETQMREALAGWSLRPVVEGLMALRGVSLIAAMTLLAELGDLSRFDSPRQLMGYLGLIPSEHSSGGSRRQGGITRTGNGHARRLMVEAAWSYRFPARKTRGIEQRAEQTSAAVQAIAWAAQKRLCGRYQALLQAGKQTQQVTTAVARELAGFLWAIACEVMGKAHGSKALA

SEQ ID NO: 356273 - protein, 342 aa, unidentified
MEHTTIAVDLAKSVFQVAVSHRPGHLDEERRLSRDRLLPFFAQRPPATIVFEACGSAHYWARQLQPFGHTVRLLPAHDVRPYVRRNKTDRTDAKGLLEANRNEEIHPVPVKTIEHQAIASLHRLRSTWLATRTARLNTVRGLLREFGVFIPVGAQHVVPRVRALVDEPTAVPLALHTTLAAACDEIEMLEANMRAVERQLEALAAQLAAVALLRTVPGVGVLTATALIALVTDIRRFPSGRHFASFLGLTPKEDSSGSRRRLGAISKRGDVYVRMLLTHGARSVVWHAKTAARPTSLQRWAVETEQRRGRNVAAVAVANKLARIVWAVWAQHRPFAADPRVA

SEQ ID NO: 356274 - protein, 437 aa, unidentified
MSGKKSLELRVSVDVGYRRHSVAIGLPSGEVLEEFEIAHRPEGFEEFFSRIEKHHKARRCGVAVGMEGFNGCARPLDAMVRRRGYRLYNINNLKLARFKEIFPGAAKSDRIDARKGLELFQLSDHLPLAKEVLQEVKGTPQENEVLKRLTRRRRRLVDERVRVISNLQTDLQAVCPGLLEITKNAGNQWFLNFLVSAATLPQLARLRPSTLLKVPAVGRKYARLIEDWQKRAHFSEEVEWVSEMIQEDAQRCLELDEKIKALKAKIKGVAKDSKIAKTLLSIPGFGTICTAELAGEIGTIERFSKEGSLALYLGMSTLDNSSGKYQGSKQPKHVNRRAKAAMMVALDRHRKYVPESQRYYEKKRREGKKHNQAIRALGRHLCRIIYKMLNDEREYEIRPEKGNTKTKVKSRSCVKTQIRKPKIPAKGKITTSTNGAR

SEQ ID NO: 356275 - protein, 503 aa, unidentified
MNNSAAGENSAGGRPASARTRSREGHRKTVKRRLPGEPEALAQTSNRTAPQEGCNISAMDGRAKRRQELKGKSPSMNNPEQPSGRWLEQRGFGGLDWASQHHSVVVVDSQGKVLEDFEIEHSALGWKKFRERMRPYGSIPFAIETSQGAAVEQLLEAGMQVYPLNPKSAQRYRERKAPSGVKDDRLDAWSFADALRVDGQDWKALHPEDALIKELRLFCRDEVALIEQRTAFINQLRHALAEYYPTALEAFEDWGALSAWMFVQRFPTPQALQEAGKRQWEKFLHSRHLWRTESGPRRLELFAHATEFCGSLPMTNAKSCLALSLVSMLFALEKQLGLYRQRIEELFGRHPDHDLFGSLPGAGPKIGPRLLSEIGEDRARFGEDAQPLQCLAGTAPVTRRTGKARTNPPRWPCHQRWACDKYLRHAMYLFAEQTLTRCVWAQIYYSHHRQKGLSHADALRRLGQRWLKIIFRMWMDRKPYDPMLHNQNQLKHGSWVLQLNPTN

SEQ ID NO: 356276 - protein, 418 aa, unidentified
MSADGNTRGSRRYIALDIHKKYSVMGGVDREGRVVLQAVRVEHVDLEGWLKKNLRASDQVVIESTTNAWHVYDLLAPLVERVVVANPVKVKQIANARVKTDIRDTFILARLLAANLVPDVWIPPQHVRELRQLLSQRRQLVETHTQILNRMHSVAHRHHLNHERGKRFNEKNTGWQKDKQLSKMEQFQLELEMENRAYIEKQIGRIGKEVAKMSHQQPWAEGMTYIMQLPGFGVITAMTVLAAIGEIQRFGTPQHLASYSGLTNGLEQSGTKLVQKGITKEGRKELRWALVEVAQRAVKSDPVWKHRFQELQKRMHRNQAIVAVARRLLELVWYVLTRRQPYRHFSQERIAYKYLTWAWQMDEAARDGLTRQQFARYYLMRLGVGHDLTRVALNPKYPRKIASEAELLQLRPELQQLK

SEQ ID NO: 356277 - protein, 383 aa, unidentified
MNYKQNEKINQVKESTLVVGIDIGSTTQYARAFDWRGIELGKVFPFSNSREGFESFKAWMQHLQDKYKKLDAIVGIEPTGHYWFDLGAYLEDEGILLVMVNPYAVKQTKELDDNSQSKNDRKDPKVIAKLVTEGRYSAPYTPDGVYADLRIMVANRKRLIREMTQIKNRFARWFAIYFPEYTDVFGDYEAQSSMLLLKKVCTPEAIVELGAEKINQIWRDAKLRAVGMKRATTLCETAKRSIGLKKGSSAARYEMKLLLEDYEYKKAQLDAVMEEIEKLCRKIPESEQMLAIKGIGVITVAGFLAEVGDVRRFESPRQIQKLAGLSLRENSSGKHKGQTTISKRGRSKLRAVLFNAAIPLIAKNPEFKSYIFSFSFSTRCISR

SEQ ID NO: 356278 - protein, 324 aa, unidentified
MYAALDLHEKSIQCVLKDDAGKIVRESKVPKDEERILEFLDGTHASVVMESGYNHQHISDVLKEKGYDVKVAHPLMVKAIAYAKVKTDKVDARTLADLLRADMIPESYVPDEKTREVRDLVRRRHHLVETRTAFKSKVQAEVAKRWVKHEGDVFTKEGRDFLRSLHIDAVDDYLDAIEFLDGKIGELDRKVKEVAQQDRYAKLLVTVPGISYYSGLLISSEIADVSRFSDHEHLCSYAGLVPGLRQSAERSHPTPSKTRSAMLNWIMVQCTRVHVRSCDSSITRFYTELAMRRGEKVAIVAAARKLMRAMYIMLKEEKTFRLDG

SEQ ID NO: 356279 - protein, 315 aa, unidentified
MTITLQDYVGIDIAKDKFDVAVLGEKRVRQIANTKRGIAEFTKQMHELDPQLIVVEATGGYEELLVLALFAAGLPVALVSPQRVRQYARARGLLAKTDTLDAQNLAEYGRSVQPRLFVANSEAGRRLSALVGRRKQLGEMHKAEKNRLRTAYLEMKSSIQIVIVCLEAEVERLDEEIREFMNEHADFQAQEQLLCSAKSIGPVTAATLLADLPELGKLDRKQIAALVGVAPMNQDSGRKRGYRKTKGGRPEVRSVLYMSALSAIRYNPIIKAQYEQLVKRGKQKKVAITACMRKMLTILNAMIRDQRPFRAISVS

SEQ ID NO: 356280 - protein, 370 aa, unidentified
MAKRSMFVGMDVHKESIDLSLAEEGRDGEVRHYGVIPGDLEALAKVVRALRAPNRRLRFVYEAGPCGFGIHRYLTGQGEDCVVVNPSSMPKRSGDRIKTDRRDGDALARLHRAGELTAIYIPTADDEALRDLVRGREDAVGLSTQAKHRLKAFLLRQGRRYPGRAGWTRPYRRWLADLSFPLAPQHIALQEYRDTIDETERRVERLTDQLRQLTPAWRWAPVVDALQALRGVSFVTAVGLVTEVGDIRRFTHPRELMAYLGLVPSEYSSGPSVRRGGITKAGNPHARRLLAEAAWAYQGIPRIGRQMLYRQETLPKPICDIAWKAQLRLTSRFRKLVARGKAKPKVATAIARELTGFIWAIAREVPTPPA

SEQ ID NO: 356281 - protein, 421 aa, unidentified
MKPQVPEAFAAFVGLDWADAKHDICLQVAGSTRREFLRLEHRPEVIDAWVCTLRTRFNGQPIAVCLELNKGPIVSALQNYDFLVLFPVNPLTVAKYREAFTPSRAKDDPTDAELQVELLLKHRDKLTPLVPQSPTMRALAQLVEHRRRLVGDKVRLTNRLTSALKNYFPHVLQWFQDKDTAIFGDFLSRWPTLKAAQLARRATLERFFRAHHVRSVDVITARIEAIKNAVALTTDEGVIAPNTLLVQALVAQLRVTLQAIADFDTAIAQRAQAHPDFPLFDALPGAGAVFAPRLLVAFGEQRERFTSAAELQKYAGIAPVTERSGKKSWVHWRLQCPTFLRQTFVEWAAESIRHSFWAQVYYQQQRDKGKAHQAAVRALAFKWIRILYRCWHERLPYDESTYLQALHRRGSSLIQNLAQAS

SEQ ID NO: 356282 - protein, 335 aa, unidentified
MSLYCGIDLHSNNQVIVVIDDNDKRVLERRVPNELGATLSVLEPFREDLLGVAVESTYNWYWLVDGLTDHGYSTRLVNTAAVQQYSGLKYAGDQHDAFWLAHLMRLGILPTGYICPREIRDVRDLLRKRLGLVRERARNLTSVQNILARELGHRVATAKVRGILNGDEKFRPAVRTAIAANLAVIETLDTVISGIQGQALEVVKPTSRHRRLKTISGVGDVLAPTIMLETGEIERFKSVGNYSSYCRVVESRRESNERKKGEGNKKCGNRYLAWAFSEAAHFAVRYNDRARRFFDRKAAKRNRMVAIRAVAHKLARAAYFIQRDKVPFDEMKLFG

SEQ ID NO: 356283 - protein, 360 aa, unidentified
MFTERTSVGLDVHARSVVAHAMDVQTGEIFKARLCPDPAEVTAWIKALPGPAAAIYEAGPTGYGLARTLLASDIRTVVAAPSKLQRPSGSRVKTDAIDAEHLSTLLRLDAYSAVTVPDELNEAARDLVRAREDCRSDLMRARHRLSKLLLRHGIVYSGGQAWVGAHDAWLKRQRFDSPLVQAAFDEAYDSVITITARRDLLDERIAAMAADSPWSDTVRRLGCLRGISTLTGFGLAVEIGDWTRFTGNSIGSFVGLIPSENSSGQSRSLGPITKTGNSHARRLLVEAAWHHQHRYVPGKTIRDRWDLASPAARARGDLGNRRLNHRWNQFKARKKRPIVANAAIARELAGWCWSLAVLED

SEQ ID NO: 356284 - protein, 338 aa, unidentified
MSYYVGIDLHSDNNFIGMIDKKDCRILSKRLPNDLDMVLNTLKPFKRKIKGIVVESTYNWYWLVDGLMDKKYKVHLANPAGMEQYSGMKYTDDKWDSFWLAHMLRLGILPEGYIYPKEIRPIRDLLRKRMMLVQHRTAYVLSLQSMVNRNTGKKLKAKETKKLSEGELDRLFSDKHLVMSGQSNCEVIEFLNGQIDAIEKTVIKEVKLRYPFEKLLTVPGIGNILGITIMLESGDMNRFQEVSNYSSYCRCVSSKKVSNGKKKGENNKKNGNKYLAWAYVEAANFIRRFCPQARSWHQRKVSKTNQILATKALSNKIARACYFIIKDQTDFDPAMLFK

SEQ ID NO: 356285 - protein, 404 aa, unidentified
MKQESTSHSLRIIGLDVHPDSFTAAIVSGPTPASAYVVKVFNKVPLKQLAKWAETHSLPEDILTLEASGNSFYVVRLLKQIQRQALVLESHFIGKLKEAHANNDKISAVRIAKAYLAGTAKKVWVPDSLTQERRDTHHAHQKAVKRSTQLNNRLKSYLSDQGLRLGSRRALLNQSEEILKAKDWSPKQRLVIEGLLMEYQHAQQQRNHWRRLIAQEVLCDPKLLSLTKLTGVRDIVAYALGAMVGDIKRFASPKKLVSYVGLYPAFDESGEGGWKGGIRGHGRRDLRSLLIESAQSVLRSHHPLAAWGKRLLARKGSKNIAVAAIARKLVVAAWYVMNGKESPVEELTPLMGRKLGKIITQLGPDGILALAPTRKELRKQVIQSFLEGKSYLLDSSKVYVPNET

SEQ ID NO: 356286 - protein, 355 aa, unidentified
MESTKYVGLDVHKEATTIAVMNSAGKLIMESIIETKAITIRQFIQGLRGDLHVTFEEGTWAAWLYDLLKPYVTKVVVCDPRKNTLLKVGNKSDRIDPKKLAELLRNGALSAVYHGENGVRTLKELARSYLTISKDLGRVMNRVKALYRSWAIPCAGTQVYALCHRSEWLSKITEAGVRRRAEHYYQQLDALQTLRHEVRKDLLLESRKHNATKSLRQVPCIGPIRAAQLVALIQTPHRFRTKRQLWTYSGLGLETRDSAQYRYVEGQLQRSKKPQQLRGLNANHNHDLKNIFKGAATTASVSAGPFHDFYEALLTKGMQPTMARLTLARKIAAITLIVWKKGARFDPQHLKQQAA

SEQ ID NO: 356287 - protein, 351 aa, unidentified
MKYYTSATEFNCGIDLHAREMYVCVMDRQGNKVVHTNIVGNDFAYFLKKIEPYRHSLTVVCECTFNWYWLADACFEAKLPFVLAHALYLSHIHGGKNKNDRIDSEKLAHLLRSNLIPPSYVYPSERRPIRALLRQRMSYVWQRAALMTHVSMNQTAEGLTPAAKGGHNRDVWVERILAQYDNPLHRMAVTCEMDVIRAYDIQIQKLETEIIRQAKQHEGRDYHLLLTVPGIGRILAMTILFELDAIERFPTVKDFLSYARLVKGSVASAGKVKGLTGGKMGNAYLRWAFGEAAVLGKRTYPQLSSYADRLVAKRGKFKGNAILAAKLARAVYFMLQKGTAFDTEKLIATSL

SEQ ID NO: 356288 - protein, 388 aa, unidentified
MTQASCSLSSPITLNYENTLVLAIELSKTKWVLAAQVPGLLRVKAKQTIEPKAEALLAAIDGYRDRSRAAGRTVERVVAIYEASWSGFWLARWLGRHGVETHVVQPSSVPVDRRARRAKSDGIDAELLLRTLLAWLRGEPRVCSMVPIPTEADEDERRRVREREDLMAERVSLVNRIGAVLATLGVGDYNPLRRDRRTRLEGLRTALGDPLPPHAHARIRRMLDRLDLVCAQITELEQERDAVLDKEAPDRAEKMIRQLVELRGIGVQSATVLVREAFVREFANGKALGSYAGLTPTPFSSGATEREQGIGKAGNRRLRTVMVELAWLWLRYQPGAAQVSWFRERVGGTGRRMRKVMVVAMARRLLIALWRFAKQGVVPEGAIVNPAG

SEQ ID NO: 356289 - protein, 350 aa, unidentified
MDQVSRIGMDTSKHIFQLHGVSADEVPVLRKKLRRKDMVTFFAKLAPTVIAIEACGASHHWARLLQSLGHSVKLIAPQLVKPYVKRGKNDAADAEALCEAMSRPTMRFVPVKTAEQQAGLMMVGVRDRLIRNRTQLANAIRGHAAEFGLTAARGMAHLVPLLDRIEADESLPALARELFAIQAKEYTQLQTQVDEIATKLMAWHRADECSQRLVKIPGVGPIGAALLRMKTPAPELFRSGRQFAAWIGLTPKDHSTAGKVRLGVITRAGDEALRSVMVVGATAVIQHVRRGGRAPHWLAELLKRKSPKLAAVALANKTARIAWKMMVTGETYTAKSVAATSAGAVSQGAV

SEQ ID NO: 356290 - protein, 349 aa, unidentified
MTMVGGFDVHRKQITFDCVDDDGLVRWGQIRPATRMTLRGWLAEHCPAGDAEFALEGCTGWRYVSEELAAAGVGVHLGDPAEIAALRGPKKRAKTDRADARLLRSLLLEGRFPESWIPPTHVVEARTLGRLYCALMDERRAWQQRIHAQLFHQGCPPITALLSAAGRDALACAELSAAGRQYVDTALRRIDELTGEIDPLRTQLVNFARRQAGCRALQARQYGIGWLCAAIIWAEIGDARRFARSDQLVRFAGMDVTVYSSDGKRSPGHLSRQGSPELRWATFEAAKCAARRGSPDYAYYHKLAARPDSGKIPTLAVERKILRRCYHTLRELGDAALAMPIPEDKGVAA

SEQ ID NO: 356291 - protein, 385 aa, unidentified
MSDHSEAFVAFDTSKLRNAVAIADGGRGDEPRFLGEIDNTPAATAKLVRKLAGKYERLTFCYEAGPTGYGLHRQVKSLGHECIVAAPSLIPKKPGDRVKTNRRDAVGLAKLLRSGDLTAVWVPDRQHEAMRDLTRARETAMLDLRAKRQQISAFLLRQGLHYPEDKRTWSKSHLNWLASQKFDIAEHRIVFEELMEAMRQAQGRLDRLEAAIRAAVPDWSLGKLVIALMAMRGLDMISASTIVAEVGDLSRFRTPRELMAYVGIVPSENSTGDKVKRGPITKTGNRRVRRMLVECAWSYQFPPRLSKDKQVKVDAVPQAVREIAWKAQSRLNQRYRALLRRGKLKNVAITAVAREFVGFIWAVAQAVGAAPAANNRTAPAPAAAR

SEQ ID NO: 356292 - protein, 346 aa, unidentified
MNKITRIGLDIAKNIFVLHAVNAHGKTVKCQTLNRSKVLSFFAQTEPCLVGIESCASSQHWAREIRQFGHTVKLMNPKFVVPYRKSGKNDTNDAEAICEAVGRPNMRFVSVKSIEQQAVCALHTGRQFLVVQRTSLINHCRGILAEFGIIMPLGADKVRRLFAEILDDEQSTVPLLLKDLLQQHLQDLARNEQRIESIDKQLAEWAKTNQQATTLLQMLGVGVITATAFAAGVCDPKLFENGRQFSAWIGLVPRQYSSGGKNKLGSITKTGDVYLRTMLAQGARSIVFNAKKKSDPFSLWIQRLLARAGMNKTVIAVAAKQARIMWAIMAKNQDYQPERICSPLST

SEQ ID NO: 356293 - protein, 416 aa, unidentified
MDLDEVVYTIACGLDVHFAFVAACLVTTGPKGKPKVEEQTFPTNQKGLRALREWLSAAGCQAVGMEATGVYWMPVYAALEGAFELVVGNPQHMKNARGRKTDRMDARWIAGQMRHDRIKPSFVPPPEFRDARELARARRQLIHERTSIRNEVQRLLARAGITLGDLVSDLFGVSGMNILEALAEGKSIQEELPECLRTKLKSKLAPIAAALEAPLSETSQYLLGVALRRLEAQEVMIEELEARLFKHLSPHRAKVDLLLKIPGISQLSAHIILAEIGVDMTAWPTEKQFSAWAGVAPGCNQTGGKSKRGKTRKGNPYLCSMLMECAGPAAKKEGCHLKPKYHKLCSQLGSKKKARMAIAHKLALIVYQVLGQNIAYFEPKPKPQTEKTKRKILQKSIRDLERLGYKVTLEAPEAVS

SEQ ID NO: 356294 - protein, 343 aa, unidentified
MEQFAGLDVSVKETSVCIVDDTGRIVREVKVASEPEALLQVLANPAYHFKRIGLEAGPLSQWLYSALAETGLPVICVETRHMRAVLKAQINKTDRNDARGIAQMMRAGLYRPVHVKTLRSQKLRMLLTHRKLLQSKAISIDNDLRGTLRNFGLKVGMVGKVKFEARIKELVENLPDLAVLVEPLLVVRRVLREQLGILHRRLLAIVRDDEVCRRLMTIPGVGPVVALTYRATVDVPARFRNSKAVGAVFGLTPSKYQSGEISRTGAISKCGDEMMRVMLYEAAQIMLTRTNKWSWLKAWAMKIARHRGMKKAIVALARRLAVIMHRIWVDGTEFRWTREVAAA

SEQ ID NO: 356295 - protein, 349 aa, unidentified
MRIIIGCDFHPGYQRMAMLDMDTKELVEKTLSHENREEVRAFYAGLPRPVLVGLESSGQSQWFEGLLAELGQELWIGDAAKIRAAAERKQKTDRRDALLILQLLVEKRFPRIWVPTARERDVRQLLLHRAKLVRMRTQVKNQLQALALNQGVRRKGKLWSAAGRKELQGLPLLPWAGRRRAELLVLLQQLEIAIGDLDAAVAQEANTRSAARRLMTHPGVGPVTALAFVLTLGPPSRFARGKQVASYFGLIPSEASSGGKQRLGHLSKQGNSFMRWLLVEAAQSAVRHEPQLRRAYQRLAHRKCRALAKVAMARKLAVRLYWMLREEMDYAQLIQGSYAGEPGSFRGRS

SEQ ID NO: 356296 - protein, 376 aa, unidentified
MRNNAFVPRDYDVFAGLDVDKKSISVTFTNHQGFIRSLHMPYSVEHLVNHVRKHFPDQKVAFAYEAGPTGYGLYDGLVANSYPCLIASPSMIPKAPGQRVKTNRLDGVGLAENLRGGQLKSIHVPSPVYRELRHLTQLRDTFVSEMVGMKQRVKSLLLLEGIGFPPAPAGSQWSFMVKAKLRKLPGSGTVRFKLDELLDSLEFNEKRVVKTTQQIRRFCQTDPELSRCIKYVMSVSGIGSIVASQLLARIGEWRELKNVRQLGGFLGLVPTEHSTGDRTDRGSITHTGDGRLRSKLIQASWSAIRQDDELREFFGSVCQSHARHLASRVAMVAVARKLSVRISVVLMKQRAYVVREKVESAPLTQEETSPQGTTRR

SEQ ID NO: 356297 - protein, 403 aa, unidentified
MNNVAGIDVSKGKSMVSVLRPFGEVVAKPFSIGHTGSELKELADYLKSLDGETRVVMEHTGRYYEPVARFLHDEGVFVSAVNPKLIKDYGNNTLRKVKTDKADSRKIARYGIDNWAELRQHTPMDTIRMQLKTLNRQQSLYTKTKTMMKNNLIALLDQTYPGVNALFDSPVREDGSQKWVDFATTFWHVDCVRNMSLTAFAERYRKWCKRHGYNFSQSKAVEVHAGAQDLIAMLPRDALTKTMVRQAIDALNAISASLERLKAEMQALAAQLPEYPVVMAMHGVGDSLGPQLMAELGDVTRFTHRNAITAFAGVDPGADQSGTHEAKSTRVSKSGPPELRRALFLVMDCLLKTMPQDDPVYRFMDKKRAEGKPYLVYMTAGANKFLRIYYGRVKEYLASLEGN

SEQ ID NO: 356298 - protein, 368 aa, unidentified
MKQQTSATTETNIKGRNIIDFTGKTIHVGIDVHEKDFQVAKVLGDICLGNHRMAANGQGLIDHLRTRYPGADFKCVYESCAWGFTLQRQLQQAGIDCIVVHAADVSSSDKEKKRKTDKVDALKLARNHAAHQLTGIHVPNEEIQKQRNLIRFRKKLVGDLNRSKNRLKSLLKYQGINIPEQLGKKNNWSYNFMNWVEEVAKKDVLLQDTLLLMLEEVKLLRQLLLETERALRKLMQTSYNDKAKLLMSTPGVGRTTAMLFLLEIGDIQRFGPFDRLNDFVGFCPDTDSSGEIDRDTGITSRRHKQLRSALIEAAWEAIRIDPALLDTYQKLTRRMKGNHAIIRIARKLLRRMRAVLISGISYQKGVVV

SEQ ID NO: 356299 - protein, 382 aa, unidentified
MAATRENEYSSVCSPVLYLAFELGWTSWKLGFTSGAGQRPRERTIGAGDLKALGEEIVRAKKRFEVPAEAVVLSCYEAGRDGFWLHRYLAKAGIENLVVDSSSIEVNRRQRRAKTDRMDVERLLSLLIRYRSGEKKVWSVVRVPTVEEEDQRHLHRELLALKKDRTRHINRIKGLLAGHGIRLEARGDFVARLDQVRQWDGSPLPGGLKARLRREYERLLKAEEQIKELEKERVEAIRHSQEPSVVVVRNLLKLNGVGLNSAWLYGMEFFAWRGFRNRKEVGGLSGLTPTPYQSGRSYREQGISKAGNRHIRAMAIEIAWGWLRYQPESHLTKWYQDRFGTGSSRVRRVGIVALARKLMIDLWRYLETGVIPEGAVLKTRLI

SEQ ID NO: 356300 - protein, 409 aa, unidentified
MERMLERVAGLDVHKQTVAVCIKVPGDNGERQQHVRTFGTITAELFALRDWLAAHGVTHVAMESTGVYWKPVYYILEEMVTCVLVNPGHVKQVPGRKTDIKDCVWIAQLLEHGLLRGSFVPPLPIRELRDLTRGRKALIQDRTRAANRLHKMLEDSGIKLASVATDILGVSGRAMLEALVRGTTDPDVLTDLARGKLRKKLPALRQALAGRFRPHHAFVVGQLLAQIDYLEEAIEAFSAQVADAIAPFADVVQRLDTIPGVNQRTAETLVAEVGVDMSVFPTAGHLASWAAVCPGNNESAGKHRSGKTRKGNRWLRGALIEAALAATRASNTALSARYRRIMRHRGHKKAVTAVAHAILIIVYHLIAHGTTYRELGVDYHDRRAAERARRRAIQTLERQGYRVVLEAVA

SEQ ID NO: 356301 - protein, 418 aa, unidentified
MKIVFPTCCGVDVHKSFLVATIIKTPQDSLQPSYQKKRFSTFNSDLNRFADWLHENDCLDVCMESTGKYWVPVFNILEKRGIRVTIANPKWVKAVKGNKDDTKDSKWIGDLFRIGLVKSSFIPAKDIRILRELTRYRYKLTSMKSSEKNRFQNAFTVCNVALDSVVSDMFGKSATAITDYLTSDEDFDPQHCVSLLHRSLKKKAEDVLSSIEGYEITLEQKCRIGIVRDHLHYIEKLIERVDICINTMVEKYDGAISLLRTIPGIDRSSAITVISEIGVDMTQFGSSKRLCCWAGLTPGNNESAGKKKSVRISRAGVYLKPVLVQAAHAAVKDKLNPYYALKYERIAKRRGKKRAIVAIARMILTAIYSMLSTGEIWNPVDLFKVDMPEHLKEQQLQKAMKQAVRFLEAQGLTVLDSA

SEQ ID NO: 356302 - protein, 392 aa, unidentified
MVVSVGIDVSKEKHDCFIVSSEGEVLADVFTIPNTMEGFNFLLQKIRECTTPQVKIKVGLEATGHYSYNLLGFLLDNGLATYVLNPLHTNLYRKSLSLRKTKTDRVDARTIASMLLSDAGLKPYTNTAYHNEELKSLTRYRFDKVKERAKLKSSISRLVCILFPELEKLVPSLHMASVYALLEECPGAKQIAAVHLTRLKALLETASKGRYKRDMALEIRDAARNSIGSRMPAKSLELQHTIRLIRELDTEIAEIEAQIQSLMDELDSPITTIPGLGFRMAAMILAEVGDFTRFDSPDKLLAYAGMSPSTYQSGQLKNCYPHMEKRGSRYLRYALYNATKYVCHWDPTFAAYLAKKRAEGKHYNVAISHAAKKLVRLIFAMEKSQRPYRVAA

SEQ ID NO: 356303 - protein, 378 aa, unidentified
MPNTIRNDIGAIFVSLELSRSKWLITSLSPGGGERMSKHTVPGGDICALLARFSELQRKALARTGTLFPVIVVQEAGLDGFWIHRLLEKEGIESHVVDAASIAVARRRRRAKTDGIDGETLLRTLLAYKRNEPRVCAMVKAPTIEEEDRRRLCRERKTLMNERVVHVNRIKGLLFSQGVSGYEPLRRDQRRRLDELKTGDGRPLPPHLKAHVVRELERLELLLEQIKAVEGERDALLAPQEATTPEMTMLLAIKGVGLEFAAVLWSECLFRQFANRRQIAAYAGLAPTPWQSGSVDHEQGVSKAGNPRLRTTLIQLAWLWLRHQPHSALAEWFHERVRRNGGRLKKATIVALARKLLVALWKYVTAGIVIEGAVMKTA

SEQ ID NO: 356304 - protein, 349 aa, unidentified
MTQFSRIGLDTSKSVFTLHCVDAAGQPMLRVSLRRSQLLGFFKRHAPTVVAMEACGGSHHWARKLMALGHEVRLIPPQYVKPYLKRGKNDRNDAEAICEAAGRPGMRFVLAKTEDRQADTMVLKVRATLVEQRTQLINALRGHAGEFGVVSGRGTGKVTALLAEIAADTAIPPVAQEMLALLGEQIEHLDCRIKALEAKLEAMHKADAISQLLATVPGIGPIIGLSFALEVDPAAFTSGRHLAAWLGLTPQEHSTGGKQRMGGISRAGNERLRALLVSGAMAVIRASERAGSKLATEWLRKLLARRPRKVAAVALANKMARTIWAMMTTGEAYRRPAAPAAARLAAVVS

SEQ ID NO: 356305 - protein, 310 aa, unidentified
MVDKPVVGVDVAKDWLDVCVAGVAERIDNTAAAVLSWLDRVQPALVACEPTGGYERVLLKALNQRAIAFVRVHPNQLVAFRKSQGLRAKTDRIDAQLILAFLCHRLAQRGLRLAIPGDPALMALAARRRQLVDSLHAERCRLAIASLDALRHSHHAVTQALRDSLEAIEGELATTIAGNPHTAKLAGLLQTVFGIGPVVAVALIADLPELGRLSAKQIAALVGLAPHTNRSGKAQYREPTGHGRPGVRRALFNAARAAIRHPSPFRDFYDRLVTQNHRPGKVALTAVMRKILVCANAVARDQQPWKLAKP

SEQ ID NO: 356306 - protein, 345 aa, unidentified
MQPMYYIGLDLHKRTISCCVKDVSGTIHAEGTIPAIRFHLDQWMNTLPQPWTAAMEATVFTGWIYDHLQPHAAGLKVAHPLMLRAIAAAKKKNDRIDARKLSDCLRCDFLPECYMAPTAIRERRRTLRYRNLLVRQMVQMKNKIAVLLMEAGVSYNKQRLHKAGYFRELLATNPDINEGLCSLLRVCRETVVRLQRTESALVRSLERDSLLKERVERLMTIPAVGPITALTWALEVGDVWRFSSIKKAISYCGLCGAEKSSANTVQRTPLSKQRNKHLQTTLIEAAKMAARYSPHLALLYDKEKQKGSANRATLAVARKLVAYLMAVDRGQRPFELVEASYSTAA

SEQ ID NO: 356307 - protein, 357 aa, unidentified
MTTMKIKQWIAMDLSDKENEVCIINELGEKIKSHKIDNRPHVIDAFFRECDKNIDTTLIIEAGTCSAWITELGELHGLTVIVANPRKLRAIWDTVNKSDERDAELLARLGRVDPLLLAPIKHRSMEAQAHLSVIRLRETAVKMRGIASNSIRGTLKTLGVFLEDIKSPEQMPKKAPQQLPTNLLKRVEPLLIVMSVLNQEIQVYDKQIEKFCKTIPTCLQFMQINGVGPITALTFYLTVFDPNRITHTRDIGAYLGLVPKRDQSGNVDKRLGITKAGDTLCRTSLVRAANYIIGHFGQDCDLRSFGLTIKEKGGKSPTKRASTAVARKLAVLLLSMWKSGDDYKPFRKIKKKEAIAN

SEQ ID NO: 356308 - protein, 325 aa, unidentified
MFYLGVDVAKAKLDCMLLDSTSGKLKSKSIPNTAAGFKQLLEWLSKQQARAAHVVMEPTGTYHEPAALALTDAGLKLSLVNPAQLRKFAQGLGVKTKTDKADSAVLARYGATQNPPTWQPPPPSVRALKALLTRRDAVADDLQRELNRQGAAEFADAPAAVRESMAQSIAFLEAELKRLQAMINDHIDNDPDLREKQDLLETIPGVGPRVSAHMTALLAGRAFDSAEQLAAYLGLVPVQWESGSSVHGRPRLSKAGPAHLRKLLYMPAVVARRYNPHIKALTERLLARGKSKMAAIGAAMRKLAHLCFGVVRAGLPYNPKMAMIA

SEQ ID NO: 356309 - protein, 351 aa, unidentified
MNYVGVDYHKKYSYMVVKDENGNVAGRGTVNNTREEIQQFLEPYRPGMAVVEATRNWGLIYDWLDEVLDDVALAHPLKVKAIAEARIKTDKISADILADLLRANLIPKAYAPAREIRELKSILRQRMFLVRIQGMVKNRIYDILDRHPEVLGQAPEVSDLFGAAGTRWLNGVVLQGEDNRLLTNELELLAFVRERIAESNSVVKELAKKDTKAQLLQTIPGIGPFFSLLILYEIDDISRFRSEKNLCAYAGLVPSTYASGGKVFHGRITKTGSKWLRWAAVEAVQPAIRNNPDFYAYYQRTKARKGNNAAKVATARRLLTVVYRILKHGRPFERRITPQEQRIVPASLVSI

SEQ ID NO: 356310 - protein, 448 aa, unidentified
MNLKSTKMKEKKPMAFPIIYPNAAGIDISSKEHYVAVNPGSSEEPIKAFGSYTEDLKAIALWLKECKVDTVAMEATGIYWVSLFLILEESGFDVVLVTAKHVKNVRGKKTDVSDAEWIRQLHSCGLLSASFQPDDFTRKLRTYMRHRKNLIEMAATHIRMMHKALEQMNIKLQHVITDITGKSGQEIIQAIIWGERNPVKLAAFCDGRIRANKKESIIKSLEGVWKEEHIFELEQSFMLYHVYHEKIRECDQQIEKHLREKSGINKKKDDEQIKVRSNKNNLNFDAKEILKSITGTDLSEIYGITETNAVELLSEVGLNMEKWPTVKHFTSWLNLAPNNKISGGKLLSSRIPKKKNHAGQIFKMAAFAVQRSDNWLAKFFQRIKSKRGTQKAVVATARKIAVIFYKLMHEKIKFNPVPIEMYMDRFKQYQIKKLKRHALTLGYHLVGV

SEQ ID NO: 356311 - protein, 352 aa, unidentified
MEQFIGCDAHKQFSVFVAVNEKGHAGEAARVPHERRLYREFLTRLPPHSTIAVEASGQYSWLVDEMEQSGHCPKLANPLEAKRRMGLTMKTDKLDAKGLAILLRNGTLPEVWIPPSELRDQRELLRLRIFLVHLKTRVKNRIHGTLARHNVIIPGADLFGAEARLQLGERLPELPVHSREAIEQELATLDFLEGEIKSAEQRLEAIMEVSAEADLLKTLPCVGTILSMVLMLEIGRIERFPTAAHLASYAGLVPRVRASGGRTRMGQVCQNVNRNLKWAFVETGNLVVINQRRLAGTHVVRLYQRIKRAKNHQKAVVAVGRHLAEAAWWILTKQEVYREPRNVRQALSSTHG

SEQ ID NO: 356312 - protein, 371 aa, unidentified
MDESSKTLFVGLDVHKDTIAVAYAPDDRGAEVVAWGTIGTRQCDVDKLIRKLQAKGGRLVFVYEAGPCGYWLYRYLIRKGLACHVVAPSLVPRKAGDRVKTDRRDAATLARLMRSGDLTGIYVPSIEDEAIRDLSRGREDAMRDLKATKSRLKAFLLRHDIRYEGRANWNAAHLRWLAQVVCPTPTQQIVFQEYVRAVTEQQERRQRLETELQSAVTQWRLYPVVEAIQALRGIDLTAAVIFIAEVGDLTRFDNPRKLMAYLGLTPSEYSSGERRRQGRITKTGNGHARRALVEGAWAYRYPAKVSRHLQLRAEKTSATVQAISWKAQVRLCKRYRQLSARGKHVNQVVVAIAREMAAFAWAIARTVPRPA

SEQ ID NO: 356313 - protein, 363 aa, unidentified
MKRGHDVESAPSIQRRRTAVENYAGIDVSLELSSVCVVDAQGKILKEAKVASEPDALVEFFETLGFAVKRIGLEAGPLSQWLHAGLKGAGFETVLLETRHVKAALSAMTVKTDRKDARGIAQLIRMGWFRPVHAKSVDAQEIRALLIARKQLLGRLIDVELSIRGILRGFGLKVGPVTRKNFEARIRELVAGQSTLERIAMAMLSARSALKAEYGRLHKAVLASVRDDAVCRRLMTVPGVGPLVAITYKSAIDDPHRIAKSKAAGALFGLTPKKYQSGEKDVTGGITLAGDEIVRTVLYEAANVLLSRITRFSKLKRWGMDVAKRRGSKRAKVALARKLAVILHRIWVDGTTYRWAEAGPIAT

SEQ ID NO: 356314 - protein, 454 aa, unidentified
MAKLRKNKKAHGLVAAPVMEPNAAGVDIGATEIYIAVPPDRDTQPVRRFAAFTEDLKAAADWLERCRIETVAMESTGVYWIPLFQILETRGMKVCLVNARHVKNVPGRKTDVSDCQWLQYLHAVGLLRASFRPSGQVCAVRSLMRYRESLVGMAAVHLQHMQKALDQMNLQLHHVISDLSGTTGMAILDAILCGERNPLKLAQLRDPRIKASPETIAKSLVGDYRREHLFTLRQSVTAYRSYQQLLACCDVEIEQMLGEFSDGAGPDTPVLADPKDRHRPRRNEMKFDLRGHLYRIFGVDLTEVPGLNALTAHTLLTEVGPDLSAFPNVGAFASWMGLCPDNRVSGGKVLSSHTRKVNNRAARALRMAAQSLFRSQSWMGQYYRRMRAKLGAPKAITASAHKLARIVFHMLTNRHAYDETVFAQQEIQNQHRLQQRLMQQAKKHGFQLIPIAQN

SEQ ID NO: 356315 - protein, 339 aa, unidentified
MTKYVGLDVSQKTTVLCVVDGEGHRLWRGECTSSPDQIVHTVLQHAGAGASIGLETGPMTPWLVHELRSRGLDVICLDARHARAALRMQLNKTDRNDAEGLAQIMRTGWFRAVHVKSFDAHRARALLGARQQLVGMVTRLSNHIRGVLKTFGMLPGPVRGRSFAERVELLVAERLDVAPIVRPMLAAWSKLREQIVAFDKAIRAEVKQSRECRLLMSVPGIGPVTVLAYVSAIERPDRFRRSRLVGAHLGLTPRQYQSGDVDRSGHISKCGDKLARLCLYEAATVIMTRVKRPLDLKIWAMKIAKRSGTNKARVALARKLAVILHSIWRTGQAFSWGTH

SEQ ID NO: 356316 - protein, 368 aa, unidentified
MTEYLGFDVHSKDTVYVGQEESGGVTGEGKVSTTVKGFCHLIKTLQVPKGTKIGLETGPQAMWVARVLSGLGMQPIVIDAREVRQKARRIGQKCDRRDAFEICDGLRRGIYTSIVYVPGPEIQRLRQILSERRYFVRVCTSQVNRAKFALRSVGMGQEATTLTTLEAWHKLLRRPAVELVRETLARHMDVWRVAREKVLLLERELREALKPFEDTVRRLQTTPGVGMITAATYLAVIATPQRFADSGRVVSYIGLVPSTYDTGLVQRHGHITKRGSCELRAMLCEAAHHAARPQHPLNPYWVRVCAKQGYKRAVVAVAQRLGRILYAMWRKEEDFDATQLNVVEKQHTRTRTYYWQIKKPGQQLVVIG

SEQ ID NO: 356317 - protein, 355 aa, unidentified
MTPFVYNAEHYDVYIGNDVDKRSFSLNIRERYHQIMTKTIPANPEQLYNFIKHHFSDRRVVIGYEAGPTGFSLYDYLLSRNMPCVMISAASIPKPANQRVKTNRIDARKLASMLAEGEFKPIRVPEGPYRELRNLVQTRENYARSQRTAKQRIKSLLLYTGLHTACRDFEHHWSNRYIQHLKDLDCTPAVRFRLDRLLEDLDYSRHQLLKVTRQLRLFCQTDQDVKEHLYNLKTIPGIGLVTAVTLLGRIGDPQYLKGLRELSAFCGIVPRENSSGDKIRRGSITGSGNGALRSLLVEAAWRAIKHDKELEQFFHRIANRHPASYGKQKAIVAVAHKLTLRIYRVLTERRPYIIR

SEQ ID NO: 356318 - protein, 347 aa, unidentified
MNANAKVAGLDIAKEVFVAVGLDRNGKAVFKHKMKRGEVLPTFRTLQPMAIGIEACAGSHYWARELAALGHDVKLIAAQHTRAFVTGNKNDTNDAAAIAEARSRSSTKYVPINTPAQQDLQMLHRARSALMSERIAMINRIRAFAGEYGRVFAAGVAKFKVGLLAWLADPENGLSGLALTTFRELKEQLDDKEQRILAYERKLNQAAKTEVAQKLMEVPGVGPLTATAVMASVADPHHFRSGRDFAANLGLVPREHSSGGKQRLYGITGKGDSHLRTLLIHGARSALRCAGNKTDSQLRWASNLAQRRNFNVAAVGLANKMARVIWAILAHGRSYVPVWSNSTTRPA

SEQ ID NO: 356319 - protein, 422 aa, unidentified
MENRDAVMYWVGVDWGGKEHAVCVLDSQGVVVSRLRVKHSPQGLATLVEWLRNFGPIGGVAVESTRNLVVHALSAANFTVYPINPKLSCQWRKAWSVSEAKDDERDAEVLADGLMHRYEHLQPLLPDTEIARELALLCEDEVRLINDRTCLVQKLEDTLKQYYPAALEWFGDWATPNAWAFVLKFSTPAALAEASRQKVYGFIKAHRLKYTPARRTLIESRSNATDWPCDEATIRAKSLLAVTLAKQLEGLERSLKKYRKRIEALFNKHADSPIFESLPGTGPKLAPRLSASFGSNRSRFDSARAVQQLSGTAPVTHQSGKRKHVTIRRACQKGFRATLYHFAWHSKRRSAWAKACYDLAKERGQSHSQALRVLANKWNKIIYRMWQTGETYDEQRYIDQLIRKRSPIAQKMGLLKTGTQCG

SEQ ID NO: 356320 - protein, 341 aa, unidentified
MSEVFIIGVDLAKRVFQIHGADASGKIIFRKKLSRPQFAKFLKEQPSCIVAMEACASAHHWGREALAAGHEVRLVPARYVKPFVKRHKSDVVDAEAITEAAMRPSMRFVPVKAPEQQAQAMLFRTRELFVRQRTQLINSLRGYLAEFGIVLRLRIRNADILKREVEEQAHKLPDEAKRLAERLLAQIETISAEVEGLDHSIKMHAKTSEETRLMQTMPGVGPMSAIAISAFCPPAKNFRTGRDFAAWLGLVPRQHSTGGKERLGRITKMGQKDVRRLLIIGAMSVINSIERWKRCAEPWLARMLETRPRMVVAVALANRMARRLWAMLMTDQIYRIRGAVA

SEQ ID NO: 356321 - protein, 348 aa, unidentified
MTEIYYAGLDVSARSVNLCVVDEDGRVTHERKLGIEPEAISAHLVSLEVRFARIGLEAGILSQHLYAGLAAAGLPVICVETRHMKAALSAQLNKTDRHDARGIAQMMRVGLFKPVHVKTPTSQRLRTVLTARQLLRNKLQDVENEIRGLIRNFGYHLGKVTARDFEPRVRELIAESDLHVVADALLLARRSLREQFGRLDDLLVRLAREDEISRRFMTVPGVGPLVALTFRATVDVPARFTRSRTVGAHFGLTPRKQQSGEVDRTGRISRWGDAMMRSALYEAAQVLLTRVKRWSALKAWAAQVSRRRGHKKAIVALARRIGVILHRMWIDGTEFDWGKRPEAAAQSA

SEQ ID NO: 356322 - protein, 343 aa, unidentified
MKLHVLGIDLGKTVFHLVGLDSTGRVVIRKRCSRRQLLVFTGNLEVKLIGMEACSGAHFLGRALREQGHEVRLMPAQYVKPYVQTNKSDYLDAEAIAEAVQRPRMRFVPIKTEEQLDLQALHRVRERWVMRRTAVVNQIRSLLLERGLTLPKGRSHLDEQLPRILEDAELNLSDSFRVLLAQLKLELEQLAARIEEMDRVIQETARENEACQRLTEIPGVGPVTATALIAAVGNGSTFEKGRKLSAWMGIVPGEYTTGGKQKLLGISKRGNKYLRRLFVQGARSVLQQRHKQAPGLSSWLAQLLGRSHQNVVVVALANKLVRMAWAVLCKNERYRAPVLAATT

SEQ ID NO: 356323 - protein, 420 aa, unidentified
MTVYLERGYNRKEFLWSKNSIIFYERGIRMILVGIDVAKDKHDCFIMSSEGEVLYKSFTITNSMEGFNELYQKISSTTDDLSKIKVGLEATGHYSYNILGYLLDKGLTTFVINPLHTSLYRKSLSLRKTKTDKVDSHTIASMLMSDVNLKSYSETLYHNEELKSLTRYRFDKVKERAKLKQSISRLVTILFPELEKLVSTLHMVSIYALLSEFPSAKAIANAHLTKLTNLLYEVSKGRYTRETAIMFRESARNSIGSYMPAKSLELKHTIKLIGELDNEIEEIEAEIKRIMDEIDSPLRSIPGIGLAMGAMIVAEIGDFSNFDSPDKILAYAGLSPSTYQSGQLYSTHAKMEKRGSRYLRYALFNATKFVCNWDPTFSAYLAKKRAEGKHYNVAISHAAKKLVRVIYQLQKSGQSYIKAA

SEQ ID NO: 356324 - protein, 453 aa, unidentified
MSRIPAPPFVASPYGLSTQISYVEIFAGPATAACLEARMEVLHTRCAGIDVHKKTLMVHARAVEDGKVVREIRESGTFTSELLALRDWLKDRGITVVAMESTGSYWRPVYNILEGEFEILVCNAQHIKNVPGRKTDVRDAEWIAELLAHGLVKPSFIPEAPQRALRDLTRGRSSLVSERARLGNRIQKLLEEANIKLASVATDVLGVSGRAMLASIAAGQDDPHTLAGKAKGRLRLKMGALGEALHGRVRPHQRILLGELLKQVESLDASIQTLEIAIHEEIVRETDIPFETAIALIQTVPGIAETSARAIISEIGVDMTRFGSASRLCAWAGVAPGNNQSGGKRLSGKTLHGNRSLMRTLAEVASAAGRQKGTYLSALKGRISARRGKRRAVVAVAHSVLKSIYHMLVNGVHYHELGPSHFDRIDVAKVIKRLSKRADDLGYEMRPKEAIPA

SEQ ID NO: 356325 - protein, 451 aa, unidentified
MPSTVTPSPATEPLLIVNPDAAGLDIGRDEIWACVPADRATPAVRKFGTYTPDLQALADWLVSCGIKTVALESTGVYWIPIYEMLEARGLKVYVVNPGHLKHVPGRKSDVQDCQWIQRLHTYGLLSASFRPAADICAIRSYVRQRAMLIDYRAAHIQHMQKALQQMNLQLPQVLSDITGKTGLAIMRAILAGEHDPQQLAKWRDDRCAKSEAEIVKALTGNYRAEHLFTLKQAMALYDTYTAQIQECDTELERLWQAQRPEREEALPPLDTSDKRNTHSKNAPDYDARTLLYEVVGVDLVAISGLNASTVQTILSDTGLDLSAFPSEKHFSSWLGLAPHNDISGGKVLRSRTLKSGNRAGQAFRLAAQSVSRKQDEFGAYYRRQRARLGPEQAIVATAHKIARVFYHMLKSRTPFRSLSADDYNQRVRDREMAHLKKKAAQLGFTLTPAPA

SEQ ID NO: 356326 - protein, 378 aa, unidentified
MQPTQRINRTSALDVSLELAANSWKLAATDGKRPHPAVLAIEGAPLWARLQTLLCRLRELQQKWRLSSNSAVRMIFEAGQDGFWIARALQAEGIEVIVVDAASVPVARHARRAKTDRLDALKLLEVLRGWLRGERGELRVVQIPSEEAEARRLLARERGLLQKEVGQHRDRARKLLLLHGCTEEVNEGFAERLVAGKVRRANGAALPEELWNWLLRETERLDLARQQLARLERTLMHQLPESVQRCVAQLAQLKGVGWVGAMRLVLELFWREFANRRQVGACVGLVPQPYDSGNSHVDQGISKQGNRRVRALLIEMAWFWVRYQPDSELAKWFARRTTGGNKRGKRVAIVAVARRLAIALWRYLQEGVIPAGAQLKAA

SEQ ID NO: 356327 - protein, 400 aa, unidentified
MNRTRTVAGLDVHKDSIYLCIMGYDQAIIWENTYGVLTPDLRQMDHDMRAHGVTEAAMESTAVYWVPVWTELCESMELRLVNPYFIKQLPGRKSDVKDARWIAECLLKNLIKGSFVPEPIVQDMRKLNRRIMDLCEDTTYNSNKLDAALQRCGFRLSNYVATTKSKSYRSVLKAIIDGQTDPDELLRLVHGRILNKHGRERVKAALTGSFSETDLIVLRQLKETLDLIEEQTADCQQELVRLCKEHYPKPYERLQTIPGVKERAATAIIAETGVDMKMFATAASLVGWCGLKPRNDVSNGRFKSRKVTHGNRYLRQILIEIAWAASRTRNCFFSHFSYLQTTVKKKNKMKIQVAIARKILVALWHMLSKEEDFIDIYLKRQEELKRTEGQIKLLESYMAD

SEQ ID NO: 356328 - protein, 331 aa, unidentified
MFPVGIDVSKNTLDLCMLYDGIKGRIKTRNIQNNRHSVENILRWLRLQHCSPEDVHVVMEATGVYHERLATELHDAGFRVSLANPHRSREFARGMGIMTKTDKVDAYMLACYAFLKKPHRWEPPAPEIRYLGALLRRRDVLLGDALREENRLEKYLSTDTPADIISSCRRMAQLLREEVSNIERQIKAHIKASPALRRDYTLLTSIKSVGPQLGMHMLVVLRSHNFVSAEQAAAFLGVVPIEKRSGTSVRSRPRMSKIGPPQLRAKLYMSALCGKIYNKRMRNIYDEMCLRGKPKMVAIGALMRKLVHWCYSVLKTGTVINDESLKQVLST

SEQ ID NO: 356329 - protein, 320 aa, unidentified
MNSEQFVGIDVSKACLDVATFESNKVHQWANNDSGVKKLIKFLKPLSVTLIVLEATGGYEALAASMLNESGLPVVVANPRHVRNFAKATGALAKTDQIDARNIAHFASAVRPARRELKDDQTKLLAALNARRRQIVDMLAAEKNRLHTAPKANKKSIHQHIKWLEKNLNQINKDVQKAIRESLHWRETDDIIQSYKGMGPVSSATLLGDLPELGTLNRKKIAALVGLAPFNCDSGLYRGRRRIWGGRAHVRKTLFMASRSAIRFNPVIKSFYEKLRDAGKPHKVALTACMRKILVTVNAMVKNKTYWLQGYKNLDFKHGC

SEQ ID NO: 356330 - protein, 355 aa, unidentified
MTSTKYIGMDVHKESISIAVMNAAGKIVMECVIETKASIILQFIHGLRGDLQVTFEEGTWAAWLYDLLKPHVTEVVVCNPRKIALLKDGSKSDRIDARKLAEQLYMNKLQPVYHGEHGLRTLKELARSYLTITKDLTRVMNRLKALYRSWGIPCSGKEVYAPRHRSEWLGKISEAGVRRRAEHYYQQLDVLRLLRQEVRRDLLVEAKKHKAWKLLRQIPGIGPIRAAIVIAVMQTPHRFRTKRQLWTYSGLALETHDSAQYRVAEGQLERSKKPATIRGLNKDHNHDLKDIFKGAATRVSSSRGPLRDFYENLLAKGRKPTMARLTLARKIAAITLIVWKKEVRFDANYLKPQAA

SEQ ID NO: 356331 - protein, 339 aa, unidentified
MQVTTIGLDLAKNVFQVHGATEEGDAVFNRSLRRAQVLAFFESMRPCLVGIEACGTSHYWAREIAKLGHEVRLIPPAYVKPYVKRGKSDAIDAEAICEAVTRPSMRFVAIKTPQQQAVLALHRVRDLIVRQRTQIVNMLRGVLAEFGIVVRQGAGYAIAFAKQCLEGAVQDVPDLAREVVANLCHQLVALHRRVLWYGRQLNHAASRDARVARLRTIPGVGPITASAIVASIGDGHQFSNGRSFAAWLGLTPLNRSSGGKERLGRISKMGDRYIRRLLVLGMTSRIKQIQQRPDRFDPWFADILERKPTRLAAVAMANKTARIIWAVLTREQDYQIRTA

SEQ ID NO: 356332 - protein, 338 aa, unidentified
MKLYGAIDLHSNNNVTVLTDERDKVVYQKRLTKHLPLILEQLSPYASSIEGIVVESTYNWYWLVDGLMEKGHRVYLANTAAIQQYEGLKYTDDDSDARWLAHLFRLGVLPEGYIYPKEERAVRDLLRKRCQLVRQKTANFLSIQNLYSRHTGQSISANRIKQLTSEKVDALFTSSDLALAVKANLTVMRSLETEIAVLERVVRERVKLKPAYRYLLTVSGIGQILALTILLETGDIRRFPKVGNFASYCRCVGSEKLSNGKRKGIGNTKNGNKYLSWAFVEAANFAIRYEPLIARYYERKKAKTHRVVAIKAVAHKLARACYYVMRDEVPFDVNRAFA

SEQ ID NO: 356333 - protein, 347 aa, unidentified
MKQLAVIGIDVAKNVFQVHGTDAAGHSVLTKKLSRSQMIEFFAKLTPCLIGMEACSSAHYWGRRLTEMGHTVKLMPPQYVKPYVKTNKNDARDAEAICEAVTRPNMRFVPIKTEEQQAVLVLHRVRDGIVKQRVALSNQIRGLLAEFGIIIPQGLKQLNLRLMQIIDSPSGVLPGDLRTMFSSLYQELANLTARIKSFDKQIEAHLQTNEECQRVLQIEGVGPLTATAVVASIGDIRNFKSASQFAAWLGLVPRQNSSGGKTQLLGISKRGDSYLRCLLVHGARAALGYAARVDKLTDWQQSLLQRKAYNKVVVAMAHRTARRIWAVLAKGCAYDPSYPHRAAATAL

SEQ ID NO: 356334 - protein, 358 aa, unidentified
MKYVGIDVHKKMCQAAILGDDGELLDEIRFPNDADGIEEFSGKLTTFRDEVRAVVESTGNLWIQIHDRLEEHGYEVALSNPAKTRLIAEAKIKTDKVDARTLAGLLRADMLPTCYVPGEELRSKRELLRHRIRLVTARTEMKNRIHSLLDKHGLRMPGTTPFSKGNIAWLRGLSLGFMDDAILRSDLAILEAVDGQVTLIEEKIATLAVEDRRVRLLMTMTGVGYFTAMLILAEVGDVERFHSDKAFASWMGLAPGVHQSGERTRIGGVSGPGNKRLRWAMVECAHTAVRHDSRLGALYERQSRRRGEGRAVVAVAHEMARIVYFMLVRGEPYRGENRGLTERKLKNMGARALNGLRN

SEQ ID NO: 356335 - protein, 403 aa, unidentified
MTGVIIGVDPHKLSATIEVVDHHGHLLGSGRFTTDKAGYAAMRAYVKAWPDRTWAVEGANGAGRSLAQRLVEAGEQVLDVPAKLAARVRLFDTGHNRKTDALDAHSIAMVALRTAGLRVLTPDGDLEALRMLTDRRDELARLRVQTVNRLQRLLGELIPGQRKKDLSALQAKAMLVTVRPRDIAGKTRRRMAAEELADLVAVDRKLKKIKAELKAAVTARGSTLMEIHGIGPAGAARILADVGDIARFADRNRFASWTGTAPLDASSGEQIRHRLSRAGNRRMNHVIHIAAIVQLRHDTEGRAYYRRKLAAGKTPMEALRCLKRRISDVVYRRLVTDARTTEDRAAQTGPGGHCGASQESSAVDLPPHIDTSDQPLPGPAAPTLRPTPSTRKNPDRQALEPAS

SEQ ID NO: 356336 - protein, 385 aa, unidentified
MSQLNDLSRSPTPLQQDSTIIAVIEMSQSSWLVAGIVPGIERHPLKKLEPSEEELIHLLMRWRAEATKHGRTITRIAVAFEAGRDGFWLARWLRARDIEIYVIHPTSVAVSREHRRAKTDRLDTGVLKRVFIGWLRGEPDHCHMAAIPTLAEEDAKRPNRERERLVGERTRIVNRMKSCLVRFGVRNFKPTLRKAPERLETLQSPEGVPLPPNTLLELRRDMARLRFVMDQIKQVERARAQRLEQAPQEKSHAMVRLLARVIGVGIETADMLVHEVLARNLRDRRAVARYAGLTGAPDESGSKRREKGLAKAGNARVRRGMIQLAWRFLIFQKDSALAQWYQTRTAGAGKKRKTMIVALARKLLIALWRLVTTGEVPAGVILRAA

SEQ ID NO: 356337 - protein, 367 aa, unidentified
MGNDNIVWIGMDTDAKKNQVALYRGWETQPAAEWEAGMDEKGIKRLIERLKREEGEVRCVCEAGPCGYELYRKLRKAGIGCDVIAPSLTPKKASDRVKTNRRDARNLGRLYRAGELTVIGVPDEKQEALRDLTRAREDVREDLTRRQHRLNRFLARQGCHYQDGEKWTQKHWAWIRKIRLEDSNAETVREESIRAVEQSQEQLKTYDAKIEENAGKPEYAKKVERYQTLRGVKTVTAMTIVAEVWDMRRYGRAPQFMGSTGLVSSERSTGDHERRGKITKTGNAHLRRVLVEAAWHYRHRPIAGQAIKKRRQGQPEAVVSIAERADQRLNRKFRRMVDRYNKKPVIAAVAVARELAGFIWAIGQLQD

SEQ ID NO: 356338 - protein, 315 aa, unidentified
MADTIAQSVGVDISKDTLDVHLHPAGAARRFVNTRTGRSGLIAWLAKFTIVRIVFEPTGPYHHAFERHLAEAGLPLAKVNPRQARRFAEAIGRHAKTDRIDAAMLARLAALLEPPIRPAPSQTLDDMAELIVARRARVKDRVAALQRDSVHRSTLLKRQAVQRLAQIERQIAAIDTALRERLAGDLTLRARFDILASIPGIGETTALIMLVEMPELGTLDHRCAASLAGLAPIARDSGQHRGKRFIRGGRSHLRQALYMPALAAVRFNADLKAKYKALRHAGKPPKVALTAIMRKLIILANALMRDGRTCSLKPA

SEQ ID NO: 356339 - protein, 355 aa, unidentified
MCAKKTGSIEDLAVVGIDIGKDTFHLVGFDRSGQLVMRKQIKRLALNTTFDQLPRCIVGMEACLSAHFVSRTLRGMGFEPRIIPAIYVKPFNKGQKNDYNDAEAIAEAALRPNLRTVSEKNQDQLDLQALHRVRARLVSRRTATINQIRAFLIEQGITVRSGLRALKNSFETILEQRQDEISPRMRGILIGLYGDWLWLDKRIEDVSGEIEEISRTEENCANIMTIPGIGPMISTAMVAAVGKGEAFDRGRDFAAWVGLVPRQFSTGGRTILGRITKRGSRYLRMLFVQAAKVIMMRPQRWSDFSFGPWLTEVVARMPRNKAAIALANKLARTAWSLLRHGTRFDAPKDAAMEAI

SEQ ID NO: 356340 - protein, 341 aa, unidentified
MEYYAGIDVSLECSSICVLDGSGKIVREGKTASEPDALMAWFALLGFGLGRIGLEAGPLSQWLYAAMKQAGLAVELLETRHVRKAFEAMPVKSDRNDARGIAQLIRLGWFRPVHCKSIGAQETRAALTARKLVQSKLQDIENGLRGILRGFGLKVGKTTDRSFAGRVRELVAGHPNLETVADALLAVRTVLLREFKGFEKQVRSMARLDAKAKLLMSMPAVGPIVALTYASAIDDPARFKSSKGAGAHFGLTPKKYQSGETDYTGRISKIGDGSVRTALYEAAHIMLTKPLKGCSQLKSWAMRIARRAGMKKAKVALARRLAVIMHRMLADGTPFNAAAAA

SEQ ID NO: 356341 - protein, 387 aa, unidentified
MPQLNDLSRSLVALDQDSTIIAVVELSQSSWLVAGVLPGIERQPQKKLEPSAERLLGLLLRWRDEAVRAGKKITRIALAFEAGRDGFWLARWLNARGVEAHVIHPSSVAVSREHRRAKTDRLDTELLKRGFLGWLRGERGHCSMARVPTIAEEDAKRPNRERECLVGERTRIVNRMKATLARLGVRNFKPTLRKAAERLATVHTPEGTPLPRNVLAELQRDMARLGFVVSQNREIEQARQKRLEQETEIGPHAMVRQVARVIGIGIETADMLVHEVLSRPMRDRKAVARYAGLTGSPDESGARRREQGLARAGNAGVRRGMIQLAWRFLRFQKQSALAQWYRARTADSRLGTRKTMIVALARKLLIALWRFVTTGETLEGVILRPAG

SEQ ID NO: 356342 - protein, 413 aa, unidentified
MDKIYDICCGIDVHKKLIVACLNHKRKKELREFGATTRELMELAEWLQKNECEIVAMESTGSYWKPLYNIMESYGLHAIVVNPAHMKAVPGRKTDVKDAEWIAELLQHGLLQPSYIPSKDQRELRELVQYRKSLVGERTRELNRLQKMLEGANIKLSGTVTNINGKSARKILEYILSGNEIDEKKYDEMYEEKLIAHNLKASKEQILDDLKGFMSPLQRRMLKELLQHLDELNVHIENLNDEIDNFMKPEEKQASQVIQDVTGIGNTSAQTIIAVIGTDMERFPSDRHISSWAGLCPGDNVSAKKRKSGKIRKGNALLKSTLVLCAHAAVRHKSSYFHAQFKRISTHRGKKRAYVAVAHSILIAIYHILKDGVKYQDLGAEYYNQFNAERKIHAYLKKLKAWGWEPPKEAVPA

SEQ ID NO: 356343 - protein, 352 aa, unidentified
MKKYTTVIGIDLGDKESVFAVMDSDSDEIQFEGKVATTRKAFERCFSKYEPCTIALEVGTHSPWVSRLLEGLGHEVLVANARRLRMIYGNDRKNDKVDSQMLARVARLDRTLLYPITHRGETAQKDMVFLRARDGLVRARSRLVSQVRGIAKSFGERLPACDAHAFHRKIKDVLPSCLQDVLDPLLKVLKELSLQIDVYDKKIAELCVKSYPEAAVLRQVKGVGPVTALGFILAIEDPHRFRRSRDVGCYLGLVPRQAQSGALDPQLRITKAGNVFVRRLLVGAAQYILGPFGEDCALREWGLRLATGGSKRAKKRAVVAVARKLGVLLHRLWVTGEEYDPHRGLCCKEATS

SEQ ID NO: 356344 - protein, 431 aa, unidentified
MSKFFYRPTVGIDVSADFSVAAILAPDGEVHRKPFKINHNRNGFDYLVDQIKKVEKEFNMKTAIFMESTGVYHLTLFHFLKDTFETCILNPLITNCNKNVDIRKVKNDKKDALTIAKIGKFQDVKYSSNFDIEIYTLKSLCRDYYKFTDSKSTFKKKLSTDLRVIFPTYNTVFSNITSKTSIAILKTYSSPESILNADKNKLIKLISVHSRKGQVYSENTYKKLIGAAGEAVYIGIYSPSLFVKIINTISIIEALEIQIENLLKEIHLLMRSNRISAEFKKNVQLIYSIPGVGELTATTIMSEIGNIKSFVKPKHLVAYFGIDPSVSQSGKFNSNKNVMSKRGTRIGRRALYAVALASIRKNRNGEPINKVLLNFYKENMKGKSKKIGLVAIMHKLINYIFSVLKNQKEYEPRDPKIHAKMYLNRKSNFAA

SEQ ID NO: 356345 - protein, 388 aa, unidentified
MTPTSGSLSHPITLDYESTLVLAIELSKTSWVLAAQVPGLPRVKAKQTIAPRTEALLAAIDGYRDRSRAAGRTIERVVAIYEAGWSGFWLARWLARHDVETHVVQPSSVPVDRRARRAKSDGIDAELLLRTLLAWFRGEPRVCSMVPIPDEADEDERRRVREREDLVAERVSLVNRVGAVLATLGVRDYNPLRRDRRARLEALRTALGDPLPPHARARILRMLDRLELVCAQIAELERQRDAVLEEEAPDKAEEMIQQLAGLRGIGVQSATVLVREAFMREFANGKTLGSYAGLTPTPFSSGATQREQGIGKAGNRRLRTVMIELAWLWQRYQPGSAQVSWFRERTAGTGRRMRKVMVVAMARRLLIALWRFATQGVVPEGAVTSPAR

SEQ ID NO: 356346 - protein, 386 aa, unidentified
MQKLNDLSRSLTPLDPDGTLIAVIEMSQSSWLAAGIVPGVERQPLKKLAVDESALLNLLNRWRVEAEKAGRKIERIAVAFEVGRDGFWLARWLRARGIEAHVIHASSVAVSREHRRAKTDRLDTQLLKRAFIGWLRGERDHCKMVAIPTTKDEDAKRPNRERESLIGEQTRIVNRMKAALIRLGIRGFNPKLKKAAGRLEDWRTPEGEPIPPNTLAELRRDMERRRLISDQIRQIEDARLERIEQAPGDGPRAMVRLLARVIGVGIETADMLVQEVLTRNMRDRRAVARYAGLTGSPDESGTKRREKGLARSGNARVRRGMIQLAWRFLMFQKESALAQWFRARTETARGTRKTMIVALARKLMIALWRLVREGVVPDGVVLRPAQ

SEQ ID NO: 356347 - protein, 313 aa, unidentified
MSESVYVGIDVAKDTFCVATCPPVLTITLPNTPAGHRKLCQLLKPHPAALVVLEATGGYERPLAAELLSALLPVVVANPKQVHDFAKGMGQKAKTDPIDAQVLAQFAQIVKPAPKTHATPQTAELSELVRRRRQLNDLRTQESNRAQMIHHPKVRKSIRKMIKTLDFQINEIDTLIREYIDADDDFKNKDRIIQSTPGVGPQTSAMLIANLPELGKLNRQEIAALVGVAPWVHSSGKYEGKAHIWGGRKDVRSVLYMATFTACRWNPAIREFALRLQQEGKTYKVVMTACMRKLLVTLNVMVRNQTPWSPKIT

SEQ ID NO: 356348 - protein, 464 aa, unidentified
MERFYLGVDASKGYADFTILDSNEQTVMANFQLDDTPAGHEQLYKLLGAFSKEHSDCRLYAGIESTGGYENNWFHCLLGFRDPLNLKAARLNPCGVSNNSKAGLKRMGTDKISAHGVAQYLIDHPEKVNYSYQDQTAGLRKRYKVINMLIKQKGQLLNHLESMLYAAHPQLMIYFSNDTPKWILALLKKYPSAVRLARAKAKSVAQIPFITKARAEELIADAKKSVASCCDPDTEEAIKLTVGHIQHLQKTEETQKKKLATDCSLPEVELLKSFKGISDYSAIGLMLEIQNISRFVSAKKLAAFFGVHPMYKESGDKTGRMRMSKMGRKEPRRILYMVALSAIGCNPLIRDFYEKQLEKGMVKMAAVGACMHKILRIVYGMLVNNSPFDPRIDEANQQKRKPAKNKIKKDRNRRYQEIDPKAPVSRRQGLKRRGNGSQSQSDGVTKCGITAPVSTNDSNPNTTG

SEQ ID NO: 356349 - protein, 338 aa, unidentified
MQLYCGIDLYAKNSYLAIIDERRQRIFKHNVANDRQLILSFLSPYKAELAGVVVESTFNWYWLVDTLMEDGYMVHLANPCAIQQYAGLKYIDDKHDAFWLAELLSLGILKEGYIYPRQERPVRDLLRKRGHLMKLRTSLLTSLHNTMANACGRKIPSHHVLGKEDRLSSHLSGNESLALMGQVSKASIDALTLQIKTIEAHAEKQYTIEPAYVGLLSLPGVGEILGLTILLETGPISRFPAVGNYVSYCRKAESTWKSAEKVKGKGNIKNGNRYLSWAFAEAAEHARRFDTASRNFYNRKVHERNGAVAHSALANKLARAAYYIMRDQVPYEEAKLFG

SEQ ID NO: 356350 - protein, 408 aa, unidentified
MNAVGIDVSKGKSMVAALRPMGEVALLPQEFLHTEVGLEQMAYAIIALGEDTRVIMEATGRYHEPVAAALHEYGIYVCVLNPLFIKQSGGGSIRKVKTDKADAMKIAKYGLDNWVELREYTPMDTVRQQLKLCSRQYNLYMKTVVSLQNNLISLTDKTFPGVNELFSSPERADGHQKWVDFVMTFWHCDCICRVSEKAFTDRYQKWCKRKGYHFSTEKALDLYAGSCGHFTTLPKNDNTKLLITTAAQQLLAGKTTLAALRTEMTRLAKQLPEYDTVRAMYGVGETTAAQLMAEIGDVRRFPRRSSIVGFAGVDPAVDQSGKHEAKSTPTTKRGSPHLRKTLHQIVCTYLKRSPVDEPVYQFLDKKRSEGKPYFVYMTAAQNKFLRIYYARVKECLEAFDARQSLAQS

SEQ ID NO: 356351 - protein, 338 aa, unidentified
MKRYLGVDLHRNCFTVHTRQEDGSGESREWSIRSLKAFAKTVTANDAVAVEATGNVRLFCEALKGCGCRIVVVNPHQFQVISRSVKKTDKHDAKVLAEFLAKDMLPEVRMKDEAHARVASMAQTRDKLVKLRTTLKNKVNNLLAARGILIRKESLASEKGLAGVLAAPVSELEHLELEILVGEIRHLNESIKKLEGLLHGQRPKLPGWENLTSIKGIGDTGASILLSTIGKIEDFADEGKLAAYFGIVPRVSNSNETEHSGRITKRGCKLGRTTLVQCALIAARYSPYLQTYYRRIAAHRGTGKAIIALARKFLGIIYKTLKNNWIFEDFPNFVLAKT

SEQ ID NO: 356352 - protein, 411 aa, unidentified
MIKENYIYVGIDLHKETHTAVMIDCYNQKLGEITFPNRPADFPKLVAKVKKCNTDGKTIVFGLENAYGYGRALAVWLIDKGYLVKDVNTAISHRQAKHRGAMYRKSDSDDAKAIALATLNMLDKLPDACPNDAYWSLGQLVHRRDNIMKQRTRLVNQLHEQLCIAYPSYKQFFNDISRPTALYFWEHYPSRKYLKGKSVEDLRAELVPVSHNKCSTKTCEKILDAVASDKVKNNAYQDARDMVTLSIVSDLQHYDKQLAEVDKMLKQMYKMLGCTLTTIPGVNVITAVKILSEIGDIERFANANKLAQFAGIAPLHLSFSGKGKDVATKQGNRRLQATIYFLAIQMVQVSSKGTPRNSVVRAYYEKRKAEGKTSQQALICISRRLISIIYGMLKHGTEYRMPVVESAGENR

SEQ ID NO: 356353 - protein, 403 aa, unidentified
MRPEAQIEVFIGLDVGKTAHHATLIDRNGEVLSTRAARNDQAALEALLRFAAEHGPAALVLDQPGSIAALTLAVCRQHGVPVAYVPGLVMRRAADLYPGEAKTDIRDSFVLADFARTHPGNLRWLEVADETLEELRLLSGYDDDLADDRVRVVNRLRDLLTSLHPPLEALLGPRLDHPAVRALLKRYPTPSALREAGRGRILRLLRQRAPRIAERLADDDVVVLNAQTITVPAEPRLGAIVMELASELDRLDERRDRLAGEIEAVFRSHPLGPILISLPGVGPRLGSKILVEVGDGTRFASGAQLASYAGLAPVTRQSGTSIRGEKRSRRGNHRLKNALFLAAFCSLRHPASKAFYDRKRLQGKKHNAAVICLARRRCDVILAMLSTATAYDPHHADRTAVAA

SEQ ID NO: 356354 - protein, 406 aa, unidentified
MNRFFAGLDWATQAHALCVIDEHGAVHERFEVAHDAAGLRELVGKLRGLAREAAQLAIAIERPSGLLVDTLVEAGFPVVPIHPNVVKATRPRYRSHGGKSDASDAYVLADLLRTDGVRFAPLKPQSDAIRALRALVRGRDDLVATRVQLANQLRSLLESFWPGACAIFADIDSPIALAFVQRYPTPQAAAHLGEKRLGAFLAQHSYCGRRSPAQLLERLRAAPEGHSPELELEAKGELVRALARTLEPLVAQIAQLSARIEHTIAELPDGRIVMSLPRAGRQCAAQILAELGDVRERFPTEDQFAAEAGVCPVTYESGKHRSVTFRWACNHRLRRAITCLADNSRHACPWAASRYAAARARGCDHPHAVRILARAWTRVLWRLWVDRTTYDPARHRAAITLNPPKG

SEQ ID NO: 356355 - protein, 368 aa, unidentified
MIVRIITYERSTLVNDEKYIGLDVHQATISVAVMDATGKVVMESILETKAATILEFFAGLRGILWVTFEEGTWSVWLYDLLNARVDKLVVCNPRKNALLKDGNKSDRIDARKLAELLRGNQLKPVYHGETGVRMLRELSRSYLTIVKDLSRVMNRLKAVYRSWAIPCAGRDVYYRRHRAQWLAKIREAGVRRRAERLYEQLDMLQHLRQEARRELLAEGRKHAITAKLRQIPYLGPIRSVLAVALMQTPHRFRTKRQLWAYSGLALETRTSADYRFVEGQLRRSKKVVSIRGLNKDHNHDLKGLFKGAATMASVRPGPFQDFYQASLAKGIKPTMARLTLARKMAAITLTLWKKGENFDAEKLKSQAA

SEQ ID NO: 356356 - protein, 404 aa, unidentified
MIFVGVDWAEAHHDVCVMDEAGAVLAKRRIADGLEGVRQLHALLADHAEDPGQIVVGIETDRGLLVGALVAAGYQLYAINPLAASRYRERHVTSRAKSDPGDAKVLADLVRTDRHNHRPVAGDSELSSALQVLARLQQNLIWSRQRLVNQLRSSLREFYPAALRAFGTELAHPIALGVLQEAPTPAIGRTLSLSKLAAILRRAGRERNVEATALEIQLQLRAPQLATTPLVDAAYGKSVAATVRILRELNAQLASVEAELAPTFEKHPDAEIYRSLPGLGVVLGARVLSEFGDDRTRYAHPKARKNYAGTSPITKASGTRHVVLARLARNRRLADACHQWAFCSLTGSAGARRYYRTLRLRGKTHHQALRALANRLVGILHGCLEHRQPYSEQVAWPSSVTAPA

SEQ ID NO: 356357 - protein, 385 aa, unidentified
MANQNDLSRSLVAFEQDNTIIAVIEMSLNSWLVAGIVPGIERHPLKKLSCDEQMLLQLLYRWRDEAVKAGRMITRMVVAFEAGRDGFWLARWLRTRGIEAYVIHPTSVAVSREHRRAKTDRLDTELLKRAFLGWLRGEPDHCSMAAIPNLQEEDAKRPTRERENLVGERTRIVNRMKACLIRFGIRNFNPILRRATERLNALCTPEGVSLPPNTLAELRRDMARLRFVMNQINEIEAARLQRLEQAPAEEPHAKVRLLARVIGVGLETADMLVHEVLSRKLRDRRAVARYAGLTGAPDESGSKRREKGLAKAGNARVRRGMIQLAWRFLLFQKNSALSQWYRTRAESAGKKRKTMIVALARKLLIALWRLVTTGEVPAGVVLRAG

SEQ ID NO: 356358 - protein, 370 aa, unidentified
MDVHTTNFTLCAVEPILGQEANVLARATVGPDYKNIIDFISKLKNTLKVTDKECDIQCGYEAGCLGYSLYMQLTKAGIKCVILAPSTMLTQQGKRIKTDKRDALLIAQCLCYGGYHAVHIPTDDDNAVKEYIRMRDDHKISAKKIKQQINAFCIRHGLIYTGNNWTGKHRAWLKAQKLDPINQETLNEYIVSLEEAEAKIARFDKRIEEIAVETKYVEKVKALRCLLGIQTHTALSLVVETGDFKRFAKGSIYAAYLGLAPGEHSSSTDINRLGISKAGNNHLRKLLIEAAGGICKGAIGHKSKALRAKQEGNTAEIIAYADKANTRMRSRYYHFIRRGKKRNIAVTAVARELACFIWGLMTNNIALNPT

SEQ ID NO: 356359 - protein, 317 aa, unidentified
MKKTTIQYAGIDVSKKWLDAALHPMGCNARFANDDKGIEEMLVWLKPHTVAIISLEATGGIEIPALLSLHDAGYKVARINPRWIKDFARAMGAVAKTDKLDARIIALYGQKMEPEAYQPADADGQALKAMCARRRQLLNAWTMENNRRQQSQNHYVWKLHQQHMLFLEVQLKEVEHVLDTMIAQNEEWSRKKEIIESIPGVGAATAKTLLAELPELGTLTGKQIAAMVGVAPFNRDSGKQQGYRAISGGRAPVRKVLYMASVGAATCHNPLFKAFYDKLKANGKKPKVALVAVMRKLIVILNAMVRDDKIWRHDPVG

SEQ ID NO: 356360 - protein, 339 aa, unidentified
MELYAGLDLHSRNTYIGIMDDALNRVFKKRVSNDLDQILQVLKPFKKRLKGFVVESTYNWYWLVDGLMDAGYGNAHLANPSAIKQYEGLKYSDDQHDAFFLAKLLILGILPEGYIYPKEHRPVRDLARKRMFLVRHKTANILSLQSLIQRCCAVKITTSDIRKMNVEALERWLKEEYLIFSAQTSLDTINFLKQKIKSIEKAILKRVKLSKGYRQLLTIPGIGNILAMTIMLEVGDIRRFPKVGNFASYCRFVPSKRLSDGKSKGIGNRKNGNRYLSWALTEAAQIGRRHNQQFRGYYNRKVAQANTSLATKALGNKLARICYYIIRDQVPFREELFAQ

SEQ ID NO: 356361 - protein, 424 aa, unidentified
MSYRIAGIDVHKKMLAVVVSDVEVDGEYQFERIRYGSSPEHLRLLAEWLIAQQVEEVVMESTAQYWKPVWGALERYWKPICRERESAGPMSGTLHLAQAQSNRGRRGRKKDFPDAERLVKRLVANELTLSFVPDTEQRLWRTVTRRKYQLTRNHVRLQNQLEGLLEECHIKLSSLVSDLLGASARRMLQALAERETNPAAVAALADKNLRATQAQLCDALGACTELKPIYRRLLKMFLEELQLIDQQISQLDQEMASLLSQHQDSVKRLAEVPGLGVDSAQQIIAEVGAKAATFPSAKQLSSWVGACPGDEESAEVSKSHRSPKGNRHMRRILNQAANAAAKSKGTIFEIVYRRLISRLGHNQTIGAIAHRLCRLIWIILHRGVRYEERGPSVSAKSRRHRTNRMIRELRSLGYQVEPVVTTTV

SEQ ID NO: 356362 - protein, 408 aa, unidentified
METVITRCAGLDVHKTTVVATVRIPEAGGRRIVTETFGTMTPDLIALREWLQAYGVTHVALESTGVYWKPVYYMLEDAFTLLLINMLTLKHVPGRKTDVKDSEWLAQLLECGLLRSSFVPPPSIRELRDLTRYRVQQTRDRAREVNRLQKVLEDAGVKVTSVLTDVMGVSGRAMVEAIVGGTTDATVLADLARGTLRKKLPTLQRALIGRVRPIHAILLKEILAKIDYLDEMLTRLTAEIDERVRPFAPMLMALDTIPGIDRIGAISLLAETGGDMGRFPTAGHLCSWAAMCPGLDESAGKRRSGKTRKANRFLRTTLIQAALAAARTNGSALRARYYRIKAHRGHKKAVVATGHQILEIAYYVMRDRVAYRELGADYFERRDRERTARRHVKQLEALGYVVTVQPAA

SEQ ID NO: 356363 - protein, 357 aa, unidentified
MPAITEPIEVVGGVDTHKRTHHAAVLNAATGKLLGDREFTATAAGYRQLLAWLVGFGAVLKVGVEGTGSYGVGLLRHLQAQQIQVIEVSRPNRQNRRRQGKSDPIDAINAARSVLAETATATPKSKDGAVEAIRLIHTTRRSAVKARKAAIGQLHSLLVTAPEQLRTKLAGHDRATLVDRCAGLRPDPAGDLHDPTFVAKSMLRRLARRIHSLDIEIGEADTQLEQLTNDTAPTLATVFGVGPVAAAQLLATAGENPTRLGSEAALARLCGTAPIPASSGTTTRHRLHRGGDRQANAAIHMIVINRLRWHPPTKAYLERRIAEGKTKKEVIRCLKRAVTREVYTAFKTDLPRPAMAA

SEQ ID NO: 356364 - protein, 425 aa, unidentified
MSTEPALWASAAGGLILMEAPSSAYPRGTAGAGQTTSRRGGDLRRFYTRPHHFYGGIDLHARSMYVCILNRDGEIVVHRNMKASPDALRQVIAPYRDDLVVAVECLFTWYWLADLCAQEGIPFVLGHALYMKAIHGGKAKHDTIEAHTIAVLLRGGMRPHAYVYPAERRATRDLLRRRMSLMRQRAALLTHVQHTNSQDKRPEIGKKLAYKANREGGAARFPEPAVQHSIEVDLALLNAYDRLLTELERSLVNTATTHKAQIFYRLRSIPGGGKILALVLLYAIHHIHRFPRVQEFVSSGRLVKGAKESAGKRYGTSGTQIGNAYLTWAFSEAAVRCLRANPAGQTSLARLEKQHGQGKALTILAHQLARAVYDMWRRDTVFDLDKFLQCIMERSGRARRLTGHPGDQPGNRVLAWRIRCVVERV

SEQ ID NO: 356365 - protein, 367 aa, unidentified
MGWTAPTYGIDVPESWLSEATEEEPSMSKISTIGLDVAKHVFQVHGIDDKGEAVVRRRLRRSELLTFFARLPPTFIGMEACATSHYWARELGSLGHEVRLMPAQYVKAYVKRQKNDAADAEAICEAVRRPSMRFVPVKSAEQQAALMLHRSRDLLVRQRTMLINALRGHLAEFGLIEARGPGRITPLLAMLEAADDRVPALARQALAPLVVQLRSLEDQIETLAAKLLTWHKENETSRRLATVPGIGPLTASAIAATVPDASVFSSARQFAAWIGLVPRQNSTGGKARLGRISKQGDAYIRRLLIIGAQSVLRWARPAKSNPWTLALLGRRPRKVVAVALANKMARVVWALMVRGENYRYPLPSAAA

SEQ ID NO: 356366 - protein, 413 aa, unidentified
MQVVHERCCGLDVHKKTVVACVLLTHPDGTVERQVRTFGTMTGDLLALGDWLRQLGVRQVALESTGVYWRPVYNLLEDDGRTLLLVNPQHMKAVPGRKTDVRDSEWLADLLRHGLLQPSFIPPAPIRALRELTRYRKTLVQQRADEINRLQKALEGANVKLAAVASNVVGASGRAMLEALLAGQRDPEVLAELARGRLRAKLPELRQALVGRVQPHHLILLRQILDHMEFLEGAIERLQGEIEALLPAYEEALALLQTIPGVRAVAAAAILAEIGTDMSRFPSAKHLASWAGVCPGNKQSGGKRLKGPTTKGNVWLRGILGEAAWGSVKRRETYFHAQFERLARRRGRHKAVMAVAHSLLVTIYYVLRERRPYRELGADYFDRLDATRLQRHHVRRLEQLGFAVQLTPTLQAA

SEQ ID NO: 356367 - protein, 340 aa, unidentified
MSIVMGLDVHRSQITVDALETASGAVRRDRVVPGTRAALRQWLAPYEAVELRAAVEGTTGWRYVVEELQAIGAAAHLAEPCETRTARGRKKRPKTDRADAQHLRVLLQRGELPESWIPPAWIQDLRIQVRQRHTLVGQRSAWQQRIQASLYHHGLPKAGTRTAAGRARLAELSPELPPAAQELVACALRLIAGLDAELAALDAVLRPYARAQAGCRALTALYGVGATLAVTIFAELGDAGRFGNSRQVVRWAGLDITVEQSDRKRRPGKLSRQGAPVLRWAVVEAAQCASRRGAPDYARYQQLKARHGHNRACLILGRLVLKRAYHQLRELPATAWQAAA

SEQ ID NO: 356368 - protein, 370 aa, unidentified
MTTPQATVTVIGGVDTHKHTHYAAAIDDQGRLLGHREFPATDDGYVTLLSWMRHHGDVHSIGVESTGSFGATLTRALTKAGVDVIEVNRPNRMARRLEGKSDRLDAEHIARAVLGGTATAVPKAKSGTVEVIRTLRVTRASAVKARTQAFNTLWGVMIGAPSPLRDELVVLTKRTLVNRCLRLRPETDEFLSLAHDPARMLTAGIKTALRDLARRWKALDEEIKTLNKQIEALVRAAAPALVELHGVGVEIAGQFLVTAGDNAERIHSEAAFAKLCGVAPQPASSGRTAGRHRLSRSGDRAANSALYIVTIVRMRHHQPTRDYLARRTAEGLTKREVIRCLKRYIAREIYNNLPRANQTNSPAHEIQRAA

SEQ ID NO: 356369 - protein, 345 aa, unidentified
MEPMYYIGLDVHKRKISYCVKDGGGKMYSEGSLSATRLDLDVWLKTLPRPWSAAMEATMFSGWIYDYLKPHATVLKVAHPLMLRAIAAAKKKNDRIDASKICDCLRCDFLPECYMASTAIRERRRTLRYRNLLVRQMVQLKNKISGLLMEAGVSYNKQRLHKAGYFRELLASNPDFDEGLRSLLRLCRETVVRLQKTESALVRSLETDSLLIDRVERLMTIPAVGPITALTWALEVGEVQRFSSIKKAISYCGLCGAEKSSGNTVQRTPLSKQRNKHLQTTLIEAAKMAPRNSPELAVLYDKEKQKGNANRATLAVARKLVAYLMAVDRGQRNFQVVETNNSIAA

SEQ ID NO: 356370 - protein, 335 aa, unidentified
MQIYGIDLAKEKFDVSFFDLTSKKVSNQPSHKVVKNNLKSIGRFLETLPSDAVLVAEHTGVYGDTLLKCCMDSNVKIAFVGGYVIHRYRATPDRAKTDVLDCALLREFGERYPDKLKYRKFPEEALYELRQLARHREMLVEQRKQLMTADKSEDCRPIRSLAVKRSMDRIKEMLDKEIAETEKEMLKVIDGHDSIHHNYEIVKSVKGVGLVTAVELLVKTDNFTKITTARQYAAYAGTAPYEKSSGKMDKGAHISKIGNRRSKTLLYICAESARLHNKEIKLYYERRTLIDKKPRHYVLNAIANKLLRIIFTLVEKGEFYDVNYIRQDPRLVKHN

SEQ ID NO: 356371 - protein, 376 aa, unidentified
MENDSTLFVGLDVHKDSITVAYALGSGEVEVLGKIGSSQSDIDRLCKRLKSKAPHVRVVYEAGPCGYGLQRHLRAKGFGCMVCAPSLMPRKPGDRVKTDRRDAIKLTRLLRAGDLSAVHVPSVEDEAFRDLARAWSRCRSDLKRARQQLKAFLLSHGVRYTGTANWGPAHRRWLSALSLHNKWQDLAFNELRRTIEDRLAQCQRLEDALREAVQRWHFYPAVLAVQAMRGIAFTAAIGLVSELGDLTRFAHPRQLMAWLGVTPSEYSSGSKRRQGSITKTGNSYARKLLVESAWQYRHAAKVSRDIQRRQEGLPKAIIDRAWDAQLRLCRRFRKLLARGKERNVAAIAVARELAGFIWDIGRLGMAQASPAPDSTA

SEQ ID NO: 356372 - protein, 457 aa, unidentified
MTGKEKGRRGKSSGSFSTINEHAAGLDVGSTFHVVAVRPDLDEKPVRTFRSFSGDLHHMADWLMTLGIKTIAMESTGVYWIPVFEILEARGFDVVLVNARDVKNVPGRKTDVNDAQWLQQLHEYGLLRGSFRPRAGVAQLRTYLRHRERMVEYAASHVQHMQKALMQMNVQLHHVVSDITGVTGLRIIRAIVAGVGTPAQLATFRDIRCGVSEETIREALEGNYRAEHVFALKQALELWDFHQAKIAECDIEIEKVMKSLCHSCERPAKSIPPMRHAKNRNEPKFDVRSGLYTLLGADLSQIHGFGPYTVLRLIAECGDDMRKWPTVKHFTSWLTLAPGNKISGGRLLSSKTRRSSNRAAVLFRIAAVNIGRTQTALGAFYRRLSARVGKAKAVTATARKLAVLFYRALRFGLEYVDQGAHYYEERYKRRAVENLKRRAHDLGFTLLEKSELAQGVS

SEQ ID NO: 356373 - protein, 420 aa, unidentified
MEAVFAACAGLDVHKRTVVACRVVGSTRETRTFGTTTGELLKLSDWLAEVGITHAGIESTGEFWRPVHNVLEGCLEVWLLNAQHIKAVPGRKTDVADAEWIAQLMRHGLVRPSFIPPRAQRDLRDLTRHRTNFVRERATLIHRVQKVLEGTNIKLASVATDVLGLSGRAMLAAIAAGESDAERLADLARGKLRAKRAELEAALTGRVRPHHRFLLTELLVQIESVEETIARFDAEIMARCEADEKEDVVQLLDTIPGVGRLTAEMLVAEVGIDMSRFPTAGHLASWAGLCPGSNESAGKHRSGRTRQGNVWLRSAMVAAAQSAVRSRKTSFWAQYQRLKARRGTKRAILAVAHAMLVCAYHIILRREPYRELGPDYYDRRQHATTARKLTQRLRRLGFDVVITPLTESPPQASPVPGFSG

SEQ ID NO: 356374 - protein, 349 aa, unidentified
MRFYNGQHRHWCGIDLHVKTMYVCILDAEGQTLAHKNLPATPEAFLEAMAPYRDGLVVAVECIFSWYWLADLCAREGIAFVLGHALYMKAIHGGKAKNDRIDALKIATLLRGGLLPQAYVYPAGMRSTRDLLRRRLHLVRRRGQLLAHIQMTSHQYNLPPLGKRIAYPANREGIVEHFEDRAVRKSIAIDLALLERFDGLITDVEGYLVRQAKQHDPQAFHRLRTIPGVGKVLALTILYEIHDVRRFDRVQEFASYARLVKCAKESAGKKLGTSGGKMGNVHLKWAFSEAAVLFVRHSAQGKQLLARLEKRFGKGKALSILAHKLGRAAYYMLAREKAFDPERFVATAR

SEQ ID NO: 356375 - protein, 367 aa, unidentified
MEKKIAYIGIDYHSETLSLAVKVEGSKDIFDTLTMKNNDKSILKYLKKLSKEFEIRACYEASCNGYTFQRKMENWGFHCDVIAPSLIPKKPGDKRKNDYRDAINLTRLYANGQLTTVHPPTEGQESIRSIVRCRLNLKENEKSVKLQINSFVLSHGFRWPHSKWTVKHRAWLSALTLRDDFSQRVLAEHLGHLEYLSARISSLDNVIKEIADSEIYAPSVKKLKAFKGLDILSAMILITEITDFRRFPNPKALMAFLGLIPSEDSSGPKKKGGPITKAGNHRCRTQLIESVQHAMKKPIISYKMKHNLEQVDPASANIAIKCMHRLNKRFWALAMKGKSRNKALTAVAREFVGFIWAMMRQPEPAAI

SEQ ID NO: 356376 - protein, 367 aa, unidentified
MIKNSTAFVGLDLGDKRSNVFILDQEGEPIEETRIPTTEPAFRRKFASLPPCRVAMEAGTHSRWASRLLEQLGHEVLVANPRRLRLIYENSRKADEADAEHLARLARLDPQLLSPIRHRGPEAQAHLTVIRSRDSLVRARTLLINHVRGSVKGTGARLRACSADSFHHRVAPTIPTELAPALMPVLEAIASLTAQIHAYNRQIEQLCQEHYPEARHLRQVSGVGAITALAYVLTLDDPDRFRKSREVAPSLGLVPKRDQSGSRDPQLRITKTGDSYLRRLLVGSAQYILGPFGPDCDLRRWGLKLAERGGKNAKKRAVVAVARKLAILLHRLWVTGEVYDPFYHSHPDQTSLTQTDLRVRQPEAVCA

SEQ ID NO: 356377 - protein, 349 aa, unidentified
MKRTTIGLDIAKRVFQAHAVDPESGEVRRTKLQRSEVLRHFAQLRASLVAVEACGSAQHWAREIRKLGHEVRLISPQFVRPFVKANKTDAADAQAIWTAAQQPEMRSVAVKTEEQQAVLALHDIRTRLQKSRTAAINQLHGLMGEFGVELPRGWRTMLPQAATALDSASSPVPALLQPQLRFQLMEIRSLTARITEVEGHISAWMRRREDCERIAAIPGVGLLTATAAVATIGEARTFRSGREFAAFLGLVPRQSGTGGRVRLLGISKRGDRYLRTLLIHGARAVISVRKGKYATDPNTWLDRVLQRRPTNVAAVAQANKTARQIWALLAHGRIYEPKHGVLEPVAAPA

SEQ ID NO: 356378 - protein, 376 aa, unidentified
MRRCREVFVGIDTAKAKNAVAIAEAGRQGEVRYLGEFANTPDGVAKLVRKLADRYETLHLCYEAGPTGYGLYRQILAMGHSCTVVAPSLIPRRPGERVKTNRRDALSLARLLRAAELTAVWVPDETHEAVRDLVRTRAMAIEDYRRKRQHISSFLLRHGRVYEGGTTWRGRHLRWLDGQSFVHAAQRFAFQEMLNAMRAAVERIDRLDAALVEIVPAWTMAPVVAAFQAMRGVGFLTATAVVAEAGDLRRFEHPRQLMAFLGLVPSERSTGNTRRQGGITKTGNSSARKALVEAAWTYRHSAGVGTTHQRRQQLLPQRVREIAWKAQSRLCARYRRLTAKGKRNTVVITAIAREIAAFLWAIAREVEPAPITLQTT

SEQ ID NO: 356379 - protein, 403 aa, unidentified
MKSVLSIDIANGKSEVLLITEYGEILIEPYEIKHCLNDFNLLKDKIDKFKLDDLTVFMESTSTYHLPIQRFFTKNNYNVQVINPILSKNNTRNLRKTKTDIEDCYNLADLFFKNTVKIHNKNMNDIYSSMIELSRQEKHLTESLVRSKNRFKQIIANAFPEYIKCFTANDIFRKTSLNFIKEFPHADIIKEKRIDALANNLYKSSKSGCSYSKCLNKAKKIKELANNSYPGIDIDSCEVSNLINIVDIISYNDSKLNEVKQDIVKFAKQTPYFNIINSIYGVGETSTAQIIAELGDINRFENIKQLNAFCGLDPTIIQSGKSINYHGPISKRGNRNARKVLFITCCSIIRSSILHNVDNDLLLYYRKKQAENKHFKECITACSTKLLRIIFAMCKNNSLYVQK

SEQ ID NO: 356380 - protein, 334 aa, unidentified
MDQETGECGDRQLNHSDGEAERFYKKLKERGVSVRVGLEATGYSRWFERLLAELGFEVWIGDAAEIKRQRGRKQKTDREDARLVLRLLLENRFPKIWVPSPDNRDVRQLLWHRHRLVQMRTRIMNQLQAVAMNEGYRWKKKLFSEQGRALLGKLSLAPWASRRRKELLELLDQLDPKIAELTAAVEQEGNKRPEVVLLKTHPGVGPITGLAYVLVIGTPDRFPCGKKIGSYTGLIPSEDSSAGHQRLGHISKQGNALLRYLLGEAAQAAARCNPDWRRRYMHLMMRREKRIAKVAMARKLAVRLYWMWRNNWQYSQLVEFGSNAGKLGIGHGVK

SEQ ID NO: 356381 - protein, 422 aa, unidentified
MALSVKGVVVEVLIDRCAGLDVHQKTVVACVRTPGAGRQKRSSEVRTFGTFERQLVELREWLIGCGVTSVAMEATGVYWKPVWHVLDEGQSLELLLVNPAHIKNVPGRKTDVNDATWIAQLLECGLLRGSFVPPVEIRELREVTRYRRQLTEERARETQRLQKVLEDANVKLSSVASDVLGVTGRLILDALCAGERDPETLAAMARSRLRSKIDDLRQCVPGRFNSHHAAMVTEIVAHVDYLSAAITRLDTRVEAMMAPFRAARELITTVPGIQQRTAEIILAEIGVDMTRFATPGHLASWAGLCPGNNESAGKHRSTHTRSGDPWLQSALVEAAWAAVRTKNCYLAVRFWRIAKRRGQQRALVAIAHTILIIVWHMLTEGTVYTEIGTDYLARNDNPDRRRRHLVNQLEHLGYTVALSPAA

SEQ ID NO: 356382 - protein, 370 aa, unidentified
MEEGIKFFVGLDVHKDTIAVAVAEADRTPARLVGNLAHDVGKLRKLLARYGDPGQVHVVYEAGPTGYGLQRELSRRGYHCEVIAPSLIPKRAGDRVKTDRRDCLRLAELARAGELRAVWIPDPADEAIRDLARAREDAVNARTQMRQQLKAFLLRHDVRYPQRTSWSKTFYRWLATLSFDGAGAQIAFTEYWQAVTSADERVARLTQALVASIAGWRFESVVQALLALRGIDQVSAIGLVAEIGDISRFAHPRQLMAYLGLVPSEHSSGERVARGSITKAGNAHARRLLTEAAWSYRFQPRIGRRAQRRAEDLPQALRDIAWKAQQRLSGRFARLRGRGVQINKVCVAVARELAAFVWAIASARAKLPQS

SEQ ID NO: 356383 - protein, 352 aa, unidentified
MQHFIGCDVHTRDQVVAWIEEETGEIKKRRLEHEGKEVKEFYAQFPQGTVVGIEATFPVHWFERLMGEMGHELWVGDAARIRASEVRYQKTDSRDAEHILDLLRTDRFPRIWVPSLEERDLRQLLVHRMKLVRARTQVKNQLHALAISQGVCRKGKLWSVKGRKELESLALLPWAARRRKELLELLDRLDEQVRELDRAVEEAGRAREEVALLRTHPGVGMVVSLAFVLTVGPVERFRNSRKLVSYWGLNPRENSSGGRQRLGSISKQGNTMMRWLLVEAAQTAARLDPQLRRIYQRLKKQKTSGVAKVAVARRLAVRLFWMLRTRNNYAQLVHMSGSPSSAVVPPTAEPKL

SEQ ID NO: 356384 - protein, 386 aa, unidentified
MQKLNDLSRSPSPLDPDGTLIAVIELSLSSWLVAGIVPGVERQPLKKLAVDESALLKLLHRWREEAAKAGHRIKRIAVAFEAGRDGFWLARWLRARDIEVHVIHASSVAVSREHRRAKTDRLDTELLKRSFLGWLRGERDHCKMVAIPTIKDEDAKRPNRERESLVGEQSRIVNRMKAALVRLGIRGFNPKLKKAVERLDGLRTPEGEPIPPNTLAELRRDMARRRLVSDQIRQIEDTRLERLEQAPSDGPHAMVRLLARVIGVGIETADMLVQEVLSRNMRDRRAIARYAGLTGSPDESGRKRREKGLARSGNARVRRGMIQLAWRFLMFQKDSTLAQWFRARTENARSTRKTMIVALARKLLIGLWRLVREGVVPDGVVLRPAS

SEQ ID NO: 356385 - protein, 409 aa, unidentified
MLKIVYPNCCGIDVHKTFVVAVIAITNNQGITEYHRKRFSTFTNGLTQLRDWLEYHSCFDVCMESTGKYWIPVFNILEEQTNVCLAHPKYVKAIRGKKTDKKDAQWIADLFKHDLVASSFIPPLKIRQLRDLFRYRMKLTQLQVGEKNRYQNCLTWSNLQIASVVSDVFGKSAQAIIKSILDNPQDKPNIEQLVHKRMKNKVQDLEIAMEGALTPEQAEKIRVIKAHYDALAICKEDLEQMIRELGQDYQHQVKLIQTVPGSKEDLSALRIISEIGCDMTVFDSAAKLCSWAGLVPANNESAGKKFSTRISKGGKYLKPFLVQVANAVVKSDKHPELRNKYLKLKKRRGHRKAIIAICRRLLVSVYQVLRKQEDYNPVLQGLTEIRNPDKTMSVQDAVRFAQQHGFNVA

SEQ ID NO: 356386 - protein, 350 aa, unidentified
MSNHMFAAADVHAATTTFAVLDASGKFVMETVVETKGESLLSVVKSITGAVHLTFEEGTHAAWLYDLLKPHVAELLVCNPRKNRNDSGNKSDRIDARQLARWLRSGDLSPVYHGHDSTRALKELVRGYENLVSDSVRTKNRLKAVYRSQGESTSGGDVYKLEQREEWLSKIQSSGLRSRAGWLYSQMESLGELRREAEKAVLREAKKHRPCSLLRTVPGIGPIRSATIVAHAATPFRFRTKRQFWSYCGLAVVTRGSSDWVIDGEKLIRKRQPVATRGLNRNYNRRLKDVFKGAVRDAGLFRPHFDSLVASGTRPEMARLTVARKIAATTLAIWKKGEKFIPSKAVIRSE

SEQ ID NO: 356387 - protein, 322 aa, unidentified
MDGSTANSNVSFVGIDVSKSKFDVVILPEGTHLTCSYDGEGIGKFLAQLPQHDCVVVLEATGGFERRLAAELVAAGRQTAIVNPRQVRDFARGIGVLAKNDRIDARVLATYAQHVKLRLLEKTSEKQQELTALVVRRRQLLALQTAESNRLEQTAVKLAAKSIRHVLDLLRKELKKLDAEIARLIADDDDWRNKSELLQTVPGVGPATSASLVAELPELGKLNRQQIASLVGLAPFSRDSGQSRGRRSIWGGRGAVRCALYMAAFNAKRCNPIIQAFADRLKQAGKRTKVILTACMRKLLVILNTMVRNQTPWKTNVTLQNT

SEQ ID NO: 356388 - protein, 384 aa, unidentified
MGNDQGYQSGTEEVVLAVSLELGVSKWKVALHDGRRERPAVHTVAQPQATARLQAVLALIDAHRDRWSLPADVRVVVCYEAGPDAFWIWRALQARGIECYVLDPASIPVERHKRRAKTDRLDAIRLVISLRAWLRGERDRMHVVHVPSAQDEASRHLMRDRGQLQKEVLQHLDRMRKLLATLGCWDKVDHRDFAGRLARDEVRCHDGTPLPPELRERLLRECERLALATQQLATLEKTRQASVPAPARARSDALARLKGIGEVSASRLALELYWRDFHNRRQVGACVGLVPQPYDSGESQTDQGISKQGNGRVRGLLVEMAWTCLRYQPGSALTQWFNRRTQGTGPNRRARRIAIIAVARRLAIALWRYLKDGVIPDGAQLKSS

SEQ ID NO: 356389 - protein, 387 aa, unidentified
MSQTNDLSRSLVSFEQNATLVAVIELSQSSWLVAGTVPGIERQPLKKITPDEAALLCLLHRWRDEALANGRTITRLAVAFEAGRDGFWLARWLAKQGIEVHVIHSSSVAVSREHKRAKTDRLDTAMLMRVHLGWLRGERGHCKMVAVPTLAEEDAKRPSREHEDLTGECTRAVNRLKAALARLGIRGFNPKLRKAAGRLEALRTPEGEPIPSNMLEEMNRDLAHLAFLRGQIRAIEQARLERLEQAPKTGTNTMVLMLAGVIGIGIETADMLVHEILSRNLRDRRAVARCGGLTGSPDESGSKRREKGLSKSGNARVRRGMIQLAWRFLHFQKDSALAQWFRSRVEGAKGANKRTMIVALARKLLIALWRMVNTGEVPQGIVLRQPA

SEQ ID NO: 356390 - protein, 421 aa, unidentified
MPNIEIGVDSMVKENFIYVGIDLHKETHTAVMIDCYNQKLGEITFPNRPADFPKLVAKVKKCNTAGKEVVYGLENAYGYGRALAVWLIDKGYFVKDVNTAISHRQAKHRGAMYRKSDSDDAGAIALATLNMLDKLPDACPNDAYWSLGQLVHRRDNIMKQRTRLVNQLHEQLCIAYTSYKQFFNDISRPTALYFWEHYPSRKYLKGKSVEDLRAELVPVSHNKCSTRTCEKILDAIAGDKVKNNAYQDARDMVTLSIVSDLQHYDKQLAEVDKMLEQMYKMLGCTLTTIPGVNVITAVKILAEIGDIKRFSNANKLAQFAGIAPLHLSSSGKGKDLATKQGNRRLQATIYFLAIQMVQISSKGTPRNPVVRAYYEKRKAEGKTSQQALICISRRLISIIYGMLKSGTEYRMPVMENTGETV

SEQ ID NO: 356391 - protein, 358 aa, unidentified
MMKSKQTKTAFVVGGVDTHKDIHVAAVVDEHDRVMGSAFFSTTRSGYQQMLKWMNNFGVVSRVGVECTGTYGAGLVRYLLQMKVEVLEVTAPDKMERRKRGKSDTIDAESAAHAAFSLIRTVTPKTRNGMIESLRVLKTCRKSAITARKIALQMIQTNIVSAPDKLREQLRKMTRMQLIRTLASWQPDPRKYRNIEDAYRIALNSLAQRYLELHNEIAGLNSMMISIVDEVAPELIKRRGIGYESATQFLITAGDNPTRLRSEAGFAALCGVSPVPASSGKTNRYRLNRGGDRAANSALHIVALTRLRTDERTQEYVTKKITEGHTKLEAIRCIKRYISREVYKLICHQHHNVNLLSA

SEQ ID NO: 356392 - protein, 344 aa, unidentified
MNYYAGIDVSLRTVNICVIDDQGEFVAETKLDSEVTDIVAYLDGLNLDVSSIGLEAGTLTQYLTYGLQSAGFEVVCMEARQVKAALSAMRNKTDKNDARGIAQLLRSGWYSPVHVKSMASHRIRALLSSRRAVLSKCIDLENEIRGLFKVFGIKLPPKLGHGPFDAAVRDIIETDATLSESLLPLLDARLVLYHCFRELDNRTRKQAHNDHVCQRFMSAPGIGFVTALTYKAGVDDPTRFRRSRTVGAHFGLTPRRFQSGEIDIDGHISRCGDRDVRSALYTAANALMTRSSKWSSLKVWGMQVAKTRGHRRAVIAVARKLAVILHRMWIDDTQFQWGSEDARS

SEQ ID NO: 356393 - protein, 354 aa, unidentified
MSQTPNTAIAVIGIDIGKNSFHLVGHDARGAIVLRQKWSRGQVEARLANIAPCLIGMEACVGAHHLSRKLTSLGHDARLMPAKYVRPYSKGQKNDFNDAEAIAEAVQRPTMKFVATKTAEQLDLQALHRMRERLVSQRTGIINQIRAFMLERGIAVRQGIGFLRTELPTILATRTDALSPRMLRVIEELAGDWRRLDQRIDGLSGEIEALARQDQACSRLMTVPGIGPIISSAMVAAIGTGDVFSKGRDFGAWLGLVPKQISTGDRTILGKISRRGNRYLRVLFVQAAWVVLVRIKNWERYGLKSWIEAAKRRLHHNVLAIALANKLARIAWAVLAKGRAFELTRSDDADVRPA

SEQ ID NO: 356394 - protein, 348 aa, unidentified
MKYHTGCDAHKDFCIFHHMTDDGAHGLHMKVATNKQSIYRFLEQLDAPTTITLEAGNSWWHLYHLFNDHPLVSEVNVVDPRRSRKISAELSVQSGYGRASNDHIDSEMLAEIRRRNLAPTIHIPTPEQMQIRTINRFRLDSVIDGTRAKNKIHALLTFHGFSVPIKELLETAATYHTIKQQLPEYVFFLIDQLLERISALAKQVQRCESQLERLLPAADPKLRIILSHPGIGIVFARTIYSEIWDIASFKEPKNLISYAGLAPVACESAGRQKGIIKLNRHCNYYLKYAFVSAANSSRNHPTYRRKYQSDVKKHGKMIAKLNLARHIVKNIYWMLTRQQCYHTHVAPL

SEQ ID NO: 356395 - protein, 343 aa, unidentified
MQMVTTIGLDIAKSVFQVHGIDAEGKVMIRRQLKRRYVLAFFQKLPPCLVGIEACATSHYWSRELRRLGHTLRLMPPAYVKPYVKRQKNDAADAEAICEAVTRANMRFVETKTPEQQSCLMLHRTRQLFIRQQTSVINAIRAHMAELGIVTPVGRKGVEQLLAVATDASDRRVPEVARACVAALGVQLRMLKAQILEFDRRILAWHRSNETSRRLDAIPGIGPALATALVASVADAKAFRSGRNFSAWIGLVPKQHSSGGKNKLGSISKQGDRYLRSLFTAGALAVIRYAKMHGTKHRPWLTALLARRPTKVAAIALANKIARMAWAMMARDEGYREPVALAA

SEQ ID NO: 356396 - protein, 348 aa, unidentified
MQECNAELFKGQVVFVGIDVHKRSWKVTELYGGNLTKTYSMSPSPSDLSLRLNREYPGAMFKSVYEAGFCGFWIHRKLLKLGIENIVINPADVPTSDKERRFKNDVVDSRKLARELCKGSLDPIYVPSKEHLRLRDLVRHESQLIKDITRSKNRINGHLHLYGGGMTSWAGLKLEQLREEMKNKNWALFFLLDELIKQRKEKLEINKAERLLIREQGKEELLINLISIPGVGFRIASLFLAEIWDIERFKTRDELIAYVGFAPHLVGSGEKEKMVGCGKRVHKKLKSLLIEGAWRAISVDVELRAKYCNLAAKGMPQRAVTVVAKKLLLRMRAVWLQERKYKLNRIRK

SEQ ID NO: 356397 - protein, 430 aa, unidentified
MGHNRSRSRQPGGKKFKHPSLLKRINRNAAGIDCGSEAHYVAVPPERDPEPVRSFKTFTADLRDLADWLEACKIKTVAMESTGVYWIPIFEIIEERGFEVVLINARHIKNVPGRKTDVLDCQWIQELHSVGLLRGSFRPTAEIVSLRAYLRHREKLVQSAASHIQRMQKALVQMNLQLHNVISDITGVTGMHILRDIVAGVTDPMALAAHRDPRCRASQDEIAASLTGNYRAEHLFVLRQHLELFDTFQRQIQLCDAEIESLLHKLAARQRKPKTPVPSPRCKLRFYDNEPRFEIRDPLYRLAGADLTQIDSIGPFTALKLIAEIGTDMSRWPTYKHFTSWLTLAPKNKITGGRLISSRTQPSANRAATVLRMCAMVVGRTSTALGAYYRRIAYRIGKPKAITATARKLAILVYRTCVFRPIVISDSGRR

SEQ ID NO: 356398 - protein, 414 aa, unidentified
MEQIHDRVAGLDVHRDVVVACARVPGVRGGTVTEKERFQTTTGALARLAGWLADRYVTLVAMEATGVYWKPVYYALEDSFEVWLCNAHHVKNVPGRKTDMSDAEWLADVAAHGMIRPSFVPPPAIRELRELTRYRKTQTDARVAEIQRLEKVLQDAGVKLTSVASKVLTQSGRLMVEALIDGQRDPAELANLAKGKLRPKIPELSEALNAHFGAHHAVAAARILAHVDFLDATIKALTEQIDVRTKPYQAARELLMHVPGFDRLTIDTVIAETGADMSKFPGPGHLAKWAGVCPGNHESAGKRRRVGVTPGNPWLRRALVEAARAAARTKGSYFGAQYRQIAKRRGPNKAAVAVAHSLSDLIWHMLSTGEVYHDVGDGYFQRRRDPERETRRLVAQLEQLGFQVALTTLQDPAA

SEQ ID NO: 356399 - protein, 375 aa, unidentified
MGDHSEGFVAFDTSKLRNAVAIADAGRTGEVRFLGEIESSGAATAKLVRKLAAKHPRLTFCYEAGPTGYGLYRQIRSLGHECIVVAPSLIPKKPGDRVKTNRRDALSLVKLLRAGELTAVWVPDRHHEAIRDLTRARETAVMDLRSKRQQVSAFLLRRGLHYCAGKRTWTKAHMNWLASQKFEQPERSIVCEEMMFAIRQAQERVERLEQAIRAAVPDWSLAKVVTALMALRGIDLISATGLLAELGDLSRFRTAPELMGYLGMGCSESSTGDTIKRGPITKAGNRRARRTLVECAWSYQHPPRIGIAKQEKVAAAPPKVREIAWKAQSRLNRRYRALIRRGKLKTVAITAVARELAGFVWAVAREAGSAEPATK

SEQ ID NO: 356400 - protein, 328 aa, unidentified
MSDTIVGIDVSKETLDASCTRGQRRQARIFANNPDGWKLVLSWLKAMGSKQAHVCMEATGRHSLGVALALHDAGHVVSVVNPAQIRDFARTKLGRNKTDKVDAALIREYAELFKPGPWTPPSTAMRQLCELQTIRAGIVNNRAEWRNRIGSGLTDAIATRLAAATIEHFTTQLEAIDKAIAETIDQDAELRGRRDLLLSVVGVGETLAASLLAEMPEPGVLRRSGEIVAYAGLNPSHHRSGTSIDRPTRISKIGNATLRSSLYMPALSAMRFNPAVKALVARLKTAGRLKPKQIVVAAMRKLLVICFGVLKTGRRFDPAIAMPASAPK

SEQ ID NO: 356401 - protein, 316 aa, unidentified
MPRKRILVKSIDTSISYQVIGIDLAKHLVSVCLITGAGEIFGIDRLTYDDLLKSAERMSPTLFCMEPCPEVHYLAEKLQGYGHHTKVIDGAVVKEYIKTHFGGQKTDLNDAQAIAFLSLDTNLPEITPKNTSNSVLSSIQAVREQFRKEYIQSFVSLKGICQRWGLPISKGVMNKNKVEELVSESKKIPQEVKDWLLELLQSCRELQKRLNKISKYLKEYADNDEICQKIMSVPGIGPITATRLKATIGDIQRFEKPKSIVAYYGLVPKSKATGHNEKKRRHNSSRRSSCPFSSDRGCGSSFEFGSKRIPKIKASQ

SEQ ID NO: 356402 - protein, 326 aa, unidentified
MTSSHEVMVGIDVSKDKLDVAVTGYSVSQVNNTFVAFRGWLRRLLKKHRVSRVVFEATGGYEKWLILALEELEIPFARVHGTAVHHFIKARGQLGKTDAQDAVALLEYAGWMNEKTFKEGSVSTSSLKLQEWHARLRQLKQQYRSEKNRLKATLLDNDIMVDIRRHVKQLEKQIDRCKEKLVALIKAHCSMKEEYRRLQTMPGVGHEVAMAWLCYGQGLTNGQRASASAFCGLAPLNRDSGKYKGHRSTGHGQPVLKQMIYMAALVGIRYNPPLREFYEGFIKEGRPPLVALIACARKLLMWLRAMMRDQIDWQEMDVYKQSIKKA

SEQ ID NO: 356403 - protein, 326 aa, unidentified
MSNILGIDVSKDKLDLVLLNEEGKFHKVISNDLAGFKTLDQWLISRHIDQVHVCLEATGQYGDAVSEYLYGQGHDVSVVNPTRIKRYGESKLHRNKTDKADADLIAEFCLKEKPALWEPLNPDLKHLRALVRRLIDLQANYRQEESRLSSGEKDDWVIQDLSVHAEYLKARIEATEEEIQSFTKGTPSLKANQELLVSIPGVGNKTSARLMGEIGDISRFENAPQLAAYAGLNPKGFSSGSSVHKKTRISKQGRSELRACLYMPAIVAMTHNPVIRALKERLEKKQLPNMAIIAACMRKLLHIVYGVLKSQKPFDPEYDRQFNFSA

SEQ ID NO: 356404 - protein, 420 aa, unidentified
MLMNIPSQFPYRATVGLDWADQKHDVFVRFANGDSYRRKIDSRPEAIQEWLLELRSTCAEAKIAIALEQRRGALFYHLCTHLSWIDLYPINPHSLASFRQTFFSSRAKDDPVDSQLLEELLRTHPERLRSYQPEPTAERKLDQYCRHRRSLRSLATKTELKLISTLKQYFPLAVNLFADVGLKSEIALNFLSRWPTLEELHRAKAQTVRSFFYAHNSRSQSLIEKRLQLIAQAHPVTDDLALIEPLVLTSKCLVTQLRQFNQAISQFDQKIRELFKSHPDHFLFESLPGAGEQLAPRLFAVFGSNRSRWADATDIQKYSGIAPVVERSGKSLWVHRRLARPIFVCQTFHEFAQQSTHRCSWADQFYRRQRQRGKSHHSAIRALAFKWIRIIYACWKANKPYDESFYVQALEKRNFSVSTT

SEQ ID NO: 356405 - protein, 337 aa, unidentified
MKYCGIDLHGNNNWVVIIDEQDRVLYSRRHANDLPRLLAVLAAYRSELGGIVVESTFNWYWLVDGLQEAGYRVLLANTAAIKQYDGLKHRGDESDARQLAHLLRLGLLPQGYIMPKAMRAVRDLARKRMQLVQQRTAQILSIESSLSRHRGWKLSSNRIKCLQQADLEELELGEMPMLGLKANVAVMQALQAQIDGLEKVLADYCRAEPGYRLLRTVTGIGEVLATVILLETGGIERFADAGNYASYCRCVGSAYLSNGKKKGEGNTKNGNRYLAWAFVEAANFAVRSCEAARRFYQRKKAARNNAVAIKAVAHKLARACYHMLKAQQPFCVERCFA

SEQ ID NO: 356406 - protein, 421 aa, unidentified
MSTPACAKFAAQIGLDWADTKHDFCLQPGRGGPREFGRFSHQPDEIDAWVQGLKARFGGPIAIALELARGPIVYALQKYDFIVLFPIDPSLLAKYRVAFKPSRAKDDPTYAELALELMLRYPERFHPLHSQSVAMRTLGYLVQQRRMLVDDRKRIVNRLCNALKQYFPQALDWFDHRDTPLFCDFLSRWPTLQQIKRSRVATLERFFHDHNVRRPALVTQRVDGVQRAIPLTEDAAVIQSFQLLATTLVDQLRILLQAIARFDAAIAAVAPTLPDYKLFSVLPGSGPHLAPRLLTAFGEQRERFQNAGQLQRYSGVAPVTQRSGKKSWVHWRWQCPTFVRQTFIEWAAQTINKSFWAGTFYQQQRAKGCPHQVAVRALAFKWIRILYRCWVTRTPYDESRYLKALQLRGSPLLAGLRPKTT

SEQ ID NO: 356407 - protein, 386 aa, unidentified
MDVHTSNYTLCSLDPGYGVEKDNYFAEVQFTNNFVTNVVNYVSNLKKKLKDCEFVCGYEAGCLGYSTYKDLTKVGIKCVIMAPSTMAVQKGGKKVKNDRRDARVIAQCLAYQTYKEVYVLSEHDEAVRGYLRMRDSHNKALKRIKQQIIAFCTGHGLFSPTKSNWTVAHLKWLKDLKFNDPVEQEILNEYLSSLTFLSDKIKAMDVRIEELASEKQYCENIKKLRCIKGIETNVALTLLAEIGDFNRFLKPTDFAAYLGLIPGEQSSGDKVRGTGITKAGNSTLRRKLTESAKGYWRGRIGIKSATFKKLEKELPKEVTEYALKANTRLQRKFFNMTHVKGKNMNVAASACAREMACFVWGLITNHYEKAPAVPKTDEELLDLNLG

SEQ ID NO: 356408 - protein, 376 aa, unidentified
MRSLTRFVGLDVHADTIAVAVADGTAIRSLGVVPNRAEAVRKLVAKLGPVKDLKVCYEAGPCGYVLYWQLAELGVACEVIAPSLIPVKAGDRVKTDRRDAEKLARCYKNGDLTPIWVPDAEHEALRDLVRARLVAKADQRRARHRLGQLLLRHGVRRPDGLTAWKGKHRVWLNQLQFAQRALQLTFEDYLAEVDHVAERVVRLEDAIDTAVEAAPAGLRDLVQALQCLRGVARVTAAIIAVEVGDLTRFQSAPELMSYAGAVPSEHSSGASVSRGSITKTGNGQLRRVIVEAAWAYRYRPAIGPELRRRQQCLSAQVREISWKAQHRLHSRYTKLVANGKHRNVAVMAVARELLGFIWAIGKEVQRNGATTPPVAA

SEQ ID NO: 356409 - protein, 352 aa, unidentified
MKVHNAERPISVVGIDLAKRSFHLYGVDAHGQQVLSKKLSRIRLSAVVANLPPCLVAMEACGSAHHWARQFRSYGHEVRLIAPQFVKPFVKSNKNDAADAEAICEAAQRPNMRFVAIKTLEQQDIQAIHRMRSLAVDRRTAQINQIRGLLLEYGIEVAKGRPAIQRRLPEILEDGDNGLSVRFRTELHGLAEERRHLNERVAHYDAQIDAIAQSDPQARELMTIPGIGTKGATALLAAVGEDARVFNNGRALAAWIGLVPRQHSTGGRDRLLGISKRGDVYLRNLLIHGARAVLRWAERKEDRHSRWATALKARRHTNVATVAMANKIARVAYAVMTTGKPYDPAIGAMANG

SEQ ID NO: 356410 - protein, 475 aa, unidentified
MARKTQAQSHLTPIPMLPHETLYIGVDIGKFRHVAGFVSKTLLQRHERFEGCPTFAFEQSREGFRAFVDRVREYVPLEQAAVLLEHTGHYHRLLEQYLLELDITVYRIHVQKRPKGMMKTDKRDALGLANMLYTQLALGAQVADKMQLVRHALPPTKTAAQLRGLIQHRYELSRESTQRRNKLTAICDELFPEFTRIFHDPNRESALAIRERFPTPHAIATAALTDLRTLRKGHYPSEARLVELQQLARETIGTKDLDRQCSLVFEQKQLIKELRLIEEHLEQLHEEISSLVAHSREGQILQSIPPVGPIQAATIIASIGNILNFEKASEFKSFCGWAPQWDQTGVSLDWMSLSKRGSRPLKQALYLMAARASTLDGEWARIYRRLLPRLCSYDERTKEYRGKKKVLGRIAGQMASMIFALLKTDQETLAKLPPGQEPPPPMLYDPEVHRKHQEGQYRSLKPGRQLRKIIQLPKH

SEQ ID NO: 356411 - protein, 344 aa, unidentified
MEHASDTYRLFVGVDIAAATVTAAWQPPRGGPGAPYTYDQTPAGHAALQRQLRATGVSAAETLVVLEATGSYWVALAVALHAASYHVAVINPLQAHHFAKAHLRRAKTDNLDAQALAQLAVALRPAPWTPPPAVYHEVRQRLVARDGLLAMRTQARNQRHALLQWPVVVAAVRQHLDAVIGDLDARIADLTAEIAAVLKEGAWAESLACLTSAPGIGLVTAAWLLVATLDFSLGGGPAAVTAYAGLAPMPRESGRSIRGRPHIGHGGNARLRTALYMATLSAALHNPVIKPFYDRLRAAGKPVKVARCAAARKLLHLAWALATKRQRFDPMKQQQQTAPPHLAA

SEQ ID NO: 356412 - protein, 346 aa, unidentified
MYQDNLFALDLSKETIQGCLFSKSHQVKFNRGFTPRKLVEWLSGQSPLTVVMEACSTAHYWVRVVERLGHRGLLVPTRTSNRYREGHKTNATDALAVGVAARQPTTKFVAPKTIEQQELQSVERIREHLSDHLTATSNMMRSLLAEFGLPIAKGKKAFKHRVVEYLEDADNEIPMVLRTTLIEQWAYYLELEKRLREVTRTQEQLVNQHEACRWLQQLESVGPVNALGLYLALGDRGSSFKNGRNAAACIGATPKQYSTGDTVTMGGISKVCANKRLRSNLIQGARSVIKLLKKRNPRNRKEAWLKQLMERRGDGRAAVALANKTIRVAWAMLHYGDEFKLHPNMA

SEQ ID NO: 356413 - protein, 315 aa, unidentified
MAVTIAQTVGVDISKLTLDVYLHPQATACQFPNTAAGIKALLEWLGQTSVHRVIFEPTGAYHRGLERQLGDAGVLMVKINPLQARRFAEAIGQRAKTDAVDAAMLARFGALDALQTRPVVSQTISDMKELLVARRGLVKDRVAAANRNHVLRSPLLRRLVDQRLRQVERQIAAIDAALRALCQADAELKARLDILVSIPAIGEATALTMLIEMPELGTMDNKCVASLAGLAPIARDSGQHSGKRFIRAGRAHLRQALYMPALVAIRFNADMKAKYQAMRAAGKPPKVAITAVMRKLAILANVLLREQRRWTPKAA

SEQ ID NO: 356414 - protein, 470 aa, unidentified
MKLYLGGDVSKGYADWVILSDKKKTVLENFQLDDTYAGHCKLYEMLEGYFDKYAGAELYAAVESTGGYENNWFNTLKSYQKVFNLKVARINPSGVTLDRRADMKRNVTDAISALSIAEYMINHGEKVAYDQDEQWKSLCRHWNFVEMQKNQRVQTINQLETILYCANPTLMRFKKGNLPNWLLELIIQCPTAEKLSNAKPEKLAKIPYLTLERARELVAESKQSIASSTDKNAEILVSQIALQIKAFDQNIKSQVKLIEDELTCPEMEILKSFQGIDTVSAMGLLLEIGTIERFPAIKGFSCYFGLHPKFKQSGDKIVGIRMSKQGSKNMRKILFNIAKGAITFNPLIKDIYEKKVAHGMSKMAAIGVCMHKILRIIYGMLKNNQAYNPLVDKQNCERSKDKQQEKGQQDKANIEKNRRYQEFDEQAPISRKQTKKRKEHALSQGEITSQSTGSACSIPDQNYEKMMYII

SEQ ID NO: 356415 - protein, 319 aa, unidentified
MDKEQTYAGVDISKDYLDVTIVDSDKKWRFANNQVGIKKVIKIFEGMTSVMVVFESTGGQELSLWLALTQAGIGAAPINPRQIRNFAQAKGQLAKTDNIDAQIIAQYGQAMKPHPQLIPETQELKELMARRSQIVEMISAEKNRLKAARQKLIKQDIQAHIDWLQKRLCEADKELIQAIDDNPRLRDKAKLLRSTPGVGPTMTAALLTQLPELGTLNRHQVAALAGVAPFNRDSGRMRGKRTVWGGRASIRAVLYMSALVATRYNPTIRVFYQRLCAEGKAKKVAITACMRKLLIILNSMIKHKTLWQHSHSLLVVTCH

SEQ ID NO: 356416 - protein, 424 aa, unidentified
MNLTQNDRLKQVTSDTLIVGVDVGSQTHFCRAFDWRGFELSRRVFKFSNTGMGFLTFLRWTEELMNKTEMKKVIVGCEPTGCYWLTFQKFLQDHDVQLVTVNPFTVNRSMELDDNSPEKSDLKDPKTIALLVKDGRFSTSYLPSGVYAEIREASVCRDQIMKQHVRLSNQIQGWLQKFFPEYFECYADWDSTSGLMLLREAPLPQDILKIGAGGINQIWRDAKVRAAGIKRAQTLVEAAQNSVGLEAGEAARLEIWVLVNDYILKAEQLKRLDEYLEEKVKEVPNVEKLLAIKGVGMSTVIGFIAEVGDIGRFTDPKQIQKLAGLEIVKKSSGKKKGQPRISKRGRRKLRRTMYESARALMTWNPAFQDVFLYYRSRTKKPLGGMQAKIAVACKAIRIFYVVLQTGCDFDEEKFRKDIIRPEAA

SEQ ID NO: 356417 - protein, 391 aa, unidentified
MTKPKTKTVNDFSRCLDPLDMDATLIAVIEMSQSSWLVAGIVPGVERQPLKKLAIDEHALLSLLNRWRAEAEKQGHRITRIAVAFEAGHDGFWLARWLAAQGVEAHVIHASSVAVTREHRRAKTDRLDTELLKRAFLGWLRGERGHCKMVAVPTLAQEDAKRPSRERETLVGEASRIITRVKAAFVRLGIRGFNPKLKAAATRLETLRTPEDEPIPPNTLAALKRDLERHQIVKKQIREIEQTRLDVLKQAPEKGPHAMVLLLARVIGVGVETADMLVQEVLSRTMRDRRAVGRYAGLTGSPDESGAKRRDKGLARSGNARVRHGMIQLAWRFLLFQKDSALAQWYRQRTADAPSTRKTLIVALARKLLIALWRLARDGVVPEGVRMRPAA

SEQ ID NO: 356418 - protein, 343 aa, unidentified
MEHYVGIDVSLKESSVCVVDSKGKVVRETKVASEPEALCRLVTEIGLPLTRIGLEAGPLSRWLREGLVDASFEVVLLETRHVKAALSAMTVKTDRKDARGIAQLLRMGWYRPVHAKSVCSQEVRALLVGRKLLQAKLLDVELSVRGFLRGFGLKVGEVSRGRFAARIRELAEGHAMLEAVTGAMLQARAALWSEFTRLHRQMLQIARADHVCRRLTSAPGIGALVAITYRSAVDDPGRFDKSRTVGAYFGLTPKKYQSGETDIDGGISRVGDAMVRAALFEAAHIMLTRATRFSALKRWEMGVAERRGMKRAKVALARKLAVVLHRMWADATEFRWTKGAAAA

SEQ ID NO: 356419 - protein, 391 aa, unidentified
MEARTVNNLPPAGSYDDAIRCVLAIELSKKSWIVAVNTPLADKISRHTLKPGDGKELLDLCERIRTRVARETKRRVEIVSCYEAGYDGFWLHRLLEAHGIRNYVIDPASLQVDRRARRAKTDHVDVERLLRSLMAYLRGEPKVWSVVCVPSVAEEDDRRLNRERGRLINERIQHVNRIKGLLAIHGIYDYQPLRRDRMLRLERLRTAADGQTLPPRLKAEILRELQRLELILGMIKTIEAERDAIASPKTETEHTNVKKIQDLAKIKSIGPEFATTLIGEVLYRSFDNRKQLASYVGLTPAHFQSGAMCRDQGISKAGNGKARTVMIELAWLWLRHQPDSPLSVWFRERVGKLKGRIRRITIVAVARKLLIALWRYLENGMVPEAAILKVK

SEQ ID NO: 356420 - protein, 341 aa, unidentified
MEVTRIGLDIAKNVFQMHGMDKHGKTVIRKQLRRAELLPFFAQLPPCLIGIEACAGSHDWARRLKKVGHDARLMAAQFVSPYRQSGKTGKNDKTDAEAICEAVGRPHMRFVPVKSEEQQAVLAVHRVRELSVAERTALVNQIRSLLGEFGLVVPQGRERLQRELPALLEAADNGLPAILRAVMAELSGRLGELNTRIAHYDALIEALVQAMPPAQRLMHLAGIGPITATALVASVGDAKAFASTRQFAAWLGLTPRQYSSGGKSRLGGISKRGDGYLRRMLVHGARSVLRLAKDKTDRLGRWAEAVKQRRCENVAAVALAAKHARIVWALLVKGEDYRPAV

SEQ ID NO: 356421 - protein, 408 aa, unidentified
MEVVYRCCCGIDVHKSLIVACLRRGGKQELREFGTMTCEIKALASWLSEAGCEMAAMESTGSYWKPLYNLFELLNLDAIIVNAAHMKAVPGRKTDVKDAEWIADLLQHGLLRASFVPDRAQRELRELTRYRKSIIEERSRELNRLQKVLEGANIKLGSVIKDIQGKSARRLLERLAAGEPLDDCGEIAKLLHHSLLPKLDEIMASLDGIITPLQRELLAQILDHISDLDQRIHKLDGMAEAYMTQAQPDIVELCRMPGIGQRSAEVILAEIGTDMSRFPSSAHLCSWAGVCPGNHKSAGKRYHGRTRKGNPTLKSMLVQCAKSASRSKGSYFSAQYQRIAARRGKNRAAMAVAHSMLIAIYHILKNKVPFRDLGADYFDGFYREHKIRSYLKRLQALGWEPNASPASI

SEQ ID NO: 356422 - protein, 430 aa, unidentified
MNEPIQLSFDQFTHFAGFDWAREVHHIVVVDRGGKIVLSLPVEETAEGWARLRTKIAELMGDRVDRLAVTVETSSGPAVERLLEMGLAVYPINPKSAQRYRDRKSPAGVKTDERDAWSFGDALRTDGHGWRRLCPQDPLTAELRLLCRDEIALIEQRTALVNHLRATLHEYYPAALEAFDDWVNPTAWDFVIAFPTPGELVAAGKRRHQSFLHAHKLYGPKTAPRRLEIFSRADKFANPSLPVTRAKSLLAVTLARQLRTLQGQLNEYRARIAKLFNDHPDKDCFGSLPGAGEKLAPRLLAELGSDRRLFDSPDALRCYAGTAPVLHQSGKRYFVTLRRACNTTLRATVHLWANLSRQTCAWAQVYYQQKKSQGLTHAAALRCLGQRWLKILWKMWQENKPYDEARHTRNQIKHGSWVIRLASPTASLSS

SEQ ID NO: 356423 - protein, 349 aa, unidentified
MADKLIVGIDISKDWLDLCASNAAGVERIANTPEVVAAWLERVGAGLIAFEPTGGYERTLIAAARERGIAFVRVHPNDVIAFRKSRGIKAKTDAIDARLILAFVCDKAARAELRTSLIGDDRLRALAARRRQLADALQAERCRLDAAALPAVRASLEAVIAVLRHSLGVLEAELADAVAAHPQTAELAKLLQTIFGIGPVVAITLIADLPELGLLSAKQIAALVGLAPHTKRSGKTRYRETTGHGRPGVRRVLFNAARAAVRHPSLFKDFYDRLVTDNRRPGKVALTAVMRKILITANAVARDHEPWHGRLAAGTPCRPHAEQTDHRAGRVKAAAARRAVARSASLEAA

SEQ ID NO: 356424 - protein, 410 aa, unidentified
MKHSKSKIKANTVRVDERNIVGIDIGKRKHAATAVSPQGVTIASLKSFENNRNGVEQLERHVLVPATASHKPMIAMEATGQYWNALHDELQRRGYSCVVLNPIQTNARSKNQIRKTKTDLVDSGLIARTILSGDARWTIVPDEAMFELRLLVRHRWRLIRTHGIILRYAISLLDRVFPEFEGIFCKPFLSSIRQLIREVGITPHSLISNRKTVPTILERASRKMFSQEKIDLLLSRAKESIGTQQGDQTVNHQFRMIVDYLDFVEKQVKEINSELRKRMLETPSPITSLGIGPELAATILAESGDVTMFAGQEKYSAFCGLDPSEYKSGDSIKGRTPISKRGSPLLRWAMYMSAVTVCKKHHDFNRIFDRHAHKGYRYAMIAVAHKLARVIWRLMKDNRNFTKRPPKRTI

SEQ ID NO: 356425 - protein, 348 aa, unidentified
MTVYVGVDLHSNNNYVGIINQANEVLFKKKMPNDLNKVLDVLEPFRNDIAGIVVESTYNWYWYVDGLMEKGYPVHLANPAACEQYAGLKNVDDKRSALWLADLLRLGILKTGYIYPRQERPLRDLLRKRLHLVHHRSSHMISIKNILTRSLGIQVKSEEVRKLDEDQIRRLFPNEDLFLAVNASVTMMKHLNNQIDRIEKAILAKARLRKEFKGLLTLPGIGEILGLTIMLEVGNIRRFEDVGDYVSYCRCVKSIRTSNGKNKGKGNRKNGNKYLSWAYVEAAHAARRYYATIERYYQKKLAKTNKAVAAKAVSSKLARATYYVLRDQVAYDEKKLFGGKAEPGAILG

SEQ ID NO: 356426 - protein, 340 aa, unidentified
MEKASMIGLDIAKNVFEVHGRSAAGAVVVRRSLKRGQVEKFFAKLAPAVIGLEACGSAHHWARLLGKLGHEVRLMPPAYVKPYVKRNKSDAIDAAACWEAVGRPDRRFVPIKTVDQQAALSLHRSRDLLVSQRTQLSNALRSVLSEFGIVAGKGKAGLARLVDGLRAGTLDLPADAVVAATALADQRAALDAAADALERRITAQAKADETAVMLKTAPGVGPLTAHATLATMPDPSLFKSGRDFAAWLGLTPRINGTGGKTRTGRITKQGNQPLRRLLVLGATAWLRQVKARPEKASPWLRGMLARRPSKVVAVAQAARTARILWAMLTHNQPYRAPAIG

SEQ ID NO: 356427 - protein, 408 aa, unidentified
MEVIHERCAGLDVHKETVVGCVRVSERGAVRHEVRRFATTTAGLLELGDWLRQAGCTHVAMEATGVYWKPVWHILEGEFELVLANPAHIRNVPGRKSDVNDATWIADLLAHGLIRASLVPPGPIQELRDLTRTRKQLMREVVQHKLRIQKVLEDANVKLASVVSDVFGQSGRRILKALIAGQTDARKLAALGSDQLSASRETLATALHGKVTAHHRFLLKQHLQMIEHLEQTAREFEAQIEAALEPFRAAVERLMTIPGVSATAASVIIAEIGLDMGRFATPGHLRSWAGLCPQLNESAGKVMSRRLRYGAPWLKTVLVQCAWAATRNKHNYLHAQFLRLRARRGPKKAILAVAASILTAAYYVLRDQVPYRDLGPLYFARLDQDRTVQRLARRITELGYEVQIRKAA

SEQ ID NO: 356428 - protein, 417 aa, unidentified
MNTQTVSTFERYLALDVHKHYVVVGGVNAQQQIILPPRRLDLGEWAVWMPKHLHPTDATVLEATTNTWTFYDQLAPQVGRCVVAHPGLVKVIASARVKTDNRDVIRLAQLLAANLIPEVWVPPLEVRELRALLSHRRRLVKMRTMTRNRLNSVIHRYNLTPPQGERFTTPKYRTWWLELTVSPTEKLRIRQDLATLDHLEPEIAEVGEELHRLSTVSPWAEQTPYLMQLPGFGIIVTMTVLAAIGDITRFPSAKKLVGYAGLGASVHDSGETHRTGRITKTGRKDLRWIMVESARIAVLYHDYWKREYARLEKRLGSNKAIVVIARKLLVVVWHVLTDREADQHVAPQQVADKFLLWSRYLGHEKRGGLTSRQFIRLQLMRLKMGDDLTHVRHGINARPLATVDEVLALHPELKSEA

SEQ ID NO: 356429 - protein, 359 aa, unidentified
MSKLTKIDRFFNNVKLTADDELFVGVDVHKKSYHVALFLNDAPAIDFVMPAKKEKLSQMLKTTLPALQNVVYETGPTGYSLARYMKQEKLPISVIATSKIPRLSVGEDKTDKLDSQKLAQYASKGLLKSIAVPTPKQEADRQLFRMRHRQVRNLAKVKTQIKSFLLMHGLDEPAGLSYWSQNRVVQLQNLPLRKTLRLSLNELLSDLDYYSCRVKELNKFIAEHLDTGKLAQRMTILKTHPGVGTVVACQFATELFHYRDFNSTRQVYKYLGLSPKICQSGNTCTAGSINKASNSRLRSNLIQAAWRWVAVDIKAKRTYLRLYNNCGQINQKAITAMARKLAGHLWTMLITSQPYDPNK

SEQ ID NO: 356430 - protein, 320 aa, unidentified
MSGSSVVVGVDVAKAHLDVVVLGAKLGAERFDNDAEGHTALVAALQLLGVALVVMEATGGYEAALACALQAAGLAVAVVNPKHARDFAKSMGRLAKTDRIDARTLAELAGVLARRDDLARFIRPLADVQQQQLAALVTRRRQLLTMLGSERQRLQLAVPMVRPSIEAMIQAIRAQLDDLEAQMIAHVREHFADLDALLQSTRGIGPIASATLIAQLPELGRLNRREIAALVGVAPIANESGTSRGRRRVQGGRFEIRRVLYMATLTAARRNPVIKAFYQRLIATGKLPKVALVACMRKLLTTLNAMVRNNKPWDNSIHGA

SEQ ID NO: 356431 - protein, 312 aa, unidentified
MTEKNSVVHVGLDIAKAQLQLHLQNQQHVLPNTVTGHQRLIRLLRVVAGAHVVCEATGGYERKVVAALHSANLPVSVVNPAHVRHFALAQGQRAKNDPIDAALLTAYGHALRPNATPVPQAVLAELRELVQWRDHLKEQLVRARQPAEHATLAFVHRQQSKEVTHLEKQMAAVEKELAAALTRHPHWREQVQRLAELDGVGTLTAVSVLSQMPELGHLNRGQAAALAGLAPWTRQSGPWEGQRHIGGGRAVVRRALYMSAVALARQTGSTLGKFYARLRAAGKPAKVALTAVMRKLLLQMNQVLKYHVPDPA

SEQ ID NO: 356432 - protein, 356 aa, unidentified
MSRDIKYIGMDVHKEAIVIAVLNNSGKLVMESIVETKASSILQFIHGLQGELHVTWEEGTWAAWLYDLLKPHVHEVLVCNPRRNALLKEGSKNDKVDARKLADLLRTGMLRPVYHGEHGLRTLRELARTYQTLSKDLNRVMNRVKALYRGWSIPCAGTQVYAPRYREEWLGKIEHAGVRRRAELLYQQLDGLQALRRTLRPELLAESRKHKAAKLLRQIPCIGPIRAARLLALMQTPHRFRSKRQLWTYSGLGIETRASAQYRFVRGQLQLAKKPQQIRGLNQNHNHEMKEIFKGAATRASCGVGPLRDFYVALLDKGMKPEMARLTLARKIAAIALTLWKKEERFDAEQLKTQAA

SEQ ID NO: 356433 - protein, 332 aa, unidentified
MWPIRTTDQKEENMDTVSQDQIIGIDVSRDWLDIHCLPDGKRLRLPNTLEGHARLVDLAKPVSALVCFEATGGQEWRLWSALDAAGIATRQLPPAQIKAFAASRGTRAKTDRIDAELIARFMAFRPDAGRSLPHKKIRLLRALVSKRGQLVETRKRLLAQIKAHGKLGAADMFEAMDAELKGLLDHQIAKLEAEIEQVVATDEDLAATASILRSVPGIGPVASTMLIAEMPELGHISGEKSAALTGLAPIAHDSGAMRGKRAIGGGRRLLRHVLFQAALVASHHNKVLKTFADRLRAAGKPHKVIITAVARKLVTIVNALVKSGQKWSLQTA

SEQ ID NO: 356434 - protein, 349 aa, unidentified
MFIIGCDFHSRFQQIAMLDPTTGEVLERRLEHENEEAKKFYASLPGPARVGMEATFNAQWFERMLQEHSHELWIGDAAEIRAAMVRKQKTDPRDALHILDLLLTNRFPRIWVPSAEERDVRQMLRHRHKLVRFRTSVKNQLHALAMTQGLCRRKKLWGRVGRKELESLVLDPWASRRREDLLKLLDQLDPWIDSLDEAVIQAANGSPQAVCLMEQAGVGPVTALAFVLTIGPVSRFANSKKVVSYLGLNPSEDSSAGRQRLGAISKQGNSMMRYLLIEAAQGASRLDPELRRDYQRLKFRRGSAVAKVAIARKLTVRLYWKLRAAQPVPSARMQGSPGTPVVGESLSPN

SEQ ID NO: 356435 - protein, 382 aa, unidentified
MTHVESTPLPVSLESPKTKRKEGTAAMKKNQAIHYLGLDVHQATIVACVRDERGTIVMKATVPTEAPAILRLVRGLGSRVHVAFEEGTQAQWLHDLLLADAERVVVCNVRGKSEVANKSDRIDAADLSERLRLGSLKTVYHGATSMLTLKELARNYNGLIEDTTRVMLRIKAIFRARAIPTPGMSVYRAASRGTWLDQIKTPGARFRAESLLAQLDLLLELRPKAKAAMVAEAKKHSGWKNLRSIPFLGDVRVALLMAIMATPHRFRTKRNIWPYSGLAVITRTSADEEFAAGKLRRRKKAPRTRGLNRNHNPMLKSIFKGAANAAAAKPGPLNDIYKACVARGTKPELAKVTLARKIASVALRLWKKGEFFDPKKLTMQTT

SEQ ID NO: 356436 - protein, 345 aa, unidentified
MKITTIGVDLAKTVFQVHGVDERGKAVLRKQLRREQMVEFFARLPPCLVGMEACGSAHHWARVLQGQGHSVRLIAAQFVKPYVKSNKNDAADAEAICEAVARPHMRFVPVKSVEQQAVLAVHRARQGFVKVRTAQANQIRGLLAEFGLVIPRGLWHIRQRVPALLEDAADALPLAFRHLIERLLDQLKELDRQVAELEVQIQAWHRSSVLSRRLEQIPGIGPLTASALVASIADAKSFDSGRQLAAWLGLVPRQSSSGGKPLLLGMSKRGDVYLRTLMIHGARSALLAAQRKVGAADTWLGNLLRRRHVNVAAVALANKNARTVWALLAHDREFRSDYRPRLAAA

SEQ ID NO: 356437 - protein, 327 aa, unidentified
MNTQYIGLDAHSSTCTFCVMDPQGVEIDNKTIVTNGRLLVDYVQSMGNKSILAFEECDLSCWLFDILHKHVREVVVCNPAQNAQYKRAKTDKLDARNLANLLRGGYLKPVFHDASAREKLRMLVSSYQDNLQEVVRIKNRLKTIKRRVRLYPKKDAPVHAAFIQEQLTSHLEQLLISHKEYQQQITRCVQRFKETTILMSIPGIGYIHSAKIIAQVIDPERFKSKYKFFAYCGLVKHPRISANRNYGSTRIWGNRTLKCVFKMAAHCAIGGHNALNVLYGHLLDKGVSDRNARNAIARKIATLTLSLWKNNQRFSNEIILEGLPVKV

SEQ ID NO: 356438 - protein, 344 aa, unidentified
MITIGIDPHKSTLTAVGLSPDGTILATTRLPVNTTTLGELLAFADRWPQRQWAVEGAAGLGLGIAQRLVAHGQDVVDVPATLAARARLLSPGHGRKTDVNDAATVALVAQHHSRLRRVQAEDLASVIRLVSDHRDDLVAEHTSGVNRLHRLLRDLIPGGAKTGISTRQAADLLRRVRPVTATETARKQLARDLIVGLRALEARTKTLTDQLGALVAQSGTTLTKIPGVASIVAAKVIGHTGDIARFPDQHHFASFNGTAPIDASSGDQTRHRLSRRGDRQLNAAIHVIAIYQISHPGPGRDYYLKKLAQAKTPKEARRALKRRLSDTVYRRLANDHDTSILAAA

SEQ ID NO: 356439 - protein, 367 aa, unidentified
MKKVSTAVARQGRNISRQKLTIGLDLGDRNSWYCVLDESGRIQLEQRVRTTAKALQEVFGAMPRSRIALEIGTHSPWISRLLSELGHEVIVANARKVRLIGESRKKDDRLDAQTLARLARIDPELLYPVKHRSAQAQADLMMIRARAGLVRARTGLVNAARGLAKSYGERLRGCNVRNMDPEKAEGLSPELQRALEPLLATIEELSERIVEYNDRIEALAQTSYPQVELLKQIKGVGTLIALTFLLTLEDPHRFRKSRDVGGYLGLQPGRRKSGESEPQLHISKEGDPYLRTLLVQGAQHILGPFGIDCDLRRWGLKLAERGGRNGKKRAIVATARKLAVLLQHLWVSGEVYEPLHNSSRVKLAAAA

SEQ ID NO: 356440 - protein, 341 aa, unidentified
MAEVSTIGLDIAKHVFQAHGADASGRVVFRKKITRAKLMEFFASQPRCVVALEACGGAHHWGRELGKLGHTVRLIPPAYVKPFVKRQKNDAADAEAICEAAQRPSMRFVAVKDEEQQANGVVFRARDVLVRQRTQCINTLRGHLTEYGWVVPKGTAHVATLIGQIEDPNCSLPESARAIFRVLVTSLTSLEESIAVLDSEISRRSKEDPVARRLMTMPGIGPITATAITALAPPIETFATGRDFAAWLGLTPLQKSTGGKQRLGAISKMGERTLRRLLIIGGSSVVSHACRRGAPDGSWPARMLARKPRMLVTVALANKMARIVWALLAKGGVYRAPVAAA

SEQ ID NO: 356441 - protein, 340 aa, unidentified
MTPIRIGLDIAKNVFQAHGVDDKGTVVIRKRLRRPDILRFFASLPPCLIGIEACSASHYWARELIRLGHDVRLMPARYVKPYVQRGKSDALDAEAICEAVSRPTMRFATIKTAEQQAVLTLHRARELLVKQETMLANLIRGCLGEFGIVAAVGIRRVSELIAVINDDADTRILPEARIAMRAVADQLCDLQKRIKHIEQAIRAWHRSNEASRRLATIPGVGSITASAIVATVANATEFKSARHFAAFLGLTPKQCSTGGRQRLGRISKQGDVYIRRLLVLGGTSLVRYARGAGGSVWAKQLLARRPTRIVTVALANKAARVIWALLTRGQVYQAPQPQAA

SEQ ID NO: 356442 - protein, 365 aa, unidentified
MKKSSTAMAASNKNFEQKLTIGLDLGDRSSWYCVLDEAGEVVGEQKLGTTPKAMREVFAAMPRSRVALETGMHSPWVSRLLSELSHEVIVAHARNVRLIGESRRKDDRLDARTLARLARIDPQLLSPVKHRSAQAQADLTVIRARASLVRARTVLVNAARGLTKSYGERLRGCNPRNLNTEKAQALSPELQAALGPLLQALESLSQRIAEYNQQIEAIAQQSYPQTALLKQVKGVGTLIALTYMLTLEDPHRFRKSRDVGCYAGLQPGRRNSGQSEPQMHISKEGDPYLRTLLVQGAHHILGPFGADSDLRRWGLKLAERGGKNGKKRAIIATARKLAVLLHRLWVSGEVYEPLRNTKRTMVAAA

SEQ ID NO: 356443 - protein, 417 aa, unidentified
MINNTNTYPVHPRMTRTYAGVDSHKDSHTIVFLNCFHEKLGELTIGSAPSEFAKFIKRAKKYLQTGTTFAFGFEDCSAFGRSFVKYLVEKGYSVKHVEASKVATERGQVLHKTDSYDAECCARVLINQFDKLPEVNPLDKFWTITNLVTHRNAIVKINVMVKNSLHGALADHYPHYKKFFSSIIRDSALAFYDAFPSPHHLENVTVEELAEFLHRASRGRLSTTKAQLILKHVERDNVSKSEFQDTEDFTIRSLVRQVKNNLLELAAIDKEIEKVLQHFNYPLTSIKGIDNLTCAKIIAEIGDIARFKNAKALAKYSGVAPVTYASGMTQLQMANARGNRKLNEIFFKIALVSVTPIGKNNVLVNPIFYQYFQKKLSEGKTKNQALKCVQRRLVNIIYGVMKHQKEYVNPPVANLAS

SEQ ID NO: 356444 - protein, 430 aa, unidentified
MDEVNRNRLEEFRQLRKEIRHSEEYLIVGMDIAKDRHYAFFGTATGGTLLKRIVFSNDHEGFRRLLDQAEALRVQHGLKKVVYGMEPTANYHKPLGEYLIKLGRMVVLVSGVTVARNRESLDGRWDKHDGKDSANVADLISQGKCLYYEHPSVELRGLRGLLSLKRRLKKQEHGYRVRIRNQLIAQYFPEMDRYYERLGAEGLSIVRWCLAASEIAQLDVDPFIERVTSRRVRMEKRRRLEEIWEKAGESIGCDGVPGLDHEAKVMVEGLKQIREMIKETEDKIEELCKQFPEYHYLLTIPGFGPDVSAKVLGAVGDPDRFQNGKQVLKMGGLDLSADRSGKSSDKAIPEISKRGKADLRYALYQAALIASYKNRDVMIYYTNKIRGREREKGIHTKMRVKLAAKMLVIAWTLMKKKDAFNPAYLKAELS

SEQ ID NO: 356445 - protein, 456 aa, unidentified
MTKKPSRQRRRLLTAIHAGAAGLDVGATFHVVAVPPDRAEESVRTFRSFTGDLHRLADWLKEVGVTTIAMESTGVYWIPVFEILAARGFEVLLVNARDVKNVPGRKTDVNDAQWLQQLHEHGLLRGSFRPHERIMRLRALLRHREGLVDQAASHIQRMQKALMQMNVQLHHVVSDITGVTGMKIVRAIVAGIRDPGILAQHRDIRCKESEETIREALAGNYRPEHTFALRHGLDAYDFFQAKVAECDAEIEKVLAELNADRAAPEATLPAARHTRGKNEPGFDVRTSLYTLVGADLSQIHGLGPYSVLRLVAECGDDMRKWPTAKHFTSWLTLAPGNKISGGRVLSSKTRRSSNRAAALLRIVAVTVGRTQTALGAFYRRLASRIGKAKAVTATARKLAVLFYNALRNGLHYTDPGADYYEERYKQRVLHNLQRRARQMGFVLSPLPETAPAGGVS

SEQ ID NO: 356446 - protein, 356 aa, unidentified
MLQKLNSEIAVIGIDIGKNSFHIVGQDQRGAIVLRQKWSRGQVESRLANLLPCLIGMEACVGAHHLSRKLTALGHDARLMPGKYVRPYSKGQKNDYRDAEAIAEAVQRPTMKFVATKTAEQLDLQAMHRVRERLVGQRTGVINQICAFLLERGIAVRQGLRFLRAELPGILATRTDVLSPRILRIVEDLMGDWHRLDERIEGLSGEIETLARQDQGCARLMSVPGIGPIISSAMVAAIGSGDAFSKGRDFGAWLGLVPKQMSTGDRTILGSISKRGNRYLRALFVQAAWVVLVKLGPKQWDRYGLKSWIEAAKKRLHHNVLAIALANKLARIAWAVLHNGRAFECVRTNETASQPA

SEQ ID NO: 356447 - protein, 430 aa, unidentified
MKSNTQNAKIEAITEKTLVLGIDVGSETHYARAFDYRGIEYSKKPFKFSNTEAGFVTFKEWILDLKERHEKDKVVPGMEPTGHYWFNLGKFLQDNEMKPVLVNPHHVKKSKELDDNNPTKNDRKDPKVIAGLVREGRYMIPYLPDGVYADLRTASNIRFQLQAELTRIQNRISRWFNIYFPEYKTVYGKPDAKSGMLILKQAPLPEDILTLGIEGVNQIWRDAKMRAVGKARAKTLIEAAEHSVGSKEGAVSARMEIRMLLEDYESRNIRLQEVMTLIAELVNQIPMAEKLLEIKGVGIKTVSGFLAEVGDISRFNNPKELQKLAGLALVENSSGKHKGRTTISRRGRKRLRYLLFEVAMSLVAKNPEFRELHTYYTTRRLNPLKKMQSLMAIAAKLIRVFYAMLTKGVDYDPKKMVSDIKRPAVYLQAA

SEQ ID NO: 356448 - protein, 411 aa, unidentified
MENIFPCCAGLDVHKESVEACVRRIEPNGRWHQQTHHWGTMTRDLLAMADWMAAQGVTQVAMESTGVFWKPIYNILESRFTMLLVNARHLKQVPGRKSDVRDCQWIAQLLQYGLLKGSFIPPRSQRELRDLTRHRTQLVEEKTRTANRIHKVLQDTNIKLSPVATDVLGVSGRAMLEALIAGEEDPVKLAHLAQRKLRSKIPELEKALEGHLTEHHRFMLQLLWKQLAQQEELIAELDRKIEEQTRPFAAEIDRLDAVPGVDRRVAEVVLAEVGADMKPFPAHENLASWAGMCPGNEESAGKRRRRRITPGNPWLKPTLAQAAWAASHTKNSYLASQYRRLAGHRGRKRALIAVGHSILVIFYHMLKTGTSYTDLGGDFFDRLQPERLTRYYVKRLERLGHKVTLESRAAA

SEQ ID NO: 356449 - protein, 354 aa, unidentified
MSNDRFAAFDVHAATTTYVVLDGKGKLVMQGVVETKGDVLLSVVRGISGRVSLTFEEGTHAAWLYELLNPHVTKLLVCNPRKNRRREENKNDRVDAIQLARWLRSGDLSPVYHRDHGTRALKELVRGYEHVVDDSTRAKNRLKAIYRSRGLLTPGRGVYKPEEREDWLAKLDSVGLRTRAEWLHDQVESLDGLVKAANVAVEGEARRHGGCRLLKSVPGIGWIRAATIVAHVTHPGRFRTKRQFWCYCGFAVVTYSSDDWEIVESRLVRKSRQRTTRGLNRKYNRHLKGVFKGAAKTSCGAQGIFKPHFDYLVASGMRDSMARLTVARKIAATSLVIWKKGEKFDPGKAVIKTV

SEQ ID NO: 356450 - protein, 344 aa, unidentified
MILIGVDPHKSSHTAVAVDPAGHQVAQRRFVVNAGTFRQLMRWCEQWPDRRFAVEGAGGLGRSLAQQLAAAGENVVDVPSTLSARARLLATGGDRKTDAKDALHVAQVALFRHDLRLVVQEDQSTILRLLTERRDDLVHERTRVLNRLHAVLRDLLPGGAPTGLSADKAAALMKGIRPVTATDNCRRDIARDLLADLRRLDRQVKDNEAEMRETVAATRTTLTTLPGLGTVLAAKVLGHIGDISRFPTEHHFASYTGSAPLDASSGNNVRHRLNTGGNRALNSVLHTIAVCQIRDGGRGQDYYLRKIAEGKTPSEARRALKRRLSNVVYRIMKRDQRNHLAQAA

SEQ ID NO: 356451 - protein, 514 aa, unidentified
MDFCREAFQIDCLLSRVNVSEINFREKFDLIFCGSLLTHLPEASFSETINLLGRSLSDSGIAVITLHGRFSDHIQATKSNFYMPDQYYEVAAESVRRTGFGYVDYPHDVVKGLFNKEEGYGIALVRPHWVLRLLEPRSDVMKERGLRSSCPFRAHMLGVLTLLRRRRPLVSEFYEGRQFVGMDLHRRRSMLVRMTEFGEHLETVRILNDRDSLAEVMSRAGESPEVVLEATYGWYWAVDALAELGATVHLAHPLGVKAFSYRRVKNDQRDAFDLADLLRMGRLPHAWIAPPATRELRELVRHRAKLVAMRSQCKAHVHAVLAKGGIWVPMTDLFGVEGNLLLDKVTMPAPYRERIASLRRFIEGFDAEIDLFTGLVQRRLAHDAGYTAIQQIPGIGPVLAAVFVAEIGDVHRFAGPAQLTCWAGLTPSHHESDTTVHRGRITKQGSRLVRWAAIESVKILPGTSRIGAIREQVAHRRGNRNIGAVAAARRQLELVFYALRDHHVRALHRSPRAA

SEQ ID NO: 356452 - protein, 343 aa, unidentified
MQTVTTIGLDIAKSVFQLHGVDAAGQAVIRRQLKRRYVLMFFQKLPPCLIGIEACASSHHWSRELQALGHTVRLMPPAYVKPYVKRHKNDAADAEAICEAVTRPTMRFVATKTPEQQSCLTLHRTRHLLMRQQTSVINAIRGHLAEFGIVAPVGRNGVEQLLGVVADSNDKRLPEVARACVAALGAQLQMQKAQILEFDRMIRAWHRSSEASKRLDEIPGVGPVLATALVASVADPKAFRSGRDFSAWIGLVPKQNSSGGKERLGNISKRGDRYLRSLFTTGALAVIRYAKIHGSRHRPWLTALLARRPTKVAAIALANKIARMAWAMMARGERYKEPVALAA

SEQ ID NO: 356453 - protein, 406 aa, unidentified
MISVGIDVSKGKSTVCILKPGGEVLKTPFDVLHTIEDMLSLVNLIKTYDDEVRVILEDTGHYHWPVVTTLVEKGIFVCCINALRMKKYCAQSIRKTKTDKIDSIRIASYGITYWCELIPVLTPGETYRELKLLARQYYQVTSLLIKAKVNLSNLLDQTMPEIQSVLNNSPSNNKLTEFVKRYWHYSHILNMGKSRFITDYCKWAKKQGYRSNERKAEVIFALSQNGIPVLPNSQSTKIVVTETVRMLHEIELSRNTILTQMQQLAKSLPEYSIITAMSGIGPVLAPRIIAEIGDVRRFSSKRALIAYAGIDSPPFQSGAFFGTERHITKRGNSYLRKTGFEIMQSLIQLKPEHNEVFAFIQKKRLEGKPAKVAMIAGLNKFLRIYYGRISETYSAIDEQLIYGSQF

SEQ ID NO: 356454 - protein, 344 aa, unidentified
MTRYIGVDLHTNSFTACILQVGKEDCIQTLPVQDGGLERFAATLRAEDEVAVEATGNSAWFCRIISPHVKRVVVIAPWQFEVIRRSVKKTDRHDARSIAFFLSKDMLPEARCKSDGQVQLSSLIATRDQLVKLRVSLIGKVHGLFVRHGLKVKREALTSAKGFSRHVASHRWSALEKVELQVIESHLAAIRENVKQLEKEIAAFAKTLPGYDNLISIKGIGPLSTAVMLTHIGDIKDFKDTGNLAAYIGIVPRVSQSNESCNNGRITKRGSKIARTTLVQCALIAKRYSPYFHNFYERVKAKRGTGKAIIATARKLLNTIYHTLKNNWVFQDFPNFKLLPCNQS

SEQ ID NO: 356455 - protein, 346 aa, unidentified
MQNRNIIGLDTAKNVFQLHISDSGGKKIKGMRLRRDQLIEAFANLPPALVGLEACGGSHHWARTLEALGHEVKMMAPQHVKPYVKGGNKSDSRDADAICEAASRPSVPSVRVKSLDQQQMQALHRTRELYMKQRIQISNQIRGLLTEFGVVVPKSYKNLLQAVPLWLSEEGNPGILAELIEELYSRMLKLDEDISEIEKKIKLLHDQCEDSKLLSTIPGVGVLTATAIVAGIGDGSQFSSGRKFSSAMGLTPREYSSGDKRTQMGITKRGNPYIRKMLIHGARAVLASRRRNPKGEWIDQLLERRGFNIATVALASKNARRIWAMLRSGEKFDADREVMQRMKKAA

SEQ ID NO: 356456 - protein, 480 aa, unidentified
MNVKTKKAKKQANVENQANNLLPKEELSKKIEVVEKELRSYTWRELETNGKFAKNDKLSFITDDMLIVGCDIGSETHYIRAIDVRGRELSRGAFEFSNDSEGFENAKAWVLALAAKNDKKQIVLGLEPTGHYWFALAAWMISNGISVVQVNPYAVKQSKEIEDNSQLKDDRKDPKLIANLVKDGNYGMPYLPEKVYADMRRLSMFRDQLTEDRIRNINRLHRELKIYFPEYMDAFGKIDGAFTLEILKASAIPTDIAALGVEGIKNIWHDAKLRGRGYRRAGEIVSYAKKSVGLKDGAGVGREAVKWYAEQILKLDEQLAAVESALHKECREIPYAENILAINGVGENILAGIVAEMGDVRRFDDVKEIQKLSGMGLVACSSGKHKGQTKISHRGRKRLRYWLFQAAKSAVSHADEYKQLHEYYKTRTNNPLKKMQSLIVIACKILRVIYTILKTGTTYDPQKLLKDIRRPASAQAPLAA

SEQ ID NO: 356457 - protein, 424 aa, unidentified
MRFIGLDVHRDFCEVAIAEGGDVRLAGRVRTEPAALELFAQSLGGDDEVALEATGNALGIARIIEPHVARVVLANPKAVKGITRAGAKTDKIDARTLAKLLAGGFLPAVWLPDEQTRVLRRRISARAQLVRQRTRAKNQVHATLVRNLKGKPPVSDLFGARGRRWLAAQELPADEQETVAACLRQIEFLDREIGLLERMLAEQVLASAEMRRLLTLPGVNFVTAAALLAAIGDVHRFPTARQLVSYLGLDPRVTQSGSEPARHGRISKQGPGETRHVLVEAAWHAARTAGPLRAFHQRIAARRGGNIATVAVARKLAMIAWHMLSRGEDYAFARPSLTREKIRKLELATGAERQKGRRIGVWATREQHRLDRQLAAQAEIAYRRLVQDWQPAISKGTAAAPGRASCGPSNGQAARQETAPPPAL

SEQ ID NO: 356458 - protein, 346 aa, unidentified
MEKISRIGMDTSKHIFQLHGVDADEQPVLRKKLRRQEMVKFFARLAPTVIGIEAGGGSHHWARVLQELGHTVKLLAPQFVKPYVKRGKNDAADAEALCEAMSRPTMRFVAVKSVEQQAALMLVGVRDRLIRNRTQLGNAIRGYAAEFGLIGAKGIGRIEPLLARAQAEEALPALARELFGVQAREYARLQAELAEIEAKLMAWHRQNDCSRRLAAVPGIGPIGATLLAMKAPDPNAFRSGRRFAAWIGLTPKDHSTAGKLRLGVITRAGDPALRSVLVVGATAVIRQALSGKGRPAPWLSALLARKPRKLAAVALANKIARIAWKPMVTGQTYDPQHRFAATPKAA

SEQ ID NO: 356459 - protein, 401 aa, unidentified
MKTVLSVDVAKNKSMIMLMNSDGEIFIDTKEINHNLEDFEKVKEEIKEINPQNLTVFMESTGTYHLPVERYFKENGFNTLVINSLTTKNNYDTIRKTKTDKKDCYRLAKLFFVNEVEYHNLSKKDLYANLKAMTRQYFYLLQNNVSCKNRYKRLINICFPELEKIFKSTRIYDDTALNFIKEFPHAEIVKEKRIDALYNNLYKTNGRNLNFYKKLATTIKTASINSYPGVDKEHEDVKNLSYMAKIVQNNNNIINELRGKMIETAKQSPYYKIINSLYGIGDTLTAEILGELGDITRFDSPKEIIAFCGLDPTIKQSGKSINVKGAISKRENKYERYILFNCSQMVVKLGASNYPEHPVYIYYQNKKAEGKHYYESLTACSTKILRMLYSMCKNNKQFLEN

SEQ ID NO: 356460 - protein, 459 aa, unidentified
MSSRNRNAPPSRSRPQSTHPRPGPADEIRRAARIVDHNRRRAEECAEIAVAPVQNEHAAGIDAGDASHWVCVDATPDGSNCVCEFPAHTPGLRELVAWLHRCGVTTIAVEATGAYGHVLFLTLLEAGFTVILTPPQFARQIKGRPKTDRRDCQWIQRLHKLGMLPSVFQPDETTQTLRDYVRQRGNLVRLSSQHIQRMQKALELMNLKLTKVLGDITGVTGLKIIRAILAGRRDPNELAKLRDRRCKHTVAEIATALDGRYRPEHLLELRCCLVMWEKYLEMIAQVDQAIAAHLRQMQRKTELPPLPPQPRKRGRKPHDPRFDVRTALYFATGVDLTAIEGIDDLNALTLVSELGCDYTKWPTIKQFTCWLGLCPNWKKTGGKVQSSHTRRGKNRAARALRLAAWSLVRSKSYLGAYMRRQRGRLGKPQAITTTAHKLARILYNLMRYGVEYTKQSEAA

SEQ ID NO: 356461 - protein, 534 aa, unidentified
MASKKRNTQKKHIRSEGTYSSEELKCLTLDDGTRVITSADGDIKRPVCAGIDVHKEILMAAVCRTDPETLKAVFYVRQFQSTNKDIRNMAQWFKAHGVRDVCMESTGKYWIPVFNILEQCGLKPVLTHPKYVKQAKGRKTDFRDAIHIASLFRMDLVVASFIPPADIRDLRELCRYRLKLTYMRTSEKNRFQNSMTVSKVRLDCVFSDPFGKSASAIMEYLIETDPDQVSDEEILNLVDRRVQASNEDILESIHGYEFIGVQRDKLNIIQLHLGQLNECIRLIDEKLEYYRQKYFRIIRHLVTMVGITDISALYILGEIGTDMSVWKDDAALSCWAGLSPANNASAGKKKSTRTGDGGHYLKPLLVQCALAAAKSTRKDPYFHCKYETLKKRRGHKKAIIAIARKMLVAIYHMIRDDADFLPVDYEDTIQNTKKTKGLNLNNVIAFLKEQGADESTIHLIETQCCGKETETTDTCSKSPVVQDAKEKQSTSGSADISQPIQESVNGSPVLISGSQQGHALNCHPKDPAVATATA

SEQ ID NO: 356462 - protein, 348 aa, unidentified
MKIIGCDFHPGYQQIAMWDKVSGEVVEKALGHERKEEVRAFYAGLEGPVRVGLEASGQSQWFEQLLAELGHEVWIGDAAKIRAAADRKQKTDRRDAELLVRLMEEERFPRIWVPTAEQRDARQLLLHRHKLVRIRTQVKNQLQALALNQGVQRKRKLWSAAGRKELESLPLQPWGSRRRAELLALHDQLEESIGELDRAALDQTNTWPGVRRLMTHPGVGPITALAFVLTLGPAARFRRGKQVASYFGLIPSEHSSGGKQRLGHISKQGNPFLRGLLVEAAQSAVRHEPGMRRAYQRLAQRKCRALAKVAMARKLAVRLYWMLREEVDYAQLLQGSHAGQLESSRGRS

SEQ ID NO: 356463 - protein, 401 aa, unidentified
MDNTTMFYVGIDVSKDKSDICIKDEKGNDLVHRFEITNKKADLEMLYETVESIKRKIPGNSDVVFGMEATGIYSLPLYSALKRDGYKVKLYNPIQTNGYRKINIRKTKTDLIDSGIIAEMLRHSEVPQVSDIQDMHLFQLRELVRVRHRLIEKQALCKVQIVRNIDTIWPDYGGVMKRVFGAASLAILKKYSVPSKLRRESFEQFYELVKKKSRSKISRSKAEEIYANAGNVLTIPELDSVIAIEIKTLITQLELYVEQIQTVEGNIDRMMKQTDTKIMSIPGIADILGPTILGEIGGIERFSNVKKLVAFAGLDPVVSQSGRFENKSGKISKRGSPLLRHALFLAANSAIQNDENLKRFYSKKRSEGKHHFSALNAVAAKLLRIVYWVLKNNKEYQTKLN

SEQ ID NO: 356464 - protein, 368 aa, unidentified
MSKTEVYRVCVGVDLHKTQFTVCALDEETGAVELERKFSTDPKGYADFIRCMHDIEEGRGHVIELAVESTGNARFFKNKMESEGFGVIVVNTNKFKVITMSTKKNDANDAATLAFYLLKEMLPESHLCDQTSEEIRRMLKTRSILVQATVKMKNQIHGMMLGYGIETKAAQFQSKKKRQELYQDLADHNFSEFTASSLKVILDILDDLQRQIKTIEEQLQKMVVENKNVEILMSMPGIGPIGAMTIAAYTNDMNRFGGDFKRFASYLGIVPSVHNSNETVRMGKITKHGPQELRTAFVQVAMGIIRQPQNTSEWKLMKDYYRMKKEKGSGRAIIALTRKVARIVFSMLNKREKFDPTLMVREKIYQTA

SEQ ID NO: 356465 - protein, 345 aa, unidentified
MKYYCGLDVSLNTTAICVVNHDGDVIQESEVPTEPVAISQYLKATGLPMERVGLEAGGLTPWLCHELLAADWPAICIETRHAKAAMQAQQVKTDRNDARGLAHIMRTGWFKEVHVKSHESQKLRVLLANRRCLLDKRLDIDSQIRGTLKVFGLKTGKVTPAKYEHRIRELVQDDEELQAYIFPMLEVRRHLIQQCNILEKMILDRVKKDQICKLFMTIPGVGPLTALAFKTFVDRPERFQHSKAVGSAAGLTPRKYASGEVDYDGHITKCGDAFLRSHLFEAAKCMLSRGKPNPLKAWGLRLAKRSSKKKACVAVARRLAVIMHAMWRDGTVFELNEEAAVATAA

SEQ ID NO: 356466 - protein, 355 aa, unidentified
MKRGSSAVPNLTTGLDVGDRWTALCTVDEGGAALERGRIATTPAGVERRFRQGPVQRIVLEAGKQSPWMSRLLASWGHEVIVANPRRVKLIAAAANKDDPRDAETLARLGRLDPQLLRPITHRSAEAQQDLAVVRARDALVRSRTLLINHVRGVVKSLGSRVPRCSAHAFARQADRVVPDALRPALAPMIAIIEQLTGEIRRQTRAIEALVQTRYPEALPLQQVKGVGPITALAYVLVLEDPTRFATARSVGPYLGLVPRRRQSSRADPQLRITKTGDGLLRRLLVQSAHYVLGPFGPECDLRGYGERISARGGKNAKKRAVVAVARKLSAVLYHLWVTGEAYEPGHGAAPKVAA

SEQ ID NO: 356467 - protein, 462 aa, unidentified
MPERNDRESGESNRRQLQGLPVIRRNVAGVDLGSERHWVCAPTQDGSGREIASFGATTPELLRLAEWLKARQVESVAMESTGVYWIAPHEVLEAQGLQVLLVDTRQLARVPGRDKKTDPSDCEWIQRLHSCGLLRGSFRPEEAVCMLRTLVRDKANLVAESGDWLRRMQKSLDQMNVRVHRAVSDIDGVTGMAILRAIAAGERDAQKLAQLRDRRCNKTQQEIAEQLSGHWREDHLFSLQQALKMYDAVQERIAAYEQEILRQLEEMEEPGQGGETAPPLTNANKAKAIKRRGQEAKRQALYRMSGVDITQIDAIGVETVEVVLSEYGPDLSRFPTEKEFVAHVTLAPRVPRSGGKPLKKKKRNSASTRVAAALRMAALSLRHSQTALGAYYRKLAQRLGGDVAVFATARKLATLIYRLLRWGQPYMDEGIEAYEKRYRQQRVKSLTAKAKDLGYQLTPLNA

SEQ ID NO: 356468 - protein, 347 aa, unidentified
MHPQVYYVGMDVHKESISYCVKLADGTVVEEGKIPSTRAALSAWAEKLPRPFVAGLEATLFSHWIYYRLEACGQEVKMGHPARMKAISSGKKKNDRLDAAVMANLLRANLFPAIHVVPQWCAELREVLRYRHLLLRARVQQKNKIAGLLMAGGIEYDKGRVHNRGYFRQLLKGQPEICSTTRPLLEFSRSQVETIQRMERSLLRGLSAHPQLAERVGRLCQIQGVGPITALTWALEVGPVDRLPSISQAVSYCGLVSAQRSSAGVDKRGPLSKQRNRFLQSVLVEDAKLACRYNPLLKAVHDRELERGNRNRATLAVARKLVAYLWAADRGHQPIPQPEHTDVATAA

SEQ ID NO: 356469 - protein, 337 aa, unidentified
MKNASSEKVFKDCLGIGIDVSKAELAAVGITSNEAYFKRVSNDMKAIKVFIEGLHQSGYRGKVVCESTGHYHLKLALVCHEIGVELIVLNPLQSSKHSKAKIRKTKTDPQDALMLATMCITEPYLPQPAQLTMSKVLIRLKMGQLASIEKQLQQFKQSLAQYEETYAGLGMALSDHQQALRAHGSSLKRLRKQLEKELELLLSQALADDESLADLRDIPGFSNVVAGLVGILDRQVKGADSWTAYVGFDVSVRQSGTWKGRGRLTKRGNAYMRKRLFQAAWGACLNYDYVRAYYDQLKAQGRKHAEAVCIIARKLLRIAYYVVVNKVQFDPKIAFSN

SEQ ID NO: 356470 - protein, 354 aa, unidentified
MTSDHGQPTQTFASIGIDIGKDVFHIVGFDVAGKVVLRKKFKRLALEAELARLPPSIVGLEACLSAHFVSRTLRRLGHTPRIIPAIYVKPFTKGQKNDYNDAEAIAEAALRPNLRVVPEKTQDQLDLQALHRVRARLVSRRTATINQIRAFLIEHGIAVRTGSGALRRSLFAILENRADELSPRMSDLIVGLYEDWLWLDERIETLTGEIEQISHSEANCKRLMSIPGVGPMISTAVVAAIGTGEAFERGRDFGAWLGLVPRQYSTGGKSILGRISKRGSRYLRTLFIQAANVILMRPQTWERFSFGAWLTAAQPRLHRNKLATALANKLARIAWSVLRHNTAFDAHRHEVVAI

SEQ ID NO: 356471 - protein, 365 aa, unidentified
MREQDERDKITIGLDLGDRRHRFCALDKEGQVIEEGTLGNTRECLGELSRRYAGALIVMEAGCHSPWISRYLEGMGCEVVVSNPRKIRAIYQHERKSDRRDALMLARIARMDHTLLYPVRHGSEQAQQDLLRIKLRDSLVRARVGVINSLRFTLKSLGYTIANPSTERFHKVLEGQIPDSLSTVIAPSVRALEELSLRIKLLDREIIAMARSEYPETAWLEQIPGVGPITALYFVLKIGEPARFERIRDVGAFIGLCPRRDQSGENDPQLRISKRGDVYLRRLLVSAAQYILGPFGPPSALRQYGLTLAAGGTSRAKKRAVVAVARKLAVLLLTLWKNKSAYQAFPSHDEETMRTSDSERLRCIA

SEQ ID NO: 356472 - protein, 356 aa, unidentified
MTSTKYVGMDVHKESISIAVMDAAGKIVMESVIETKASMLLQCFNGLRGDVRVTFEEGTWAAWLYDLLKPRVSEVVVCNPRKNALLKDGSKSDRIDARKLAELLRGNHLKPVYHGEHGLRTLKELGRSYLTITKDVTRVMNRLKALYRGWGIACAGHEVYVPRHRSEWLGKISEAGVRRRAEHCYQQLDVLRLLRQQVRRDLLLESRKHPAWRLLGLIPGIGPIRAALLIALIQTPHRFRTKRQLWTYCGLGLETHDSAQYRVVEGQLQRSKKSVTLRGLNQDHNRDLKDIFKGAATKVSSSNSGPFHDFYEHLLAQGRKPTMARLTLARKIATITLIVWKKEVRFDASYLKSQAA

SEQ ID NO: 356473 - protein, 457 aa, unidentified
MNAVGIDVSKGKSMVAVMQPLGVVAASPFEVAHTESELRELAKFLKRLPGETKVVMEYTGSYYEPIARFLHNEGIYVSVVNAILIHNYSGNSVRRAKTDKKDSVRIAQYALDRWLDLREYIPAEETRSTLTLLNRQYSAICKHKTQLINNLISLIDQSFPNANEFFDSTVRQSDGHIKWVDFIIKFPHRDCVFGISRAAFKDKYSRWCKKQNYNYAEEKADEIYDHCRSCVATLPDSECVRAMIQQSAKLLNSTLETAESLRKLMTATVEQLPEYDTVLGMYGVGRVLAPQLMAEIGDTRRFHSRKAITAFAGLDAPPYQSGTVDVKSRSISKRGSPHQRRTLFLVVETYLKRKPADEPVYQFLDRKRSEGKIYKVYMTAAANKFLSIFMNSTGCQFLALGSQLCYACLLPMESFPQRSGGNLSIGIIFSENLFWGLTFLSRSKIMSNKKQAKGNTL

SEQ ID NO: 356474 - protein, 483 aa, unidentified
MKSKPEEKNKGATNHPRQHHWDEMNRKQRREMTRKMQSEDLRLEVMHPDAAGIDIGNESHYASVPPSRDSQPVREFGCTTAELKAMAAWLKQCRIRTVAMQSTGVYWVAVYDILEQAGLEVYLVNARDTKNLPGRKSDVQESQWLMKLHTYGLLRNSFRPPQEIRTMRTYWRQRNDLVQSAGRHILRMQKALTQMNLQLANVLTDISGVTGQAIIKAILAGERDPHKLAEFRNPRVKASEEQIAQSLEGNWQPDLLFVLKQEHEGYEFCQKQMAECDRQLQHYLQQREDRSHGAPLPEEKRQNRLKKKRANKPQFDLRGGLFRMTGTDLTRIDGIDVLTATTVISEAGYDMSKWKTENHFVSWLRLCPDNRISGNRVIGKGRLPTNNPISIALKMAASTLKESKTYLGAQFRRLRTRLGAPIAIKAMAAKLARLVYRMLRYGMKYVDQGAAFYELRHRELQIKRLKAKAEKLGYRVTPIPVAA

SEQ ID NO: 356475 - protein, 397 aa, unidentified
MRVIGLDVSRTFGEIAYFEDGQVRAGGRVVLQHDALQRFALGLRPDDEVVLDATGNTAAVVTALKPHVAKVAIANPLQVRLIAEARVKTDNIDAAILAQLYASGFLPQARMPDDRTQALRRQVARRSQIVRHRTRLKNEIHSVLAAHLIPDCPAADLFGRKGRAWLADQPLPLDERLAVEQRLRELDRLGEDLAAIEKLLCESVLHDDQIKRLLTITGVNCVVAIGLLAAIGDVSRFATAQKLVSYFGLNPRVRQSGLAPAQHGHISKVGRAHARAMLVEAAWSAANSPGPLRAFFLRIRGRRGQQIAAVATARKLAVIAWHVLVDQKDFAWNRPGLTAKKHRELELRAGLPVRKGLAALRRAQVIVVGEAADARAGRARRLPLRRSISLTMHCSPS

SEQ ID NO: 356476 - protein, 356 aa, unidentified
MLKKEEQLMRHYIGLDVSMKETSICVIDETAKIVYERIEESDPMKLTTHIKTLNINIEQAAIESGSISHWLVCQMRKLGIPVICVDARHMSAILSLNVNKTDKNDARGIAEALRSGLYREVHLKSQADVDICNLITARKTLVNQRTKLKNTIRGLLKGYGVRLSTTGTKSFLEKVQEILEMLPFATRMAVEMLLKGFQVLDEQAFEVEKQIKIEAQNDPDVRLLMTIPGVGPITALSFKTAIGNPARFQDSRWVGAYLGMTPYQYSSGETQKFGRISKRGAAAVRSLLYESAIVMLTRTKTWSKPKAWALKIVRKKGMKKAAVALGRKLAVIMHRMLITKQEFRLGNPSDPSIQVA

SEQ ID NO: 356477 - protein, 468 aa, unidentified
MKTVHSEFAAYVGLDWADRKHDLCLQVGPDGTRERSVLEHKPKAIHAWAERLRKRFGGAKVAVCLELAKGPIVSALLEHDIFVVFLVQPAMLARYRNAFTPSRAKDDPTDAEFALELLLRYRDRVQRLKPESANMRILRQLVETRRGLVDDRVRVTNRIIANLKEYFPQVLDLFREKDTDVFSDFLERWPTLQAAKKARRNALESFFREHNVHSPTTINRRIVALKQEEALTTDETVIGPAQLLVELSLPQLKALSAAIDRLEQEIADCCAKLADYKLFAGLPGAGANLAPRLLVAFGEHRERFPNAAAFQEYAGIAPVTERSGNKCWVHWRYSCSTFLRQTFIEWVGQTIPRSFWAKAFYEAYRKRGGSHQAALRALAFKWIRILYRCWLDRLPYDESKYLMALQKRNAPLLKHAASASTQESFSICRRSQDVSSAAPRNPACTRPRQGYWSSSDGRVAPIPHAPTP

SEQ ID NO: 356478 - protein, 362 aa, unidentified
MKRKKQTWNRKGMVTVGIDLGESSSYATVITNEKSETFSFTMNEEGYQALREKIPLDARIAFESSGSAYPFDRQLRQMGYTDITVAHPKELTWIVKSKKKHDRVDSVKIGKLHSVGMIPEAHLLKREDQILRDLLLQRVKLGQEISRLKNSIIGYLKREGLYDSLPKSTNGFSALRRKTMKSIAFGDERDLVLSTMILQLELVEKLTEPLEGKIRERARVNDDVRLLMSIPGVNFYLASLLCTYIGDVNRFPDADHLASFFGIVPAERNSSSMRRVGRISRDGPSTPRWALSVMVDTVGKFKGPIHDYYAKSKARTGKGSLAHVLGMKKLVRMIYHMLKTRERWKWENESVTARKLEALESE

SEQ ID NO: 356479 - protein, 531 aa, unidentified
MVTKRKSRKKRRVSQAALGKPRGVIQERVRKVGPEHFGIVAVDCAKARSKWMLCDFYGKVLVPPTVVEHQKAQLQLATTQLREAIEQHHILDHLVAVEMTGTYHRPVQRAFRKVGSETRLVHPFASRHYRLPANADNKTDDTDLEGIFRAAVNGFGLLEPTWDEPYPQLQLLARHRRDLVEKRSKLQCQIRNYLERCMPGYAALFPEDGLWTRPIAMPLARRAGSASAILAAGVKGVTRWIQEDKLHCQSRTIDRIVAWAGNAADADPLATHLARVWHALHDDWKAKAEQITRIERDLGEILVKTPYILLLSHPGINVVSGSELAGELGPIEHYAHAKAITGRAGLFPSRYQSDEVDRADGPLARFRNARLRAACMRVADNLIKCNAHFHGKFQLWKQQGVDSRDIRCRVANRAMRTVFQMVSGRRLYHHPSRLDRQYVLDKLLTFHQDHKTPPQEILRDLQQAAEQIPQHEQTSEAQPLQQRYQRACRSRRKSARPISEILLAVLARYGITGLESKESQGSHVNESDTST

SEQ ID NO: 356480 - protein, 341 aa, unidentified
MKNLFIGIDFSKEKLDVAVITAVGLSETAQRECYEFKNSVSGFRQLVKWVERNSNGIATSSWLFSGENTGDYSKPLCNFLYGKGYDIWLENAKSIKDASGIRRLKSDRADALMIAEYAMRNYDKAFMYEPLSASLSQLRELFLYRQMVIRHRCSFQVRRGEKRLAMEKSPVKTMISQSGRHIVSELNKEIEKIDKRIAELIDSEEELKEIYHIVTSVPGIGCQNAVCLMVYTDNFRKFNYDARKIACYYGIAPFGKNSGASVHTDPHVHYLANRQIKAMLTQAALAAINHNPVLSQYYLRLVERGKKKQVAMNNVKNKLIHLVTAMVRNRQVFSPEYKISA

SEQ ID NO: 356481 - protein, 350 aa, unidentified
MDHKCKVIIGIDTHKATHVAVALDTQGTRLAALSIPTNPKGYLELERWSQSLGEVHAFGIEGTGSFGAGLSRSLLAQGHNVVEVTRPNRQLRYSQGKTDTLDAEGAARSVLSGQATARPKTQTGLSEMIRHLKVARDTAVKSRSQAMVTLKTLIINAPADLRDVLDKIRGKVALIRHIAAFRPGEIDNTMAQTSSAMRALARRWLWLHEEIITHDKELERLVTERAPDLMTSHGIATLTVAEMLILVGDDPTRIRSEAAFAKLCGVCPIPASSGKTHRFRLNRGGNRQANAALYRVAIVRMRGHEPTLAYVRKRTKDGKSKSEIIRCLKRYIVREIYSQLCLPKSAQIAA

SEQ ID NO: 356482 - protein, 378 aa, unidentified
MTKGITWVGLDAHKKAINVAVLVGHETRPQEWVVENKPAAIRRLVKKLVREADGREVRCCYEAGPCGYALQRQIEAEGPVICEVIAPALIPRKPGERIKTDRRDARKLAELLRAGLLTAVQAPTPEQEAVRDLCRAREDAKQDQLRCRHRLGKLLLRRGIVYGGGKKAWTQTHRKWLRTVKFEHPSDQAAFDDYLLAIEQVEERIHTLEQRMQATAETAPFATPVGWLRCFRGIDTVTALSLVAELHGIERFASPRELMAYLGLVPSEPSSSERPRRGAITKAGNSHARRLLIEASWHYRHPPRLGVALKQRRQGQPAAVVAIADKAQQRLYRRQRHLTGRGKRPAQAVVAAARELSGFIWAALLHQHQQPLTRAAAQ

SEQ ID NO: 356483 - protein, 460 aa, unidentified
MTTRTIGIDLAIRGDQVAQIFDDGRPTGKPVRFRFETAQLDAFVAEATGGLPPGSTVQALMEPTGMSWFPVAHRLADAGVAVVRVKGQRVRALRRYLSEHAKTDLADAHLLAAMPTFGGPGFDPVHIPTPKSHALQRLTKQRSRLQDLVAAGKRRLLDLLRWAAPSLETVLPDLRTRLALALLRAWFDPDAVLAARRSTLVRFVARHARGNHPHGGPVVDALVDGLKASARETRALHGRHVDFAELQAEVAIEVDLITRHLDAMAELERRIAALYAELHPSDVLRTVPGVGGHLAPVLLGVLHTPDRFRSERHLRGFCGLFPNRAASGGADKPGQKITQAGNDRIKRALVLAADIARRTDPELAAVYHRLMTDRGHHHKQALCAVANRLVNRIFRVLRTGTPYVLRDVDGRGIDLAEGRRIVAERYTVPHALRAARRVQRSATPTRAARTIPPAAGAPAP

SEQ ID NO: 356484 - protein, 356 aa, unidentified
MGTITAGVDLAKNVFSACEVDEAGRVLRRHDLKRDAFVVWLAQLPAGTVVAMEACSGAHHWARRCAGLGLVPRIMAAQFVTPFRKSRTAKNDRNDAEAIATAARQGNMRFVPVKSTDQQVRLAWHRVREGYKSEALAIGNRLRGVLAEFGVVVAQGDGALRRLLADLAGQTLLPDALKPLLEELRAHWARVHAAIAACDARIAGHAQADERCTRLRAIVGVGPITADAAVATIGSAHEFRNGRQLAAWLGLVPSQHSSGGHARLGTITCRGDSYLRTLLIQGARSSLQRARTVAADKATPEQRWIQSLAGRLPFGKVLVAIANKHARQIWAMLAHGVDYDPDACLQHPMHRVSEGV

SEQ ID NO: 356485 - protein, 352 aa, unidentified
MQHFIGCDVHTRNQVVAWIEEETGEIKKRRLEHEGKEVKEFYAQFPQGTVVGIEATFPAYWFERLLGELGHELWVGDAARIRASEVRYQKTDLRDAEDILDLLRTGRFPRIWVPSLEERDLRQLLVHRMKQVRARTQVKNQLHALAISQGVCRGRKLWSAKGRKELESLALLPWAGRRRKELLESLDRLDEQVRELDKAVEEAGRGRPEVALLRTHPGVGMVVGLAFVLTVGPVERFPNSRKLVSYWGMNPRENSSAGHQRLGSISKQGNTMMRWLLVEAAQTAARLDPQLRRTYQRLKKQKTSGVAKVAVARRLVVRLFWMLRTRHNYTQLVHMSGSPSSAVVPPQGEPTV

SEQ ID NO: 356486 - protein, 357 aa, unidentified
MVKVKQKVDFSGQTIYVGIDVHLKSWNISLYFNQQYLNSFNQPPTPQALQTYLQNTYPNATYKCAYESGFCGYWIQRTLLESNIDCIVVNAADVPQTDKGIKNKTDKHDSKRLAQALQAGLLQPIYIPDEEIEADRQLVRCNERFNNDLTRAKNRIKALLYQLGIKLPERFANSNWSGLFIQWLNQLELKTASAKTTLQHQLTMVENIRKQKLAVLKDIRILLKKHRYATTARYLMTVPGIGPITAASLLTEIDDIKRFANFKQLNAFIGYYPSQFSSGENIHQGNIIGRKHRRLRSLLIEAAWTAIRTDPAMTKVYNELKLKIGGKRAIVKLARKLLSRIRYVWLNQTNYEKGIVQ

SEQ ID NO: 356487 - protein, 353 aa, unidentified
MKSDKYMGMDVHQAMTVVAVLNADGKVILETMVPTEAAAIIRLVQSLSAPLRVTFEETTQAEWLYEVVRAYVTEVIVCDPRRNKLLGEGSKADKVDARKLADLLRTGLLRSVYHGHEATRKLKELVRAYETLSIDTQRTMGRIKAIFRGRGIRTPGRGVYQPKQREQWLEMLTEPGIHQRAAWLFEQLDQLRTLRRKAKQTVLTEGREHRAIGLLKTIPQLGPIRAAFIVATVDTPHRFRTKRQLWSYSGLGVVTHMSAEYEMREGRAVRNRKPIATRGLNPNCNHRLKETFISAATGGIRTEPYRSYLSRLQKGGMRAEMARLTLARKIAAIALRIWKKGETFDPKKLNWTT

SEQ ID NO: 356488 - protein, 327 aa, unidentified
MEQAVVGIDVAKDKLDVCLRWADRQVFGQFDNTAAGHQKLARWMKKHSDSPVHVCLEATGQYGNEVAEYLFREGQTVSVVNPARIKHYGRSQLRRNKTDKADAELIADFCANQKPDPWSPPPAEFKDLQALVRRLEDLIAARQQEANRLHSGVTTSAVIEGLQLHLAFLDQQILQLKRLIQEHIDQHPQLREQQDLLDSIPGIGKLTAAKLLGEIRCIQEFENARQLAAYAGLTPEKAVSGSSVRKKPRLSKTGNANLRKALFMPAISAKHHNPIIAAFCQRLSLSGLLPMQVIGAAMRKLLHLVYGVLKHRQPFDPNYLSNCLATS

SEQ ID NO: 356489 - protein, 402 aa, unidentified
MNCVGIDVSKGKSTIAVMRPFGEVVVSPFEVCHTVSELSELARLLKSLDGETRVVMESTGNYHAPVAWLLHGAGLYVSVVNAMLVHDYGNNSLRRAKTDKKDAVKLANYGLDHWITLPRYVPEEDTRLMLKSCYRQYQQYSKVRTMLKNNLISLLDTAFPDANRLFTSPPRADGSEKWVDFVAAFWHCECVCGLSEKAFTAKYQKWCKKHGYNFSEDKALDIYASACGHFGVMPKMDTTKLLVEQAVSQLRATSAALAALKQEMQSLAASLPEYPVVMEMFGVGPTLGPQLIAEIGDVRRFHSKKALVAFAGIDAPPYQSGQIDVRSRSISKRGSASLRRTLFLVMGVLLQCAPMDEPVYQFMNKKRSEGKPYRVYMMASANKFLRIYYASVKTYLDSLEHN

SEQ ID NO: 356490 - protein, 353 aa, unidentified
MDSRKYIGMDVHQASISVAVLDAAGKLLMECIIETKAATILELIQGLHGSLWVAFEEGTSAAWLYDLLKPYVAHMVVCDPRKNALLKAGNKNDRVDARKLSDLLRAGLLTPVYHGESGVRTLRELGRSYLTVTKDLTRVMNRLKALYRSWAIPCAGQKVYSPRHRSAWLEKLSEAGVRRRAEQLYQQLDVLVRIRRETRRELLLESQKHPANQLLRQIPRLGPIRVALLIALLQTPHRFRTKRQLWAYCGLALQTRSSGEYRFTGGQRQHSKKLPALRGLNDNHNHDLKNLFKSAATHTSTDPLGDFYQNLLAKGMKPAMARLTLARKMAAIVLKIWKPGERFDPGQLKRQAA

SEQ ID NO: 356491 - protein, 382 aa, unidentified
MKQNSTRRQSAKQTSKQSLKQSPKQSPKQSQKICAGPITIGVDLGDKTSRYCLLDDRGEVAKEGSAATTKKGMAQTFGPLKRCRIALEAGTHSPWVSRLLKSLGHEVFVANPRQLKLISQSSRKDDRIDARTLARLLRVDPELLRPIQHRSAAAQLDLMAVRVRAALVEARTALVNSARGLAKPVGERLPKCDADSLGIGHLASLSEPLQALLKPLLKQVESLTAEIKARDQQIEQIARMKYPETKLLQQVSGVGPLIALTFVLTVADQQRFEKSRDVGCYLGLRPKRSQSGRSEPELRITKEGDVYLRKLLVQGAQYILGRRGPDTDLKRWGTRLAVGGKRAKKRAVVAVARKLAILLHKLWSCGEVYEPLRNNPARQVAA

SEQ ID NO: 356492 - protein, 339 aa, unidentified
MSKKSVLSSTTIELSATCFIGFDVAKNKLDWSFINAQGIEQDYGTVPNTVDEVGELLSTITGTYSSEVFNCVVEATSTYHFPLLEACQVLHLPCLVYNPILTKQQIKGSVRGKKTDRSDAFLVARVGWSGGGRLHVPELYMTTKYYARSCQKLSMLNSSFQQYKNHFTELLDSQLTPDTIEALDNIQQAIKEARKQICKDLAKSAKGGLFTRLQTIPGVGEYVAASIIGEIQDMVRFPRAKHLVAYAGLDTKIRQSGEGLNSTGKLTKRGSSYLRHSLFIAANVARQHDEQFKALYDKKRAEGKTYKEATCAVSRKLLKVVRSVWLNEQDYELPEASQK

SEQ ID NO: 356493 - protein, 410 aa, unidentified
MRRVIGIDIHRTFGEVVFWEEGRLRHGGRIDMTRTALEGFGKSLLTRDEVVIEATGNCMAVFRVLAPFVKRVVIANPLQVKAIAYAHVKTDKVDAGTLASLYAAGYLPEIWAPDADTERMRRLVARRYQVVRHRTRIKNEIHAILHAHLIPKCPHSDLFNGRGRGWLARQPVPDDERFAIARHVRELDRLAEDLAIIDRGIAESALDDRAIGRLLTIAGINLTVATGLMAAIGDVTRFKSPQKLVSYFGLNPRVRQSGVGAAHYGRISKVGRSHARAMLVEAAWAAAKTPGPLHAFFVRIRARRGHQVAAVAVARKLTILCWHLLTKEKDYLWARPALVANKMRAMELQAGKPQAKGNRRGPAYAYNVKALRDQEMRIAEQAERSYEQFVTHWKPRPTKSSARAPQSGKA

SEQ ID NO: 356494 - protein, 403 aa, unidentified
MLYAGIDWAARRHELAVVDGSGRVVTSFGFAHSEQGLLGMLGRLSALAPPNEIRVAIERPNGLLVERLLAAGHGVYPIHPNAFAAARPRWGASRAKSDPGDAYCLADYLRTDGHRLRPLRPAEPCLAELRALCRLRTIHQKTLMAASNQLGSLLELHWPGARHLFYRLHSSVALAFLMRYPSPESAAHLGEGRMATFLKRQRYTRRSASELLGRLREAPQPASPLDPEVLRVLIEAQVRVLRTVLATLADLEAAISARLAVCEHAALLASLPRVGEVNLAQILAEVGPILERAESVELVSAEVGASPVTRASGKHRSVSFRHACNTKARQALTIFADNSRHASPWAAEVYRRARERGCRHPHAIRILTRAWLRVIWACWHSGRPYDPARHGASRPLVLAEGLT

SEQ ID NO: 356495 - protein, 411 aa, unidentified
MEVIHERCAGIDISKVDVKVCIRVPSGKRRRSEVRTFSAVTSGLLAMRDWLLAEGVTVVGMEATGVYWKPVFYLLEHDMECWLLNARHMKSVPGRKTDVKDSEWIAKLVEYGLVRPSFVPPEPIRQLRDVTRYRTEIIRERTRETQRLEKLLEDTGIKLSATVSNILGVSGRAMLEALIAGEHDPHVLADLARGSMRRKTEALIEALTGHFTAHHAFLARAMLDRIDACTATETKLSEHIEVMLQPFRRRIEMLVTIPGVEVRAAQVILAEIGDDIARFPSAADLASWAGVCPGNHQSGGRTGSGTTRHGDPWLKAALGQAAVSASRTKDTYLAARYRRIVARRGKKRALVAVEHSILTAVWHMFTHDTAYADLGGQYFIERTGRARQTRRLVSQLNQLGYQVTLQTEGAA

SEQ ID NO: 356496 - protein, 338 aa, unidentified
MIKLTNPTQMLFCGIDVSAKTLAVAVQQQEDQPYQEREFANTPSGHKALLAWLGKWKVAVRVTLESTGIYSLDLALRLDQAERIELAVANPKDALRRSKTDAADAQALAEYSRRMRFSAWTAPNRAQLQLRSLGRHLDDLTEERTRWLNRLHAAQGSVATPRCVLADIKRSLAALDKRIVALRRETMELVREDKVLERRFRLLVSIPGIAEVSALRLLAELGLLTAGMSVRQWVAYSGLDPAHHVSGTSVRRPSRISRAGNRHLRHALFMPALVASKRDPHLRAFYNALISRHKAKMQALTAVARKMLHAIYGIFKTDTPYKGQKLFPEITTAQIHTP

SEQ ID NO: 356497 - protein, 311 aa, unidentified
MDIAVLGVDLGKNFCSVVGLDASGAVVVRRRVRRETLIALVAKLPPCVVGMEACCGSHHLGRLFAAHGHDVRLMSPEYVRPYVKAQKNDDRDAEGIAEAATRPTMRFVGLKSQDQLDMQTLHRSRDRLVGERTALINQLRSILLERGLVADARMQWAELNRRIAAFDTEFVRCAKENEDTRRLTTIPGIGVIVATALVAAIGRAKLFDRGRDLSAWLGVVPRQFTTGGKPKLLGISKRGNTYLRKQLIHGARAALPHIAERDTPLGRWAKALIGRAHHNVAVVAFANKLARIAWAVLRNGERFTETSPSYS

SEQ ID NO: 356498 - protein, 337 aa, unidentified
MNTNRNASPTISWVGIDISKADFHMAFWGHEDFSEMEVLVFTRQRKFMKEVLAKLTEAAPAGMQLGIVMEATGKFSEEVATWLLKLDPKLRIAIVNPAQTSAFIKSLGFRNKTDGLDAKALARYGKDRNPVAWEPLSPERAVLRDLTRTRGDLVDARTAMKNRLNDHKRASRAAAKALETIIRSLDGQVEALEVAIEEHVKAHPELAHQVRLFRTIKGIGIVTSTVILAEIGDLHRFSRSRKLSAFAGVSPKLKDSGTSVHGKPRMCKQGNARIRVALYMAASNAIQHNPDMKAFYEQLRSKGKEPRSALGAIMRKLLVLMRAVLIAGEDWKPRLAA

SEQ ID NO: 356499 - protein, 393 aa, unidentified
MALYVGIDVSKEEFDACGIGDEGKKLFSLSCSMNRAGFEKLVVQLAKMNTAALLLGLESTASYHIALCSYLTVKGYRVAIINPLLISNVAKLSLRKTKTDKKDAFTIAQFLLLQRAAVSTKTESPRLTELKDLSRRRERLVDQMTSLKNDMKRILSVTFPELETITGIFTKSTLCLLSELPSAYALTRAGYEAVTGIVTSHSRGRKSSASVKLLMDTAAASVGVTSPAKDMILKQEAALLLALAEQAEEIMKLIRTLADDTMQRDTEILTSMRGIGEKTALNFLIEMGGDIKAFEHDRKLIAAAGLDPTTYESGKYKGQSKISKRGNRHLRRVIWLMTTKVIIANPVFRTYYFKRRKEGLIYKKAVLAAAHKLIRVLFSMLVNQKPFDAERGK

SEQ ID NO: 356500 - protein, 411 aa, unidentified
MQVIYKRCCGLDVHKETVVACVMIREKDKAQKEIRTFRTMTPDLLVLHDWLLAHGVTHVAMESTGVYWKPIFNLLEGSFEVLLVNANHIKAVPGRKTDVKDCEWIADLLSHGLLKGSFIPPEPVRDLRDLTRYRKSLMDERIREINRLQKLLESANIKLSSVASDILGVSGKAMLEALVSGNTSPEILADLARGKLRKKLSLLRDALQGRFRAHHQFMLAQILSHLDFLDEAIEQISKEVENRIVPFLKEIELLKTIPGVDQKTAELIVAEIGVDMNRFPTHRHLASWAGLCPGNNESAGKRKSGKTRKGDRWLKRGLIESSWAISRTNNTYLSALYHRMARRRGKKKAVVAVAHAKLVTIYHMLKHKLPYHELGADYFDRLNITYIKNHFVNRLERLGYKVILEPSQIAA

SEQ ID NO: 356501 - protein, 349 aa, unidentified
MKIIGCDFHPGYQQIALLDLVTGEMVETALSHERKEEVRAFYGGLQGPVRVGIEASGQSQWFERMLAELGHDVWIGDAAKIRASCERKQKTDRRDAELLMRLLAEDRFPRIWVPTAAERDGRQLLLHRHKLVRMRTQVKNQLQALALNQGVQRKRKLWSETGRKQLESLPLLPWASRRRAELLQLLDQLGASITELDRAVVEQANARPAAQRLMTHPGVGPITALAFTLTMGPAERFQRGKQIASYLGLIPSEYSSGGRKQRLGHISKQGNPFLRGLLVEAAQSAVRYEPEMRRAYQRLAQRKCRALAKVAMARKLAVRLYWMLRLQVNYAQLIQGSHAGQPGTFRGRG

SEQ ID NO: 356502 - protein, 439 aa, unidentified
MKKRKERVCGADVHKDLIVATITGDDVPPIRENFGTTKAELERFRNWLIKNKCEQVAFEATGVYWIPIYDALSSTIDTIVANPLQIKTIPNDKSDSKDSKRIASLCLNGQIKRSRVFSNEDRDLRTLTRARSGYVKTRTQFRNRIHKYLSSSGIKLSSCMDDIFCKSGAHIIKGLAEGKSIEEILKGIPSGKIRKKQDLIRAALDNALGETNRMLVTDALEILDYIESKIEKTSHEVLKKIQQRSKDLAIVMSIPGVGFVSGSVILSEIGNYRDFQTPEQLVKWCGLNPGENESAGKKKKCGITKRGSKQIRVVLVQAAQTISNMKNTRLSRFFQRLSKKKEHNVAIVAVARKLICLIHHLLINQELYQEADCRKRRSRRDKSCKEPSFQEEHLTDKVAAIVDAFYGLSDSKRKKALMRAIGDISVTEVDRKRSSDGGG

SEQ ID NO: 356503 - protein, 429 aa, unidentified
MTRISVGVDVSKNRSTVCIMDQDGKVIMRPFLVWHSTEELDFLADTLKRLNGEVRVIMESTSIYQYPIALQLKERGLFISIVNAYEMKQFANIDFRGGKTDKKDSRTIASYGISYWDKLVEWQIPKDTYFNLDLLNRTYMNAKKHRQIILQELQHYIDCAMPGMDKELHSLNLNTKKDFMLDFVEKFWHRDEIVNMTEAEFTEVFTAWAKKKGYRPVEGKAAKIYAIAKSCIPYYPANPTVKTILQCIVDKLSGVNRTLVTIVTQMIEEAKKLPEYQIVREMPGVGDPLAARFFGSAGDIRRFKNSKALVAYAGIDSPPDESGDFSSTHRHITKKGSKVFRDTGYEIMMALRAQKRTWEKVRKNPEVYDHMLKKKAEGKPRKVAKIAALNKFLRIVYARIKELYDNMALAERAKAKTRSKTKAKTKATA

SEQ ID NO: 356504 - protein, 387 aa, unidentified
MISVGIAVGKRSHEVCLMDAEGHQIGRFFRFQHSRQGMTALVELLRQQPEGCIIALEATGHYWLALYHHLLQEGFTVVAVNPLQCHAYRRSTIRRVKNDRRDAWIIADLLRIGRVRPGYVPGPDIQPLRDLARFRLELVDQVGDAKRRILGVLDKVFPEYESLFSSVFIATSRELLKRAATAEEFAALDLKEIAQVVKKASHGRLGMERAERLQQAARTSLGLPYLRDAATVEIRCLINQVEFLETQVKAIETAIERLFSQVTQHLTSIKGIGTISAATIYAEIGDIHRFPTLESLVAFAGIDPTIFSSGEFEGTQCHISKRGSPYLRKALWMAATGARRWNPDLDAFFAKKLREGKSYGVAMGALCRKLLGRIYIILQENRPYEVR

SEQ ID NO: 356505 - protein, 431 aa, unidentified
MSYRIAGIDVHKKMLAVVVSDVEIESEYQFERRMFGSNPEQLRSLAAWLLEQEVEEVVMESTAQYWKPVWEALERYWKPIREKREGARRKSGTLHLAQAQSNRGQRGRKRDFPDAERLVKRLVARELTLSFVPDPEQRLWRTVTRRKYQLTRDHTSLQNQLESLLEEAHIKLSSLVSNLLGVSARRMLKALAEGETNPAALAALADERLRATPEQLCDALGACADLKPVYRRLLKMMLEQVQFLEQQITKLDQEMASLLSQHQDAVQRLAEVPGLGVDSAQQIIAEVGPTAATFPSEKCLSSWVGACPGDEESAGVNYSHRSPQGNRHMRRILNQAANAAVKAKGSIFEIVYRRSVPRLGHKQTIGAIAHRQCRLIWLLLHQGVRYEERGPAVTKKSKQRRTWKMIRQLRSLGYRIEPPNPQHPTQAQQAQ

SEQ ID NO: 356506 - protein, 390 aa, unidentified
MDVLYQSCAGIDIHQANIVVCILHGPLTSTRPKREMATFDTTTKGLRACHDFLSQFHVEAVGMESTGVYWRPVWHALCDDFELILAQPAHMKAIPGQKTDKKDAHWIAKLTRIGLLPRSFVPDETIQELRELTRQRKHYVESRNRETNRIHKILQSGGIKLTTYIEDIMGLSGRNLLQLLVDGTPITPRIVHQSVYTSLKKKVPQLLEALDGYFSDHHRFMLKQSLEIYDFYQKQIELLEERINVYLSQYEKHVEILDSIPGIDVITASVIISEVGVDMSQFPTAGHLASWAGLCPGNNESAGKKRSTKIRHGNSYLKKCLCQAAFAVKKQKGSPLAARFYQIQSRRGSQKATIALAHQLLKIAYILLKEQITYPEFLAQKKTTRDELVA

SEQ ID NO: 356507 - protein, 473 aa, unidentified
MAVRNRKPVCVGLDVHRNNVWACVTFKDPAKGKDGLVFVTKKFDSNHTDLASMCEWIYTTLPDLEDRAIDVYMESTGKYSTPVFDVCEEMGLKPHIVNPKHVRTIAGQKTDQKDCAWIAELGANGLLRESYIPVRELRESRRLSRSRTKLVQERGDTIRRIRNILTEANIRMDLVFSGIEGESARSVIEYLLTTEEPDLEEVKKRIRKSCRIMRFSTHKERKEKEEELRKAFAGAKFSSVQKFELENAYERVDRLTAQIQRYEQMMTEILEPFKSYLDLLDSIPGISGLSAMQILSETGTDMGQFKNEKHFISWCGLCPQSNQSNNKHKSVKIGKGGYYLKPVLIQCALNAVKHPYFKGKYEAIAARRGKKRALIAIARKMMVLAYHMFQTGEYFQERKKQIPAVLEKEQSEREQSMETSAEATDAPAIIRTAKEIVEMLQNTDDEMKHKIEQLLAQIGIAQCEYQTGAISTI

SEQ ID NO: 356508 - protein, 452 aa, unidentified
MTAGKDITMHYQKVLKMPESIPYLSVGFDVGADFTWMSIMLPNGILIGKPFKIIHSDPQSRELAISKIKEAQEMYSLESRCFLESTGIYHIPLLCFLRDKGFDCAVINPIITKNSTNMNVRKLHNDKFDSKKAAKVGLDASLKASIVPDDAIIDLRNLVRDYYYFKDLQSAIVLKLHAELKVSFPAYLNVFSKVTTQTSLKLLEAYPLAADMLAAPKDELVETIRSTARFGETYALARYDAICTAAKDAAVFGRALPSNALRIRLYIKMYREYQAHLDSILEELHQAVGKLEGTPDYDRISFIQTLHGVGFLSAVVLIAEMGSFDLFSSPKKLYAYFGLDPGVNDSGKFHGDRVHMSKRGSSLARRILHMVAINNLKVDKATKTPVNPVIYDYYTRKCASKKKSVAVGAVMHKICNIIFAMLRDNKPFELITPEEHRERYAAEHPESVNPAA

SEQ ID NO: 356509 - protein, 369 aa, unidentified
MTDLTLFVGLDVHKKTISVALVESSAGAAVRFYGTITNTLETVRNLCRKLSKDGQQLHFCYEAGPCGYGVYRQLTRLGYRCDVVAPALIPRKAGDRVKTDRRDAMMLAQTLRAGQLTAVWVPDEAHEAMRDLVRLRSQAMRDLRKARQQLLSFLLRHGRDSPYGHWTKMHRRWLGELVFVHPAQHLALEEMLLRIERAEALCDRLKGAILELVPQWSLAPVVQAIQALRGVSLIVAAAIVAEVGCFSRFASPRALMAYLGLNPSEHSSGATIRRGAITKTGNTLARTCLVEAAWTYRFPPRVSQIIRDRLKELPEPIRAVAWKAQVRLSARYRKLTAAGKPGPKVVVAIARELVGFIWAIARMVEPKFA

SEQ ID NO: 356510 - protein, 307 aa, unidentified
MNHHTTMFIGLDVHKEFISVAYVPDDHGAEVTYVGPIGTRQEDIDKLIRRLKTKGSRLIFAYEAGPSGYGLYRYLRKKGHPCLVVAPSLIPKKPGVRVKTDRRDAVQLARLLRSGDLSAIHVPQVEDEAIRDLCRAREDALGDLEAELHDHVKGWKLLPLVEALQALRGVQFTVAVTTVAELGDITRFDNPRQLTAYLGLSPSVYQSGDKRRMGGITKTGNAHARRALIEGAWAYRYPAKVSRQIQERQEKLPQSIRNIAWKAQTRLCKRFQRLIARGKNPNVTVTAIARELASFMWAIAREVSPIT

SEQ ID NO: 356511 - protein, 416 aa, unidentified
MDVLRERSAGLDVHRSVIVACVLVSAAGSQVRKEVQSFAATASGLAALVAWLSGFGVTHVGMEGTGVYWMPVYAALEAVAGLTPIVANARHIKAVPGRKTDVIDAEWIARLIRYGLVRASFVPPRPIRHLRDLTRYRRTLVEAQASERRRLIKLLEATDMKLAEVLSDVFGVSGRAILRALIAGDATPAQMAALAKGTARKKIPLLTEALAGQLADHQRFMLNLQLYRIEATEQQIDQCDAQIEARLEPYRAEMALLTSIPGIDRVGAAAILAEIGSDMSVFATAGHLAAWAGACPGNNQSAGKNKASAARSGNRHLKTALCNAAIAASRKKGSYFRAKYYSLKSRIGGGKAALAIGHKLLICIWNMLTNGEFYRDLGEQYLDRRNHQQTLKRYARKLEALGYTIVPKQEATAMAA

SEQ ID NO: 356512 - protein, 340 aa, unidentified
MGEITTIGLDLAKHVFQVHGVDAEGAAVLRKQLRRGQVLTFFSKLPRCVVGLEACATAHYWARELDALGHEVRLMPAQYVKAYVKRNKHDAADAEAICEAVARPTMRFVATKTAEQQAALLLHRGRDRLVRQRTALVNALRAHLAEFGVIAPQGLRNVGKLIAIVRDKEDTRLPDVARKVLQVMAEQIEQLEAAVVALEKQLVAWHKSNPVSQRLATIPGIGPIIATAIAATVAEPSEFRSGREFAAWLGLVPRQNSTGGKHRLGGISKRGNHYLRRLLINGASANLLRSKATNADPWVIGMRRRRPSLVVAVALANKTARIAWAVMHRREDYQRVAAAA

SEQ ID NO: 356513 - protein, 315 aa, unidentified
MEQNLWIGVDTHQASIACYQNGKFKEFKTTKDGFKKALQWAGKEALWAIEGAYCFGKPFSSYLIDNGCKVYEVNPILTKSYRKSLSICGQKNDYGDAKIISLFAKNVKLQEVSLQTIKLKEKLTARELLVKQRVDLINSIKNLYAIRGETIPFNRLNTLKAQKWLSAQNDTIISSFGNIIKELNISIKAIEKEIEILLPEKALKLTSLTGVDTIRAAVIYTELKDKISTKEALASYAGVAPVENSSGKSLKHRNNKGGNRKLNSIFYQISLNQSIYDTQGKIYYERKLAEGKSKRHARKCLARQLSNIVWKILKY

SEQ ID NO: 356514 - protein, 343 aa, unidentified
MQTTTTIGLDIAKSVFQVHGVDAAGQVVIRRQLKRRYVLSFFQKLPQCLVGIEACASSHHWSRELQALGHTVRLMPPAYVKPYVKRQKNDATDAEAICEAVTRANMRFVPTKTPEQQSGLVLHRTRHLFIRQQTSVINAIRAHLAEFGIVAPVGRRGVEELLTVVADPNDERVPEIARACLSAFGAQLRSIKEQVLEFDRLITAWHRSNEMSMRLDEAPGVGPVLATAVVATVADPKVFRSGHNFSAWIGLVPKQHSSGGKDRLGSISKQGDRYLRGLFVAGALAVIRYAKIHGTKHRPWLTALLARRPTKIAAIALANKIARMVWAMMAKGERYKEPIALAA

SEQ ID NO: 356515 - protein, 331 aa, unidentified
MKNVDDSVGIDVSKQTIDVHIHHLKLHAVFANKKSGFIEMEKWIRAHGLKPSNVLYCFENTGWYSITLSFFLHGLRRYYVCENALVIKRSIGLKREKSDKADAANIAHYAWLRREELKCTVPPTKKLLELQRMMSLREQLSKQIVSLKNVRHGMLPVTSSSSTDRTIAILDQSLSALEKQLKKIEKEMEQFINAYDKMKRNYDLILSVRGVGKILATQLILHTHNFTCFENARQFSAYCGLAPYKFQSGTSIKGKPRVHSIGDKKMKSLINTCAVSAVQHDKELRAYYLRRLEEGKPKMLVLNIIRNKIISRAFATVKRGTPFVELNQFAA

SEQ ID NO: 356516 - protein, 322 aa, unidentified
MRYIGIDVSKATFVVAYSSDKGGEIRTFNNTTAGIRQFIGTLPKDGSIHCVMEATGNYSALLLYMLNVAGITVSMENPLKVKNFAKAMLSTIKTDKSDARLITLYGEKMNPRPFKVQGEAILRLRQKRTVIRQLTKQITAMSNLRGSLACLPVPDKGATHTVDETIKFLEKRRDRLQSELTDLVEVEFSRQLALLTTIKGIGITLATALIITTGGFTYFQNAKQVSRYLGICPTYEQSGTSVNIRGHINRNGDAYTRGLLYVAAWTASRFNTKCGETYTRLRQNGKPGKLAMIAVANKLIRQAFAVVAHDKEYVDGFVSNRP

SEQ ID NO: 356517 - protein, 353 aa, unidentified
MITIGVDAHKRVHVALALDEAGQELGEWRGLNSAAGWQAISEWAASLGSPRQWGIEGAWGYGRNLAQHLVAARETVYEVNPRWTAMGRRGARKPGKNDRLDARAVALLVRQEASALPRVHAEDDTAVLDLLTSEREGAIAEATRLRNQIHALLLQTDPEYRAYLPTLKSQASLDTLETYGAAGSNPLQAQRAAAIRRLTQRLRLALSQAEELAQQIKDLARGRFSPLTNLCGVNLITAGTLAGILGPGDRFATDAQLAAYAGVAPLEASSAGLVRHRLNRGGNRRLNSVLYRIVLTQAHHLPAAKGYIDRRLSEGKTRREAHRALRRFVIRAIWRLWHECQSVQAAAVVEEAA

SEQ ID NO: 356518 - protein, 392 aa, unidentified
MEPVIGLDVSKGASVFQAFVRRNEAHGRPETIRHTENGFSRLGNVIQELKERTKKEPVVILEATGHYHRIIVAYLADIGVKHFIINPLLSKRAKSAQLRKVKTDAADAWHLAEMYYRGDVEPHRSWNECYTELQHVTRQHEFITSLYVQAKLNMRALLDQMFPTFESVFYDLFSVTALATLQVCLSGQDQEWEEAIRKQAGKSRSTSWIRTKVEHLEVIYEQWSKSKKSATQIQMLRSMVSLLLSMQEQLEAIEKQMKQLAEQLPEVGLVKSIPGVGDKLAATIISEVGDAQQFGDAKQLVAYAGLDPGVYSSGQFVATSNRITKRGSKRLRRALYLAVQCGLRGSTNERLRGYYDKKREEGKPYKVTVIACANKLLHHIYAILKKGQPYQA

SEQ ID NO: 356519 - protein, 428 aa, unidentified
MNTPTSNPPVVAWVGLDWADQRHEIRLQAAGSPRLESFSVEQKPEAFQAWVAELRARFPQGRIALALEQSRGAVIYALMNYDFFLLYPLPPKTLARYREAFASSGAKSDRSDADLLLELVRTHGDRLRAWQPDDAMTRQLRLLVEYRRKTVADRTRLTNRLTDLLKTYFPQALDWLGDLRSLAACEFLGAWPTLQAVQGANRPALRRFFHDHRRLSAEEREKLLDQIRHARPLTQDRAVLEASELMTQTLVEQLRAVITALARLDQALEELFGQHPDQQLFDRLPGAGEALGPRLAAAFGTDRDRYQSAEEIQQFSGIAPVTAASGKMRWVHWRWACPKFLRQTFHEFADASRKKSLWARAYYQQQRQHGVSHHAAVRALAYKWIRILYRCWKTRTPYDEALYLRALQRRHSPLWLAAASLSTQEAHP

SEQ ID NO: 356520 - protein, 405 aa, unidentified
MEKRRYGTTMAELEELREWLRSEGITHAVMESTGSYWKPVFNVLEDAVKVYLANPQEVKNRRGHKTDDKDGWWLAHLLRHAMIYPSFIPPRSIRELRDFTRRRERLLGDATSERNRVQKLLEDANVKLGNELSDIFGVSGQCMLEALLKGEATPEQVAQLARGRAKKKIPQIIAALQGHRMSSHHRKMINYTLDHLRFLEEQIIQLDEDIAATIRQAGLEPKWQLVQSVPGVGATSGAKILAETGGDMRVFPSVKQFSSWAGVCPGNNRSAGKSKSSHTTRGNRWLRSTLVECSWAASVKRDCFIKEKFWRIVSKTREHKNGPALIAVAHTLLKLIYQAFSTDNPYKEHGTPALDERQKQRIIRHHVRRLGKLGIAVYSTQPAATAGIRRPPAALILDPATEPCR

SEQ ID NO: 356521 - protein, 351 aa, unidentified
MWIIGVDYHPSVQQIAFVKTDTGECGERRLNHSDGEAEKFYRELKAAGCSVRVGMEATGYARWFERLLAELGFELWIGDPAQIKAKRVRKQKTDRLDAELLLQLLLEDRFPRVWVPSPENRDLRQLLWHRHRLVQMRTRIVNPLQAVAMNEGVRRKKALWSKSGRAQLESLSLAPWATRRRHDLLELLDRLNPTIEELSATVEQEAKQRPEGLRLMTHPGVGPTTALAFVLIIDSAERFAGGKQIASYVGLIPCEDSSSDRRRLGHITKQGNTLLRFLLVEAAQAVVRRDPDWRRRYTHLAMRRDQRIAKVAMARKLAVRLYGMMRKEWNYEQSKKFGSYAGESDYGHGVQ

SEQ ID NO: 356522 - protein, 337 aa, unidentified
MNNYIGIDVSKSTLQVFIPKNEIDVEVKNSSEGLKKLLNKLKKQYKNDIADIVFVYESTGSYSTILEDFCQRKKIKCFKVGSYQSSSFSKTIKNRNKTDKVDARMLSSMHILVKEGDVKVPFRDERAHEIRSLIKYYRSLVKEKTRLKNYLEAAVYNLEDSYVLNKVKRKITLLKKEEDEIMDRVVKIIKANRDYLEAYENIMTIDGIGSKSAAVLLYFFLRYPDASRQHIVALCGLDPIRQESGTSLKKKAKISKQGITLVRGILFMPTLSAIENNSEMKHIFKRLVKRGKPSSLAQIAVMRKLILLAHSLYKSGQKYDSQRYLKHAQIKEAEVMI

SEQ ID NO: 356523 - protein, 363 aa, unidentified
MHESTTVTVGLDVHARSIRLAAVRADELLEERTLPYDEEAVERVLSRWPGARCCYEAGPTGFGLYRHLVEHGIDCAVVAPGLVPQRPGDRVKTDQRDARKLARLLAGGLLEPIHVPSPQLEAARDLIRAREDARLDRMRDRHRLSKFCLRHGRRLPTSSWTVVRRKWLSEQRFEFVAEQLTFDTYLHALDLVDARIEALERAIRETAEQEPWRALVAQLRCLRGVDTLTALALVAEIGDFGRFRRAEELMAFVGLVPSEHSSGEHRRQGSITKVGNSHGRRLLVEAAWHARRRPKVGYELARRQRGQDAVVIERAWRCQQRLYQRWQRMAGRGKPHQKIVVACARELAGFVWAIATEQPLRST

SEQ ID NO: 356524 - protein, 342 aa, unidentified
MDIKVLGIDLGKTVCSLAGLDEAGAVVFRKRLQRHRLLGFLDTLPPCVVAMEACGGAHHIGRFCLEKGHEPRLMSPLYVRPYVKVHKNDDRDAEAIAEAATRPTMSFVAIKSEEQLDLQALHRARERLVSDRTRLINQGRGFLMERGIRVGTGRHVFQKELARLAAEGTADLSPRMLLLVADMASELEVINNRVAAIDAEIKALARTDADMQRLMEIPGIGPTIATALVAAVGTGSSFGKGRDLAAWLGLVPRQITTGGKAKLIGISKHGNRYLRKLFIHGARTVLHLVRDRTSPITAWADGLKERAHVNVVAVAMANKMARIAWAVLTKGERYRPNAMSGL

SEQ ID NO: 356525 - protein, 354 aa, unidentified
MTSIKYIGMDVHMESISICMRNSVGKIVMECVIETKASTILQFLDGLRGDLRVVFEEGTWATWLYDLMKPHATEVLVCNTRKNAVRKGSKSDRIDARKLSEQLYMNNVKSIYHGEHGLRMMKELARSYLTITKDLTRVMNRLKALYRSWGIPCAGNEVYAPRYRAEWLAKINEAGVRRRAEHYYQQLDVLRPLRQEVRRDLLVESRKHKIWKLLRLIPAIGPIRAAILIAVMQTPHRFRTKRQLWNYSGLGLETYDSAEYRAVQGQLERSRKQATVRGLNKDYNHDLKDIFKGAAMRASTASGPLRDFYENLLAKGRKPTMARLTLARKIAAITLIVWKKEVRFDANYLKQQAA

SEQ ID NO: 356526 - protein, 349 aa, unidentified
MTKVTIGVDLGDQYSQLYVVDAAGTCVETGRVRTTRAGLERWFARQAPARVVLEAGTHSPWASRALQALGHEVLVANPRTLRGLYENDSKDDRVDAEYLARVGCLDPALLKPITHRGAAAQADLAVLHARDALVRTRTQLISHTRGVVKALGGRLPRCSAEAFARRASGDVPAELQPALAPVLAQVQQVTAAIRAFDRELERRCAEQYPATARLRQVSGVGPVTALAYVLVLEDPRRFARSRAVGAYLGLRPRRSQSGERDPQLGITKGGNPFLRRLLVQGAQYILGPRGPDCDLRRHGERIAARGGKNAKKRAVIAVARKLAVLLHRLWISGAVYEPLRHSTALAQAS

SEQ ID NO: 356527 - protein, 367 aa, unidentified
MKKVSTAAAKQMRNFSEQKLTIGLDLGDRSSWYCVLDETGEVRLEQKLGTTPKAMKEMFGALPRSRIALETGMHSPWVSRALSELGHEVIVAHARNVRLIGESRKKDDRLDAWTLARLARIDPQLLSPVKHRSAKAQADLTVIRARAGLVRARTALVNTARGLAKSYGERLRGCNVRNMNPEKAEGLSPELQTALEPLLAAIESLSERIRECNQRIDSLAQESYPQVALLKQVKGVGTLIALTFLLTLEDAHRFRKSRDVGCYLGLQPGRRNSGQSEPQMHISKEGDPYLRTLLVQGAHHILGPFGADSDLRRWGLKLAERGGRNGKKRAIIATARKLAVLLHRLWVSAEVYEPLRNNSRATMPAAA

SEQ ID NO: 356528 - protein, 342 aa, unidentified
MQISTIGIDIGKNSFHFVAFDARGGIVIRRQCSRTQLIRALANLPPCLVGMEACCGAHHLGRILVAQGHDVRLIPPQYVKPFVKSHKNDLLDAEAIGEAVQRPTMRFVPLKTMEQLDLQAIHRLRTRLVRRRTAVINQLRGFLLERGVTFPIGRRVLIERFPEVLDNPALGLSVRFCRLLQQLRDEWRLLDGSIQDVDQEILSLARDDEACERLMQVPGIGPLTATALVAAVGNGAAFAKGRDLAAWLGLVPRQHSTGGKTVLRGISKRGNAYLRCLFIHGARAVCRHHRQRPHRLGRWLANLEARAHPNVVAVALANKLVRTAWAVLQRNTHYDGRLLANA

SEQ ID NO: 356529 - protein, 341 aa, unidentified
MKNLFIGIDFSKEKVDVAIISAEGLVETSVRVFNEFKNSVCGYKQLVKWVEKNANSIDPSLWLFCGENTGDYSKPLCNHLYGKGFDIWLENAKCIKDASGIRRLKSDRADASMIAEYAMRNHDRAVGYEPLSGSLAQLREYYLYRQMLVRHRCSFEVRRGEKRLLMDKSAAKTAIAQSGRHIVSELNREIAKIDRKIALLIEASDELSEVYKIVTSVPGIGTQNAVCLMVYTDNFHRFNYDARSIACYYGIAPFGEDSGTSVHVDPHVHYMANRHIKAMLTQAALAAVRFNPIINQYYQRLIGRGKKMPVAMNNVKNKLLHIVTSMVKNKQVYNPEYRFSA

SEQ ID NO: 356530 - protein, 359 aa, unidentified
MQTQRNELNFEGQNIFVGIDVHLKSWTVSIFTEKLHHKTFTQPPKAELLSEYLKLNFPNGSYFSTYEAGFCGFWAHFKLKELGIQNIVVNPVDVPTTQKEQMRKSDAIDSNKLGRSLRSNELKGIYIPQAETLEDRTLIRVRFAIVRDMVRLKQRIKALLNLYGIEYPNELKNTNTHWSKRFINWLKTIQLQYSTGTDALNILIIAAEQHRLILLDATKKIRTLSKSEHYSKNIELITSVPGVGIITGMMLLAEIEDINRFNNSDKLAGLIGVVPNCHSSGENEKKGEMTSRGQYFMRKGLIESSWVAACKDPALSLSYNTYCKRMEPNKAITKIARKLVNRIYSVLKNQKRYEMGIIK

SEQ ID NO: 356531 - protein, 417 aa, unidentified
MNQYAACLGIDWADKKHDLCLFDTATGKKTKQVLPHTPQAISEYFTSLRLRYPGQQIAVGLEQSRGPLLFALLQYDFLVLYPINPTTLAKYREAFSPSRAKDDPTDAEYAAELLRQHSDRLKAWHPDDHETRTLRYLVEHRRRLIGDRTRLSNRMTSLLKCYFPQVLSWFPDLSTVLVCDFLLRWPALERLPGVKRTTLLNFFRAHHSVRSDTLEKRLAAIKQSVPLTTDRAIINSSILMITALAAQMKTTIEAIRQFDLEIEKLCAAHPDFPLFQSLPGAGAVYASRLLAVMGTERTRWTTAAELACLSGIAPVMERSGQSVWIRWRYFCPKFMRQSFHEYAGESVKHSFWARAYYEQQIAKGKGRQAAVRALAYKWIRIIWKCWQTRTPYNEVKYLENLRKKGSPLLSYAAKNAA

SEQ ID NO: 356532 - protein, 392 aa, unidentified
MLFVGIDIAKRNHEASVIAQDGRVVRKAMRFANSQAGYNKFMDMVRTLSEPVVFGMEATGHYWLTLYTHLRNDGFTVHVINPIQSDALRGMYIRKTKTDSVDSVIIADVIRFGRYCETSVEPGDLHAMRELCRQRFYIIDMASDLKRKVIALLDQVFPEYEKLFSDSFGVSSMELLSQYTTPEEMLSVSSQQLAEVLEKASRGRLGAEKAVEIQDAARNSFGIVMASSSFSLIIRQYIEQIRSLESSVDIFDTEIARLLSGFDTQLTTITGIGPTLAAVILSEIGGDIRRFSSPAKLAAYAGVDPTVKQSGDFSGTRIKMSKRGSPYLRRAIWLASTVAAFKDPVIHALYERKRAEGKDHMTVIGHVCRKMISIIFAVLRDNTPYVPAGISD

SEQ ID NO: 356533 - protein, 341 aa, unidentified
MPIVTIGIDLAKNVFAVHGVNEAGKAMLVKPRVPRDQLAMLIAQLPPCVIGMEACSGAHHWARLFQQHGHTVKLMAPNLVAPYRMSGRRGKNDAADAAAICEAVTRPSMRFVPLKDEHQQATLCLHRTRQGFVEERTATYNRLRGLLSEFGVVLPQSPEKLRRHITEHLDTLPGWAKRSISDLLEHAGHIEDRLLEYDRAIAEIAREDARSKRLMQLRGIGPTTASALLASIGAGHDFKNGRQVAAWIGLTPGQYSSGGKARLGSITKAGDAYLRGLLVNGARAVIANLGEKQDRFSRWARTLIERRGYWRAAIAIAAKNARLAWAMLKYGHDFKLEPVAD

SEQ ID NO: 356534 - protein, 339 aa, unidentified
MELYAGLDLHSRNTYIGIMDKAFNRVFKKRVPNQLELILQTLEPFRDQIKGFVVESTYNWYWLVDGLMDNGYSSAHLANPAAIKQYEGLKHSDDQHDAFFLAQLLILDILPQGYIYPKKDRPVRDLARKRMFLVQHKTAHTLSLQSLIARCCARKVSANDIRTLTVNELEMWLQEEHLVLAAQANLDSINFLKQTIKGLEKAIIKKVKLKKSFQQLLTVPGIGNILAMTIMLEVGDISRFPEAGNFASYCRCVSSQRLSNGKRKGSGNRKNGNRYLSWAFVEAAHLTRRYNERFRKYYNRKVAQANTSLATKALSNKLARICYYIMRDQVPFNEELYCP

SEQ ID NO: 356535 - protein, 346 aa, unidentified
MKCYAGLDVSLKEISICVIDQNGGIVARGSSPCDPEGVQAWLRNRSLAPERIIHESGQLAIWLQRGLTRLGLPATCIDARMAHKSLSARPNKTDAADAEGLAQLARTGWFTSVHIRSEEADRLRSLVNARERLIRLRKELEGHVRGALKTFGIRMAAVGQGQLRQAFRDQLALAGERDPVVRVLADAFISSHETLCRATADLEAVLKTEARQHPVARRLMTIPGVGPVVALSFVALVDDPTRFRRAADVGAFLGLTPRRHQSGQMDWSGRISRCGDSAMRRLLFEAASSLIHRVQRFSPLKSWAVRLAGRRGFRKAAVATGRKLAVLMLTLWKREDDYAWTEGATT

SEQ ID NO: 356536 - protein, 329 aa, unidentified
MVFLGIDIAKASMDCAILAGPGGKPLGRRSFPNSAEGVDRAARWAARVSGTEVAETHVVVEATAAYHELAAHRLAAAGMRVSIVNPARVRSFARALGILGKTDRIDAQLLARYGQLVRPKLWSPPAKALLELRSLIARLDDLEADFRREENRLEQARTRGCPELVQRSLLAGIAALEAQAGDLRRGIAAHVAADAALQADLERLMTIPAVGPKTATRMLLMLRSRAFDTARQAAAFLGLVPVERTSGTSVRGRPTLSRAGNPRLRAALYMAAVVGIRKNPDLRARYGRLLARGKCKMAALGAAMRKLVHLCFGVLKSKGEYRPAAAIKA

SEQ ID NO: 356537 - protein, 342 aa, unidentified
MYYIGLDVHKKTISYCVKDASGQVHREGKVGATRWELDDWMKTLPQPWTVAMEATIFTGWIYDHLLAHAQQVKVAHPLMLRAIAAAKKKNDRIDAGKIADCLRCDFLPECHMASTAIRDRRRTLRYRHLLVRQMVQMKNRISGLLMETGVSHNKQRLHKVGYFRELLTSNEEVNESIRPLLRVSRDSIVRLQKTEYALVSSLQRDPLLAERVKRLRTVPGVGPITALTWALEIGEVSRFPSIRQAISYCGLCGDEKSSADKVTRTPLSKQRNKHIQRVLVEAAKLAPRQDHSLALVYEREKQKGNANRATLAVARKMVAYLLAVDRGQRDFVPFADSQSAAA

SEQ ID NO: 356538 - protein, 326 aa, unidentified
MEVLFNIGCNAHGKEVKRKMLKRNKLVAYVANLPPCRIGMEACAGAHFWARRFEALGHEVRLIPPQHVKAYVRGNKNDYNDARAIAEAARHPDIRCVAVKTVEQQDVQALHRLRGARVGERTALCNQIRGLLAEYGIVLPQGVGTVRKRLPELLEEADNGLSDFFRPLLADCYRQLREIDAHIEFYTRELKEHARRNEAVQRLQTIPGFGPIVASVFHAFVGDGQGFGKGRDVSAALGLVPKQHSSGGKTVLLGISKRGDRYLRGLLVHGARSVVRQAARKDDRLSRWINKLKATRGANKAAVALANKMARIGWAVLSQHSVYRAA

SEQ ID NO: 356539 - protein, 393 aa, unidentified
MVYVGIDVAKDKHDCFIANSDGEILYDVFTIQNDMDGFEDLFFKIKTASRDLSKVKVGLEATGHYSCNILGFLHNKGLTTIVINPLYTSLSRKSVSLRKTKTDKVDARTIASMIMSDVSLKPYSDTVYHNEDLKSLSRYRFDKVSDRSKLKQSVSRLVNILFPELEKLVSSLHTKAVYELLSEFPGAHQVASANLKHLTALLSTASKGHFGREKANAIREAARRSISSYLPAKSLELRHTIKLIRELDAEIAEIETEIKKIMDSIDSPTLSVPGISYALGSVIISEVGDFSRFDNPDKLLAFAGCSPSTYQSGQIYSTHAKMEKRGSKYLRWALLNAAKYVCKWEPTFAVYLRKKLAEGKHYNVAVSHAAKKLVRLLYHLETTGEKYIPQTLS

SEQ ID NO: 356540 - protein, 374 aa, unidentified
MSSNVCHQTICLAIELSSSSWVIAYRVPRNDKAKLHRLEAGDGAGLLAFIASLRHRLDPPDDASTLVVSCFEAGRDGFWLHRLLSAHGVINHVVEPTSILVTRGARRAKTDRLDAFGLLRVLAAKFAGDPDACRIVVVPSVEEEDAKRPHREREFLVQERVRIENRIAALLATQGVRERPSLRSWDADMRALRTGDGRPLPTHLVAELNRLRRQLSLTLEMIRELDAVREQALEAQHDSASRTVKALCTIRGIGVNFASVLTREVFYRTFDNRRQIASYLGLAPTPFQSGGMDRDRRINRAGNSRARKTLVQLAWLWLRYQPESSHAAWFRDRVGSLQGRIRRITIVALARKLLIAIWRFVTLGLAPEGAIIAA

SEQ ID NO: 356541 - protein, 422 aa, unidentified
MNNPPDQESGGWLGNRGFGGLDWASQKHSVVVVDPQGKVVEDFEIEHSALGWKKFRERIKPYGSIPFAIETSQGAAVEQLLEAGMQVYPLNPKSAQAYRQRKAPSGVKDDRLDAWSFADALRVDGHGWKPLRPEDPLIKELRLLCRDEVGLIEQRTAFINQLRHALAEYYPTALEAFEDWGAVSAWMFLQRFPTPQLLEKAGKRQWEKFLHSRRLWRTESGPRRMELFAKATEFGSSEPTANAKSMLALSLVEMLFAVEKQLGLYRKRIEELFESHPDHDLFGSLPGAGPKLAPRLLAEIGDDRERFEGDAQNLQCFAGTAPVTKRSGQHRECHQRWACDKYLRHAVHLFSEQSLTRCAWAETYYKAHRAKDHSHARSLRCLGQRWLKIIHKMWMDRTPYNPELHHRNQVKHGSWVFRFQEN

SEQ ID NO: 356542 - protein, 345 aa, unidentified
MTIVGGLDIHRKQITFDYVDTVTGRVRRGRIAPADREHLAGWLAQRFPGRTDVEFALEGCTGWRYVAEELAAAGVGAHVAEPADTAALRGGRRHAKTDRTDSRHLRELLADERLPQCWIPPAQVLECRALLELYRDLRVEHTAWVQRIHAVLFHQGAGALTVPALRSQAGLVELSEQAADLSSAGKMQVVTALEMLAVLDEQLVQVRRQLLAAARHLRGARVLTARLYGVGPITALALCCWLAGAGRFSSARKAVRFAGLDVTVHSSDGKRSPGHLSRQGPSVLRWCLYEAGKTHARGSAPDHAYYAQVKDRIDGKRAALSEGRKIVRQACHLLSELGDDALTQV

SEQ ID NO: 356543 - protein, 313 aa, unidentified
MTNKQEYVGIDVSKDTLDVACNESKAFRQFKNTSRGISKLIEWMETIQPKLIVLEATGGLELPCVAELSHADLPIAVVNPGRVRGFAKSIGQLAKTDKLDAMVIAHFGQATNPVPRKRPTEQEERLSALITRRRQLIEMLTAEKNRRHSARFNTRSLIEKHIDWLKAELSDLDGEISTYIHQCPAWKHKADLLMSVPGVGKVTVATLLALLPELGTINRQRIAALVGVAPVNKDSGKRSRKRRVFGGRANVRSVLYMAALSASIHNPRIKAFYDHLLENGKEKKVALTACMRKLLVMLNAIIRSDTYFEVLMS

SEQ ID NO: 356544 - protein, 346 aa, unidentified
MTNNIQFSSVCGIDIAKSVMQVYRVTSDGVVSNKAVKRADFLNEFRNIPPALIGMEACGGSQHWARELQSLGHTVHLMPPKLVKPYVTGLKNDKNDARGIYKALEMSVREVPVKSAAIRDLALLQTMRTKRQREKVAKINHIRGILTEYGLVMGKSINAFLAKAGSLIVQLKERADVSPYIVSELTALFREVKEAMEKIKELETNIDSIAKTLKQYDLFRSAPGVGPITAATMLVLLCNPAVFKNGREFAAYIGLAPKSSGSGGKNFVTHIPKKYECNNEVRTLLVQCAHAICRSKHKSDWVSSILARKPKKVVIIAVANKLARQLWIMAKKGEKFERRFILAAAQ

SEQ ID NO: 356545 - protein, 408 aa, unidentified
MNPLFVGIDVSSKNNVAYLMKPDGSKHSSFSVQNNLGGAKLLSEKIVSALHSMQLNDVVIGLEATSIYGDSLVYALREDGSLGRFQRKIHVLNPKQVRKFKEAYPDLPKNDWVDAFVIADHLRFGRIAKEVYMDDYRYQALRTLTRARFDIIQNLTREKQRFANYLFLKCSAIAQAKDIQNTSATTLALMEHFETVDDLANADLDELTAFISEAGRGRFVNPDATAKAVQAAARGSYRLPKTVNDTVNQAMAVSIASMRALKEQVKVLDRAIEQQFEIIPNTLTSIPGIGKVYSAGIIAEIGDIHRFNSQASVAKFAGLVWHRNQSGDFEAEHSQMIKSGNRYLRYYLLEAANSVRRCDSEFRRYYDLKFKEVNKYQHKRALALTARKLVRLVFRLLKDNRLYIPPEG

SEQ ID NO: 356546 - protein, 417 aa, unidentified
MWNKATRVKSSVESASNKHIGGILMVCVGIDVAKDKHDCFIISSEGEILADVFTIPNNAEGFDTLLQAIRRSTRPEDKIKVGLEATGHYSYNILGFLLDKGLPTYVINPLHTNLYRKSLSLRKTKTDRVDARTIAAMLMSDVDLKSYTDTVYHNEELKSLTRYRFDKVRERAKLKQSVSRLVTILFPELEKLVSSLHSASVYALLSEFPGAKQISSTHMTHLKAVLKNASQGRYGQEMAENIRNAARSSVGSVMPAKSLELQHTIRLIRELDAEIEDIETAIQAIVDEMQSPITTIPGMGVRMGAVILAEIGDFSRFDSPDKILAYAGMSPSTYQSGQLSLSGAYSHMEKRGSRYLRYALYNATKHVCHWDPTFAAYLAKKRAEGKHYNVALSHAAKKLVRLIFAMEKSQRPYCAAA

SEQ ID NO: 356547 - protein, 360 aa, unidentified
MAKARSLVGLDVHATKIVAAVLDAETGELTFFAMTADIDRAGGFCAALPGPVRVAYEAGPTGYGLARELAKRRVECVVAAPSKIPRASGDRVKTDRRDAELLVRLLLAGKLHAVRVPGAEEEALRDLVRARESVRVDLMRCRHRLSKLLLRHGIRFEDGDAWTERHRQWLASVELQWPAAQATLLDVRGAIDALTHRRDALERQIVAMLPSSPWRAQVGVLRCLRGVDTLSAVGLCAEVGDFTRFARAGQLMSYVGLVPSENTTGQQRRLGSITKTGSAHARRLLVEAAWHYRPRPNLGKALTERQADQPPEAVAIAWTAQKRLHRTWARLEARNKRRTIIAVAAARELAGFVWAITQVE

SEQ ID NO: 356548 - protein, 395 aa, unidentified
MLFERMSVGLDVHARSVAAAAIGNVIGELVKTRLVHSAEAVLAWLSGLSGPVAVAYEAGPTGFGLARALADAGFACTVAAPSKINRAPGDRVKTDARDAVLLARLLRMGELTAVRVPTQVQEDARDLVRAREDVRGDLMRARHRVSKLLLRHGHVYAGGSTWNREHHAWLRRIRLDLPGTQAAYDADLEAVAFAEARRDRLDAAITTMAADSEFIDLTHRLWCLRGVSTLTAFALAVEIGDWRRFTGASIGAFLGLVPSEHSSGGSRRQGAITKSGNAHARRLLIEAAWHHRPRYVVGKVLQDRWDQGSRCQAAAPRARVARSGCGGSTQSGRWMMLPMAPGRLIRACHPRVSRESAVPPSPLSEARAPRHTAQYLGDRDRLRSTAVGRRALIRG

SEQ ID NO: 356549 - protein, 355 aa, unidentified
MIVIGIDPHKQTHTAAAVESGSGELRGERTVKARREGHERLLVWARALGSERLWAVEDCRHVSIALERFLLASGERVVRVPPKLMAGARKGARSYGKSDAIDALAVARAGLREPSLPVARLAGAEREIRLLTDHRDDLVQERTRIQQRLRWHLHELEPELELPAGCLDRRVWLERLGRRLARREPIVQVRICRELVARCRELSRRAAELERELARLVSAHAPALLELPGCGVLTAAKLVGETAGAERFASVAQLAMHAGAAPLPASTGSRQRHRLNRSGNRQLNCALHRMAVTQGRWHPPAQAYLARKEGEGHSRKEALRCLKRHLARVVYRTLRTIEEDNMASPHRPVLTPALT

SEQ ID NO: 356550 - protein, 311 aa, unidentified
MTRMICGVDVAAQTLQARIGAQGAQQSFANHAEGIAELAAFCRQHQVELVVMEATGGYEQMAYALLWEQGLEVAIVNPLAVRRFAQSMGHLEKTDALDAGVIAHYAATKNVQPQPPASATQQKLRALVTHLRQLTVTRVQLRQQQRLVGEPMVLASFQRMLDCLEQEEERLEEAIAELISADPLWQKLNESFRQIKGVASRTVARLMAEMPEMGTVSNKAIAKLAGLAPLANDSGRMQGRRAVRGGRRHVREVLYVVAGIVCRFDAHFQAFAQRLLEAGKPKKVVRIAVARKLLVRLNARAREVRAAFACA

SEQ ID NO: 356551 - protein, 322 aa, unidentified
MSAPILGIDIAKQRVEVALLVEGKVRNRSFKNAPDGFESLAIWLSKWGIDQVHACMEATGNYGEALAIYLHEADHTVSIVNPARIKGFAQSELIRTKTDKVDAGIIARFCLAMKPGSWTPPSQEIRSLRALVRWADSLTGMLTQEKNRLGSAHESVIPRIKGHIDYLDKEIEEVRHQIAGLIEEDPNLRQKKDLLASIPGIGTVTIPVILAELDNLEKFKHVRELVAFIGLAPKERLSGSSIKGKPRLCKTGNARLRKALYMPALVSIQYNPLMIAFYNRLKEKGKNGKVIVCAIMRKLVHLIFGILKSGKKYDPNYKPAFA

SEQ ID NO: 356552 - protein, 339 aa, unidentified
MKNNEKTIYKHYIAIDWSIEGVYIARILAQGTKIETKRFDSEVKQIKKYLISIKGKKILTIEETTSSHWLYVELLDCVDKILICDPYRNSLLSEGAKNDKIDAEKLCLLLRSGLLKEVYHSLNEDYKIRKLVSAYEDLVKAGVRVKNQKSAIYRAEGLRYKKDKIKRQDKIIGFIEEQQNASIKLYGNEKKKYENKFEEIKKGNAIVKMLCGIPGIGTILSMRIYSKVIDANRFENKYKFWGMCGLVNHQRESGGRNYGKKKPRYSRTLKSVFKIAAMAAISGNNDIREYYDLLLKKGYVISEARNQIARYIAKVSYAIMKNKIPYKAYQWRELKKIAA

SEQ ID NO: 356553 - protein, 406 aa, unidentified
MRVIGLDVSRTFAEIAYLEDGRVRAGGRVELLREPLARFAATLMGTDHVVLEATGNTAAIVAVLQPAVERVVVANPLLVRLIAEARVKTDKIDAAVLAQLYASGFLPEVWIADPRTQALRRQVARRSQIVRQRTRLKNEMHAVLAAHLIARCTATDLFGKRGRAWLAEQPLPLDERLGVDQRLYELDRLGEDLAAIDRSLAQAVSDDPAVKRLLTIAGVNVTVAIGLLAAIGNIDRFASPAKLVSYFGLKPRVRQSGLQPAQHGHISKVGRSHARAMLVEAAWAAAKAPGPLRSFFLRIRARRGMQIAAVATARKLATLVWYLLRHDEDYTWARPSLVAIKERALALQAGAPARRGQKGAAAAYSVKALRDRERRVVENAEHAYARLVAHWTPAGGKRRANPPGLR

SEQ ID NO: 356554 - protein, 358 aa, unidentified
MMNLKYSIGIDVSKKDFHCCLSVIDSTQKVTVKSSRKLSNSPGGFKEFLVWIKQHQKEELPLRMVMEATGVYHEQLAWFLHSKGLVLSILLPNKAKKYLQADGANSKNDSIDARGLAKIGAEKNLEPWAPGSEKLYDLRHYTRQHQNLKETINVIGNQLEALNHAQFQSREVIKQLNKTIKLLEQQVLEMEKAMEKLVKTDKVLNLHYENITAIKGVSLLSFCVIVAETNGFTLFKSSASLVKYSGYDVIENQSGKHIGKTKISKKGNSRIRRILFMPAFCAVRDDQPQFKNLYERVVERTGFKMKGYVAVQKKLLVMMYHLWKNEQRYNPQFNYPEKIIAPEKSRATHDKIPEGSFH

SEQ ID NO: 356555 - protein, 412 aa, unidentified
MEVLYPHCAGLDVHKDTVVACVRHMATGSVEREVRTFKTTTKDLLALSDWLAEHGCTHVAMEATGVYWKPVWHILSDGDFVLVLANAAHVKNVPGRKTDVNDATWLADLLAHGLIRGSFVPDEQTQEMRNLLRTRKQLVRECSRHIQRLQKTLEDANIKLDSVISDIMGLSGRAMIEALIAGESDPQRLAQLAHRRIKAPPEALCEALRGRVTRHHRFLLRLHLKQIDAVNVAIDDIDQEVDAQIEPFRTAIQLLITIPGVSELSACVILAEIGHDMNRFPTAAHLISWAGLCPKNDESAGKRRSTRMRKGAPWLKTTLVQCARAAARKKASYFQAQYHRLRARRGDKKAIGAVAASILTTAYHMLKYGTLYEDLGPDYFDKRGKGKHVHRLINRLQNLGFAVQITPVEAAA

SEQ ID NO: 356556 - protein, 425 aa, unidentified
MSYRIAGIDVHKKMLAVVIADVATESAYTFERRKILTTPEQLRKLAEWLIEREVEEVVMESTAQYWQPIWGMLEEIWQPVRREAGAGVKAGKLHLAQAQSNRGRRGRKNDYLDAQRLVKRLVADELNLSFVPDPQQRLWRTATRQKNQLTEDRSRVQSQLESLLEQAHIKLSSVICDLLGVSAQRMLQAIARGESDPAVLAAMAEKNVKATPAELADALSAVRRCNVMYRRWIRRMLDRVALLDQQIEQFRLDAAELMESQREAVQRLAEVPGLRADSALQIIAEVGPRAEVFARASNLASWVGVIPGEQVSAEQNASSTSPKGNRQMRRILSEAAHAAIKQKGNIFEVKFRRFLSRMEYQEAVWAVAHFMCRLVWKILHDGVRYEERGPAVNAQAAHRRNQRMIRHLKALGFSVVPTRGTALPA

SEQ ID NO: 356557 - protein, 410 aa, unidentified
METIVKRAAGLDVHKAQVTACVRVPGRGREREQEVAEFQTTVRGLLTLRDWLKAHRVTQVAMEASGVYWKPVWAILEDEFDCLLVNARHVKQVPGRKTDVTDAAWLCQLLEAGLLQRSFVPPKPIRALRNLTRYRKAQIGERQREANRLHKLLEDTGIKLDCVASDILGASGRAMLDALVAGTTDPQVLAELAKGKLRAKIPALKEALVGRFDRQHALIVSAILAHLDFLDEQIQLLSDEIEEQLRPFAAAIELLCTIPGVQRRTAEVIVAEIGTDMSRFPTDRHLASWAGQCPGNDRSAGKRRSGKTRHGSKWLDSALTEAALAATRTHDVYLAAQYQRLRPRRGHGRALGAVKHSIITGCWHMLTTGELYRDPGGDYFSRRDPERATRRLVAQLERLGHHVTLEAAAA

SEQ ID NO: 356558 - protein, 345 aa, unidentified
MTQYKRVGIDTSKAVFTLHGIDQHDRPVLRINLRRAQMIPFFKRLPPTVIALEACGGSHYWARELTGSGHTVRLIPPQYVKPYVKRGKNDRNDAEAICEAAGRPGMHCVPAKSVAQQAQGMVLKVRETLIGQRIALINTVRGHAAEFGIIAGKGTGQIVPLLSAIEQDTAIPSEAAEMFKLLGQQIAGLDARIKEVDTKLNAAHKASELSQRLVTIPGVGPITALTMAVEIDPAMFESGRHLAAWAGLTPKERSTGGKQRMGGISRAGNERLRVLLVSGATSVINVARRPGSHQMTDWLRALLLRKPRKLAAVALANKIARTAWAMMKSGETYRRPSATTDAVAA

SEQ ID NO: 356559 - protein, 343 aa, unidentified
MQTVTTIGLDIAKSVFQVHGVDAAGNVIIRRQVKRRYFLAFFAKLPPCLVGIEACATSHYWSRELKKLGHTVRLMPPAYVKPYVKRQKNDAVDAEAICEAVTRANMRFVETKTPEQQSCLMLHRTRHLFIRQQTAVINAIRAHLAEFGIVAPVGRNGVQELLDVVADASDERVPEVARACLAALGAQLRMLKAQILEFDRLIMAWHRSNETSKRLDAIPGVGPVLATALVGSVADPKAFRSARDFSAWIGLVPKQNSSGGKQKLGSISKQGDRYLRSLFTAGALAVIRYAKIHGTKHRPWLAALLARRPTKVAAIALANKIARMAWAMMARGGRYKEPVALAA

SEQ ID NO: 356560 - protein, 346 aa, unidentified
MGKSITDLSSVTTVGLDLAKLVFQVHCVDASGRVVVAKAIKRNKLLEFFASLPPCLVGIEACGSAHHWARELIKLGHDARMMPPAYVKPYVSRQKNDATDATAICEAVTRPSMRFVVIRSLENQAALMRHKAREMLVSQRTQLLNGLRGHLTEVGVIAAQGPRHARELAGLIEACDENIPIEVREALAELVHQLHRLDEAIARLDRTIVKIARKDETARRLMSIPGFGPITASAMAASVQDASSFAGPREFAAFLGLTPKQNSSGGKQRLGRISKMGNRNLRKLLVVGAHAVLFHRKRHTDPLRMWAKKLMEKKPFKLVAVALANKMARIAFAILRGKTTYREIPA

SEQ ID NO: 356561 - protein, 442 aa, unidentified
MSWMGTAPYVEQGCVPVKLCGKPPSVTFLKEVWCDMFYVGIDIAKNLHEVAILSDSGELAGTSLKIANTIPGAQKLLDHLAKAGVAADNAVIGMEATGHYWLAIYSFLVGQNYAVKVINPIVTDAYRNMSVRKAKTDQIDAVVIAKVLRLGEYKEAPTANEQTLALRQLCRFRAYEVDLCSDLKRKSIALVDQLFPEYAKLFSDTFGVTSREVLLNYSTPEELSQISTRKLTNLLDKASRGRFGKDKALQIKDAAVHSLGITIATDAFAFQLRQLLEQISFVEEKVEQLDLEIAVYMKQTDSFITTIPGIGPVLGAVILSELGDISRFEDAKKLVAYAGIDAAVNQSGNFEGTEVHMSKRGSPYLRRALYTAASVAVFHDPELSAYYQRLRQRGKHHSVAVVAVARKLCYFIFSVLSENRPYEVRLHNAATGGTEPAQLALE

SEQ ID NO: 356562 - protein, 359 aa, unidentified
MIVIGADSHKRTHTVVGVDQVGRRLGERTVKTTSDGHLALLEWSAQWPEVTFALEDCRHLTRRLEQDLLAAGQRVVRVPTRLMAAARRVGRQPGKSDPIDAEAVALAALRQPDLPVAELDGPTREVKLLVDYRRDLVRQRTRVVNRLRWHLHELDPALQVPSRGLRRYKVLEELTVRLAGVEGTVARLARRLLARCRELTVEINALEAELRSLVRRLAPTLLAVPGCGVLGAAMILGETAGAGRFRSKDAYARFTGTAPIPVWSGDRRGKMRLNRGGNRTINTALHMIAVTQIRGIGPGQAYAERLMARGKTRTEAVRLLRRRLSDVVFSALRADEQARSTSTQTRYSAAAKAASARAA

SEQ ID NO: 356563 - protein, 349 aa, unidentified
MKIIGCDFHPGYQQIAMWDKATGETLERALSHEGKEEVRAFYAGLEGPMRVGIEASGQSQWFERMLGELGHEVWIGDAAKIRASCDRKQKTDRRDAELLVKLLDEDRFPRIWVPTPAERDARQLLLHRHKLVRMRTQVKNQLQALALNQGVQRKWKLWSEAGRKQLEALSLMPWASRRRAELLVLLDQLEASVGELDRAAAEQANTRPAARRLMTHPGVGPITALAFALTMGPADRFRRGKQVASYLGLIPTEHSSGGRGQRLGHISKQGNPFLRGLLVEAAQSAVRHEPEMRRAYQRLAQRKCRALAKVAMARKLAVRLYWMLREEVDYAQLLQGSHAGQPESFRGRS

SEQ ID NO: 356564 - protein, 368 aa, unidentified
MPSVTSKDPGCIHLGMDTSIDAIVVGILAPDDQTPAVDRIFNDEPSVRRLIARFPDRSVLAACYEAGPGGYGLHRLLTSLGVSCDVVAPTLIPKGSSDRVKTDRRDAIRLARLHRAGELTPIRVPSPAEEAVRDLLRVRADLVAGRKRVQQQISALLLRHGRIWRTGKKWTQPHRAWLARQTFDEPALNTALSAYRSALTIRESEVTALEAELHALAANAAMAPLVSRLACYRGIAELTALTLAAEVIDWRRFATARAFMSYTGLTTAEYSSGTRTRRGAITKAGSASLRTALVESAWSYRARPAVGYRLQVRQRGATADTIARSWAAQQRLCGKFHKMTAAGKTPVVAATAVARELAGFLWAEMTTA

SEQ ID NO: 356565 - protein, 481 aa, unidentified
MSQPKKHSPKPGQEKPAAGQGKRGGKRKGMCLEDRPILEPNAAGIDIGAREIFVAVTPDRAEDPVQVFSTFTEDLERMAQWLVSCGVSTVAMESTGVYWIPLYDVLEKHGIRPCLVDARGMKNVPGRRTDWHECQWLQFLHSVGLLRAAFRPDGEVCAVRSLMRHRNDLVQMTNQHIQHIHKALTQMNVQIHHVIDDITGVTGSAIVDAIVAGQRNPLELAKLRDPRIKASEETIVKSLKGNWRREHLFTLKQSRQMYRHYQEQITACDAEIEKMLVAFQPRVDPQEKPLPPDRKKKKHHRRQKKGALNTGFDLRTESYKLFGVDLTQVPGLMLMVLTLFSEVGRDMSRWKTAGHFVSWLALCPDNDITGGRVAWREMRRVHNRAGELFRMAAYSLHHDRSPLGDYLRRMKSKLGPPGATTATAHKIAIIFYTMVKKQVEYDATMWAERDAQREKRFEAKLKRQAQQLGYKLVPIEEKPAA

SEQ ID NO: 356566 - protein, 346 aa, unidentified
MPIVGGLDIHRKQITFDYVDTVTGELQRGQVAPADRSHLAGWLSRRFAGRSDVEFALEGCTGWRYVAEELARAGAVAHVGEPADTAALRGRKRHAKTDRTDSRHLRQLLCDGRLPECWVPPSHVLECRALLELYRDLRVEHTAWVQRIHAVLFHQGAQQLGAGGLRTEQGLTELRAIAAAQLSAAGQLQVATALDMLTTLDEHLDAVHRRLLHAARHLTGAKVLTARLYGVGPITALALTCWLGGADRFSSTRKAVRFTGLDVTVYCSDGKRSPGHLSRQGPAVLRWCVYEAGKTHARTSAPDHRYYAQVKERIDGKRAAISEARKIVRQACHILTELGDDALSAA

SEQ ID NO: 356567 - protein, 346 aa, unidentified
MTILKQVAGIDIAQKELVVSLGRLDQELTLEIFDYKVFPNNPKGFKALIQWAEKQFKNDVKIRYVMEATGVYHESLAYYLTDNGSEVSIVLPNKISNFFRTLDVNTVTDKTASQAITRFGLERKLEVWQKPKPIYRDLKQLTREREQLIADRTVLKNQLHAENAEAFPNPSSIKRVNKRIRLIDQQDLEIKAEIAALVKTDTELVKKINTITTIPGVGKLTAVIALAETNGFELIKSKKQLVSYSGLDVKLKDSGTSVKGTPRISKKGNRHLRKAMHMPALSAMRFNDQHKALFVRLVSKHGIKMKAAVAVQRKILELIYVIFKTDKPFDKDYILAAKQITPIQNS

SEQ ID NO: 356568 - protein, 343 aa, unidentified
MNDTTTIGLDTAKSVFQVHGVDATGETILRRQLKRRQVLAFFAKLPPCLVGIEACGASHYWSRELTKLGHTVRLIPPRYVKPYVKSQKNDATDAEAICEAVTRPNMRFVPTKTREQQAILMLHRTRHLLVRQRTSTINAIRSHLAEYGIVAGVGRNGVEALLKIVSDEQDDRVPAIARNCLMALGVQLEMLKRQVLELDAKILATHRSNELSRRLEAIPGVGPCIATALVASIADPGAFRSGRQMAAWIGLVPKQNSSGGKDRLGGITKAGDRYLRSLLMLGALSVIKRAKQLGYTRRPWLAQLMARRPIKVAAIALANKIVRMVWAMMVRGESYREPVALAA

SEQ ID NO: 356569 - protein, 324 aa, unidentified
MIDGILGIDVSKNTLDVSIAICTKVRSKSFANSSDGWRLLLDWLIAQNIQRVHACLESTGRYSLGIAYALYEAGHVVSITNPAQIRDFARTKLGRNKTDGVDASHIREYCELFKPSPWEPPTQAHRRLGELQTIRSGIIAGLTEWKNRKNSGIVDAVAQALADATISHFTSQLGAVDEAITRTIDNDCDLRSKRDLLLSISGVGETLAGVVLAELPGPDVLRSSAEVVAYAGLNPRQYQSGTSVVRATRISKIGNAVLRAALYMPALSAMRYNPAIVALVTRLKSQGRLKPKQIVVAAMRKLLVLCFGVLKTRRPFDAAVAMGC

SEQ ID NO: 356570 - protein, 457 aa, unidentified
MSAPKKVKTKSTRKASPQLPTLHPHAAGIDIGAREIWVAVPPGSDPKPVRGFDTFTDDLLKLRDWLLACGVQTVAMESTGVYWIPLFQILEAAGLEVCLVNARHCKNLPGRKTDIQDCQWLQYLHAVGLLRGSFRPPEHICAVRSMLRHRNRLVRCAADQVRLMHKALTQMNVQLQHVISDLVGVTGEAIVQALLAGERDPVQLAKLKDYRIKASHDTLARSLRGDWRPEHLFTLSQSYQTWQHYQKQITACDEQIELQLANWDARVDLQAQPLPPPRTTHRTAQRNEPQFDARTDCYRVLGVDLTALPGFQAPTALVLLAELGPDFAQKFPSAKHFASWLGLCPDNRITGGKIMSSATRDVKSRVAETLRLAAQSLWHAQNYFGELYRRWKARLGGPKAITAMAHKLARIVWHLLKHRQAFNPDVFRKEEEKMRRKKLARLQNTAAALGYRLIEAQ

SEQ ID NO: 356571 - protein, 416 aa, unidentified
MRIVYTRCCGLDVHKKSISACLLVPDEKGGTRQEVRRFGAMTRDLLLLSEWLAANQVTHVAMESTGVYWKPVWNILEEHYTILLVNAQHVKAVPGRKTDTKDCQWIADLLQHGLLHGSFIPPSPIRELRDLTRMRASLRQDHTSVANRMQKVLEDANIKVAAVATDWLGVSGRAILSRLLDGEEDAEKLAQLCRGRLREKIPEMQMALEGRMTQHHRWMLTLLREQLEFLEKQIARLDTRIQDHLCQYQKAVELCITVPGIEAVAAANIIAEIGVDMQQFPSAQHLASWAGLCPGNHESAGKRLSGKARNGCVWVRRSLCQAAWAASHGKNTYLSAQFRRLAARQGKKRAIVAVTYTILIILFHMLKNQQPYRDLGADYFDRRNAEQLKRSLIRKLERLGLQVTVQSPVSSAIETA

SEQ ID NO: 356572 - protein, 411 aa, unidentified
MNPVVGLDVAKGESQVQAYLERKKPYKKSFKVKHDLDGLASLLDFIKEIEDILGERPPLVMESTGHYHTPVVQYFGDKGYLIIIVNPLISYKAKSSSLRKVKTDIIDANHLCELYYKEDLEPYKKRGIQLMNLRHLTRQHDNITGMFVQTKLQFHAVLDQVFPEYSKVFGDLYSDVSLKTLQVFPTSEDALKADTEILATKIKEFCNTRSLQWANKQAEKLITAAAQNPFQKTLYSSLALSLDMYISMLFEHKKHLSMLENEIDALAKSLEESKIIRSIPGIGEKIAATIISETGEIERFNHPKKLVAFAGLDPSVFESGTFKGTYNRITKRGSSRLRQALYMAVKCAIRDCRKQKTTDEILPRNKRLRAFYDKKREEGKPFRVAVIACANKLLHWIYALLKNKTPFQDLT

SEQ ID NO: 356573 - protein, 331 aa, unidentified
MKKLHFLYFVGIDVSKLTFDVAIVNDETTKSFLFDNTLKGVKAFLRLLKNLRMDLNDTLICMEHTGIYGSLLITKLLETEANFCVEMSLRITRSLGIQRGKNDKIDAIRIAQYAVKNCNEMEMYRPIPEILEKIKILIKAREQLVNFKADLNKYPNEAKRFAPELGKLAEKQIRKTNKCLDDEIKRIEADLQAFILSDEKLNTTVGLVTSVTGIGIMTALYFVIFTNFFTRYQDAKQLACYCGVVPFEHTSGSSVQKRSRVHHMANKTMKKHLHMCALSAVRHDPELKIYYKRKADEGKNKMLVLNNVRNKLVLRVCAVIKRQKPYQKRVA

SEQ ID NO: 356574 - protein, 339 aa, unidentified
MRYFIGLDVHSNNTVIAVLDEKGKRVYSRRVKNFIKLVLEELEPFKGKVQAIALESTFNWYWIADGLRDQGYQVHLANPSANKQYEGIKHTNDFSDAFFLAELLRLGILKEGYIYPRRERAIRDLLRKRLMLVRQRTAHILSFQSLYNRVKGCSFGGVMYVKRLKEDEMDDYFEDENFALAAKANIASIRFLTQQIEKLEKTVLKKIELLPEFEKLKTVPGIGNILALTIMLETGDIRRFPKVGNYVSYCRCVPSERSSNKKKKGENNRKNGNKYLGWAYVEAANFARRYCSKAKRFYQRKSAKTNNIVATKALAHKLARASYFVMRDRVDYEPERFFG

SEQ ID NO: 356575 - protein, 361 aa, unidentified
MTICIGVDLHKTQFTVYARKGDGFFAKYVTDEKGYRGFLDQLAKWCTAGDCIRIGVESTGNTRYFKNRMEREGHEVKVINTLKFKIVTESVKKTDRHDATTIAEFLEKDMLPEARLCSEESEQVRRLLKVRRTLVRAVVTVKNQIHGLLCGMGMQDAKASLQSKRGRRKIQDALLRASGLVVQPLFETIDRLEENVKLMEREIEALTKDDPTVELLRTIPGCGPITAWTIRAYTDDIRRFNSYKKYSSFAGLAPWVQCSNTTEHYGRITKRGPEELRTALVQLVLGMRRSRKAATWRIMERYVAMKQDKGPGKSIIATARKLSKIIWYMLTKGESFRPELMVDKKLHEKAEAMRAILRQSA

SEQ ID NO: 356576 - protein, 354 aa, unidentified
MIIIGVDFHPEFQPIALLNTTTGEVEEKRLAHPEEAEKFYRALAGAGETVRIGMEASGHARWFERLVAELQFDLWMGDAAEIRTKRVRKQKTDRQDAQLILSLLLEDRFPKIWVPSWENRDLRQLLWHRHRMVQARTRVMNQLQAVALNEGLRCKKKLWRERGRQQLESFGLAPWASRRRRDLLELLDRFNPAIAELTQAIEREVENCPAAQRLRTHPGVGVLTALAFVLILGDAERFHCGKQVASYLGLVPLEDSSGNRRRLGHITKQGSSILRFLLVEAAQVAVRSLPEWRSKYFHLVLRRGRKIAKVAMARRLAVQLFWMMRKEWNYEQLKKFGSHAGQPGNRHGVQSNTE

SEQ ID NO: 356577 - protein, 355 aa, unidentified
MNGPKHQKEKRSMEHFGGLDVSVNETSVCIVDETGRVVREVKVASEPDALLQALKNNTYRFRRIGLEAGPLSQWLYSAFAEAGLPVICVETRHMRAVLKAQINKTDRNDARGIAQMMRAGLYRPVHVKTLRSQKLRMLLTHRKLLQSKAIAIENDLRGTLRNFGLKVGVAGAARFEARIKELVADIPDLAGMVEPLLIVRRVLREQIAVLHRRLLVIVKDDEVCRRLMTVPGVGPVVALTYRATIDVPARFRNSRAVGAVLGLTPCKYQSGESDYTGAISKCGDEMMRVMLYEAAQILLMRSTRWSWLKAWAMQIARRRGMKKAIVALARRLAVIMHRIWVDGTEFCWTREAAVA

SEQ ID NO: 356578 - protein, 399 aa, unidentified
MNSVGIDISKGRSTIAVMRPFGEVVISPFEVRHTGSELSKLARQLKSLDGETRVVMEATGNCHASVAKLLHNAGLYVSVVNAKLVHDYGNSELRRVKTDRKDAVKLANYGLDRWLTLPRYITRLLLKNCYRQYRQYSKVQTVLKNNLISLLDTVCPNANRLFSSPIRGDGSEKWVDFVAEFWHCRCVSEKSERAFTSKYLRWCRKHGYNFSEEKAHTIHAETCGHIDVIPKSETTKLLMEQAVAQLRATSAALAALKHEMQSLASMLPEYPVVMGMFGVGPTLGPQLIAEIGDVRRFYSKKALVAYAGLDAPPNDSGDVTGRHKSMSKIGASSLRRTLFLVMSVYLQTAPLDEPVYQFMDRKRAEGKPYRVYMMASANKFLRIYYATVKAYLESLEHTV

SEQ ID NO: 356579 - protein, 344 aa, unidentified
MTIVTRAVTGGVDTHGDVHVAAVLDEVGTLLGTDSFPACTSGYVDLTRWLRHFGAPAKVGVEGAGAYGAGLARHLASEGIEVIEVDRPNRQARRTQGKSDPLDAVEAARAALSGRAHGHPRGRDGVVEAIRVLVVAKRSARGARVRAINQMRHLIYSAPDELRLRLKALSITELVATASALRPKRCGDPVMAATQAALRSLARRVHALGEEMRLLEQLLQPLLEAAAPALLSVRGVGPDTAATLLITAGDHPERLRSEAAWAHLCGVSPLPASSGKLIRHRLDRGGDRQANSALWRIVMVRLACDPETQRYVERRTKEGKSRREAMRMLKRYVAREIYAYLRAT

SEQ ID NO: 356580 - protein, 430 aa, unidentified
MKSNTQNAKIEAITEKTLVLGIDVGSEMHYARAFDYRGIEYSKKPFKFSNTEAGFVTFKEWILDLKERHEKDKVVPGMEPTGHYWFNLGKFLQDNEMKPVLVNPHHVKKSKELDDNNPTKNDRKDPKVIAGLVREGRYMIPYLPDGVYADLRTASNIRFQLQAELTRIQNRISRWFNIYFPEYKTVYGKPDAKSGMLILKAAPLPEDILTLGIDGVNQIWRDAKLRAVGKARAKTLIEAAEHSVGSKEGAVSARMEIRMLLEDYESRNTRLQEVMVLIEELVRKIPMAEKLLEIKGVGIRTVSGFLAEVGDISRFNNPKELQKLAGLALVENSSGKHKGETTISRRGRKRLRYLLFEVTMSLVSKNQEFRELHNYYTTRRLNPLKKMQSLMAIAAKLIRIFYAMLTKGVDYDPKKMVSDIRRPAAYLQAA

SEQ ID NO: 356581 - protein, 484 aa, unidentified
MHLSSPVRLLGIDLGITSDHTAVVVDGAGSICARRRARSTVASLAALEAAALAAVPDAHLVVVVEPTGPAWLPIAVFFGRRGHTVLRVTSAKAADLRRFLSRHAKSNGIDAETLARLPLVAPSGLVPVEFGSPARASLDRRVRAVARLTAEIGRRKNRIRALAQAMVPTIGAALSEGLNHTDLAVLERYADPRALLAAGPARLTRLIATTSRGQLGQAKAQALRTAAAEAVALWDGDSAAALDDLAAEVASEVRLVRAAETERTRHEHARDAAFAHVDPAGLAASLPGLGPVGTTQLVAVMGRPGRFPNAGAFKAFTGLTPRASETGQTDRKHQPMTKAGPRALRSQLVQSADTARKLDPQLAEVYHAQMTQRGATHRKALCVVGARLAERAWLTMARGEPYIICDLDGRPVTPEQAKRLIAERFTVSPEVRRRRRSTKKAGKAPHTALKAQGKSQREAGHEATFPAASLKAPPSTVNLASRPT

SEQ ID NO: 356582 - protein, 348 aa, unidentified
MAHFVGLDVSVKKTSVCVVDDAGTVLCERKVPTEPDDITVLLTSIGGEYVRVGIEAGPLSQWLVNGLAEAGLPVVCVETRHMKALLTAQQINKSDRNDARGIAQMMRVGLFKPVHVKTLAAQEHRMLLTSRKLIQRKLLDIECDMRGTLRNFGLKVGMVSTIGYEARIRNLVEGFPRLAAIVEPLLTVRRVMRQQLAALHKMLLDSVRHDPVCRRFMTVPGVGPVVALTYRASVDQPHRFLHSRAVGAHAGLTPKRHQSGEIDYDGGVSKCGDTMLRAMLYEAAQSMLTHSKKWSWLKAWAMRVAQRRGLGRAIVALARRLAVILHRMWVDGTDFRWSNSATAVTVAG

SEQ ID NO: 356583 - protein, 414 aa, unidentified
MTDNTCCCDTPVTRVAIDIAKKYHDAKIKRSDGRIVYLRFENSLTGYARLITAISSSGEKVVVAFEPTADYHRNIAWWLQGRGIECRLVSSLACARAREMLFKTWDKNDRKDTSVILYLMEQGLSSPFFDPLLNNIMDIQEISNTYYQISLARTRSLNSLVNHYLTLYFPEAEQFLHQSRTEWFCQFLLRFPTPRTITSIRKSLFVKEAWDIIGRKQYKQQFLEQLYEIARNSIALPLPENCQAVATFKLQIRRYIELTLQRLQLEKMAESYLQERADYHHLRSLPGIGPVIAMMILAESGDLNRFAHYRQYLNFCGFNLSASQSGEKCSSYRLSKRGNARLRYAFWLAATVAVRMQENTLRNKYERYIREHGDTPDQRRKTVVAVATKLARIAHSLVKKDVDYQRYFDISHGT

SEQ ID NO: 356584 - protein, 420 aa, unidentified
MIAAVIERCAGIDVGRKNIDVCLMVGEAQAEPTQQTRRFSTLNEDLERMRQWLKENHCTHVAMESTGSYWRPIYNVLDDGQMEVVLANSQHVKNLRGHKTDRNDARWLAHLLRHGMIRPSFIPNRETRELRDLTRRRKQMVGCAADERNRVQRVLQEANVQLGTVLSDVFGQSGLNMLDALMNPDATPEEIADLAVRQARKKIPLLKKALEGHRMTDHHRKLIRHSMEHLAFLEEEIAELDKEISEHVKAHAALSKATDLAQSVTGIKETAAASIIAETGADITQFPDGGKLSSWVGTCPGNNITGGKRKSAPARKGNPWARRVLVECAWSATRKKDSEAQRRYEHLKHRHKHKPSLVATAHLLTLQLYETLATGKPYVENPQAELPEGKAQRLVRHHSRRLKKLKHWLSNHRQRCGQTT

SEQ ID NO: 356585 - protein, 393 aa, unidentified
MICVGIDVAKDKHDCFILSSEGEVLADVFTIQNNAEGFDRLLQTIRRCARPEDKIKVGLEATGHYSYNILGFLLDKGLPTYVINPLHTNLYRKSLSLRKTKTDRVDARTIAAMLMSDVDLKSYTDTVYHNEELKSLTRYRFDKVHERAKLKQSVSRLVTILFPELEKLVPSLHLASVYALLSEFPGARQVAGAHLTHLKAVLYDASKGRYGRDMAVTLRDAARCSVGSVMPAKSLELRHTIRLIRELDAEIEDIEAAIQSMMDEIQSPITTIPGIGVRMGAMILAEIGDFSHFDSPDKILAYAGMSPSTYQSGQLSLSGTYSHMEKRGSRYLRYALYNATKYVCLWDPTFAAYLAKKRAEGKHYNVALSHAAKKLVRLIYALEKSRQPYHIAA

SEQ ID NO: 356586 - protein, 349 aa, unidentified
MSDKLNSAIAVIGIDIGKNSFHVVGHDKRGTIMLRQKWSRGQVETRLANLPPCLIGMEACVGAHHLSRKLRTLGHDARLMPAKYVRPYSKGQKNDFRDAEAIAEAVQRPTMKFVATKTAEQLDLQALHRVRERLVSQRTGIINQIRAFLLERGVTVRQGLRFLRAELPRILATPCDALSPRMLRVIEDLAGDWRRLDERIEGLSSEIEVLARRDAGCERLMSVPGIGPIISSAMVAAIGGGDAFSKGRDFAAWLGLVPKQISTGDRTILGKISKRGNRYLRVLFVQAAWAVLIKPRSWDRHGLKPWLEAAKKRLHHNVLAIALANKLARIAWSVLAHGRTFEASKIRAA

SEQ ID NO: 356587 - protein, 321 aa, unidentified
MEHGIVVGIDVAMLKFDAAVWLGETKYKTKVFANTPKGFELFIAWLQPYQGAHLCMEATGSYYFALATFLYGSGWTVSVVNPFQIHSFGKSEIIRNKTDQVDARLIARFCASHKPQPWQPAPLNERQLLALVRRLEGLREMRQIELNRLGVADNVVKPSIFEIIEALTQQISETEKKIKKHIDADPVLRQRKALLTSIPGIGDILSASLIGYLGDMSQFGNSGKVVAYAGLNPYQKESGKWQGQSHISKRGCANLRKALYMPALTAMTFNPVVKSLRDRMRARGQKGKVVVCAAMRKLLQIAYGVLKSGQPFDEKVPLAKT

SEQ ID NO: 356588 - protein, 451 aa, unidentified
MAQAKPQVIDDEEHERVYERVAAVDVAKDTGMVCARTPHRSRPGARQSTVWTVKARMASIRALGRQLKADGIEMVTLESTSDYWRIWFFVLEAAGLAVQLVNAAQARNLPGRPKTDKLDAMWLARLTELGLLRASFVPPAAIRALRDYTRARTRLVQERTRCFQRLEKLLESALVKLSSVASKLTTESAKDMMKAMIAGERDPHTLAALARTRMKAKHDDLVEALDGMFDAHHGELAGMLLDQIAFLDERVIQLTARITAAVAAMPAAWGVDADGTTGPDAGTGPDAAALPAVARLAEIPGVSPDLARSIIAETGLDMTRFRTAAHLVSWAGLCPQARQSGPRTRSGKKNQGDSWLRNSLGQAATGASRTATFLGERYGRIARRRGKAKAQVAVARSILTIIWHLLADPAARYTDLGASYYQTRTDTDRKLRNHIRQIQALGFEVTLTKGA

SEQ ID NO: 356589 - protein, 346 aa, unidentified
MKKFYVGIDISKSKLDVAVYDAEKKKIANKFVIKNEADGIQSLFSTLKKEKINLEDCWFCFEHTGHYGFSLCYELEQICCVYSIIPALQIKLSLGMTRGKNDQVDAERIAMFAYTFRDKLQPSKMSSDCFQKIKQLLTYRNQMVRISTQLQNSLKSHQAVCQLTHFDYVVDEIKKQIIEVKVKIESIDELLMSEIKRDKTLENNFNLLKTIKGIGPIISIYLLVLTQNFESFTDARKFNCYAGIAPFEHSSGSSIRGKTKTSSLRNKTIKSLLFNGANAAALHDKEIKNYYKRKKEEGKHHQSVMNAIACKLVYRAFSVIKRQSPYVTLYAQNFKKIWFSLRIHKE

SEQ ID NO: 356590 - protein, 420 aa, unidentified
MARTVEIVYPVCCGMDVHKSFIVACIAITNESSHTEHHIRRFSTFTGDLRRLADWLASYNCRDVCMESSGKYWIPVFNALEKTCNVCLTHPKYVKAIKGKKTDKKDAKWIAELFKCDLVRSSFIPPPDIRQLRDLCRYYVKLTGFASSEKNRAQNCLTTCNFKLDDVFSDIFGKSATRVLNALLEQGNGNFSLDGLVDGRCKSSPEQIRAALDGELNPSQAEKLSLIRQHMSNINALQTSLETLIYSLAAKFQPQIDLLLTVPGISAKLTAIRILAEIGADMSVFETAKKLVSWAGLTPQNQESAGKKKTTRIGRAGAYLKPLLVQIALACGKSEKCPELKNKFLALKKRRGGKKAVIAIARKLLTAIWHMLSKNEAYNAELYRKADKPPVTREFTTAQALAFLRNKGFLIVDAETGEVA

SEQ ID NO: 356591 - protein, 382 aa, unidentified
MQTIDTVNPTILLAIELSASTWLVAARVPGLEKPHLHRIDGGDTTALLALISSLQARAARRLDATISVVCCFEAGRDGFWLHRLLTAHGVVCHVLEPTSILVNRRARRAKTDRLDAEGMLRVLAAYLRGDHQTCSMVRVPTPEEEDAKRTHREREKLVQEKLRIENRIEALLFTQGIRKRPSLRSWERDLAALRTGDGREIPRHLRAELDRLRRRLIMTLELIREVEAERDQAAKTKPQDQACHKIAALSRIRGIGENFAAVLTREVFYRSFDNRRQIASYVGITPMPYQSGGMDRDRRISRAGNPRARTTMIQLAWLWLRYQPGSELAEWFRERVGTLAGRTRRIAIVALARKLLIALWRYAETGVIPAGAEIRAEITVAA

SEQ ID NO: 356592 - protein, 352 aa, unidentified
MIVLGADTHKSSHTIAAVDGATGELLGDRTIGVGVRGFAALLTWARGLAGGRVWALEDCRHVSGALERFLIARGERVVRISTRLMAGTRRSSRERGKSDQIDAIAVARAALAAGIDTLPTAALAGPELDLRLLVDHRERLVRTRVALNSTLQWNLHDLWPELTLPGGALFSKKWTIKIARRLARAEQTMRVRIARDELRRLRELTTAIKALEAEIRELVTAIAPQLVAEPGCGPLTAAKLVGEIAGADRFGSDAKLARAAGIAPIPVSSGRNDRHRLDRGGNRQINAAIHRIAVTRARCDPHTQDYIARKKAEGKTNRDAIRCLKRHIARRVWNLLRTPTPITGKALTQSIS

SEQ ID NO: 356593 - protein, 331 aa, unidentified
MQSIIFIGLDVHKATISVAVAQGERGGEVRHWGTILHRPDDVRKLVEKLRTGGRKLHFCYEAGPCGYGLHRQLLEMGQDCIVVAPSLIPVKAGDRVKTDRGDAIMLAKLHRAGDLTAVWMPDTAHEAMRDLVRARATAIRVSGKARQHLQGFLLRHGRIYPGKKGWTVAYRRWLTTVRFQHPAQQIVLQDYIDAVADAEARVARLTAQIAELLPEWKLAPVVEAVQAMRGVAFIVAVTVAAEVGDFHRFYSPRQLMAYLGLTPSEHSRGSSQRRGGITKAGNSLARRALIEGAWSYRMQARVTRSGTGLGVRLPRARLRPRRRRTDSPSSR

SEQ ID NO: 356594 - protein, 341 aa, unidentified
MESIYYIGLDIHKKTIAYCVKRSDGVLIRQGTVFAERKALLEWISGLPGSWIGAMEATMFTGWVYDFLKPHALELKVAHPEMLKVITAAKKKNDQADAERITDLLRVDLLPECYMAPEELRELRRILRYRNMVVRTAVGMKNKISGLLMEVGATYDKRRIHGKRYFNSLLERVEDVPPSVKELLALSRSNLELFTAVQKKLLKTLKDNNLIRQRVERLMSIQGVGEVLALTWVLEIGEPSRFNSSRQAISYCGLCSAQHESAGKQYHGPISKKRNRHLQTMLIEAAKLAPRWNDQLAMVHAKELARGNRNRATLAVARKLVKYLLAVDRKNSDFEPLQQAV

SEQ ID NO: 356595 - protein, 339 aa, unidentified
MDISTLGIDIGKTWFHIVGLNRAGKPIMREKRRRKDLMPFLANVPPCLVGMEACPGSQQLARSLIAQGHQARIIPAQFVRPFLKAGKNDFNDAEAIAEAVTRPSMRFVPVKNVEQLDVQALHRARDRFVHDRTAIVNQIRAFLLENDIPIRTGRTHLRRELPDVLEDAQNRLSDRLRSLLHRLWQHWETLELQIKEIGAELKLIANTRDDCRRLLTVPGIGPLAATAMVAAIGHGTQFTRGRQFAAWLGLVPRQHSTGGVPKLLGISKRGNNYLRRLLIHGARSVYMHMHRERFALGRWIDELQLRAHRNVVVVALANKIARICWAVLTSGTVYRAAAA

SEQ ID NO: 356596 - protein, 322 aa, unidentified
MLAPVLGIDVAKQRIEVALLVDAKVRNRSFKNTPDGFESLALWLRKWGVERVAACLEATGNYGEDVALYLHEAGHMVSVVNPARIKGFAQSELIRTKTDKIDAGVIARFCLAMNPELWIPPSLEVRALRALSRRVDSLIGMLTQEKNRLGSAHESILPLIKGHMDYLDAEIEKVRDEIADLIDADPDLRHKKELLASIPGIGKATIPVILAEMDKFERFKHVRELVAFIGLAPRETLSGSSIKGKPRLCKTGNARLRKALYMPALVSIKYNPLMIAFYDRLKEKGKNGKVIVCAVMRKLVHLIFGILKSGKKYDPNYKSAIA

SEQ ID NO: 356597 - protein, 376 aa, unidentified
MREKLRFLGLDVHAETIAVAVAEPDGEVRSLGTIANREESVRKLIRKLGPVDQLRACYEAGPTGFVLYWQLTQLGVECAVVAPTLVPKKPGERVKTDRLDALKLARSHRSGDLTAVWVPDEDSESLRDLVRAREAAKQDQLRARHRLTKFLLRTGQRPPLGLKAWTEKYVEWIQQVHYTHPAREATLLDCLNEVQHMEQRVKRVEQSILEVVKLAPAPVQAVIQGLQALRGVAHISAVTIAAELGNISSRFESARKLMGYSGVFPSEDSSGERIRRGGITKSGNAHLRRIVVESAWSYRHRPSIGARLRKRQEGVPAQITEIAWKAQNRLHKRYMKLMAAGKDQRKVMTAVGRELMGFIWAIGVKAEEACMQQQAA

SEQ ID NO: 356598 - protein, 400 aa, unidentified
MVTQETPQVFLGLDVGKSEHWACAITSGRKVIWNKALPNDEAKLVDMYTRLQEHGPLLVVVDQPATIGALAVAVAQHMGVPVAYLPGLTMRRIADLYPGDAKTDEKDAFIIADAARSLPHTLRELTEADVDEATLGMLTGFDLDLSRQVNQVSNRIRGLFTQIHPALEKVLGLRREHDAILEMLATWPTPEKLRKAGRARIDAKLKKHGARRHAAWTEEILTALAKQTVTVTGTQAAGIVIPHLARQLIHLHAQRADVAQEVEKIVVHHPLYLVLTSMPGVGLRTAAVIIAELSGKTFTSAAALASYAGLAPTTRQSGTSIKSERVSHSGNKRLKRALFLSAFAVIRTDPESRAYYDRKRSQGKRHNQAIIALAHRRLGVLYAMLRDGTLYNTPETVLMA

SEQ ID NO: 356599 - protein, 332 aa, unidentified
MNHFIGIDVSKSTLQVYIPIKDENINIDNTKKSLKSFYSKLKKYYRKEIHKLVFIFEPTGSYSSRLKHFCSEKNIKAFIVNPRQSSNFAKALDNRSKNDIIDAKMLHKFHVMAKDGDIVVPLIDEVQESLGSMLGYYKLLQKQRNAFSNYLEALEAKEGKSPIEKKLRKEIKKLKDQEEDMIKEMKDLILLDTKLSQAFECIISFKGVGDVSAIVLLHLFISYPEANRQEITALSGLDVIETSSGTSIHRRSRISKRGNSLYRGILFMPILSSICNNQYMKAFYDRLKENGKHSTAAQIAVMRKVILITHSLYKNHQKFDDRLYEKRVGWNT

SEQ ID NO: 356600 - protein, 345 aa, unidentified
MHIASIGIDLGKTTFHLVALGERSQVLVRKKFSRAQLLAYTANLPSSRIGLEACAGAHFMGAALREQGHEVRLIPAQFVKPYRKSNKNDFIDGEAIAEAVTKQNMRFVPIKTQEQLDVQAMHRVRDRLVQRRTALINEIRGFLLERGITFPAQAIHLRKNLPTVVEDAEHNLTPRLRWLLDRLWQEWKQAEVDIETVTDEIERISNEDERCQRLRQIPGFGPLVSTAMVAAIGNGAAFGRGRDFAAWVGLVPRQYSTGGKAKLLGISKRGNIYLRRMLIHGARAVLFRIKYDTAGLGQWVHRLGQRAPRNKVIVAIANKLARIAWAVLSSGKDYRHQPLPQRAAA

SEQ ID NO: 356601 - protein, 385 aa, unidentified
MNFIGADLHKKSITLCVMDEKLKVLARKTLPCDQADQVVEFFRQFRPFRVAVEATASYTWFVELVRPLAEEVVLANPGKLRVIAESIKKTDRLDAQVLAEFLARDQIPRAYMPTPRQRQHRALVRQRQYLRERMSSVRCKIRHVLADYNADRKDLFSAKAGWGYIKGIELGDADSFVIKQLWTEWEEHQARLLKLTGKIKAFVAKAPQREAEARRIVKSAPGVGEVTAEVVLSEIGDVGRFGNAKAICAYAGLVPRVRQTGGKKSPDLPITKQGSGLLRWALVEAAWRLVGTSPRWSAFFARLRKRKGSKRAIVAVARKLLCVLYAMLKTSTPYKVVATEPSPPEPARPTRRRPVRKSTAEAAAPGGRRRPARASTAKQEQTATT

SEQ ID NO: 356602 - protein, 427 aa, unidentified
MPHRIAGIEVHKRMLAVVVSDVEVADEYQFERRQFGSNPAQLRALAEWLLEQQVQEVVMESTAQYWQPVWGALEQYWKPPCQKSEGARPRSGSLHLAQAQSNRARRGRKRDFLDAERLVRRFVANELVLSFVPDPEQRLWRTLMRRKYQMTRNRVQLQNQLEALLEEAHLKLSSLVSDLLGASARRMLRALADGETNAVALAALADYRLQATPAQLQDALGACAGLDPTYRRLLSMALEELQLLEKQIGQLEQEMADRLRPHQDAVQRLAEVPGLGADSAQQILAEVGATAATFPSEGDLASWVGACPGDEESAGRSYSHRSPKGNRQMRRLLNQAANAAVKLKGSIFALLYRRYVTRLGHNVTIGIIAHRLCRLIWKILHQGIRYEERGPAASEQSKRQRARRMIRELRSLGYRVELPNPQPAVPA

SEQ ID NO: 356603 - protein, 357 aa, unidentified
MSYIGVDLHSDKFTAAFRDKTNKDILKSYYIDENEIDNFKKGLKKNDYIFIEASTPTFAFTDLLKDRVKKTIVIDPFKFRAIADSRKKTDKIDAKQLARMGKYHIEGDKKFLPEVYVVEKRIRKLRSLFTTYRLLNKEITMIKNRIHSLFKQNLKPYSKKHIFDEIMTGLKPIDLDEEYKIQVEVLFDVLSKLEEKKSEIKKKILLTGEPFIADIDILVSISGISVFVALGLISDYATIERFKNAKQFSKYLRSTPKSEESNKKVKTGKTQKNGRKLSIELMLQSINHFRRESLFIDKFYRRLKKGKGGCKARIAVVRKMFVAIYFMLREREYYRYMNKKLHDKKMREYKRFLVKNK

SEQ ID NO: 356604 - protein, 361 aa, unidentified
MKTAKKVKTITKIAVRKAVAAVGIDLGDRWSHWCALSPTGEVIERGRVKTAAEDLSELAAGWSGVRVAIENGTHSGWISRTLEKSGCLVWVANPSRWRGTAHSSKNDANDAEALARVVRVDPKLLFPITHRTQQQQEDLAVVRVRAQLVRARTMLVNTARGAVKSVGARLPATDADAFHNTSWQSVPEALREALKPLYQSLAAITEQVRVLDRQIEKLSKQKYQATMLLRSVPGVGPLTALTYILTLGDTTRFTTSREAGAFLGLRPRQRQSGSRNPELGIAKNGDHYLRSLLVECAHYVLSRGPDSALKRWGLGLAKAGPPAKRRALVAIARKLAVLLHSLWSNGELYCPFPADASPVVA

SEQ ID NO: 356605 - protein, 430 aa, unidentified
MTKFHSTPPDAVLVAIDMSKHRQEVLLERPEGGRRRRMTVMATKADYDRLADDLTATGRPVIVGFEATGNYHRTLAHRLLSAGFELRLISSVALARTREALHNGWDKNDSKDAQVILHMLKIGATQRYVDPLAAGINDLQEMSKTHEAISKAKTQTWHRILTHYLPLYFPEIERFAGNSRSDWFLALIERFPTPGSITSIGREAFTEQAWPLIGRKVSKARVVNDIYETACASIALPIDEDSTAVAMFRMVIAQARTLIQQRNEIERIAHDALATNSDYQLLRMIPGIGPINALTILAEAGDLRRFSHHRQFLKFCGLDLATYQSGIFRGRTKLSKYGNARLRRTFWMATQVAIRQPNNSFRDKLSRYVDGHADDPDRRRKAMTALTAKMARVVHAVIKTGTEYRPFVERADTRWKDPSLLCREGATATL

SEQ ID NO: 356606 - protein, 387 aa, unidentified
MPQVNDLSRSLAAFDPISTLVVVVEMSKTSWLASGVVPGVERQPLKKLEPDATALLRLIERWRIEAVRAGRPIRRIALAYEAGRDGFWLARWLIARGIEAHVIHSASVAVSRERKRAKTDRLDAAMLMRVFLGWLRGERGHCGMVAIPTMEEEDARRPNRERESLVNERSRIVNRMKSALARLGIRGFKPHLRKAPERLAGLRTAEGTGLPANIIEEFRRDMARLALVREQISSIEKTRAERLERAPDTGPHAMVRLLARVIGIGIETADMLVREILSRNLRDRRALARYAGLTGSPDESGLKSREKGLAKAGNARVRRGLIQLAWRFLMFQKDSALARWYRTRTEGPSGARKTTMIVALARKLLIALWRLVTTGEVPDGVELRPAA

SEQ ID NO: 356607 - protein, 335 aa, unidentified
MSQYYAAVDLHSNQSVLVLIDERDQQVWKGRLVNDLELILLALAAYREQVLAVAVESTYNWYWLVDGLKEAGYKVELVNPAGVKKYEGLKHQDDVSDAYWLAHLMRLGILPTGYIYPRERRGLRDLARKRLRLVSQQTSHILSLESLYNRCVNRRLRASQVGRVEAEELEDPYWAQAARSSQAVLESLRVEIGTLETQLKAALERDREYEILQTIRGVGEVLSFTIWLETGDLGRFPQVGNYASYCRCVGSEKTSNQKKKGEGNRKNGNKYLAWAWQEAAVGAIRWQSKARSFYQSKKAKKGAWVAHKALAHKLCRAGYFMLRDQVEYSSARLFG

SEQ ID NO: 356608 - protein, 388 aa, unidentified
MRQTDDLSKSITPFVQGNTLVAIIELSLSSWLVAGVVPGIARQPLKKLEPDEAELLRLLQRWRDEAVKSGCAIERVVVAYEAGRDGFWLARWLRAHEIEVHVIHSTSVAVSREHRRAKTDRLDTAMLLRVFMGWLRGERGHCGMVAVPTIEEEDAKRPHRERENLVGEKTRIVNRMKAALIRLGIRGFKPELRRAPLKLDGLRTPEGLPIPPNTLDEIRRDLARLAMVREQIDLIEQARLERITQGPKTGPNAMVRLVASIVGVGVETADMLVREVLSRDLRDRRAVARYAGLTGSPDESGSKRREKGLARAGNARVRRGLIQLAWRFLGFQKDSALTQWYRARTDGVKGASKTKMIVALARKLLIALWRMVTTGEVPEGVRLRPVEA

SEQ ID NO: 356609 - protein, 425 aa, unidentified
MIYVGLDVAKDKHDCCILMENGEMAEPVFRVQNDRAGFELLFSKIRSYVVNDGLNSDQTEVSESKSALGSVPESVSHSNPVSSSNWKSRVRVGLEATGHFSYNLLHALLEMQLPTYLINPLHTNFFHKGISLRKTKTDRVDASVIASMLMHDNLLQPYTNTAFFAEELKSLTRYRFDKVLDRSRLKVSIARLVTILFPELDKLLPNLHSSFVYSLLYKYPGAAYIAEADPECLLELILESSRGHHGKETADAIHEAASGSIGISSASKSLELKCTIRMIRVLDEEIESIEAAIRSIMDTLQPPILTIPGISYRMGAMILAEVGDFSRFPNADKLLAYAGLSPSTYQSGQLVSTYCHMEKRGSKYLRYALFNTARYVCQWDPSFGAYLQQKLNEHKHYNVAISHAAKKLVRVIWKLQTSNKVYRAA

SEQ ID NO: 356610 - protein, 474 aa, unidentified
MLQPWARALPASITLTGDCLLARVQSAIKIRIILAHHPSLAGKVVFTLKKADLLSTLFVGIDISSRENVVAIMDFESTKPIASFAVPNNEPGAEKMAKKISEFFTPESGLRRLVISLESTSFYGVHIANYLSTCRILMPFHTEVYCLNPKSIANYKKSYIGLGKNDYVDAFIIADFARVGRITTKPWRGCQYLALQRLTRHRLHLVKALTREKTYMLSNIFLKFSEFTMLDAEEQPFSNEFGATASAVLTEFLSTEEIVDMPMEKLVEFICEKGRNRFTDPQKTANLLQAAARNSYRLDKCLYEPLTVAIASSFTMISTYNAEIKKVNKAIETTIKGLNPNAFLSLQSIPGIGPVMAAGIMAEIGDIHIFKSQESLAKYAGLVWHENQSGQFKADDTPMSKAGNSYLRYYLLEATSHIRIHCPEYGEYYSKKYAEVKTHQHKRALALTARKAIKLIFGLLARNQLYSRNRVGQA

SEQ ID NO: 356611 - protein, 338 aa, unidentified
MKTHVGVDLHQRFCYLTAVDASGKTCKQGQVVNEGEALRAWLRQLPGPRQVVVEASGFWPAFRRAVAGEQERLVMVHPRRVKAIASAKLKNDRVDSETLAHLSRCDLLPEAWMADEATQQLRLRVRLRITLGRERARAKNQLQAVLHQEGFKKPVTDVFGKRGRAWLSGLELSAAGRLAVETWLREVDHLDGELAGQTRELERLARADARARFLQTVPGIGAYAAMVIVAELGDVERFGSKRALASYAGLTPVVRESAGKRQRGGITHQGSNTLRWMMLQVAQVAARCSPGARSYYAGLRARKPAQVAKIALARKLLTVVWALLRHGECFDEELFSRG

SEQ ID NO: 356612 - protein, 356 aa, unidentified
MSIIAHSHPFVVGVDTHARNHVYAIIAATTGELVDTTDFPTTSAGIKRAIAWVARRTGADLAVLWVIEGAASYGAVLAGAVGSQGYQVVEAARMDARSHRGVGKTDTLDSQRIAHAVLPLEQTQLRRPRLNDGVRAALRVLVCAREAMTGERTRAVNSLTALTRVNELGLDGRKALTRAQITEVSRWRARDEELALSVARAEATRLAKRIHDLDSELKDNTKQITGLVKVSEAAPLLEIKGFGPVTAATCLTVWSHNGRVHSQAAYASLAGVNPIPASSGNTIRHRLNRGGDRSLNKALHMVAITRMTHDEETLKYVHKREAEGRTTKEIRRCIKRYLARRVYRVFNSNTAALNNA

SEQ ID NO: 356613 - protein, 364 aa, unidentified
MNATAALPIVGVDLAKTVFQLAIADANWRVVDRQRLTRTQLERWFANRAVGLVVMEACGSAHHWGRWLSALGIQVRLLPAPYVRAYVKRNKTDAADACALLEAARCAEIVPVRVKSVEQQALQGLHRTRSLWMATRTSRINALRGFWREFGIGIAQGARLGLEQIGRVLADPKSAIPELIRDTMRLLVEEIRLLETRVSELERTLTQTARQSPTCATLLTIPGSGLLTATAMVAATSGSVAHFGDARHFASWFGLTPKEFSSGSTRRIGRISKRGDRYLRMLLTHGARSVLRAASAATRAGRSVDALRAWALAVQGRTNHNKATCALANKLARICYACLRDSAPYGEVRRPEKKITRSVFPIPT

SEQ ID NO: 356614 - protein, 359 aa, unidentified
MRETMTYVGLDVHARSTHAAALDVLTGELRRARFGGGSEEVIGWLAGLPQPLRGCYEAGPTGFALYRAAEAAGLTVEVIAPSKTPRAAGDRIKTDRKDAELLARLLLAGQLKVVTVPPPAFEAARHLARAREQVRGDLMRCRHRVSKLLLLHGRVYDGGAWTKTHRRWLEQQRFEQVATELAYLDTLAAVDGLVARKVALDERLSRLAREGEWWPTVARLRCFRGIDTLTAFVLSLEIGDFRRFQRPAQLASWLGLVPSLDQSGESRRQGAITKTGSGYARRLLVEAAWHYLPRPSAGPTIAERRVGQPDHVIQIALRAQRRLHRHYHRLRERGKPANVTTVAIARELACFLWAAAVAD

SEQ ID NO: 356615 - protein, 376 aa, unidentified
MKTKTNTNTKPTTPSVVSTPPPAPVAAGGFTIGLDLGDRSHYACVLDATGEILHEGPMLNDRAALTLLLTKYPAATVALEAGTHSPWISRYLTSLGATVIVANPRKLHAISRHERKCDRRDAVMLARLARADAALLHPLEHGSAQAQHDLLGLKLRDSLVRTRVNLINTVRFTLKSLGHAVSNPSSEAFHKNIVTAVPADCLPVVQPVLTVLALLTAQIKILERGLVARGKKDYPVTQRLQQIAGVGPLTALCFVLKIGEPKRFGRSRDVGPYLGLCPGRDQSGGTDKQLRISKCGDGLLRRLLVSAAHYILGPFGPACALRAYGQHLAGTSAREKKRAIVAVARKLAVLLLSLWKHGTDYEPRVPATPVLVLVPA

SEQ ID NO: 356616 - protein, 336 aa, unidentified
MTHASSHLRGRDTSMNQVSSELVFVGIDVSKARLDVCIMSETPTLFSVDNAATGVAELVSRLRPLAVTRIVIESTGRYSRLVAAELCAANLPVCVVNPRQARDFAKSLGRLAKTDTIDARSLAEFARVAGLRLSEKQPENQAILDDRITRRRQVVQMLVMERNRTEGVTDQLTLDHIKKVIHLLEQQREDLDREIAKLIDADDNWRNRRDTLVTVPGIGDNTASILVTDLPELGKLNREQIAALVGVAPINRDSGTLRGKRSIFGGRPHVRATLYMATLSAMRFNPTIKVFADRLKAAGKPFKVIAIACIRKLLTILNVMLKNNQPWSPPCLAKNA

SEQ ID NO: 356617 - protein, 431 aa, unidentified
MNEVDRNRLEEFRQLRREIRHSQEYLIVGIDVAKDRHHAFFGTATGKTLLKRFVFDNTYEGFRKLLDQTEAVRVQHQLSKVVYGMEPTANYHKPLGEGLIELGRRVVLVSGVMVKRNRESLDGRWDKHDEKDSANVADLVSQGKCLYYEYPSPELRGLRGLLSLKKRLKKQEQSYRVRIRNQLIAQYFPEMDRYYERLGAEGLSIVKWCLAASQITQLDVDLFIERVTSRRITGEKRRRLEAIWEKAGESIGCEEVPGVDHEGKVLVEGLKQIREMIKETDKKIEELCKQFPEYPYLLTIPGFGPDVSAKVLGAIGDPDRFEKGSQVVKLAGYDLSADRSGKDSDKAIPEISKRGKADLRYALYQAALVASSQNRELMIYYTNKIRGREREKGIHTKMRVKLAAKLLVIAWTLMKKKEAYNPAYLNTDKGE

SEQ ID NO: 356618 - protein, 340 aa, unidentified
MSDITTIGLDLAKNVFQVHAIDGAGNVVARKRLRRGQVLAFFAGIPSCLIGLEACATAHYWARELIALGHEARLMPPSYVKAYVKRNKHDLADAEAICEAVRRPSMRFVPLKTVEQQSALMMHRARDLLIRQRTMLVNALRGHLAEFGLIEAQGLHKVTRLITIVMDETDRCIPDTARQVLKVIVHQIEDVQTGIAELETQVLAWHKNNPVSQRLATIPGIGPVIATAIAATVADPKTFRSGREFAAWLGLVPRQNSTGGKTRLGGISKRGDGYLRRLLVNSSHTVLLCSKAAKTDPWLTSLLSRKPRLVAAVALANKTARVAWAIMSRQDTYRHVAAAA

SEQ ID NO: 356619 - protein, 344 aa, unidentified
MKIAVLGIDLGKNVCSVVGLDASGAVVLRRRVRRDTLIDLVAKLPACIVGMEACCGAHHLGRLFATQGHNIRLMSPEYVRPYVKAQKNDDRDAEGIAEAATRPTMRFVEVKTEAQLDMQTLHRSRERLVGERTALINQLRAVLLERGIVVPQGKRKFEQYLVAMMDEHDGEGLSARMRMLVADTRAQWRELDRRIAAFDAEFARWAKENEDARRLATIPGVGVTISTALIAAIGKAETFEHARDLAAWLGLVPRQATTGGKPRLMGISKRGNKYLRTLLIHGARAALPHLAEKGTTLGRWAKNLLSRVHQNVAVVALANKLARICWAVLRSGQKFAAKEAPLAA

SEQ ID NO: 356620 - protein, 376 aa, unidentified
MNKSSAKVCRFVGLDVHAETIAVAVAESEGDVRSLGTIPNRGESVARLVKKLSADGPWEACYEAGPTGYALYWQLSKFGIACMVIAPTLVPVKAGDRVKTDRRDAERLARSFRAGELTAVWVPDAAHEALRDLVRARESAKRDELRARHRLGKFLLRQGRRPPEKMRPWSKTYMEWVKHHVQFEESAQQWTLEDYVNEVEHCSQRIKRLEGLIDLAVETAPAAMKEVIAALQALRGIAKVSAVTIVAEVGQLSRFPTARQLMGYSGAVASEYSSGERTHRGRITKTGNAHLRRIVVEAAWTQRFKPILSKPLKLRQEGLDPEVIEIASKSMHRLHQRYMRLLAKGKSKQQVVTAVAREMLGFIWAIGVAVELKNAA

SEQ ID NO: 356621 - protein, 336 aa, unidentified
MVQIYGIDLGMSSFDVSFLSESGSVRHLSGVKNTVHGISKFLLSLPSSAVLCAEHTGVYGDLLLRLCTLNRTCLCFVPGYQIKHSLGLQRGKADPLDACRIREYAERFYDLLRPCFYPGEEMSELQELYRTRSLLVESRKRLDTLNIGDNCKSSVSLAAGHARRAVLAELNTQISGLDHEIEALIQNSSEFSRNYQILTSIVGVGPVTSCELIIKTENFRKLDTAKKCAAYAGIAPYPKESGKMKCGHKISPMGDKQLKTLLFLCACSAKEHNKEIRLYFLKKHKVEKKHFFVAMNNIANKLLRLIYSLIQKQQTYDRDYIQRDPRCVVISDTNKC

SEQ ID NO: 356622 - protein, 433 aa, unidentified
MTIDSAAVRATKGRPMKPWTEITHYAGFDWARDHHDVVIVDRQGQIVADFRIEHSLAGWQAFRDQVKPYPVLGVAIETNQGTAVDHLLSLDGTIYPVNPLSAKSYRERKAPSGHKTDRLDAWSLAEALRQDGQQWKALQPLDPLTQQLQLLCRDEIGLIEQRTALINQLQQAMVEYYPAALAAFEDWTQPFCWDFIIQFPTPEKLADAGRRRWEKFLHTQKLWRPETASKRMEIFQNARQFCGPAAVTSAKSLLALSLAKLLNALQLQLDQYRQQIEALFKQHPDHDLFGSLPGAAQTLAPRLLGEIGGDLQRFEDTEALQCVAGTAPVSFQSGQIHRVHVRYQCNKMLRHTVHLWAQCSLRVCPWADVYYRQKRAEGKSHACALRCLGQRWLKILWRMIQTRQPYDADLHARNQKQHGSWVLTLMKPAPQAG

SEQ ID NO: 356623 - protein, 321 aa, unidentified
MHKYYLGIDVAKAKLDCALRMPDGKYRNKVVVNTPAGYTTLSLWLNKHGATLPHVCMEATGVYWEAVAEYLASQNMIVSVINPAQIKAFGASRMVRTKTDRVDAQLIAAFCVERCPDAWKAPSPAEQALRAMVLRLEALQNMRTQEINRLDVAREAVKPGITSHITWLDSEIETLIARIRDHMNNDPDLKDKQALLDSIPGLGERTIAVLLAFYADIQRFDNARKAVAFAGLDPRQHESGSSVKAKPRMSKVGHSFLRKALYMPAMVTLYRTAWGKSFYARLTASGKPPMLIIGAMMRKLVQVAFGVLKSGKSFDPALHGS

SEQ ID NO: 356624 - protein, 342 aa, unidentified
MSIVILGIDLGKNSCSIVGLDADGAVVVRRRMRRDGVIAFAAKLPLCTMAMEACCGAHHMGRSLAALGHEVRLMSPEYVRPYVKAQKNDDRDAEAIAEAATRPTMRFVELKSEEQLDVQTLHRVRDRLVGERTSLTNQIRSLLLERGHIVAQGHARLRLLLGELLDSDADALSPRMEFLLRDMRTRWEELDRRIAAFDAEFAAMVRTDDRARRLTGIPGIGALNATALVAAVGSAATFGKGRDLAAWLGLVPRQVTTGGRPKLLGITKRGSRYLRKMLIQGARSAMPSLAKSDTAIGSWLRGLLARSHSNVAVVALAAKMARTVWALLHHGRSYKATPVTTA

SEQ ID NO: 356625 - protein, 315 aa, unidentified
MEAMVERCAGLDVHQKTVVACVLYGSLDKRPKKETRTFPTNTSGLLSLSDWLTSMQVTDAVMESTGVYWKPIWNILEDNFQLILANAKHVKNVPGRKTDVKDAEWLAKLLRSGLIESNFVPPEEIRDLRDLTRYRTRLVHNCTQEKNRIHKILQDANIKLTSVLSDIFGVSGRRILKAIINGEKIEEYTLRKLVHPQTKASIVEISEAINGRLRRHHRYMLQQHWEHMEYIEQNIKELEEQISYCLKPCQREVELLDTIPGVNKNGAAILIAEMGVDMSVFKSHKRLASWAGVSPGNNESAGKKNLVRLKRAIRH

SEQ ID NO: 356626 - protein, 314 aa, unidentified
MEEEIGFEQLVSRGCGLDVHKKEIVATIRGTGLRKQTRSFGATTRSLTELKDWLLENEVTHVAMESTGVYWKPVLNILEPGGFIILVVNARHIKYVPGHKTDKKDSAWICKLLLGGLLKGSYVPDVSQRNLRDLTRYRRKLVGQQSAEKNRMIRIFEDASLKLSSVFSDVTGATCTRIIESIIGGKEDPEELIELCTHKNLKTSREEIKEAIRGHMTDHHRFMLSIIRKDIKNIQSLINELDKKIENLMIPYADEIARISEIPCVGEQTAKELIAEIGTDMSVFPTEDHLASWAGMCPGNNESAGKKKFPHHSR

SEQ ID NO: 356627 - protein, 480 aa, unidentified
MAKRSKSAFERLGCNRLNRNQRRELSRRIAAGDPGLSIVNPNAGGIDVGNESHFAAVPSDRDPDPVQEFGCWTADLNRMAKWLVACGIDTVAVQATGVYWMALDDVLTKHGVRVVLVNARNTKNVPGRKSDVQECQWLMKLHTYGLLRDSFRLSKEMESVRTIWRLRDRHVAEAGRAVQHMQKALTERNIQVANALSDITGVSGMKIITAILDGERDPYRLADLRDKRVKASREEVARSLEGNWRKDVLFELRQALDYYRFIHEQMRECDRQREVYLGKLPSALEIPVAAENPEASRKRKTKKARENEPRIPHLEAELTRICGVNLCSIDGISIITAQTIIAEVGTDMSAFPSEKNFSSWLGLTPGKDISGGKVVGKRRKVKNRVAAALRMAATTLLRSESYLGAKYRCLRRQLPSKKAAVKAMARHLAVLVYRMFTYGQAWVDRGAAHYHQKRTELDMARLESIARAKGFQLIPMAQAN

SEQ ID NO: 356628 - protein, 355 aa, unidentified
MDNTKYIGMDVHQATISIAVLNSSGKLVMESVIETKALTIVQFVRGLRGDLHVTLEEGTWAAWLYDLLKPHVREVLVCDPRKNALLKTGNKSDRIDARKLAELLRGGQLSPVYHGEHGVRTLKELSRSYLAISGDLARVMTRLKAVYRSWAIACAGKQVYAPRYRAEWLGKISEAGVRRRAEFYYQQLDELSALRQQVRRELLAESAKHEASKLLCQIPSIGPIRAALLIAIVQTPHRFRTKRQLWAYGGLAIETHSSADHRYVEGQLQPAKRQVSLRGLNRNHNHELKNIFKGAAIIAATKAGPLQEFYAALVAKGIRPEMARLTLARKIAAIVLIVWKKGVSFNAQHLKSQTA

SEQ ID NO: 356629 - protein, 350 aa, unidentified
MIIIGVDFHPEFQQIASVDTDTGEFQEKRLTHREEAEKFYRALAGAGQKVRVGMEASGHARWFERLLAELQFELWIGDAAEICTKRVRKQKTDRQDAQLILRLLLEDRFPKIWVPSCENRDLRHLLWHRHRMVQARTRIMNQLQAVALNEGLRCKKRLWRESGREQLESFRLAPWASRRRQDLLELLDRLNPMITELTQAIEQEVEKCPEAQRLRTHPGVGVLTALAFVLIIGRAERFQCGKQIASYLGLVPLEDSSGKRRRLGHITKQGSSMLRFLLVEAAQVTARSIPEWRSRYFHLMMRRGRKIAKVAMARRLAIRLYWMWRKGWNYEQVVKFGSHAGQLGTGDGVH

SEQ ID NO: 356630 - protein, 387 aa, unidentified
MSQAFDVRRSGKPFDQSRSLVAVIELSQGSWLVGGIVPGLQRRPLKKLLPDKEKLLALLLRWRDEALKAGHEIDRIAIACESGRDGFWLVRWLRTQGIEAYVIHAASVAVSREHRRAKTDRLDTEMLKRAFLGWLRGETGHCSMVTIPSCEEEDAKRPGRERETLVSERTRLVNAMKSDLVRLGIRNFNPRWRKAAEQLEELHTAEGTAVPPNTLAKLRRDMERLELVMAQIKAIEAARLERLEQSPQEKPHAMVVLLARVVGVGIETADLLVREILSRQLRDRRAVARYAGLTGSPDESGSKRREKGLAKAGNARVRRGMIQLAWRLLRFQEDSALVRWYRERTANCRGAKRKTMIVALARKLLIALWRLATSGKVPEGFILRPAL

SEQ ID NO: 356631 - protein, 342 aa, unidentified
MEYYVGLDVSLKQTSICVVDQAGLVVREGVVGSDPEAISVFVRSKAPGAVRIGLETGPTSTWLWTELKRLDLPVICIDARHAKAVLKMQINKNDRNDAIGIARIMQTGWFKEVHVKDIDSHSVRALLASRALLVKIKRDLENHVRGLLKNLGLVIGRATFNVFAVRAEELIEDRPDLVAAVRPLLEARNAVEQQVSELDRKVMKLARRDAQVQRFMTVPGVGPITALAFKATIDDPARFARSRSVGAYVGLTSRRHASGEIDWSGRISKCGDGMPRSYLFEAAGVLLTRVPKWSTVKAWGTRLAKRNGLRKAKVAVARKLAVILHRMWIDGTEFNWSKEVAA

SEQ ID NO: 356632 - protein, 304 aa, unidentified
MRFYNTNHKQYCGIDLHARSMYLCVLSHDGKTLLHKNLPTDPDVFLNAIAPFREDLVVAVECIFTWYWLADLCAQEGIAFVLGHALYMKAIHGGKAKNDRIDALKIATLLRGSMLPQAYVYPAEMRSTRDLLRRRLFWVRQRGQLLAHIQNTHHQYNLPTPKARLAYRKNREGVAEHFADSAASKSVSSDIELAEHYDSLITKLELYLCRQTKLHDQDNFYRLRSIPGIGKVLAMTILYEIHDIDRFERVQNFASYSRLVKCEKSSSGKRLGTGGNKIEPSSFSQVRARASGRDLPLDRRGPDR

SEQ ID NO: 356633 - protein, 455 aa, unidentified
MAPRHKSNLAKKKSPFVLPTLRPHAAGIDIGARQIYVAVPPGSCPRPVRHFDTFTEDLHALRDWLLACGVDSVALESTGVYWIPLFQILEGAGLEVVLVNARHCKNLPGRKTDVQDCQWLQYLHSVGLLRPSFRPAEQVCAVRSILRHRDSLVHGAARGVNHLHKALTQMNIQLQHVISDLTGVTGLAILQAILGGQRDPQKLAALKDHRIKASRDVLAKSLRGDWREEHLFTLGQTFELWQKHQQLIAQCDQQIATMLAAFDTRSAKDAVLAPAKGSHKKPQRNEPQFLAREECFRVLGVDLTVVPGFGTPTVLVLLGELGPEFAEKFPTAKHFGSWLGLCPDNRITGGKIYSAKTRDVKSRVATALRMAAQSLGRAENYFGDLYRRWKARLGGPKAVTAMAHKLARVLWHLLKFKQEFDWKVFAKEEEKMKRKKLARLFTMAESLNYQLTPKP

SEQ ID NO: 356634 - protein, 499 aa, unidentified
MRHSGWEACDDPSGGLVLKREPRLEYSILSERASSLSILLTTKCFKMKEQNQISMDIVNPKAAGIDIGSRSHFVAVGQKEEHVREFGVYNEDLKAISNWLEENGIQSVAMESTGTYWQALYAVLLNDGFQVILCNGKFTKNIKGRKTDVQDCQWIQKLHSIGLLSGSFLPDLQTEQLRTYCRHRASLIDVAADTSKKMQKYLRLLNLRLDVIVKDICGLTGLKIIEAVCNGETSPEKLAELRNGNCKKSEQEMAKALQTNGRKDYLFGLNQEFKMYKNLQSQIKECDLEIEKLLHEQIDNDHNKKQHYTDPKIHKRVNKNTPKNIDINLMGYQYFEGVDLLKIEGFSHQTLLTLMSEVGLEGIKKFSTAKQFASWLRLTPNNKISGGKVLSSRIPKGSNRLKIALRNAANAIGNLKESTPLRDFFHRINFRKGRVSAISATARKLGVIIWNMVVKNIPYHNPKEYLYLDEKRKLAVQKRLQKQVENYQFSANDFNFTTT

SEQ ID NO: 356635 - protein, 350 aa, unidentified
MLIVGCDFHTRYQQIAMMDTETGELVERRLEHANGEARAFYASLPKPVLVGMEATGYAQWFERMLAELGHELWIGHASEIRAGVVRKQKTDARDALHLLHLLLEKRFPRIWIPTPAERDARQLLRHRHKLVCFRVSVKNQLHALAMSQGVCRKKKLFTAQGREELEKLSLGPWARRRCQELLGMLDQMNVVIEELDRAVQQQAESHAQAARLMTHPGVGPVTALAFVLTLGPVARFRRSKQVVSYLGLNPQEHSSGGQQHTYSISKQGNTMMRWLLVEAGQTAARLDPELRRLYQRLKFRRGANVAKVAIARKLAVKLYWMLRATSGGAQTAPMQGSSGGTLVPQVGSTF

SEQ ID NO: 356636 - protein, 340 aa, unidentified
MKLYGAMDLHSTNSVLVVIDEEDKIVYQKRLPNDLALILKELCVYQSRLEGIVVESTYNWYWLVDGLMEQGYKVHLANTAAIQQYEGLKYSNDDSDARWLAHVLRLGILPQGYIYPREERPVRDLLRKRSQLVRQRTMNLLSIQNLMTRNTGSSMTANQIKGLDKAQVDGLLPDADLSLAVKANWSVMCSADEQVELLEQRVTERVKLRAQFSFLKTVPGIGQILALTIMLETGDIRRFATVGNYTSYCRCVGSQKISNGKRKGSGNTKNGNKYLAWAFVEAANFAIRFNSKIKSFYQRKKAKTKAVVAIKAVAHKLCRACYHIMKDRVAFDVTKAFGQK

SEQ ID NO: 356637 - protein, 421 aa, unidentified
MIQVSHEAFAAFVGIDWADAKHDGCLQVAGSAKREYCQREHTPEAIDAWGTTLRMRCHGQPVALCLALNKGPLGSALRTYDFLVLCPIHPLTLARYREAFTPSRAKDDPTDAALQLALLLPQRDKLQPLNPQSPTMRALAQLIAPRRRVVGDTVRITNRLPSPLKNYCPHVLHGLQEKDTAIFCDFLSRWPTLKAVQLARRATLATFFRAHHVRYAEVIAQRIQASKAAPPLPTDAGVMAPHALLVQALVAQLRGTLQALADCDTAIAQRAQSHPDFPLFQALPGAGPVFAPRLLVACGEQRERYACAADLQKYAGSAPVTERSGTKSWVHWRLQCPKFLRHTFVEWAAESLRPSFWAQVSYQQPRDKGKAHQAAVRARAFQWIRILSRCWQERTPYDAAIYLQALHRRGASLSQTLAKAS

SEQ ID NO: 356638 - protein, 315 aa, unidentified
MSDAQPNVGVDVSQATLDVAVHPTGEQWQATNDDAGVRQLVERLSNLGPERIVLEATAGYELLLLAALANAHLPVVAVNPRQVRDFARSIGRLAKTDALDAQVLAHFAAAVRPQLRPLPDAATRELSAVLARRRQLIEMRTAEANRLATALERVRPDIREHMRWLDKRIKELDRELHDRLRASSVWRENDDLLRSIPGIGPVCSTTLLADVPEAGKVADKQLSALVGIAPLNRDSGRWRGKRSIWGGRATVRAVLYMATLSAIRLNPIIKQLYQRLIQAGKPRKVAITACMHKLLRICNAILRHRTPWRYQPLDS

SEQ ID NO: 356639 - protein, 475 aa, unidentified
MTSKRRTSKGKQTRVQKRHQKRTPPRQASAKSMPVMEANAAGIDVGAREMYVAIPPDRDSEPVRVFPTFTCDLEALADWLVERGITTAAMESTGVYWIPLYQILEDRGIRVCLVNARHMKNVPGRRTDWHECQWLQYLHAVGLLRAAFRPEPEVVAIRSVVRHRRRLVEAAGVHIRHVHKALTQMNLQIHHVISDITGVTGTAIIESILAGQRDAGELAKLRQPEIRADAETIRKSLEGDWRREHLFALRQSWELYGTYVRSIAACDQEICEMLGEHEPKVDPAKKPLPSDTKRRTKRKHQRTGDFRFDVRTEAYKQFGVDVTGIPGLEGIALMLYSEMGNDMNRWSSASQFASWTALCPDNDKSGGRILWTGVRQVKNRVGQLFRQAANSLHHSQTPMGGYLRRMKAKLGAEAGITAAAHKIARIFYAVVKNQVEYDQTTWHRQDLERQRRLEAKIRRQARGLGFQLVPIQPVA

SEQ ID NO: 356640 - protein, 521 aa, unidentified
MESVAAIFSLVARKRFGVFEDPVCETASIFRRLSQAASLSQGNQTMKKHKKTKPNPEAAKPLHEPKPDAAGIDLGATEIWVAVAPDRCQMPVRRFGAFTQDLLAILQWLLECGIRTVAMEATGVYWIALYQLVADAGIEVCLVNARHVKNVPGRKSDVRDCQWLQYLHSVGLLMASFRPAQIICQTRSIYRFRQNLLTQVGQHLQHMQAALDQMNIKLHHVINDLSGQTGMAIIEAILNGERDPLRLAQYRDRRIKATQETIAKSLEGDWRSEHLFVLRLAWENGKQVQEQIKKCDQELMQYTRQLEAKTMVAQPIVPVKIMSLNVEPGVPELTPAPAVRPAKPRKKTSKNEPDGPWRENLHRFFGVDLTLIPAISVLTGITLMTELGNDLSAFKTVHHFCSWLCLCPDNETSAGKVLHKSTRRSQNRVRQALRMAASSLHHDKSYLGDKYRRLRAKLGAPKAITAMAHQIARIIWYLITHQVAFDMSIFAELEKANQKRHLNRLNSAAHQMGYQLTPIAA

SEQ ID NO: 356641 - protein, 337 aa, unidentified
MKRYLGVDLHRTQITVCTRLENGRTYMRQWSLRELKLFAGQLRPDDEIAVEATGNTRLFYDAVVKQVARVVVVNPGQFKVISQSVKKTDHHDAELLALYLSKALLPEVRMKDQEHRNMSHLAQTRDLLVKQRSALKGKINNLLSAEGINLKRETLSSKKALNRVLTLPLSPILAIEVRVLVDQIHSLSGSIAELEELIEEEGPKLAGHQNLISIKGVGSVSAAILLSSIGRVGDFADPGKLAAYFGLVPRVQNSNETERSGRITKQGNKLARTTLVQCSLVAKKYSSYLQQFYQRIQRRRGGGKAIIALARKFLGVIYHTLKNNWVFEDFSNFVLAS

SEQ ID NO: 356642 - protein, 391 aa, unidentified
MIYIGIDVAKDKHDCFITNSDSEVLFKAFTIFNNLDGFNDLYQKIESVMDDVTKVKVGLEATGHYSYNLLGYLIDKGLPTYVINPLHTNLYRKSLSLRQTKTDKVDARTIASMLMSDVNLKSYSDTSYHNEELKSLTRYRFDKVKERAKLKTSVSRLVCILFPELEKLVPTLHMASVYALLSEFPSTKHVATAHLTRLTNLLSESSKDRYCKDTAITFRDAARASIGSNMPAKSLELKHTIKLIQELDSEIDEIENEIKIIMDGINSPILSIPGINYRMGAMIIAEICDFNRFDSPDKILAYAGFSPSTYQSGQLDGAYAHMEKRDSRYLRYALYNATKYVCHWDPTFAVYLAKKRAEGKHYNVAISHAVKKLVRVIYHLEKTKQQYIKAA

SEQ ID NO: 356643 - protein, 431 aa, unidentified
MSKYYDKAVIGIDVASEFSVATILAPNGYVFKKAFKFNHNLSGFKYFLEEIKKVENEFSMKPAIFMESTGIYHSTLFYFLLKNNYEAFIINPLITNSNKNKDIRKVKNDKKDSLNIAKLAKYEDIKAYSYFDISIFSLKSLCRDYYKLIDVRTTFKLKLNSDLRMIFPGYNKIFSDKTSLSSLALLKKYQSPNDILKAPKEDIIKIIYSASKKESWSHQIYYKLLKSASEAVELTIPSSALCVRILNSISMIETLNEQIKILTDEIEKLANSGEVPTSFKNNIKLIMSLKGIGLISTITLLSEMGDFNNFKNPKQLVAYFGVDPSVNESGKFKGNRNKISKRGSRIARRVLYIVALTAIRKKPNGEFSNKILYDFYHNLIETKKKKVAVVAIIHKILKYIFAVLRDQKEYECRNPKIHCKMFLGNNDKLVA

SEQ ID NO: 356644 - protein, 318 aa, unidentified
MQAEKTSACFVGIDVSKKTLDLYARPSQESWKVENKDFGPLLEKLQQLKPELIVLEATGGYETGVWKALNQAGFNVCREHPLKIYHHAKGRGKLAKTDRLDASTLAHYAECFANEMVQREFPSEAQQKLQQLIARRKQLVEFKTAETNRKQHPAILPEVQESCIQVIATLDEQIKLVDVSIRKLVEADEAWQRKKEILQSMPGIGETLASLLLGYLPELGKVNRKAIAALVGVAPYHNESGQFKGQQHIRGGRPEVREGLFIAALVAKKYNPEIQEFYDRLIQQGKKKKVALVACMHKLLRMLNAMLAKDALYSTERA

SEQ ID NO: 356645 - protein, 390 aa, unidentified
MIFAGIDVAKDKHDCFICNSDGEVLFKAFTIPNTKEGFDNLYQKILSVTEDLRKVKVGLEATGHYSYNLLGYLLDKGLPTFVINPLHTNLYRKSLTLRKTKTDKVDAHTIAMMLMSDVNLKSYSNTLYHNEELKSLTRYRFDKVSERAKLKQSIARLVNILFPELEKLVPTLHMKSIYMLLSEFPSAHHIANVHITKLTNLLYEASKGKYKRDTAIRFREAARNSIGSVMPAKSLELKHTIKLIFELDSEIKEIENVINSIMDKLNSPILSIPGISYRMGAMIIAEIGDFDNFSSPDKILAYAGLSPSTYQSGQKQNCYSHMEKRGSRYLRYALFNATRFVCRWDSAFGEYLAKKQSEGKHYYVAISHAAKKLVRLIYHLEKTGQSYKAV

SEQ ID NO: 356646 - protein, 405 aa, unidentified
MTSTYGVFVGLDVGKGEHHAVGLDPAGKRLHDGPLPNSEPKLREVFDNLAAHGPVLVVVDQPATIGALPVAVARACGHEVAYLPGLAMRRIADLYPGNAKTDARDAFVIADAARTLPHTLRQVDVGDDALAELGVLVGFDDDLTAEATRISNRIRGLLTGIHPALERALGPRITHTAVLEILARCGGPIGLSNTSRRKLISIATKHAPRMGARLVDELLAALAEQTVVVPGAAAADTVLPRLAESLKTVLEQRKALAAEVEGILDAHPLAEVLTSMPGIGVRTAARILLEIGDASAFASSAHLAAYAGIAPVTHRSGSSIRGEHPARTGNRKLKRAFFLAAFAALSDPVSRTYYDRKRAEGKKHNAALICLARRRCDVIFAMLRNKTHYQPTRPTTQPTAPPAAA

SEQ ID NO: 356647 - protein, 334 aa, unidentified
MKTKVAVLSNHSLMDKIKHFYGVDISKSFFDVVDQDGKHDQFSNDLKGFKSLLKFIQKDSLVVMEATGYYHYRLAQYLYEKGITVSVVNPLSVKRFIQMKLSKIKTDKSDAKAICEYGQANKVPLYTARNTVQAECLQLLSLQDLYLKQRTALKNKIHGEKALGIPSKTVSRSLVRTLKQLEKELAQIESRLESLVRKTQEDQLEQLTSIPGMGKKTAMFLIVLTDGFTSFENARQLCCFTGITPTIRQSGTSVRGRSRISKVGNRKLRNLLFMCSFTACKTNKACREIYERIVEKGKSKKLALIAVCNKLLKQAFAIAKSGTYYQENYMSKLA

SEQ ID NO: 356648 - protein, 378 aa, unidentified
MSKIRFVGLDVHADTIAVAVAEQGGEVRPLGVIPNRVEVIRKLVARLGPAKNLKVCYEAGPTGYVLYWQLTALGVACEVIAPSLVPVKAGDRVKTDRRDAVKLARSYRAGDLTPVWVPDATHEALRDLVRAREDARQDQMRARHRLNKFLLRHGQRPPADVKKSWTQKYMTWIKEQVHFEQPALEATLLDYVHEVEHMAERIQRLEKAITEAIEKLPPAMRAVVEALQALRGVAQITAVTVVAELGTLSRFPSPRQLMGYSGLTSSEYSSGNRIQRGSISKTGNAHLRRVIIESAWSYQHRPWVGGFLRKRQQGLEQEVKDIAWKAQWRLHTRYKKLAAANKKKPQIVAAVGRELLGFIWAIAVKTERKFPPCTARAA

SEQ ID NO: 356649 - protein, 313 aa, unidentified
MHEEVFVGIDISKDQLDAHVLPKGMHTTVKNDTQGIDSLIEILHAEPPMVIVMEATGGYEITVAAQLGLAGLPIAVVNPGQVRDFAKGIGKLAKTDAIDAYVLARFAQTVRPIPKPLPTEDEKQIKELVTRRKQLVDLRASEKNRLHRARSNRVQRSIQTVIAALDKEIEDIDKDVDDLIRKSPLWRETEELLRTFKGVGPITARVLMAKLPELGHVSRHEISRLVGLAPLNKDSGKKKGKREISGGRADVRSTLYMAAVAAITSNVVIKPFYQRLIEAGKPFKVAITACMRKMIVILNAMLKKKQPFQVVFS

SEQ ID NO: 356650 - protein, 379 aa, unidentified
MLYVALELGWDSWKLAFGVGPGSAPRLRQMPARDVTRLLLEIAEAKRRLGLPTDCLVVSCYEAGRDGFWLDRCLASHGVKNLVVDSASIEVNRRQRRAKSDRLDAQKLLSMLLRYAGGETTVWSVVQVPTAEQEDARQLHRELLTLQQEATEHTNRIKSLLATCGLSIEIDRHFPKKLKDLRQWDGTPIPGALRQRLLREFERMQVANRQARQLQQQRTKEVRENDSPAVEQVRKLLGLKGIGIGSSWLYVHEFFAWRKFKNRKEVGGLAGLAPTPYGSGQMNHDQGISKAGNKRMRWMAVEIAWGWLHFQPDSELSRWFMVRFGRGSSRQRRIGIVALARKLLIQLWKFLQTGVPPAGATLTEWQFKARTTARSLQVT

SEQ ID NO: 356651 - protein, 299 aa, unidentified
MSQEKYIGMDVHQATVSAAVRDRNGNLLMECILETKADTLLEFVQGLHGTLSLAFEEGTLAAWLHDLLKPHVNRVVVCDSRKAALLRDGNKSDRIDARNLSELLRTNQLKPVYHGEHGLRTLKELGRSYLTVSKEMTRTMNRIKSLYRSWAIPCPGTTVYAPRYRRQWLAKITEPGARMRAEHLYEQLDHLQPIRVRARREFLQESNKHDAVKRLRQIPSIGQIRAALLVALLQTPHRFRSKRQIWAYSGFAIETHDSGEYRYVRGKLTTQPRAHHRARSEPQPQSRPEEYLQRSSHLG

SEQ ID NO: 356652 - protein, 340 aa, unidentified
MDEYGGKQYVGIDLHRRRSVVVRMTPEGERIGSMVRIDSDPVELAAQIASWGEEPVVVLEATYGWYWAADVLAEAGASVHLAHPLGVKGFAYRRVKNDERDASDLADLLRMGRLPEAWIAPPQARELREQVRHRCKLVALRSGLKAQVHAVLAKQGVAVPMSDLFGAAGRKLIVDAGLDAPFHARVLSLLRLVDAFTFEIDLVGKRVTAELNHDRGFTAIQALPGVGPILAAVFVAEIGDVTRFARPQQLCSWAGMTPKHRESDTKVHRGRITKQDNKLVRWAAVEAVQRVHSGPLAGKKARLAVRRGNNIAKVAAARELLTLVYYGLRDGHIRALAKTA

SEQ ID NO: 356653 - protein, 344 aa, unidentified
MAPSPTTYRLFVGIDVAATSCAVSCMRPAAQPARATTIKQTPAGFADLQRQLLAIEPDPHAVLIVMEATGTYWMRLATSLSEAGFAVSVINPAQAHDFAKALLKRSKTDAIDAQTLAELGARLVPERWTPPPQVYTELHQRLVHRDGLVAARTQFRNQLHALVQQPIVIASVQTRLESLIATLDEEIATVEQEIASALQQDEAWAAAAARLATISGLGTLTIAWMLTTTINFTLTVTPDAAANYAGLAPQLRQSGSSVRGRPRVGHGGNARLRRALYMASLSAIQHNPVIKAFYSRLRAAGKPRKVALCAAARKLLRIAWAVATKDQDFDPAYAACSGREVAAV

SEQ ID NO: 356654 - protein, 409 aa, unidentified
MQECNVAAGKIETASSQVALSAASGQGAAKQYAAYIGLDVHKETIAVAVAEPGRGEPIYRGEIANTPKKVERLIAKLSEAYDGGLLLFCYEAGPCGYGLYRQLIASGHDCQVVAPSQIPKKAGERIKTDRRDALKLARLLRSGDLTGVWVPDQEQERMRDLSRARDDLKAQERKARQQLNAFLLRHGQHWPKGKSRWTPAHENWLAALKLDDPWQQVVLQTYIDAERAAGERVAQLNDQLMRALPEWSLAPVVDSLVALRGIDKLAAIVLLAELGDISRFDSPRQLMAFLGLVPSEHSSGGRRRQGAITLTGNSHARRMLIESAWSYRFPARQTKHLKAKASNASPAAKQIAWKAQVRLCGRYRTLTRAGKNTKLVCVAIARELAGFLWDIVRQEMPRLTPAQTPATSA

SEQ ID NO: 356655 - protein, 400 aa, unidentified
MLSIGIDVSKGKSTVCGMKPGGEIVYAPFEVQHTREGMLELVSLLRSSGEEVRAVLESTGSYHCPVVAALLENGIFVSVVNSLRMKRFCSQSIRKVKTDRIDAMQIALYGLAYWQELQPTKLPEDTYRELQLLARQYYQMTSMLIKAKVDFNAICDQVLPGMQELMNDHAGRHKLSDFVLRYRHTTHILEMGETRFRKDYCKWAEKKGYRNCERMAALIFATAQNGIPVLPNAPSTQIVITEAIRVLHTVEASRDAILTQMQALAKTLPEYSLVREMPCIGDTLAPRLIAEIGDVRRFHSKRALIAYAGIDAPPYQSGKFCANNRHISKRGNRYLRKTGYEVMQSYVMHKPANDPIFTFIEKKRGEGKSGKLAMVAGLNKFLRVYYGKVTELYRSLPAIE

SEQ ID NO: 356656 - protein, 310 aa, unidentified
MTIAHRFIGIDISKMYLDIFDDRFGSIERIANTPAAIAAALTRWQRADTRVIFEATGSYDRVLRRALDAAGIACVRVNPARARDFARATSTLAKTDAIDARLLAAMGRALALVPREAGDPLRERLAALHRRRDQLVANRGEERNRLAVTEDDDVRTSIAAHIVWIGTEIRRLQVAIDRLVASSAELAALCDRLQTAPGVGPVTAVTLMALMPELGNRSGKTIAALAGLAPFNHDSGALRGQRHIRGGRRRVRQALYMAALTAIRKAPSLAAHYRKVLARSGHAKVGIIAVARKLLVALNAMAKTGQPFAT

SEQ ID NO: 356657 - protein, 357 aa, unidentified
MAEGSWVGLHVHARTTLAGVLDAASGELSLQRLQPRSEETIAWLLSLAQPVRVAYEAGPTGYGLARACARAGIACTVAAPSKIPRAPGDRVKTDRRDAERLARLLRLGELVAVRVPDPVGEAARDLVRAREDARGDLMRARQRLSKLLLRRGLVYEGSAWTRAHDTWLRRQRFAGRVLALAFEESYGAVAQAKGRRDALDQAIVELAGEPPFCEVGGRLCCLRGVSTLTALALSVELGEWERFRPESLGPFLGLVPSEDSSGERRRQGAITKTGNTHARRLLVEAAWHQRRPLRTSAALERRRQGQPAPVRARADESARRLHQRWHALEGRGKRRTIVAVAVARELAGHRWALATMK

SEQ ID NO: 356658 - protein, 434 aa, unidentified
MEEITDEPLYRDRVCGIDIGKAGLVATIRVPSDANPARRAAETRSFGTTRREVLALADWLRCWQVPAVVMESTGDYWKGPFYRLEAEGLECVLADAKQVKHLPGRPKRDPSDSRWLAACFERGAVTACFVATEEFRVIRLHTRYRRDLTEERTREKQRAEKLLESAAIKLSSVVTDLHGVTGRDIMDHLIAGETSPKVLAQLARARARRKIAELEAALEGAEFFTPAHAALLATMLDRIDHLHAEIARLTEMIEHLLAPHEEQLAQAESMPGWGRRSAQDALAETGTDMSRFPTPSHLASWAGRTPLDNSSGKRKGKAKSKKGNRYLAAVTGETAVAAGKTQTREGARYRRLARRRGKAKAQVALGNTQLKVYHALLSHPGTRYQDLGPDYYERQAGTRRQIAHHVGKLAALGFEVTLARLPEPDPTGTDNQAA

SEQ ID NO: 356659 - protein, 334 aa, unidentified
MAAMVSIPLVALDIGAKFHAFAADAGGTIDAGRIDNKAGDIRAFFTRWLGPGRGLKVIMEATGIYFLDVALIAHELGAEVFVINPKTGHHFAKSLGQRNKTDRVDARMLLEFLRRMPLLRWIPPARECLQLRQIGRYLMQLTGEATAAKNRLHAMESSRETPRFLREDVRRSIRSLENRIERIRQEALQLIEQSPALQGAYAALNTMVGMGEKSAVSVLGELCVLPRSMSARACVSHAGLDVIHHESGTSVNKPGRISRHGNRYVRQAMYMPALSAGTHDPHAFAFKQRLKARGKTAMQSIVAIMRKMLTAAWAMIRNPQPYDGAKLYATIENA

SEQ ID NO: 356660 - protein, 412 aa, unidentified
MEGETVIAGVDTHKDVHVLCLLDGLGRKIRSGSFGADPEGYDRLAEAIGDPGSCMVVGVEGTASYGAGLTRRLVELGYNVVEVLRPKRDKVRPGEGKSDPLDAERAARKAASGRGCSVPKSQDGWVEAVRQLYVARRLAVATSTSCVACAKSMLTTAPGALRERFRGRERPKDLMPLLARGRKAGDALEESVLASLRSVAAVWKEARSQVESLDERIRALLEANAPALLGVEGCGTTTAAALVVAAGDNPGRLKGEAAFSMMCGASPIPASSGKTDRHRLNRGGNRQANWALYEIAIKRMAYDERTRRYVARRTSEGKSRREAVRCLKRYIAREVYRVLMDPNPDGAAPEGPELAKMRKAMRVTQKKAAAELGLSAATLGHLEHGRRRSTKLERRYYELLCELERTLPQTAS

SEQ ID NO: 356661 - protein, 308 aa, unidentified
MIAQNYVGCDISKQWLDFFDETSGRLRRIDNQADAIAAYVAGLDPSRDFVVMEATGVHDRLLRHALAKAGVPFSRHNPAHTHHYSKSTRRRAKTDPLDARMLSDYGRRYNPEAEPAPREEVERLQSLARYRDQLVEMRATAKKHLAEAFNEIVIADLEETIAYLDTRIKAIESQIAEVIRQAEDTARDYSLMVSVPGVSKVGAFSLLALLPELGQRSPKAIAALVGLAPFDNKSGKLTRRSQIQGGRSRVRRALYMAALTAIRTCERFKTFYSALAARSGSKKLAIIAVARKLLVVLNAIMRDKTAFA

SEQ ID NO: 356662 - protein, 325 aa, unidentified
MIDGMLGIDVSKNTLDASMSSCNDKIRAKSFANSPDGWRHLLDWLIGQKIRRVHACLESTGRYSLGIACKLNEAGHVVSIVNPAQIRDFARTKLGRNKTDAVDASHIREYCELFKPAPWAPPSHAHRQLGELQTIRAGIVAGLTEWKNRKNSGMVDAVAQSLVDATISHFTSQLGAVEKTIAQAIDNDSDLRRKRDLLLSISGVGETLASVVLAELPGPDVLHSSAEAVAYTGLNPRRHRSGTSIDRQTRISKIGNAVLRAALYMPAMSAMRHNPAIVALVTRLKARGRLNPKQIVVAAMRKLLVLCFGVLKTGKPFDPALAMGC

SEQ ID NO: 356663 - protein, 352 aa, unidentified
MDIIGLDLHKRESQLSIKAKDGAITDRRIVTSRERFTAVLGDQPRARVLLEASTESEWVARHLESLGHEVIVADPNYAPMYANRSRRTKTDRRDARTLMDACETGAWRPAYRLSEPRRHVRAELAVRDALVRTRTRYLALAKALVRRDGLRVPTSASAWVPTRIAELDLSPALTTELAPLFAVYASLNEQIATADRRIATLAATDPIVARLATAPGVGPVTASAFVATIDDITRFRSAHQLEAYLGVVPSERSSGEKRQLGRITKAGNGRMRWLLVEAAWRILRSKSPATAALRGWTLTIAQRRGKRIAAVALARRLAGILYAMWRDGMPYDAQRIRPLARAKPPVADQRAG

SEQ ID NO: 356664 - protein, 416 aa, unidentified
MKHPKMRYTYVGIDSHKETHTAVFIDCFFEKLGEIVFDNLPSKYEAFLNDAEKLRQDGTELLFGLEDTGSFGRTLTIFLTDKLRKVRHVHSVLVARERKNQNITQKTDSIDAECAARVLLSKFGELPSADPNDKYWILRTLVVRRDQTVTSNVRCKMILHDLLTQHYPNYRKFFVYTFLKTPLAFFKKYPSPKNLKNVTKEELAEFFYTESNGVFGMEKAWERAEYILDSLEDTTVEYQEIRDEAVRSVIRQIEFNIAELERMEVSMTVYLDSFNCTLTSMTGIDVVSACQMMSCIGDVRRFPTPAKLARYSGIAPVTYASGKKDLQFANQRGKRELNSLFYMLAVRLTSPTGPNNKILNQFFYDYFHRKMSEGKTKRQAFKCVERRLVNIIWTMLTNNEEYVNPPVMDKPEDEAE

SEQ ID NO: 356665 - protein, 342 aa, unidentified
MKFYCGIDLSARDCHVCVIDQQLKIVVQQKLRNELPKIVKLLAPYKADLKIVVESTFNWYWLIDGLQAEGFEVVLAHTLGLYLITGAKVKTDRRDAYSLAKLLLVGAVPAAYIYPVETRPVRDLLRRRARLVQVRAGEYGSLRRLLLRQGMLSCKQQEIKTATETELEQWFAHPLVRLHASQELRRIELYSQQIAELEKTILALAQTEQSYELLLKLPGVGQTIALTILYEVGELTRFANVKVFSSYCRVVPGIAQSGQVTGRGRASKQGNHYLKAAFSQAAVHAVRCYPQVRRYYERQLKRHQGRGRQMICYNIIAHKLAQAAFHVLKEQTEYRAELLFGP

SEQ ID NO: 356666 - protein, 323 aa, unidentified
MPEREVFAGIDVSKAHLDIALSEAETTWRLANCEAGIEGLVRRLVEAAPSLVVMEATGGFEIPSAAALTAAGVAVVIANPRQVRDFAKSMGQRAKTDRIDAQILALFAARVRPEVRALRDEETRALDAVLARRRQVIGMITAEKNRLGFALAPVQKRIRKHIRWLERELADVDSDLDQMIRESPVWRAKSDLLMDVPGVGPNLARTLIAELPELGRLSNKQISALVGVAPFTRDSGVFRGKRMIFGGRATVRSALYMSIWSASKHNPVIRVFYRRLRDKGKPPKVAQVACMRKLLIILNAMIRDGRKWDPSIPLEQLRLQHSC

SEQ ID NO: 356667 - protein, 415 aa, unidentified
MTEQQWYAGVDWASESHHVFLTDGTGRKIGEKIFKHSGEGLAEMAAWLLTASGAARSSQIYIAIEVPHGPVVETLIERGFTVHAINPKQMDRFRDRFTLAGAKDDSRDAEVMASALRTDAHRFRLLAALDPTVIELREWSRIASDLGTERNRLTNRLREQLWRYYPAMLELEEDLGAEWLLDLWEIAPTPGKATRMREGTAAKVLKRHRIRRFNAAYVLDVLRKPAVQAAAGTAEAASAHIRTLIARIRLLNGQIKEAHRRLDALTARLIPAEDAGAGQQKQHDVEILASLPGVGRIVLATLLAEAWDGLKRRDYAALRSLTGVAPVTKKSGKSCIVIRRQACSNRLANVMYHWARVAIQFDTASKAKYATLRGRGHSHGRALRSVADRLLNVACAMLKNGTLFNPSLKAQMTPC

SEQ ID NO: 356668 - protein, 439 aa, unidentified
MILIGEVADAPVIMGISKPAGLKSPCGEVKIMNPLFVGIDVSSRNNVAYLMKPDGSKYSSFSVQNNLGGAKLLSERIVSALGSMQLSDVVIGLEATSIYGDSLVYALREDGRLGQFQRKIHVLNPKQVRKFKEAYPDLPKNDWVDAFVIADHLRFGRIAREVYMDDYRYKALQTLTRARFEVIQNLTREKQRFANYLFLKCSGMAQDKDIANSSSTTIALMERFETVDDLANSDLEELTAFVTETGRGRFADPAATAKAVRAAAKGSYRLPKTVNDTVNQAMSVSIASMRALKEQVKVLDKAIEQQFEIIPNTLTSIPGIGKVYSAGIIAEIGNIHRFDSQASVAKFAGLVWHKDQSGEFKAEHSRMIKSGNRYLRYYLLEAANSVRRCDSEFRRYYDLKFKEVNKYQHKRALALTARKLVRLVFRLLKDNRLYIPPES

SEQ ID NO: 356669 - protein, 418 aa, unidentified
MEPNRFRHYIGIDWATEAHRICLLNHDGQPCGKTSIPHSGEGLAKLQDWLAHHGVVPAHAAVGIETPRGAVVETLVERGYAVFAINPKQLERFRDRYTAAGAKDDDRDAWCAASALRTDQAAFRRIQLDSPEQIRLRELCRTQSELGVDAQRHANRLSEQLRRYYPQMLALCPAGDEPLLWDLLELAPLPEVAQHITVAQVAAVLHRRRIRRLTAEQVLAQLRATPLTVARGVADAASEHALVLIQALRVLHAARIQTLKRLLRLERQIRATRPDPQLPSDAEIIDSLPGAGALTVAAILTEASQAVAARSAAALRGHAGVAPVTRQSGKHCAVSMRYACNPYLRNAFHHFVLASLRDPIARRHYDRLRQQGHSHARALRGVGDRWVTVLMAMLRSGQLYDPTRRKAWRATAAQEHTA

SEQ ID NO: 356670 - protein, 418 aa, unidentified
MSKIQKPNKIINKKTLLVTIDIGKTTNYAYMRCPNGDDVKPFKISNTRRGFNLLWKCVSEMKQRYQLTDVVVGVESTGPYGIPLMYFLDTKPVTQVLVNTKHTKKVKELLDNSPGKSDKKDPYVMADIIELNRWLHVVLPHGVVAELRHYSHSLDRHKTTRTGFYNQLQGLIFQIFPEFHQVFNDVKTKTAQYLIRHYPTPQSIVNLGLDELTALIKQKSHGKMKADRAKQLYDAAQHSVGIRDGLVSITQEIGHLVAMIDQLNGYIQEFEAIISDLLTQVPISRYLLSVKGYGKVTVACIIGEIVDFSQFEVKEELVKYSGLNLFEISSGAHQGQKHISKRGRPLLRKILFFAAMNVVRKGGIYHDKYQAYLDRGMPKLKALTAISRKLLRLTYALVRDQREFELHYSADDKFRQAA

SEQ ID NO: 356671 - protein, 359 aa, unidentified
MWPRLRSVRSPVAPNGLEAREMIVIGLDVHKQSVTAVAVDEAGRPLAERVIPVGSDELLGWAAALAAERLWAVEDCRQLTRWLERQLLGAGEELVRVPPKLTVPERRAGRTRGKSDPIDALAIARAALREPDLSRPRPDERVYRELKLLVDHRDDLVDQRRRIQQRLRWHLHQLDPTFEVPLRMLGRASHLERVRRWLARREPELQVRLARELVSTIRQLNRTIAALDQELEQRTAEIAPALLELPGCAAVTAAKLLAEIGPVDRFKTDAQLARHGGVAPLEASSGRTQRHRLDRGGNRQLNAALYRIAITQSRYHAPARDYLERKRSEGKSKREALRCLKRQLVRVVFQTLKANPTLT

SEQ ID NO: 356672 - protein, 386 aa, unidentified
MQDAPHLHRLFVGVDVHKDNHAAVALTGFGATLLEQELGNAVDDFDGLISRVRTLAHEHQLTPLFGLEDTTGSGDFLARFLVTRGLEVRTINPVLVQRARRYETHPEKSDLADALGIAKVLIQRIDSVPTYSVTETTELAKDLRAVVNDRTTIIKEQTRLKNQLHALLHHSWGSPYRTLFANVFAKKALVFWQEFPSARILRESRRPTIVKPSWITNTSPAELPMSSPTAANQIRRKARRLLAIRDELREIEKELTDLGAKTGQHLTTLPGCGSVLSAAVFSEIKDIHRFPTPAQLAKYAGLAPRKLESGKRHRHVKTRSGNRRLNAAIHHIALTQISNQGVPKAKQYFQKKVGEGKSKMHALTCLKRQISDIIWSMLQERRAYYP

SEQ ID NO: 356673 - protein, 316 aa, unidentified
MSISETFIGIDVSKEQLDCASRPNGTTSSFKNSVTGIDALIKQLQEQRPRLVVLEATGGLERALVAALVVAQMPVVIVNPRQVRDFARAVGQLAKTDRIDAAVIAHFAEAVKPEVRTLPDQLTQEMDALMKRRGQLVAMLGVERNHLVSATSLVSNHVKEHISHLEELIKGLDQEIDQMIGKSPIWKAKDELFQSVKGVGPVLSRTLLAELPEIGQLSRQKLSKLVGVAPLNNDSGKRKGKRSCWGGRSRVRAILYMSALSATRFNPVIKEFYQRLLAKGKTKKVALVACMRKLLTILNSMVKNNTPWDPSFAQRG

SEQ ID NO: 356674 - protein, 312 aa, unidentified
MEKLSYGGIDVSKDRLDVVVLPEGWFFSVSNDTAGWAELVARLRPLAVSAIGLEPSGGYERGIIRALLAAGLSVRRINPNKLRQFARARGVLAKNDRLDARLIAEYVAIMPTRVVQRDDAVERLAEIVTMRRQLCDEHVAVDNQAAHLEDAMLRRLSKRRLIRLEADIRLLDKRLAEMVATNAAFAQLYELLTSMPGVGPVLAFTLIALLPELGKMSRKQIAALVGLAPYDFDSGKLRGHRSIYGGRMPIRNVLYMAALSASRYNPALKTFSNRLAHANKKSKVIIVAVMRKMITTLNAMLRDNAAWQPRSA

SEQ ID NO: 356675 - protein, 395 aa, unidentified
MKANELQVAVDVGARMHRVAVGNGSGQLVAEFDLAHTAAGLAGFFTRIERLRGRRSAPVAVAMEGFNGWARPLDRQVLEHGWRLYNVNNLKLARYKEIFPAPAKTDAIDARRILELFRLRGDLAIARGVLQEIVATTEEAERLKRLTRRRRQLVNEKVRVLNRMHSDLQAVCPGLLAITAEADNLWFLSLLGAREDIRRLAGLRPTSLLALEGVGRAYCVKIQAWQREALFSHEAEWAGPMIVADARRVLALKREIAALDQLIEPLTEGCESARRLRTIPGFGPTCSGELAGEIGAIERFGSEASLALYLGMAVLDHSSGTHTGTRRPQQVNTRAKAAMMVAVARHMEQVPSSRAYYDKKRAQGKMHNQAVRALGRQLARVIWSMLKHQRDYELR

SEQ ID NO: 356676 - protein, 320 aa, unidentified
MMSEVVLGIDVSKKTLDAALIFDNRTFSKQFQNSAEGFKLLAAWLESLQITRVHACLEATGVYGEAVALFLHESGHLVSVVNPLRIKGYASANMQRNKTDRLDARLIASFCQTQKPDVWLPPSAEVKHLQSLVRRVEVLEEMLQAEENRLSNGAPEIKASHERMIALLKEEIKELERQIKRHIERHPNLKEQSELLQTIPGIGARTANLLLSEIEFDRYNSARAIAAQAGVTPRRKQSGTSLKQTSLSKLGNARLRKALYFPAIVARQHNEIVKEFAKRLKKNGKTPMQIVCAAMRKLLHIAFGVLKHKRAFDASLAFSA

SEQ ID NO: 356677 - protein, 320 aa, unidentified
MRNTVGLDISKLTFDATAIVGNAEYSAKFDNDSKGLNQFSDRLKSLGCQNLHICMEATGNYYEEVADYFAQYYSVYVVNPLKISKYAESRFKRTKTDKQDAKLIAQYCRSAQESELVKRQKPTDEQYRLSRMTAAYAQIKSECAAMKNRHHAAKDEEAAKAYAQIIKAMNEQLEVLKEKIKEQTEKPNCKEGVKRLETIPAIGRMTAAVLFHHLTSSKFETSNKFAAFAGLSPQQKESGTSVRGKGKLTKFGNRKLRAVLFMPAMVAYRIRAFPDFIKRLEEKKKPKKVIIAALMRKLAVIAYHVHKKGGDYDPSRYKSA

SEQ ID NO: 356678 - protein, 466 aa, unidentified
MARKRKSNNSKKHKRPIRSLETIQPNAAGIDLGSREHWVAGPPQDDKVPNVERFGTTTPELLRLADWLTQQGVKTVAMESTGVYWIPLFEILDSKGFDVLLANARQVTHVPGRKTDMLDCQWLQLLHACGLLRGSFRPSDDMCRLRGLMRERNTMVEQRSDWVRRMQKSLNQMNVCVHHAVSDITGVTGMRIIRAIVDGQRDPHVLARMRDRRCRKSVEQIAAELTGNWRSEHLFNLGQTLKMYDQLCTVVTDYDSEILDYILRLQPADNTDTTAPPPISKSKARNIAKQGQEPLRQALYRFSGFDLTTIDGIGVDTVSVIVSELGLDYTVFPREHNFVSYLRLAPNLSISAGKKVSSKSKASTCTRVSTALRMAALTLRNSKTALGAYYRRVAWRKGASVAVFATARKLAQLVYRLVRFGQAYVDAGAKAYETRFNQRRLKFYTKALNEMGYNVKPLATGEPNTT

SEQ ID NO: 356679 - protein, 377 aa, unidentified
MKKKKNERRVGEERRWNVPRTPAVGLDLGDEFSVVTMYSPLGEISERFNFSMDDEGYSLFSSKIPKDARIGYEACTMAYPVDRKLRSMGYSDITVAHPKELALIVRSKKKNDKADSEKIARLLFMDMLPESHLLTREEQIVRDLLIQRVKLGVEIRRTKNSVISYLKREGVFTTLPKTDDNFSVTRREAIDALRFGDDRDLVLRTMMEKIGFYEARCAPLEERVRALVKENEDVRLLMTIPGVDYYLASLLSSYIRDVNRFPSFDNLASFFGIIPQSGDSANVKRRGRMSKDGPSIARWALGIMTDTVMRRNAHLHAYYAHEKERTGSGKYAHVLTMKKLLRMVYHILKTREHWRWEDEALTKRKLANLERGGVGIA

SEQ ID NO: 356680 - protein, 311 aa, unidentified
MSIHVGIDVAKNELVVHALPQGQRRCFANSAQGRAELVAWLSALGADRVLFEASGGYEAPLLRVLHEAALPAVRISADRPRQLAQALGLKAKTDALDARMLAVAAQLLPAPVSKPLPEATERLRQCVHLRTALVGERDSHRRRLQQISDPTAHAIQHACINDLQQRIKQLDTLIAELLSATLPLQGKAPGLGPVLRATLAARLPELGTLDRRQIAALVGLAPYNRDSGRWRGQRRISGGRADVRRVLYMATWSAIRKDPALGQSYRAMVAAGKPKKLAVTACMRKYLTRLNAMRRDNAPWKAASEQHGKDS

SEQ ID NO: 356681 - protein, 366 aa, unidentified
MDVHTTNYTICAFTMEGQKAFAQTTINPEFGELEKYLTTLNTQLGGSCHFVCGYEAGCLGYSLYHQIMKHNWKSFEAECIILAPTTMPRSSKDAVKTDKRDAKKIAQCLTYGTYSKVYIPTDEDNAVKEYIRMRDDAQKLLKQTKQQIIALCTRHGCYFEGRANWTQTHIAWLRSLRFPQAVLQEALDEYLTTCTQLSEKLERLDRRIAEMAQNDRYAEKVRKLGCFKGIAIHTALSCVVEIGDFKRFPSAQQFSAFLGLVPTEHSSGDSQHRGGITKAGNSHLRRLLIESASAFNKGSVGQKSKALRKRQEGNTCETIAYADRANERLRRKYLRITFRSKANIAKTAVARELSCFIWGMMTGNIT

SEQ ID NO: 356682 - protein, 426 aa, unidentified
MKYTQNERIMQITEKTLIVGIDVGSEKHYARAFNFRGVEYGKLLIFHNDAEGFAILEGWIRKLAVQNGFKDVTVGMEPTGHYWFTLGEHIKRTGMRIVLVNPHHVKKSKELDDNNPSKTDRKDPKTIAMLVKDGRYMEPYIPEGIYKELRNLMDSRWRITKELFAIKNRIRRWISIYYPEFTKVFVDWEGKAAMLILKECPTPAKIIEKGIDGIIAIWKEHKIRAVGMKRAVMLLEMARLSIGTKEGMTSAENELQMLLEDYESKMRQYERTMDLVERLAREIPGFEEMLAIKGVGLVTAAGFIAEIGDVRRFSHPKQIQKLAGLSLKENSSGKHKGKTTICKRGRRRLRYYLTFGMMPLLSKNEEFKALHEYYTSRKVNPLKKMQSLVALSNKLVRIFYVILTKKVAYDPQKMMNDIRRTEVKAA

SEQ ID NO: 356683 - protein, 318 aa, unidentified
MPESMDVGIDVAKDTLEVAFGPEARPQCFSNDDDGHEALVTALSAHRVELIVMEPTGGYEAPCACALQAAGFAVAVINARQVRDFAKAMGYLAKTDRIDARVLAEFAAVLAKRPDRDKVVRVLPSEEQQRLHAMVLRRRQLVQMLVAERNRLATSHRAARRSIEVLIHTIRKQIGEIERELASHVDRHHAELAKVLQSAKGIGPNTCMVLIAELPELGKLSNREISALVGIAPFNHDSGTMRGKRTIFGGRAQVRCALYMATIVAMRHNRVIRTFYERLLGVGKPKKVAIVACMRKLLTILNAMVRNGKKWDETLHFV

SEQ ID NO: 356684 - protein, 377 aa, unidentified
MHSENIAAYVGLDVHKETLAVAIAAPERLGEVRYYGTINNEAQAVRRLFQKLQGLYGNILSCYEAGPCGFGLYHQLTAMNIKCQVIAPSRIPKSPTDRIKNDHRDAISLARLLRAGELTPVWIPDLTHEAMRDLIRARAAAKRDSRVARQRILSMLLRTDKHYTGKHWTGKHRTWLANQSFSQPSQQIAFQHYCQSLEQIEDRILQLDQEISRLLPVWSLCNLVCQLQALKGVGQLIAITLVAELGDFSRFSNPKQLMAFLGLVPGEYSSGNSIRPRGITKVGNSELRRLLYEAAWSYRTPAKVGAWLIYYRPDSVTQYSKDITWKAQQRLCSHYRSLTAKGKKSQVAITAVARELTGFMWDIALAAQSSFSQQKQN

SEQ ID NO: 356685 - protein, 358 aa, unidentified
MAETAVTTQVVVLGVDTHQQTHHAAIVATDGRPLADREFPTTTAGYTQLWQWACGFGRVEDAAVESSASYGAGLTRMLTAEGVRVIEVNTPDLPRRYAHGKTDQLDAYAAAMAVITGRATAVAKDTRGAVESVRMLTVARASAVEEATRIGNQIRDLCTTAPAEYADQARQARTIAKRAAFIKDLPVPAEKADLSGPAAAFVRAARSLLDRHRLAQQQARSLARELTRLLTKLVPTLLSRPQIGPITAARLVITAGDNVERMGTEARFAKLVGAAPLPASSGKTSRHRLNRGGDRQANSALHMIAVGRMKSHAPTRAYVERRSAEHKTKKDILRCLKRYIAREVFRDLTTDLGALDKL

SEQ ID NO: 356686 - protein, 298 aa, unidentified
MNRTTLIGIDLGKHSFHLHGQDKNGKALYHKKMTRTKLLEFLAVTPNATVVMEASAGAHSMARKIAALGHETKLISPQFVRPFVKSNKNDFIDAEAICEAASRPSMRFVQPRTESQQTMRALHRVRESLVRDKVKTTNQMHAFLLEFGISMPKGIAVIRQLSEVIAENDLPSYLVQLLQRLHAHYLYLVEQISEIEQELVLTIKQDEGAQRLLTIPSIGPITASVLASGLGDGKQYSHSREFAASTGLVPKQYSTGGRNTLLGISKRGNKQLRKLLVLCARVYIQETGSPVRKIGGVG

SEQ ID NO: 356687 - protein, 391 aa, unidentified
MKYNTQNAKIKSITEKTLIVGIDVGSETHFARAFDWRNYEYSKKPLEFSNTEAGFMTLKAWMADFAEKYGKNVVIPGMEPTGHYWFNLGAYLQDNGMKPVHVNPHHVKKSKELDDNNPNKNDRKDPKTIAALVNEGRFSYPYIPTGIYAEIRSLSNLRLQTQEEITRIKNRIARWFSIYFPEIKDVYRNPDSVSGLMILKEAPLPQDIVKLGVDGINKIWRDAKLRAAGLKRAKTLVTAAEHSIGSQEAPDSARIELKNLLNDYEIYKNREEDLMSLTEEKLSEIPHIDKLLEIKGVGLKTVSGFVAEVGDITRFDNPKQLQKLAGYAIVECSSGKHKGESHISYRGRKRLRYVLYEAAISLIARNEEFKEVHRYYRKSAKEDAVSHSSCV

SEQ ID NO: 356688 - protein, 360 aa, unidentified
MVSMVHGGLDVHKETIEAYLIGEETGEVVSEQLVNDRTKVLRAVRRWSKLGELRLCYEASGAGFVLKRWLEAVGVHCDVVAPSLIPKAPGNRVKTDRRDARQLALLYRAGMLTPVRVPDREEEDARSLMRLREDLTQDCVRLKNRIGKYLLILGHIYRGTSFTLKHRRWIDELPLEPLQRVVLDSYLVQLDHQVEQQRDLDGRIEQLASSERYRVGVQRLMSLKGVGLYSAMVLLTEIGDAHRFSSPVKLMSYFGLVPRESSSGERRCTGSITKAGNNHARWILVEAAWHQVSKPGRSLRVCKHWQTQPAPVVSIGKKAEKRLHHKFWSIAMRKDRKTAATAVAREMVGFVWALLTLEVA

SEQ ID NO: 356689 - protein, 516 aa, unidentified
MPLVTRGGNAALIPLGKLHSLRPLPAHVGLLPQRVLDTMSRHNRRREKTTGPMTRLPRPPRGTAPALTVLRPHAAGIDVHSDMHMVCVPAASAPPETGDGGLPANVRRFGANSCDLHAIAEWLQACGVTSVAIESTGVYWVPLFELSEARGFEVWLVEPGQLSRCGARPKTDALDAQWIQRLHSYGLLQPSFRPADSVLALRGYHRQRQMLIRYAAGHTLHMQKALERMNVKLAEVVSDITGATGQRIISGILKGERDPRVLALLRDPKCKNDAAKIAKALEGTWRPEHLFALKQAHELYRFLRQQIASCDALIRAELDRLPDRAGGRTATTKPRRCGRKPNDLSFDACGPLLRALGVGLTEVEGIDVGTALVILAEIGVDVSRFPTEKHFASWLGVCPRQHRSNGTTKKRGPRKGKNRVAIALRMAAQAVGRTQSPLGLFYRRIKGRIGGQGAVTATAHKLARLVYRMLKYGAEYVKRSPADYEAKLRAQVERQLRARAARLGFELVPRCAATGP

SEQ ID NO: 356690 - protein, 488 aa, unidentified
MSKLDIRVTGLALSSPLCPIGGTCMLSKKTPKKRALDELACVFPNAAGLDIGSAEIVVAVPPDRDAEPVRVFATFTSDLHALVAWLLACGIDTVAMESTGVFWIPIYELLEAAGITPYLVNARHVKTVPGRKTDWNDAQWLQKLHALGLLQASFRPDAEIRTLRTLVRYRAELIERRAPHINHIIQALKHMNIQLNLVLTDITGKTGLAILRAIVAGERDPQRLALFRESSCKHSEAEIAKALTGSWDDAQLFILEQALEIFDYYTVKITACDDKLEQQYQQMESRAEKDAPLPDLPPAKQDSRSKNALTFNARAQIARVIGVDLVAVMGLSAVTVQTIISEIGTDMERFPTVKHFCSWLGLAPHNDKSGGKVLRSRTMKVRNRANQAFRQAAQSVAQSDSSFGAYYRAMRTRLGPKQAIVATAHKIARTVYHLLRTHEPYHEESGTEYERKRRERELKHLARRAQKLGYTLTAVPERTPELQPQPAG

SEQ ID NO: 356691 - protein, 320 aa, unidentified
MTMNRSECFVGIDVSKARLDVAVLPQEESWSEANEDKGIERLVKPLKKLRPTLIVVEATGGLEISLAGVLAAAGLPIVVVNPRQVRDFAKATGKLAKTDSLDAHILARFGEALRPHVRPLKNEHAQELSALVTRRRQIVEMITAEKNRLTTAPKPVHRDIKAHITWLEKRLDTTNENISKLIKSSPLWREQDRLLRSVPGVGPTLSATLLCGLPELGTLNRRQIAALVGVAPLNRDSGLFRGRRTIWGGRAHVRAVLYMGVLTAVRYNPVLRRFYLRLCQAGKPKKVTLTACMRKLLTILNAIVKNRTSWQADYSLGPCH

SEQ ID NO: 356692 - protein, 389 aa, unidentified
MKIYVGIDIAKLNHFAAAISSDGEIIIEPFKFTNDADGFQLLVSKLESFDKNSLIIGLESTAHYGDNLVRYLVTELYQVCVLNPIKTCQMRKNNVRKTKTDKVDTYVIAKTLMMQDNLRFVSFFDLDMMDLKALGRFRQKTIKQRTRLKIQLTTYVDQVFPEIQYFFKSGLHQHAVYALLKEAPSPKEIASMHMTHLANLLKVNSHGHFTKEQAKELRVLAQKSVGANDSAISIQITQTIQQIELLDSQLEKIEAEMTDIMKFNDSVIMTIPSIGYINGGMILGEIGDIHRFSNPNKLLAFAGLDPSVYQSGNFQAKTTRMSKRGSRVLRYALVNAAWNVVRNNATFKAYYDAKRAEGRSHYNALGHCAGKLVRVIWKMLTDEVEFNLE

SEQ ID NO: 356693 - protein, 338 aa, unidentified
MQHVAIDLGGRESQLCVRSHDGQILLEQRVATRSLEIFLKRQPHSRVVLETCAEAFHVADLALKHQHEVRVVPATLVRSLGVGARRIKTDRRDAQVLSEVSCRVDLPSVHLPSDLARRRRTMCGMREELVASRTALINCVRGWTRTELLKVGPATSATFPKRLRLARPEGLPDHVERLLKVIDSLNEQIKLADQELEKLAEQDPVCGRLMSVPGVGPVTSIRFAAAIDDVSRFSSAHAVESFLGLTPGENSSSERKQRTGITKAGPAAVRRALGQAAWVLRSSRPLDPMSQWAKEIELRRGKLVATTALARKLAGVLFALWRDGSTYQPRPAKVQHPA

SEQ ID NO: 356694 - protein, 343 aa, unidentified
MQVARIGLDLAKYVFEVHGVDNHGKVIVQKRLRRDAVASFFANLPACLVGMEASNGAHYWARVLTELGHQVRLISPQFVTPYVKSHKNDRNDAEAICEAVGRPSMRFVPCKSTDQLAVQAVHRIRQRVVADRVRLVNQIRGLLSEHGIVIARDIAQLRRGLAVIVGNINDGLSEMVRALMRELQAELAELDARIVAYDRRIKEIFRASEQCQRLGKIEGIGPVTATALIAAVGDRSCFKNGRQFAAWLGLVPKQRSSGGRVRLFGISKRGDRYLRTLMIHGARAALSRASGKQDPRSLWLGKIRQRRHPNVAAVALANKNARIVWAMLTGATAYEPALSVKAA

SEQ ID NO: 356695 - protein, 326 aa, unidentified
MMIIGVDYHPSFQTIAFFVEETGECGEQELNHSDGQAEKFYRDLKQRGICVQVGMEATGYARWFERLLAELGFELWIGHPAEIKAKRVKKLKYDREDARLILRLMRENNFPRIWVPGPENRDLRQLLWHRHRLVQMRTRILNQLQALAMNEGYHWRKKLFSEQGRALLEKLSLAPWASRRRQELLELLDRLNPTIEELTAAVEREARKRPEALRLMTHPGVGPITALAYVLIIGTPARFECGKQIGTYVGMIPCEESSGGKQRLGHISKQGNSLLRYLLVEAAQAAAHLHPDWRRRYMHLAMRRHKSIAKVAMGRRLEYHIRTKRA

SEQ ID NO: 356696 - protein, 427 aa, unidentified
MRWASDVILVGIDWAREEHAVCVLSLEGAVVAEWTIEHSGAGLAALADRLCELADRDASRVHVAIELNRGSLVETMMERGFHVYALNPKQSDRYRDRHFPAGSKDDTRDAFVAADALRTDAHRLREVRPDDPITIQLREHVRMREELLEDENRITNRLRDQLLRHFPQLVKFNGAVSDAWMLDLIERAPTPELGRKVPAGDIATILRKRHIRKFTVDDVLAMLRERDVFVVEGTTDAAAAHIRLLVPRLRLVLDQIRAVDRKLEGFLEQLSAPLAKEDSSSPEKVEHRDAEILLSLPGAGTIVVATMLAEASWALRDRDYHALRAISGVAPVTISSGKKKGRNATVLMRRACDSLLSNAVYHFARVAAQFEPKAKAQYKQHRQHGQTHGRACRAVADRLLAVMIAMLKSGSLYDSERRKPPVAEEAA

SEQ ID NO: 356697 - protein, 341 aa, unidentified
MQAITVGLDIAKSVFQVHGVDADGQVVIRRQLKRRYVLAFFEKLAPCVIGIEACASSHHWSRRLQALGHTVRLMPPAYVKPYVKRQKNDATDAEAICEAVGRANMRFVPTKTPEQQSGLVLHRTRHLFIRQQTSVINAIRAHCAEFGIVAPVGRRGVEELLRGIANEKRVPELARACLLALGAQLRRIKEQILEFDRMITAWHRGCETSRRLDEIPGVGPALATAVVASIADPRAFRSGRDFSAWIGLVPKQSSSGGKPKLGSISKQGDRYLRGLFTAGALAVIRYAKIRGTGHRPWLTALLARRPIKVAAIALANKIARMVWAMMARGERYREPVALVAY

SEQ ID NO: 356698 - protein, 364 aa, unidentified
MKPVKDIANRIVRYIGMDVHKDSTTAAVRDAQGKIEMEVTLHTEASALVDFLRGLRGTRYLTFEEGTYSAWLHGLLSPHVDKLTVCNPYQNALLKKGNKNDRVDARKLSNLLRLGELSPVYHGSPALHTLKELARSYLTLVQDASRVMSRLKALYRGRGMRCAGTQVYSPRHRAAWLEKLTDPGARQRAALLYQQLDLLLELRPQARHALLTEARKHSGYRVLRTIPGLGPVRVAILLAWLQTPHRFARNRKLWGYSGLGLLVRGSGQYRLVQGQLVVSPKAVQVRGLNPMHNHQLKDIFKGAALAARQHPGPLRDYYQRCIAHGTKDHLARLSLARKIATLVLTLWKKGEVFDARRLTREQAV

SEQ ID NO: 356699 - protein, 398 aa, unidentified
MTESSDYESVQVFIGVDVGKDTHHAVAVNRSGNRLFDKALPNDENKLRSLISDLKQHGQILLVVDQPATIGALPVAVARSEGILVGYLPGLAMRRIADLHAGEAKTDARDAAIIAEAARTLPHALRTLKLADEQIAELSMLCGFDDDLAAQTTQASNHIRGLLTQIHPALERVLGPRLDHPAVLDLLQQYPAPEKLASLGEKKLATQLCKLAPRLGKRLAADITQALTEQTVVVPGTNAAVVVLPRLALQLITLRKQRDEVALEVEQRGLAHPLYPVLTSMPGVGVRTAARLLTEVACRAFASAAHLAAYAGLAPVTRRSGSSIRGEHPSRRGNKTLKRALFLSAFAALRDPISRAYYTRKMSQGKRHNQALIALARRRCDVLFAMMRDGTFYTPTAS

SEQ ID NO: 356700 - protein, 411 aa, unidentified
MNPVVGLDVSKGESQVQAFLDKGKPYRKSFKVSHTIEGLDLLVEFLEVVKIETGKKPPIVLEATGHYHSSVVQYLEDRGYLLIIINPLISYKAKSSSLRKVKTDEVDAYHLCELFYKEDLEPYKKRGVQLLNLRNLTRQHENITGVMVQTKLQFQAILDQVFPEYRGVFGDLYSVVSLLTLSEFPSSEDILEASEETIADKIAELCKSRSHRWANEKAIQLKAAANRNPFEKTVYQSHILSLGMYINIILQYKEHLSKLESEIDALAKEVEEYNIIKSIPGIGEKIAATIISEIGEIDRFTHPKKLVAFAGVDPSVFESGKFTATKNRITKRGSSRLRHALYMAVRCAIRDCRKSKTSDEIIPRNKKLREYYDKKREEGKPFKVAVIACVNKLLHWIFALLKNSSTFQDID

SEQ ID NO: 356701 - protein, 343 aa, unidentified
MQAITTIGLDIAKSVFQVHGVDPDGHVVVRRQLKRRYVLAFFEKLAPCLIGIEACASSHHWSRQLQALRHDVRLMPPSYVKPYVKRQKNDGTDAEAICEAVSRANMRFVPTKTPEQQSGLVLHRTRHLCIRQQTSVINAIRAHCAEFGIVAPVGRRGIEELLNVIANANDEQVPEIARACLSALGDQLHRIKAQILAFDRMIGAWHRSCAASKRLDEIPGVGPALATALVASIADPRTFRSGRDFAAWIGLVPKQSSSGGKPRLGSISKQGDRYLRGLFTAGALAVIRYAKIHRIGHRPWLTALLARRPTKVAAIALANKIARMAWAMMARGERYREPAALAA

SEQ ID NO: 356702 - protein, 341 aa, unidentified
MDQFIGLDVSLKETSISVRQNGKRSWRGKCPSDPKLLAEVICKRAPNAKKIVFETGPLSVWFYHALTGEGLPAICIDARHAKAALDMAPNKTDANDADGLAQLAEVGFYREVRVKQYDSMLTRTLVAARSQLIKIVTELSNQIRGLMKTFGLVVPKGAGRVFEANVRNLIVDNKGLERIILPLLETWRTVRDRAAELDRQLVAAARESAPCQLLVSIPGVGSVVAASFASAIEAPENFRTSRSVGAWLGLTTRRYQSGEVDFDGHISRRGDNHLRGLLYQAAVVILTRTLADSTLRTWGLKLRKKVGFKRAAVAVARKLAVIMHTMLKTGEPFDRSAGATA

SEQ ID NO: 356703 - protein, 368 aa, unidentified
MHETITGFVGLDAHAESTAIGFAEAGREAPRFVGTVGPKFAELSKAVAKLGEPGRLLIVYEAGPCGFALARELRAAGYRCEVVAPSKIPRRPGDRVKTDRRDALSLARLARAAELTFVLVPDERDEAIRDLSRSRIDAVRARLKARQQLKALLLRHGRRYTGKTSWTAAHERYLATVTFAHRAQDIAFVEYRQAISQAQARVERLSQALAQELEHWRMRPLVQALMTLRGVDQLVAITLVAELGELKRFAHPRELMGYLGLVPSEHTSGEKRRLGAITKTGNGHARRVLIEAAWNYRYPPRITTPLQKRQEKQPSEVRAIAWRAQLRLNHRYRTLSARGLQHNKICVAIARELAGFIWSIGQQISPCT

SEQ ID NO: 356704 - protein, 347 aa, unidentified
MRFYTQQHRYYCGIDLHARTMYLCVLNQEGEIVLHRNMPSTSESFLKAVAPYRDDVAVAVECIFTWYWLADVCAKENISFVLGHALYMKAIHGGKAKNDKIDAHKIAVLLRGGMIPMAYVYPAGMRSTRDLLRRRMHLMHKRSELLVHIQNTNSQYCLPQFQKKIAYKKNREGVAEHFPDLSVRKSMEMDLALIDHYDKLLTDVELYITKTAKIHDVHAYYRLRSVNGIGKILTLVILYEIHDIERFPTVQDFVSYCRLVKCSKESAGKHYGFSGAKIGNVHLKWAFSEASVLFLRQNPEAKRYLDKLTSKHGKAKALSILAQRLGRAVYYMLKRDKAFDMKKFFSS

SEQ ID NO: 356705 - protein, 394 aa, unidentified
MKLVGIDIGKHKHFVSIVDKLTGEIILQPVAFSNNAQGFEFLISQIALYPVDSVLIGMEDTGHYHFALLRFLLQKNYNVALINPKTTDLNRRMDGGITKNDKLDTLNICDILSSNKLKKPYRLTSSKKFDLYEQKQLTRLHHSLKEQINVLSNRLQKCLDLVFPEYNALFKSKYGKVYMSILKQFGSAKAIAQADIRTLRKCFEITGRGNRISLTAEKLKESAKVSVGISSLADEMQIKHLIAHIELLNDQLKEIDKKIEEFSIGLNSPIISVPGISHFSGTSILAEYGDIFNYSKPSKIIKAAGVAPFHYESSQYEAKHSAITKQGSSYLRKTLYQVIVPVIRFNKVFKDYYDLKRSQGKSHRCAQGHCIRKLLRVIYHLVTTNQQFDASLLR

SEQ ID NO: 356706 - protein, 355 aa, unidentified
MVVVGADVHKRTHTFVAVDEVGRKLGEKVVVATTAGHHKALRWAGKQFGAELLWGIEDCRPLSARLERDLLSAGQKVVRVAPKLMAQSRASARTRGKSDPIDALAVARAVLREPDLPVASHDPVSRELKLLVDRREDLVAQRTSTINRLRMRIHELDPAHAPALGSLHRANPRRMLADWLATQPGLLAELARDELADIDRLTHAIDALAARIGEHIEVAAPTLLTLHGCGDLTAAKLVGETAGVARFKSEPAFARHAGVAPIPVWSGNTAGRVRMTRSGNRQLNTALHRIAITQIRLKGSAGHTYYRKRIDAGNSPKEALRCLKRRLARIVFSRLRVDNHSDHAFHTSATTCPLT

SEQ ID NO: 356707 - protein, 385 aa, unidentified
MSRHHDGAPVGAQYGTILLVFELSKAKWKLGVMLPGSQKLSRYTVAGGDTAALTVLLAQVRARAGGASRVVSAYEAGYDGFWLHRWLEDQGVENRVLDSASIQVNRRARRAKTDKLDLDQLMRVLAALERGEPKVCSLARPPSPEQEDARRLTRERERLVRERVGHTNRIKGLLFGQGVRDLEPLRRGFLDELKQARTGDSRPLGPGLLGEIRRELKRLALVTEQIAELEAQAHAALAATSATLQADAPVKVAQLTRLRGIGELSAWPLVNEAFYRRFDNRRQVGGYFGLDGSPYDSGESRREQGISKAGNRRARTLAIELAWLWLRHQPDSDLSRWFFARVGQLKGRIRKITLVALARKLMIALWRYLETGLVPGGAVLSPARG

SEQ ID NO: 356708 - protein, 340 aa, unidentified
MKHYLGVDLHRNCFTVCTLGEDGKSELRKWSIHSLGDFAQEVQDTDAVAVEATGNTRHFCQALEARGCRLVVVNPHQFQVISRSVKKTDAHDAKTLAEFLAKDMLPEVRMKEQLPTEIASVLQTRDKLVKLRTILKNKINNLLAARGILIRKESLSTEKGLEQALQANVGELAQVELGVLVEQIRHLNQSIAKLEAAIKKQGPKLPGYENLKSIKGIGDIGGSILLSTIGDIHDFADEGKLSAYFGIVPRVANSNETERSGRITKRGNKLGRTALVQCALIAMRYSPYLAKYYARIKAARGTGKAIIALARKFLGIIYKTLKNGWVFEDFPRFVLAPTAG

SEQ ID NO: 356709 - protein, 347 aa, unidentified
MLADELDYVVGVDPHRDRHALAIVYAGTGAALFEAQVAARERGYVHALGLAEREAPGRRVWAIEGTGSYGAGLARFLTARGERVLEVGRVRRERRSHAKSDALDALRAARSALGEAKLASPRAAGEREALRALMVARAGALAAKAAGLCQLRALLVTCPEPLRSELRSLTRARLLHRLGAVRPDRHRDAELRGTLIALRALARRVQVLTAEEHELKREIHALVARLAPALLDEPGVGPVAAAQLLISWSHRGRFRSEAAFARLAAAAPIPASSGRVHRNRLDPGGDRQLNRALHTIIVSRRKNHPATISYIERKTREGKSVREAIRCLKRYLARSLYRTLEATPQTA

SEQ ID NO: 356710 - protein, 332 aa, unidentified
MVYCGIDTGKDSLDVVVRSKGKSLKCITFKNNPSGHQAILKYLHKHKVTRVGIEATGYYHLDIALELDDATNIDVMIINPRASKHFAKAMMKNVKTDAIDAELLAQFVERMNFVKWVSPADDVFAIRSYGRRLVSLSKEKTKAKNQLHAFSRAKRTPVAIIEDIHLSIEQLEAQIENLMIHALDLINQNEVLQSRYLHLISIKGVADKTAIKLIGELGILDMDMTAKQWVAHAGLYPRSFESGSSVKKRTSIGKIGNRYIREALYMGALSATRYDPNIRAFYLHMIEDNGLTKLQAVCAVMRKMLLAMHSMLKANKSFDGQRFYSLSESIPD

SEQ ID NO: 356711 - protein, 341 aa, unidentified
MDKELYFGVDVSKKTLDLAYYDGETIDWKNAHIKVSNDDAGFKKIGSWVAKVGKDFDTFLFCMEYTGLYNQNFRLWLESKEYIYGMVEPRKMHRFEPDLDDDQRSLDRIKTDELDAFRIAIYCEQNHKKILRNPSKLPSPVYFKLKRLLAERKQNTKQSTLYKQQLHDICAYDTDLSVERKKLLLKSMKENQKAIDREIDSYINEDASISKNYDLLTSIPGIGRIIALETIVLTENFTAISNPRKYACYIGIAPFKKESGTSVRKRTTVSKKGFSEAKADLSIAVLSAIRNNPSIRDYWIRKRKEKCGGIVLNAVKFKLVLRMFAVIKRGTPYVETDAYKN

SEQ ID NO: 356712 - protein, 415 aa, unidentified
MKVVFPTCCGVDVHKTFLVATIITTPADSLQPNYQKKRFSTFNSDLNRCADWLLEHNCLDVCMESTGKYWVPVFNILEKRGIRVVIANPKWVKAVKGNKDDTKDSKWIGDLFRIGLVKSSFIPDLNIRILREFTRYRYKLVSMKSSEKNRFQNAFTVCNVALDSVVSDMFGKSATAITDYLTSDESFDAEHCVSLLQRSLKKKAEQVLESIEGFSIADEQKARIKIIREHYDFAEKLIAKVDACVDEMVAKHEGAINLLCTIPGIDRSSAITIISEIGTDMGQFGSSKRLCCWAGLTPGNNESAGKKKSVRISRAGVYLKPALVQVAHAAVKDNDHPYYKLKYERIAKRRGKKRAIIAIARMILTAVYSMFCTGEVWNPVDLYKVDMPGCLKEQQLAKAIKQATRFLEKQGLSVA

SEQ ID NO: 356713 - protein, 334 aa, unidentified
MQTKSFFLGFDISKLTVDYDLINGQDKSLLKGQIANSEAGCKQLQKALMVNGFKDFNLILFGMENTGSYCNPMKLFCVKNKLDVVVANAYDVCRSKGMQRTKSDSIDAFVVAQYLRKNLPLTKLYVPDRKSVELLKKLQSARSLLVKMKTQLSNHLGEAKDFFDPKDYKILEKNLKKTVINVQVSIVNLEKQMNKVLCSDESLKQNAEIMESLPGVGRQTALRLITATNNFQTISDPRKAACHAGVAPFKNESGTSRNLRPKVSKMADKGLKKTLFLAAMSAVQHCRPIKLYYEKKVAEGKEKMSVLNAVANKILHMIFAMISKKQLYEETKFQ

SEQ ID NO: 356714 - protein, 342 aa, unidentified
MEFFAGIDLGKRRSQIKVLNQDRKVVEELKVDNDPKEFFRIFKKYKGKIDVACEAWSNAFWVWDTLAPIVRRFSIGHTSKIRWIAEARIKTDKIDAGILAELLRADLFPAIAIPPKRIRELRELIRGVIRLRRQALRYRNQVHGLLGRHGIPYKRSEVQDTKLGELVRSVELPRPVRLAADALLRLEAATREEIRQLQVELQKELKGEEEINKQISLLESIPGIGFFSAALLVLELWDVTRFSDAKHLASYIGFVPGTHQTGETLWHGSRTRQGNVLVRWILVQDTWIAIHNHWFFGRMYDRYKKRKGNTRAVVPVARALLKTIHPIKRKLWSGELVSGLSH

SEQ ID NO: 356715 - protein, 355 aa, unidentified
MTFVGLDLHKRYITACALSDDGTVVAECRQLATAIMSIREWIAALPAPVTVAMEATLYWEWLVAQLEGAGVAARVAHAFHVKLIWQTRSKTDPIDARKLAELLRVNLLPSIWVPDTQTRQRRQLLRGRAFLVRERTRLKNRIHGHLTAENLLVPKTDLYGVGGRAWLATALLSPTLRAETDRLLRLHDQLSTEITELDADVKRLARRDPIVKQLATIPGVGAFSALFLLAEIGSLARFRTSHELAAYAGLVPSTRSSGGKTTHGGLGQASNRWLKWILVEIVISLRATPGPVSAHYRHLLRAKGKPKATAAAARKLCCYIFWMLKKGWSYEEWLRQHNESRRSEVRPIQRLGPAA

SEQ ID NO: 356716 - protein, 401 aa, unidentified
MSSRDLATCIMDHEGNTCARFKVDNHLLGATFLRDQILLWANKRKPTEILIGMEATSVYSWHPAMFFHQQEALQAWNVKVFTINPKLIRKFKEAYVDLEKTDDIDAWIIADRLRFGRLKMTAVLKEQFLALQRLTRMRYHLVHQLTREKQYFLQHLFYKCSSFTQEVDSSIFGHAIFELLLESWSLDDICQMDVKQFADFLRQKGRNRFADPECIAKSIQKAARSSYRLSKCVEDSIDLLLGLSIQSIRSLQSQLKELDKAITRHLEGIPNTLQTIPGIGPVYTAGILAEIGQIERFHNQAALAKYAGLTWSKHQSGRFQAEDTSLIRSGNRYLRYYLVEAANSVQRHDATFRAYYRKKYEEVPKHQHKRALVLTARKLVRVIDALLRNGQIYTPRKGEDR

SEQ ID NO: 356717 - protein, 421 aa, unidentified
MKKRIYKQIPVNSFLASSIDLDALAGKLVFAIDVAKVDMVAAIATGSGQVLSTISWKAPMQNAKIIEILVGFKALGLNVQTVLESTGTYGDVLRFALETAGIPVFRVSGKRTFDAREVFDGVPSLHDAKSAAILAKLHAEGLSSLWTADHGDRRQLTAAIAIMDLHQERYLQLVHRLESWLARHWPESTSIFEVTSAALLALLARIGPPADVAMQKKASFKLMKGMGHGLIKEDKIEMLIETAVTTVGVPCEGLERDALMAIACEAHKSIRAYKGAKLVVERLSVNTAANAMAPVVGKTTAAVVFAEAGDPRDFKSAGAFVKAIGLNLREKSSGTIKGRVSITKRGPNRVRQFLWLAANRWVQSDPLAAQWYARKKQRDGGFGSKAIVALMRKLAKALFHVARGATFDSRLLFDRDELKAT

SEQ ID NO: 356718 - protein, 370 aa, unidentified
MLDTTTFVGLDVHARSIKAVSLDVMTGEVRAATFGYDAGAVAEWVRSVDPGARCVYESGVTGFDLQKRLSGLGVDCVVGAVSKMIKPSADRRRKNDRNDAEFLARMLSVGNVVEVWVPDDECEAARDLTRALEDARDDLSRSKQRLSKFLLRHGLVFDERTPTGRRKGNWTRAHWSWIESIRFAEGADNDVLAYYVDAVRRAAEEKSRLEGLVEAEARKPRWRKRVDSLRCLKGVDTASAADLVFEAGEFSRFRNARSFAAWVGLTPSEHSSGESDRRGAITKAGNKHLRKTLVEAAWHYLTCSGRPKDLAKGQAPDRGARRHAAKGVRRLVERRGVLLARGVHNNKANVATARELACWVWAVGLMAEGA

SEQ ID NO: 356719 - protein, 401 aa, unidentified
MVYLERGYNLKELPWSKIVSNSFLFKEACMILVGVDVAKDKHDCYIMTSEGEVLFKSFTIANNMEGFNQLYEKILSVIDNFDNVKIGLEATGHYSYNILGYLLDKGLTPYVINPLHSNLYRKSLSLRKTKTDKVDSRIIASMLMSDVSLKPYSNTLYHNEELKSLTRYRFTKVQERAKLKISISRLVTILFPELEKLVPTLQMNSIYALLYEFPSAHAISKAHLTRLTNLLNTTSKGHYTKDKAVLIREAAKNSIGSNMPAKSLELKHTIKLIKELTSEINEIEEEIKIIMNKINSPILTIPGIGLSTGAQILAEIGDFKNFSSPDKLLAFAGLSPSTYQSGNMYSSNAKMEKRGSKYLRFALFNAAIYVSYWEPTFSQYLKKKRVEGKHYYVAISHVVKN

SEQ ID NO: 356720 - protein, 347 aa, unidentified
MRDRNAVFVGCDLSDKLTEICVVDHTGGVIASKRVRTTKPALVQALEKYRRARVVVEAGTHSRWVEEALSSAGHQVVVANPRQIQLIWGRRKKTDRSDAMLLARLARVDVTLLAPVQHRSRGAQVDLASLRSRDILVSVRTKLVNHVRGLLKQFGVRVESCSTAAFANRADEAVPAELRPALVPVLEALRKVTEQIAIHDRQVDQLAAVCPTTTRLAEVDGVGAITALAFKLTIDDPTKFKKSRIVPAFLGLVPAKDQSGDSDPQKGISKAGNRFLRRLLVQCAHRLLGAFGADCDLRRWGLKLCERGGPAGKKRAIVAVARKLAVVLHRIWVSGRPYDPHFNERAA

SEQ ID NO: 356721 - protein, 385 aa, unidentified
MKKIYLNVACAGMDVHYKFSNVTFRDEAGRVVRRERLEHPQRGPLWERLNRWPKGLPMVLEASFGWGWLSDLLSEAGLEPHLSNCYKLEQMRKARGWVKTNKKDADMLSLLPFETTAWWEVWRAPREVRNRREQMRFRGDLVGLQTMVKNRIHAIFHRHGIFHEFSDLFGGQGRKFLAELCLHNPTDLSYQGLLALRGQVKLLDYLRRQLADVERILHKQLVKTPLTMRLKTIDGIGLILAHVLAAEIGMIERFRNHKALASYSLLAPRSDDTGQDDPRHSPLGRHLGKRGNRTLKWAFIEAAHGAVRSGGKWRAMFDRVTNGGKKDRNRGYIKVARELVKVVYVLWKKDVAYRDVPPQRPGANRKKSRSGTGQLLHPMVHASTA

SEQ ID NO: 356722 - protein, 400 aa, unidentified
MLSIGIDVSKGKSTVCGMKPGGEIVYAPFEVQHTREGMSELVSLLHNSGEEVRAVLESTGSYHCPVVAALLENGIFVSVVNSLRMKRFCSQSIRKVKTDRIDAMQIALYGLAYWQELQPARLPEDTYRELQLLARQYYQMTSMLIKAKVDFNAICDQVLPGMQELMSDHAGRHKLSDFVLRYRHTTHILEMGETRFRKDYCKWAEKKGYRNCERMAALIFATAQNGIPVLPNAPSTQIVITEAIRVLHTVEASRDAILTQMQALAKTLPEYSLVREMPCIGDTLAPRLIAEIGDVRRFHSKRALIAYAGIDAPPYQSGKFCANNRHISKRGNRYLRKTGYEVMQSYVMHKPANDPIFTFIEKKRGEGKSGKLAMVAGLNKFLRVYYGKVTELYRSLPAIE

SEQ ID NO: 356723 - protein, 413 aa, unidentified
MDVLHERCAALDIGKKELKACVRTPDPKRKNGRRQEIRTFATTTNSLLELRDWLIREQVTLVVLEATGDYWRGAYYLLEDDLNVMLVNAAHAKGLPGRKTDVCDAAWLCQLGECGLLRASFVPPEPIRRLRDLTRYRTTLVAERTREASRLEKELEDAGVKLSSVASNILGVSGRAMLTALIEGGQDAQAMADLAKGRMRPKIPALVEALTGHFGEHHAFLCRLHLERIDQISVTIEELSARVEEAMRPFYRQLEHLQTIPGVGQEVAEVIIAETGGDMTRFRTAGHLASWAGVCPGHHESAGKRRSGKTRHGNRWLGGALGIAAMAAGRSKDTYLSARRGKLVPRLGKQKTIVALEHSILTAAWHMLTDDVDYHDLGGDYFTRRDPEVAMRRITRQANALGYTVRFDPIQAA

SEQ ID NO: 356724 - protein, 416 aa, unidentified
MWLTMDVIHQRCAGIDISKADVKVCIRVPGHGTRRRTEVRTFTSMTRDLLAMRDWLLSEQVTLVGMEATGAYWKPIFYLLESQVECWLLNARHMKTVPGRKTDVKDAEWIAKLVEHGLVRPSFVPPQPIRRLRDLTRYRTEVVRERTREAQRLHNLLEDAGIKLTSVVSDVLGKSGRAMLEALITGQRDPQALAELALGRLRGKCSTLIEALTGNFTDHHAFLARAMLDRIDTATAMQTRLNTRIDREIQPYRRRIELLATIPGVSEHTAQTILAEIGTDIARFPTAGHLASWAGVCPGNNESAGKHSSGTTRPGDPWLKGVLGQAAISAARGKNTYLGARYRRLMARRGRKRALVALQHSILIATWHMFTNDLTYRDLGENYFLERAGKARATRRLIGQLNHLGYQVNLNPLAVT

SEQ ID NO: 356725 - protein, 387 aa, unidentified
MAQVNDLSRSLTAFDLISTLVVVVEMSKASWLVSGAVPGVERQPLKKLEPDATALLRLIERWRNEAVRAGRPIRRIALAYEAGRDGFWLARWLIARGIEAHVIHSASVAVSRERKRAKTDRLDAAMLMRVFLGWLRGERGHCGMVAIPTMEEEDARRPSRERESLINERSRITNRMKSALARLGVRGFKPHLRKAPERLAGLRTAEGTGLPANIIEEFRRDMARLALVREQINSIEKTRAERLKRAPDTGPHAMVRLLARVIGIGIETADMLVREILSRKLRDRRAVARYAGLTGSPDESGLKRREKGLPKAGNARVRRGLIQLAWRFLTFQKDSALARWYRTRTEGPSGARKTTMIVALARKLLIALWRLVTTGEVPDGVELRPAG

SEQ ID NO: 356726 - protein, 261 aa, unidentified
MLSFCGIDVSKDRLDVMVLPEEQCCSVPNDARGWAALVERLRNFSIAAIGLEASGGYERGVARALLAAGISVRQVNPFKLRQFARASGVLAKNDPLDARMIASFVGIMPTRPAQRPTPAAEQLAEMLAVRRQLSAEKVAAENASRLLEDAMLQRLSRRRIRRLAADIELLAERLVEIVTSEVALAHRYRLLTSMPGVGPVLACTLIALLPELGGMTRKQVAALVGVAPYAFESCALKGKALHLGRSCERPPGALHGGDERQ

SEQ ID NO: 356727 - protein, 316 aa, unidentified
MSETILGIDVAKKMLDACLMMNGKVFTKKFANDTKGIKLLEGWLRSMKIERAHVCLEATGTYSEMVAEFLYEHGHRVSVVNPSRIEAFARSDLKRNKTDAADARTIAQFCLEKDPDDWHPLPPEIKQLQALSRRMEVLEKMLAAEHNRLDTAPKTVTSSVKRVITDLEKEIDNVQRLIKDHINNNPDLKQQSELLQTIPGIGEKTANLLLSEIEFRSFSSARAVAAHAGVTPRRSQSGTSLNRTRLSKIGNSRIRKALYFPAIVALRYNQVISAFARRLRENGKRPMQVVGAAMRKLVHIAYGVIKNNRPFEPTLA

SEQ ID NO: 356728 - protein, 347 aa, unidentified
MRFYTQQHRHYCGIDLHARNMYICILDQTGKTLVHKKIDCDRDELLRTLRPYRKDLVVAVECLFCWYWIADLCTEEGIVFVLGHALGMKAIHGGKVKNDRRDSYTIAALLRGGNLHYSYVYPRDKRATRDLMRRRTFFVRKRAELLTHIQNTNTQYNLPAFEERIDKTEDRGAIIEHFDDSSVQMSMAADVALMGAFDEVIRDLELFLLHEVRKDHGHEFSLLRSIPGIGEILALTLLYEINDLKRFARVQDFLSYARLVKGRHESDSKVKKSAGSKMGNVHLKWAFSEAAALFLRWNAPGRKYFTRIEKKHGKGKALSILAAKLGRAVYYMLLRKKPFELKRFVTV

SEQ ID NO: 356729 - protein, 405 aa, unidentified
MADGPVGVYGGVDTHKDVHVAAAADQAGRVLAAASFAADLDGYRGLRGWLESFGPLVRVGVEGTGSYGAGLCRHLWAAGVEVVEVTRPDRQMRRRRGKSDTVDAEAAARAALSDERTSAPKGGDGTVESIRQIRVALCSTRDHLTRISNQIRDLIVTAPEQLRSELEPLPAAQRAQRCARFRHGDVADPAQAAKLALRTLARQHQALDADLGELRGHLDRLTAAAGPALRAAKGIGPDVASILLTTAGDNPDRLTSEAAFAALCGASPVETSSGKTTPHRLNGGGNRQANHALWRIAMVRLATCERTRAYAARRQTEGKSRREIIRCLKRYIAREVFALLTKPQPAPVVADLRARRHATGHSLAHVADQLNTWPATISAIERGHAPHHRLLPAYRDWLNTHQTAA

SEQ ID NO: 356730 - protein, 417 aa, unidentified
MKKHNNSRKKSEATSKRAKSRRPVPQDTKEVLAEPVGELWGKLDRKVAAGSTREREDHQRGELRPNVDRLTVGVDLGDQGSHYCILGLEGETLAEGQLRTTQEDLATFFQGLNAARVVIEVGTHSAWGQEVIRGCGHEVLVANPRLMDGSKRRKRKNDRIDANKLARLGRVDPESLYPIQHRSREVRQDLVMLRARDALVAARTEIINTTRGLVKSMGTRLPKCSSRSFAQKGEEAVAVEMREALLPLVRVAATLSADIKEYDKKIEELGREKYGHTTLLRQVKGVGPITALAYVLTLENPERFTKSRDVGPYLGLVPKQEDSGESQPQLGISKAGDTMVRKLLVGSAQYILGPFGPDTDLRRYGLRLCERGGKNAKKRAAVAVARKLAVLLHRLWVSGEVYQPLHNAMSAPIAAAA

SEQ ID NO: 356731 - protein, 318 aa, unidentified
MSDSVFIGIDVSSQTLEIASSDQAKTWRVANDTSGIEQLVSQASALAPALTVLEATGGYEFEAACALQAAGLAVAVVNPRTARDFARAMGALAKTDALDARMLAAFARVLHQHPERERFVKPMADAELQQLQALVLRRRQLVQMLTSERQRLRLAHAAARPSIERVIEFLKKEQGDSEVEVAAHVQRHHAQLAQALASVPGIGAASVAVLLAELPELGKLDRRRIAALVGVAPLNHDSGQMRGQRSIWGGRADVRRTLYMATLTAVRYNPALKACYDRLLAVGKRKKVALVACMRKLLTMLNAIAKHGSTWDSTMHIA

SEQ ID NO: 356732 - protein, 346 aa, unidentified
MDYFAGIDASLETANVCIVDGDGAIVLEQKVGAEPKDIAALLKLFGKPLKRIGLEAGPTSSWLFSELRAAGFPALCLECRHVKAGLSAMRNKTDRNDARGIAQLVRLGWFRLVHVKSVQSQQIRMLLVNRNLLLGKLQDIENSVRGSLKVFGLKLGHVTKHSFEARVVELIEGHSALAAITEPMLRVRRVLMDEFVGLDRMARRLARNDPICRRFMTVPGVGVIVALTYRTGVDIPERFTRSRDVGAHFGLTPRRYSSGQVDYDGHISRCGDEMVRTALYQAAHVLMHHGRWSGLRGWAMRIAKRSCVKLAKVALARKLAVVLHRMWIDETDFRWTTREQARALAA

SEQ ID NO: 356733 - protein, 323 aa, unidentified
MQGKIERSAPAKIYVGIDASKAWLDVASTPISTSFRVANNKKGHKALVKKLSGLEVAAVVVEATGKYHRGVHVFLHERGLPVCVVNPYRSRKFADALGELAKTDKIDAMVLARYAELIGPEAQAPASKAVAELAELVHARNSAVAAQTALRNRLGAAHSSLLKRELRIQLRSSATHVKRLEKAIRVVIADNAELARRFEILTSIPGIGPIAAAGLVGLMAELGTLSSKQVAALVGVAPMNWDSGMMRGRRAIKGGRPAVRRLIYMATLSAAVRGANPDLKAFYEQLRGRGKASKVAIVAAMRKLVILANTLIAQDRQWSPKPA

SEQ ID NO: 356734 - protein, 418 aa, unidentified
MFKIFRKNCCGLDVHKTWIYACIGITDNNSLTSYKEARFSSFSKGLRELAEWLASYSCTDVCMESAGKYWIPVFNVLEKTCNVVLAHPKYTKPQKGNKTDRKDAKWICDLFMCDMIKPSFIPPADIRQLRDLMRYREKLTNCLTGEKNRAQNCLTVSNLKLDDVFSDVFGKSARSITEYILAHPGEYFDVTPFVDGRCKQPIEEIQAAVDGAISREQATKLRECLDHIDELKRHRKQIETEIHRLAEPYAYSLELIRTVPGFSANPMTAIALVSEIGVDMSVFPTAKHLCSWAGCCPRNDGSGGKIKSTRISRAGAYLKPLLVQVANALVRSEKHPEFRERYRRIKARRGHKKAIIAVCRMILVAVWNILSKLEPYTPCIVADTPAPFSKELSLSQALNFLKLRGYVIKDDVPIEAIT

SEQ ID NO: 356735 - protein, 360 aa, unidentified
MRIQRTSVGLDVHARSVVGCAIVEDTGEVIRHRFGYDPAAVLEWVRSLPQPAAVTYEAGPTGFTLARLLTASGIDCVVAAPSKLQRPVGDRVKTDARDALHLARLLRLGEIVAVTVPTIEQETARDLVRAREDNRGELMAARHRLSKLLLRHGIIYDGKQAWTATHDAWLRRQRFNHAGLQAAFDADYEAVQQARARKDRLDVIIEQMATTSDYAPVVRRLGCLRGVSTLTGFGLAVEIGNWERFTGSSIGAFVGLVPSEHSSGQSRSQGSITKTGNTHARRLLVEAAWHHRKPYRPGAVMQARWAAAPSLAVSRGDDGNRRLHQKWQHFTARKKRPTIANVAIARELAGWCWSLAVMPD

SEQ ID NO: 356736 - protein, 362 aa, unidentified
MDVHKASFTLSCFSVTTQETFATVKISPDAKAIKKYLDGVSLSRSEECEFVCGYEAGCLGYTLYHQLTAMNIRCVIMAPTTILRNGKRVKTDRIDAENLARCLAYGGYKSVYIPTAQDEAVRDYLKMRDDHKLMLKKSKQQINAFCLKHNKIYPGNKSKWTQAHVKWLNALEFDGYLQDAFNEYMITYRELADKVERLESQIEQLAELEEYRDKVKKLICIKGIKTHTALSLIVETGDFSRFQSAERYASYIGLVPGEHSSSEDQKRLGITKAGNRHMRMLLIEAAQCYSRGVPAKKSKDLKSRQKGASPEVIAYADKASIRLRRKYIRMELVNKKKANVAKTAVARELACFIWGMMTDNIA

SEQ ID NO: 356737 - protein, 312 aa, unidentified
MKTICGVDISKAYLDACIEPGEVRGQFTNDAAGIGELAAFCRRHQVELVAMESSGGYERRAFLLLSEDGLPCAITNARNVRLYAESMGVPEKTDRIDASMIARFARHKDLQPTPLPSPAQRRLKALVARLRQLTDDLIVQKQRRSSLRDDAGMLASIDEVIALLKRQSRSIEGEIGSMIDDDPLWAHLSQTFRSIKGVADRTVAWLMAELPEIGTYSNKAIAKLVGVAPIADDSGKRRGKRPVRGGRPGVRSIVFLVAAIAARYDQDLGRFRDRLLAAGKQKMVVRIALARKLLVRLNAKARDARAAFANAT

SEQ ID NO: 356738 - protein, 458 aa, unidentified
MTLPPPALPELSTGNRGMRRRAPVSDRPGFSFVTGLSLIGTRRAVALPESEHYVGIDWGSTEHAVCVLDEAGKTRSEFNITHTAVGFAELVRKLARFGPPEDIPVGIERPDGRLVDLLLEAGHPVVPVKPNAIKAWRDAEVLSGAKSDPGDAMVIAEYLRLRHHKLSAARPFSDETKALRTVVRTRDDIVRLRVMATNMLSSLLDGFWPGAKSLFKDVESPIALEFLTRYPAPASAAHLGEKRMAAFCTKHGYSGRRSPDELLKRLRQAPDGVTAEHHTEAGRDAVIALVTVLKTLGLVKKDLDRSVGSHLAQHPDGRIFTSLPRAGQINAAQILAEWGDSRTAYGDPDAIAAFAGVAPVTKASGRMRGVSYRWACNKRFRTAITTFADNSRHESPWAADIYQRAQARGMDHPHAVRVLARAWIRVIYRCWLNHEPYQPSRHGRLQRLTTPPPRLQAM

SEQ ID NO: 356739 - protein, 341 aa, unidentified
MSVMIGIDPAKGSHAAAAVNGSEEAVAELEVRASRRQTSELLAWAEQFPQRKWAIESANGHGYLLAQQLVATGEFVVDVPSTLSARVRVLDSTRSQKNDANDARSVAIVALRQPNLRVVTAEDHLAVLRMLAKRHKQLASLKTQAAARLHTVLAALIPGGLGKEMVVRQAAELLRRIRPASMVEAERKRLAHQHLAEVRRLEKELKASKANLATAVAASGTTLTDIYGVGPVVAGLVIGYSGDITRFPTRHHYATYNGTAPIEASSGQKKRHRLNPRGNRMLNHALHLIAITQLRYPNTEGRLFYERKLEEGKTKKEAIRALKRRLSDVVYRHLQADQQPR

SEQ ID NO: 356740 - protein, 358 aa, unidentified
MALRGPLEDKISLRRLSAGDAKGLLALAGRMQSAATAALGTVVTIASCYEAGYDGFWLHRVLTAANIENHVIDPASIHVDRRARRIKTDRIDAQALLRTLLAHRRGEGRVWSVVQPPTPEDEDRKRPHRERQNLLKERGRHVNRIKGLCAQQGILDYEPMRADRHERLAELETGDGRRLKPLLLAEIRREIARLEFLLAQIAELEMTRETAIKTASSDDTATVQSQQMRSLRRLTAIGPETSTVLANEVFYRRFRSRRHLAGYVGLTPSPHMSGGLSREQGISKSGNRRARTALVEAAWLWLRYQPKSALAKWFTQRVGGQRGRLRRIMVVALARKLLVALWRYVETGLVPTGATLRA

SEQ ID NO: 356741 - protein, 337 aa, unidentified
MHYIGLDVHSKHFTAAVVDEQGRLLFRSTHPTSEHNLIEVVTSLQGRKRVAFEETTVAGWVYRTLRSVTEDVIVTDPRLNQWISRDADMDDDKAALRLANLARGNFVQRVHHTDDQTQAVFKELVLGHKKVSKELARAKNQLKAKFRQHGIVCDGDGVYSPAHAEDWLAKLKDEDSRFQARRYMRRIGHLTEEKQAYARRIAKRARAFPQIAAFEALPGIGIIRAATFFAIIDTPHRFANKRKLWTYCGLGIAHFSSDQMRGPVKLNPNGNRMLKELAKNAAQDAVRQGNNPFARHYQRLLANGVKSSCAMLTVARAIVATMWAMWRKDETYIPRAD

SEQ ID NO: 356742 - protein, 343 aa, unidentified
MPTIADAGQARLVTGGVDTHAEVHVVGMVDQAAWMRGHGELVKVGVEGTGSYGAGLARYLAAEGVEVAEVIRPNRQARRRRGKSDAADAVAAALAALNGEASGTPKSGDGAVESIRALQVARRGAVKARTQAGNQLRALIVTAPEQLRDKLAALTTPQRVTLAARFRPGGLTSPAEAAKAAMAAVARRHQVLTAEIAQLDTCLEALAGHAAPAGFLARAGVGTQVASILLATAGDNPGRLRTEASFAALCGSSPVDASSGKQRRHRLNRGGDRQANSALWRIVFTRMACDARTQAYVARRTAEGKTRKEIMRCLKRYVAREIYKALVTQARNPAAGIPLTPAA

SEQ ID NO: 356743 - protein, 344 aa, unidentified
MKISTLSIDLAKNVFQVAGFNSNYKRECNKRLNRAKLNAFMANTPPCRVVMEACYSSHYWGRGFSSYGHTVDLIPAQHVTPFVRGNKNDSNDALAIYEASLRPHIKFVPIKTEAQQEILMLHKIRERLLQNRIAATNQLRGLLVDFGYVFPVGMKALEQGIIALESDSELRPQLRIMVSDIYTEYKTLVKRIKAIEAMLTAHVERDTNAKILHSIPGVGVLNASAYAASIGNGQAFKNAKELGVWLGLTPKQYASGDKSKMSGITKRGNSYLRKQLIHGARALIARSHHKTDALSQWINQLREKKHFNCVVVATAHRLARLMWILLTKQTLYSPQYVQNTQKDA

SEQ ID NO: 356744 - protein, 386 aa, unidentified
MNLKYSVGLDVSSKKINACISIIDDRQKVSVKSSCVISNTINGFKSLQDWISKHKKEDLPVVICMEATGIYHENCAYYLFEQGFEVSIILPNKAKKYLEAIGLKSKNDSIDAKGLAQMGAEQCLDTWQPMGTFFYQLRLLTRQHQNVTELKTVLKNQLDALGFAMHQSDPVNNQLKQTITLFETQIKELDKAIQSHIKSDEKIAEKVNNILLMKGLGVLTIATVLSETNGFELFNNYKQVVSYAGYDVVEAQSGTRVGKTKISKRGNSRIRRAMHMPSLVVIQCKVKPFKDLWDRTYEKHGVKMKSYVAVQKKLLVMIYHLWNKNESYDANYQIKIQEGEQKLSSRECVFVENKNEKNSPNLKVGTTQGKHPVNNRKKLPLGVTNI

SEQ ID NO: 356745 - protein, 437 aa, unidentified
MGEGRGRESDSGQIGIRLNEALLIPVDAMGGGERVAPSALLSSYLRSAPMSPFFNASKSLTALDQDSTLVAVIEMSQTKWLIAATVPGFERNPLKKLDADPDSVLRLLRRWRSEAIQAGREVRRIVVAYEAGRDGFWLARWLQARAVEAYVIHPSSVAVSREHRRAKTDRLDTELLMRAFLGWLRGEKRHCSMAAIPTINEEEARRPNRERDNLVRERTRIVNRIKAILARFGIRAFKPNLPKAAEKLEALHTAEGMPLPERSRAELRRNLGRLHLLREQIHEIEQERLRQFSVVPDTEKGPLAMVRLLSRIIGVGIETADMLVNEILSRGLRDRRAVARYAGLTGAPDESGQRRREKGLARAGNARVRYGMILLAWRFLQFQKDSALAHWFCARTADGRGGTRKTMIVALARKLLIAFWRLVTTGEIPTGVALRPV

SEQ ID NO: 356746 - protein, 321 aa, unidentified
MQTVVGIDVSKETLAVCHLVAGEPRHLEVENAKAGFRRLLKGGGPESLYVMEATGAYYMRLAYFLVGQGAKVAVVNPLVIKRFIQMHLGKGKSDRKDAQWIMRYGQQNELKLWQPDDAQLVECRQLEQAIEQLVKQKTMTLNSLEALEQQPERNKVTLRTLRLTLLVLQKQIRLLEQELDGHLQDQFKEQMELLSSIPGIGSKTAGMLLLFFGGFRQVTSYRQLIAKAGLCPREYSSGSSVRGKVRITKMGGSQIRSKLYMCSLTAMRANKACRELYERLVAKGKNRKLALIAVCNKLLKQAFAIVHSGVPYQPDFKRFSA

SEQ ID NO: 356747 - protein, 430 aa, unidentified
MQSYRVAGIDVHKKMLAVVVADVGGGGEFEFERRKFSTAPKDLHVLAQWLVGQEVEEVVMESTAQYWRPVWEALEQSWQPAMRKREQISKLSGTLHLCQAQSNRAPRGRKKDFPDAERLVKRLVAEELTLSFVPEPDLRLLRTVTRRRYQLSRARVMFQNQLESLLEQARIKLSSLVSDLLGGSARRMMKALAEGERDPAVVAAMADCRLRATPEQLQDALSACAEMNPHYRRLIKMALEELHLVETHIEALDREAMELLQDHQDVVRRIAAVPGFGVDSAMQMIAEVGVEAANFATAKNLASWVGVCPGDQESAGKQQSTRSPKGNRHMRRLLTQAAHAAVKVKGSIFELTFNRHMRMHPTQYKRSIWAIAHRLCRLLWLLLSKRVDYEERGPEVSAKSKRVRTSRMIRELRKLGYRIEGGPVALANHV

SEQ ID NO: 356748 - protein, 403 aa, unidentified
MFYLGIDVAKKSCHYLILNQEGQKVKAFTLDNTHEAFQNLLAHLKDLSIAKENLLIGLEASGGFWENLYSHLKEKGFSVVLLNPYHTNKFREALAKKAKTDDLDALIIAQLLRTGKYVQSQVAEEMIQSLRELTQLRYELLQEKKNYQRQVFSLLAIIFPEYEKTALPNPFSIASVAILQKFPTAKDLAQAKPKQIEKIVRSIKGNNFSLKEIQALLTTAQNSIYSGRAKETRAKSLRILLRHTKNLSCSIEELENEIQQILSPQEPKDQFPGENLLTIPGVGKKTVAAVLSYPGADGANFSTSTKAIGYAGYFPKIYQSGQTKRDNKICKRGPKVLRWALYMTAVACLRHNPQMKTLYHRKLSQGKTEKQALVCVAKKLLHIMLAMLKSGEPYDPLKVFVNC

SEQ ID NO: 356749 - protein, 295 aa, unidentified
MEHYVGLDVSLKLTSICIVDRTGRVEREGVVASDPEAIATFIKLHAPHIVRIGLETGATSTWLWTELNKMGLPIICIDARHAKAVLKMQINKSDRNDAVGIARIMQCGWYKEVCVKDLDSHATKALLVSRALLVKIKRDIENQIRGLLKNFGLVIGRAKMNMFAVRAAQLAGERSELFAAVDPLLKAREAVEQQILDLDRKVLRLARNNAQARRFMTAPGIGPVTALCFLATIDDPARFKRSRSVGAYAGLTTRRYASGEMDWSGRISKCGDKMLRSYLYEAANVLLTRVISSLP

SEQ ID NO: 356750 - protein, 333 aa, unidentified
MITQYIGLDAHLSTCTFCVLDKDGNQIDYRKILTNGRLLVDYISSLGKHTAVAFEECSLSAWLFDILHKHVEEIIVCDPVANRQYKRAKTDKLDAYNLAQLLRGGFLKPVFHDGSKRERFRILVSAYEDTVIEIVRTRNRLTSIIRRFRADRACSGSHQRDIEVIIRLSREQLSSLLKIKKEYVECIVKTLRNFPESRLLTSIPGIGYIHAAKIISQVVDPRRFRTKYKFFAYCGLVRHPRISGGRCYGSRYIWGNRMLKCVFKMAAHSAIRGKNPLKEYSHGLLSRGLHPVAARNAVARKIASLALALWRRRQKFNENRFWEKIIREKKEVF

SEQ ID NO: 356751 - protein, 452 aa, unidentified
MEEKSISMEVVNSHAAGIDVGSRSHWTAVGQKEEDIREFGVYNEDLFEMADWFAEKKVTTIAMESTGTYWQNLFAVLISKGFKVILCNGKFTKNIKGKKTDVKDCQWIQKLHSLGLLSSSFLPDNETEQLRTYCRHRSNLINMAASTSKKMQKYLRLLNLRLDVVVKDVCGLTGLKIIRAISEGESDPKKLASLRHYNCKKSEEEIAKALHSNDRKDYLFALSQELETYDHLQSKVQQCDAEIESMLNQIIDNDVKKKEHTIEPKPYKRLNKNTPKNIDINLKGYQMLEGTDLLAIEGMSHLTVLAVISEIGVEGIRKFPSAKHFTSWLRLAPNNKVSGGKVLSSKVPKGSNRVKIALRRAANAIGNLKDSTPLRDFFHRINFRKGRVSAISATARKLAVIIWNMVVHNTPYENPEGYLYLDQKRKLGIVKRIRNQIDKYGINPNDLNFSSD

SEQ ID NO: 356752 - protein, 331 aa, unidentified
MNFKETIGIDVSKSTIDVRLHCKNLINEFANNQSGYKRLIQWVLSSTKLKKDTVLFAFEHTGLYSYRLSVYLSEHNFRYILIPGLELRRSMGIARGKDDQIDAGKIALYAYRRKDEITPYELPSNEITKIKRLLSLRERLVKQKAGYEVTLKENKQFIRKNDNLVLFKVLEKMIVELKKQIDILNQELSNHISNDDHLKKIYELITSIKGIGPQTALFMIAFTNGFTRFENWRKFACYSGIAPFPHQSGISIKGRTKVSHLANKKMKSLLSSCASTAILCNPEMKQYYERRLAEGKNKMCVLNNIRNKLLARIFAVINRGTPYVNTLGYIN

SEQ ID NO: 356753 - protein, 405 aa, unidentified
MVTSIDRYDEVDVFVGLDVGKGEHHAVALDREAKRLFDRALPNDERQLRAVIDQLASHGVVLLVVDQPATIGALPVAVAQAAGALVGYLPGLAMRRIADLHPGEAKTDARDAAIIAETARTMPHTLRSIQVADEKVAELSMLCGFDDDLAGQIVQVSNRIRGLLTQIHPALERVLGPRLDHPAILDLLQRYPSPAAMKTAGEKRLGNRLLKNAPRKGRVWAAEIMTALGEQTVVVTGTDAAALVLPRLAEQLQALRRQRDEIAIEVEKIVDAHPLQPVLTSMPGVGVRTAARLLTEVTTKTFATAGHLAAYAGLAPVTRRSGTSIRGEHPSRRGNKILKRTMFLSAFAALRDPESRAYYDRKIAQGKRHNQALIALARRRSDVLYAMLRDGTLYQPRPAQPALAA

SEQ ID NO: 356754 - protein, 355 aa, unidentified
MKYYTSATEFNCGIDLHAHQMYVCLMDREGKKLLHTNIRNNDFEFFLKLVQPYRHDLTVCCECMFGWYWLADACQAAGLTFVLAHALYLHAIHGGKNKNDRIDSEKLAHLLRSNFIPPAYVYPADKRPLRALLRQRTFFVWQRADLLARIQSHQLAYNRPAIRQSRPNRDPWEEKLLAAEDHPLRQLALKNELAMIRHYDAQISALEEHLHKLTKEVACREYALLQTVPGIGEHLGMTLLYEIGDINRFPTVKDFLSYSRLVKGTVASAGKIKGLRGAKLGNPYLRWAFGESAVIAKRDHHIIGPLAQRLEAQMGGNKFKANTVLAIKLARAVYYMLKNRTVFDPERLVASVMKN

SEQ ID NO: 356755 - protein, 338 aa, unidentified
MTIETLGVDIAKNVFQLHGVNRNGRVVLKRRVMRDELLKVIAQIDRCTIVLEACTGAFYWARKFEVLGHEVQLISPQYVKPFVRRQKKNGNDAEAICTAARQPHIPFVPKKTIEQQDIQALHRARQRMVNHRTAVVSQIRGLLLDRGFAFAKSITRARRVIPEILADQDNELTAMAREAIAELYDLFRDLDRRIASFDKKIDAVFRNNEACQRIAKIKGVGPKTATAVVAAIGDGSEFKNGRHLAAWVGLVPRQFSSGDRKVLMGISKRGSQHLRSLLVHGARSVVRTAPNKTDPTNQWINQLRQRRGFNRATVAVANKNARIIWAVLKTGEPYRAAG

SEQ ID NO: 356756 - protein, 310 aa, unidentified
MILERSLPTTPKGIHQTFSKIPRSRIALETGTHSPWVSRQLTQLGHEVIVAHARNVRLIGESSRKDDQLDARTLARLARIDPGLLGPVRHRSAKAQIHLTVIRARAALVSTRTALVNAARGLTKSYGERLRKCGTRQMNREIAKGLSQELRDALEPLLEEIESLNERIAEYDRRIEQIAKEVYPEVALLQQGKGVGTLIALTYVLTLDDPHRFRRSRDAGCFLGLRPGSRNSGRSEPQLHISKEGDRYLRTLMVQGAHYILGPFGQDSDLRRWGLKLAERGGKNAKKRAVIAVARKLAAVLLGNYLLTNS

SEQ ID NO: 356757 - protein, 333 aa, unidentified
MEETAICIVDEAGEIVREARVASEPDALVMFFDALGMTMERVGLEACSLTAWLHQGLSEAGIPVVCIEARQAKAAMGAMPNKTDRNDARGIAQIMRTGWYRPVHVKSPSCRSWRALLTARRMVLNKRRDVENGVRALLREAGLKVGTPSRKDFPARVRELAAGDAVLTGLVESLLSVIRVMTDEVARLTKRVLDEVRVEPTCRHLMTVPGVGPLTALAFRATVDRPDRFRRSRDVGAHLGLTPRRYQSGETDVQGRISRCGDELARTALYEAAHSLLIRSTKWSALRAWGMQVAKRRGMARARVAVARKLAVIMHRMWVDKSEFRWGKRAVAA

SEQ ID NO: 356758 - protein, 406 aa, unidentified
MQDAIVRFGSVDWAANTHAACIVDASGHIVDQFSVDHTAAGLATLVRQFQRQHVARVAIERPDGPVVEALLVADLEVVVVSSRAVKGLRTRYGLAGNKADRSDAYILADCLRTDGHRWASLQPDAPETLALRASVRSRKDLVATRVATANQLRAHLQLVFPAAVSLFAAIDSPIMLRFLARFPSADKAAWLSERRVQAWLQANAYSGRRTPSELLERLRTAPKGVHGATAEAQAVVTLSLVRVLRVLVAEIAQLETQIREQLAQHPDGPIFRSLPRSGTVRAAALLVEIGDCRARFPSPDMLAGLAGAVPSTRASGQHRVVTFRWTCDKKLRDALVDFAQDSVRASPWADQLYRRHRQAHKTHPHTVRILTRAWIGVIWRCWQDHQPYDPARHRALQRVLAPQGLT

SEQ ID NO: 356759 - protein, 313 aa, unidentified
MDQNNYEIVWGIDVSKSWLDISIDGKVTRIDQTKNAINLFIKNNNKENKKILAIVESTGGYERLVANCLTSKNLLVHVAHPNKVRSYAKARGRMAKTDKLDATILEGYGKFIDPTSIHERPSQSNQNLSALSSRLEQLKKTHHQECCRLGLTTDKLIKRSHQKILALLKKEIQKIEDEVMRLIQLDSPLKERYKLLQSMKGVGPAVAMTLICDLPELGQCDKKEIAALVGVAPITKESGQKRGRSMVQNGRSNVRKTLYMGALVAAHHNPLLKTMYQRLIEKGKPKKVALVAIMRKMIVILNAMVHSKTAFHA

SEQ ID NO: 356760 - protein, 344 aa, unidentified
MDQIIRIGMDTSKQFFQLHGVDSAERPVLRRQLRRSQVLGFFAKLPPTVIGMEACGAAHYWARELRKLGHEVKLMAPQHVKAYVKRNKNDGRDAEGLCEAMSRPTMQFVPVKTEEQQAALMLAGVRQQLIARRTQLSNTIRGYAAEFGLTMAKGLDKIEPLLARIAQDEGLPMLARDLLAIQGREYARLQVELKVIEAKLMAWHRGNADSRRLAQIPGIGPIGATALVMKTPDPRAFASGRHFAAWLGLTPKDHSTAGKTRLGKITRAGDEMLRSVLVAGATAVIQQAMRGRGHPSPWLIALLKRKPPKLAAVALANKIARIAWKLMVTGASYDGARMLGAIAA

SEQ ID NO: 356761 - protein, 414 aa, unidentified
MKSWQDHTHYAGLDWAKDHHSVLIVNRDGSIVADFEFEHSLEGWKSFAQKTSAWPNLAVAIETSQGAAVDQLLQRDYTVYPVHPVAAQSYRQRKAPGGTKTDHLDAWALADALRVDGHGWKTLQPMDPMTQQLRLLCRDEVVLIEQRTAMVNQLQQALLEYYPTALAAFDDWTDSFSWEFILAFPTPQALVEAGKRRWEKFLHTHKLWRPETAQKRLKLFAQADQFKASDPIVRAKSQLAVSLAKLLCTLGQQLKLYRKQIEALFGEHPDHDLFGSLPGAKKVLAPRLLAAVGGDPKRYGSHEVLQCIAGTAPISYQSGKLNKVQVRWACDKFLRHTVHLWADCFRKASTWGQTYYQQKRDEGMTHACALRCLGQRLLKILFCMLKNQTPYDAELHTRNQQKHGSWVLKLVREV

SEQ ID NO: 356762 - protein, 319 aa, unidentified
MQPLELLVGIDVAKQSVEVSLGSHLPTIALSNDSEGVEALLERLKGERVALVVMEATGGLEAMMACALQGAGYAVAVINPRQARDFARAMGQLAKTDRIDAHILSQLAGVLDRHPQRERYVRALPEAEQTELAALVARRRQLVGMWVAERNRLPGAHPRARPSVKAVIEALAQQLAHIDRDMDQYVKAHYADVSSLLDSAKGVGRRTIATLIADLPELGTLSHRQISALVGVAPINRDSGKMRGKRTIFGGRASVRQALYMAVLSGARYNPTIKAFYQRLLKAGKPKKVALTACMRKLLTILNAMVKSGKPWQESIHEA

SEQ ID NO: 356763 - protein, 411 aa, unidentified
MEEILCGIDWASDHHDVALIDVEGIKLGRRRISDDAVGLGELTGMFAGHGAGPGTVKIAIETERGLLVASLRAAGYDIYPVNPKAVDRYRDRHHLARGKSDAADAMVLAHILRTDAHLHRPLPADSPAARAIEVLARAHQDLVWSRQHEVNRLRSLLAGYYPAALAAFGDLTTRTAMTVLAAAPTPAAAAQLTTSDLLDLLAAAGRGRRRADARRLAEVFAAPQMRQPAAVEQAMGDAATAVITTITAMNTAVTALAQRIDASFEQHPDAAIYHSMPALGPILSARVPGEFGDDRTRWPDPASRRAYAGSAPITRASGKKRVVLARSIRNRRLYDAAHWWAFAALSVSPGARAYYHQRRADGDGHQAALRRLASKLIGQLHHCLQHRVPYDEATAWTRHQEQSQPAPPAAA

SEQ ID NO: 356764 - protein, 400 aa, unidentified
MNPVVGLDVSSGESEVQAFLDKGKPYGKSFKVSHTNESLEALFHFLKKIENESGLKPTVILEATGHYHTPIIQFLEEHNYLYIMVNPLLSYQAKKSSLRKVKTDAVDAYCLCELFYKEELEPYKKRGTQLLNLRNLTRQHETLTGLYVQAKLQFNAILEQVFPEYKGVFGDLYSKVSLNTLLEYTTSESVLRVGESKLADKIASLCKSRSERWANERAKKLMEAAQRNPFKSTLYHSHLISLEMYIQMLLQYQEHLAKLDERIDALAGEIEEYKIIQSIPGIGEKIAATILSEIGEVERFNHPKKLVAFSGIDPSVHSSGKFTATINRITKRGSSRLRHALYMAVLCGIRGSRNKKLKEFYDKKRNEGKPFKVAMIACTNKLIHWIYALLKHKETFLDLV

SEQ ID NO: 356765 - protein, 338 aa, unidentified
MIYVGIDVAKDKHDCFAMNSDGEILIENFSFQNNSDGFNLFFNSISQFNESFENIKVGLEATGHYSNNILNFLTSKGFNVFVINPLQTNLFRKGQSLRKTKTDKLDARFIATMLISNNLKPYSNLSYHISELKSLVRHRFRLIEERSKFKVSLSRLVTIIFPELEKIVWSISQNSVLYLLNELPSAKNISECNLKHLTNLLQKHSCGKYSRDKAIEIRDLAKISIGTHSPSISFELRQVIQTILFLQSQIDDIDKELKRLVVELDSPILSIPGISYVTAAFILAEIGDINNFDSPSKLQAFAGLDPSTYQSGKFNATHSVMVKRGSKYLRWAYLLQQD

SEQ ID NO: 356766 - protein, 338 aa, unidentified
MNYVGIDHHRQYSHLTVMDQEGQVLRSGRVPNVRIEIEKFLEGLEAVEAVIETGRSSYTMVDVLDEMGVAVKIAHPNEVKAIARAKIKTDKRDSEVLAHLLRMKMIPEVYRRSGENRQAQRVLRQRAFYVSAMTALKNRVHAFLAQQREEVREEVTRETNIFSERGRKMLLGLDLARGEKRLLEALLKTYRHLEIRIGESTVLVEKLYEESREAQLIRTIPGFGKYLAVLVVVEIADINRFADAAHLHAYAGVIPSTHSSGDRTHHGKIVRAGNRWLRWAAVEAVWPGIRADFDLRCFFERLARGKGANKAKVATARRLLTIIYKVLKEGRNYIAYRR

SEQ ID NO: 356767 - protein, 355 aa, unidentified
MDSKKYIGMDVHKESISIAVMNGAGKIVMECVIETKANMILQFIDGLRGDLQVTFEEGTSAAWLQDLLKPHVTKLVVCDPRKNASMRDGNQSDKIDARRLAELLRLNHLNPVYHGEHGLRSLKELVRSYLTITKDVGRVMSRVKAIYRSWAIPCTGKQVYAPRHRAEWLGKITEPGVRRRAEFYYQQLDALRSVRQQVRRELLAEAKKHKAWKLLCQIPSIGPIRAAVLLGILQTPHRFRTKRQLWTYSGFGIETQSSADHRSVDGQLQRAKKQSSIRGLNRNHNHDLKNLFKGAAIVASSKPGPFQEFYTALLTKGLRPEMARLTLARKIATIVLIVWKRGACFDAQHLKPQTA

SEQ ID NO: 356768 - protein, 343 aa, unidentified
MEYYAGIDVSLKESSVCVVDTAGKVVREVKVASEPEALVRYFDELGLPVGCIGLEAGPLSQWLHAGLMAAGRDAVLLETRHVKAALSAMTVKTDRKDARGIAQLLRMGWYRPVHAKSAACKDTRALLAGRKLLQAKLLDVELSIRGILRGYGLKVGEVSRGRFEARIRELTAGHAILETVIGAMLAARMALWNEFTRLRREMLKIVRADRVCRRLMSAPGVGALVALTYRSAVDDPSRFAKSGAIGAYFGLTPKKYQSGETDRDGGVSKVGDGMVRTALFEAAHIMLTRAVRFSSLKRWALAVAQRRGMKRAKVALARKLGVVLHRMWVEATEFRWSNAVPAA

SEQ ID NO: 356769 - protein, 350 aa, unidentified
MHYVGVDYHKRYSYIVVKDDEGRVERRGMVSNTKEELQRFLEPYRPGTAVLEATRNWGLIYDWLEEVLGDVTLAHPLKVKAIAEAKIKTDKISADILADLLRADLLPRAYAASKQTRDLKNILRQRMFFVRVQTMVKNRIYDILDRHPEVVSQAPEVSDLFGVAGMQWLSQTVLPGEDNGLLTSELELLKFLKEKINQSNSMVKELAKKDTRARLLQSIPGIGPFFSLLILYEIDDISRFRDEKKLCAYAGLVPSTHASGGKVFHGRITKTGSKWLRWAAIEAAQTAVRSNPEFYAYYQRIRMRKSPNAAKVATARRLLTIVYRLLRQQRPYQRRTTPEGIMTPAALVMG

SEQ ID NO: 356770 - protein, 350 aa, unidentified
MTEAYDGRQVVGMDLHRRRSVLVRMTADGKRLETARITNSAAELRRVIAKAGHHPTVVLEATYGWYWAADELAAAGAEVHLAHPLGVKAFAYRRVKNDEKDAGDLADLLRMGRLAEAWIAPPEVRELRELTRYRIKLVRIRSSGKEQVHAVLAKLGIPVTCSDLFGTWGSAWLDGLALPQPYAGKVASLRELIGWLTGEIGLLDAVIADLLGSWPPYYAVRALPGLGPVLAAVAVAEIGDISRFPSPGRLCSWAGLTPRHRESDLKVARGRLTKQGSRILRWAMVEAIQHQPADSPPRELKDRIIARRGAQARNIAKAAAARKLLTCVFYALRDGQVRSLAAPGRAAEAG

SEQ ID NO: 356771 - protein, 480 aa, unidentified
MNVKATRTKKQVNVENQAIKLLSKEELGIKIEVIKKELRSYTWRDLETNGKFAKNDKLSFITDDMLIAGCDIGSETHYIRAIDVRGRELSSRAFEFSNTSEGFANAKAWVLALAAKNDKKQIVLGLEPTGHYWFALAAWMVSNGISVVQVNPYAVKQSKEIEDNSQLKDDRKDPKLIANLVKDGNYGMPYLPEKVYADMRRLSMFRDQLTEDRIRNINRLHRELKIYFPEYMDAFGKIDGAFTLEVLKVSAIPSDITALGAEGIKNIWHNEKLRGRGYSRANEIVSYAEKSVGLTDGTDAGRETVKWYAEQILKLDEQLAVIESTLHEKCREIPYAENILEIRGVGENILAGILAEMGDISRFDDVKEIQKLSGMGLVACSSGKHKGQTKISHRGRKRLRYWLFQAAKSAVSHADEFKQLHEYYTTRTNNPLKKMQSLIVIACKILRVSYTILKTGTTYDPQKLLKDIKRPTASQAPMAA

SEQ ID NO: 356772 - protein, 336 aa, unidentified
MEFNFFIGIDVSKDTLDICLLGAENSETVNHQQVSNNDTGIASMLAWLKEQDGFSIKDSLFCIEHTGMYNYPLLQFFSRQEANIWVENPVQIKKSLGLQRGKNDKVDAIRIAQYAFRLRDQAKLWHPAREVIDRLKHLTALRERLVETRKRLLTPVEELFKIGSDAMAKVLERAMRKTMKALEKDLEAIEAQMKDIIDKDDNLKSLYKLVTSVVGIGFVTAVNLIVCTNEFKLFSSHRQFACYSGIAPFEYRSGSSIRGRTKVSHMANKKMKRYLHMASLTGIKLDEGLKNYYNRKVQEGKNKMSVLNAIRNKLVARVFAVVNRGLVYQKKYLVLS

SEQ ID NO: 356773 - protein, 369 aa, unidentified
MKRILKIGMDVHTTNYTLCAMEPIIGEDDRVFATIKVTLDYKNILLFIENLKTKLGLNDEYDIQCGYEAGCLGYSLYNQLTAAGVKCVILAPTTMLTPQGVRIKTDMRDAYMIAQCLSYGGYHAVYIPTEDDDSVKEYLRMRNDHKLALKKIKQQINAFCIRHGFCYDGTKWTLKHLKWLKKLEITHELYRETLDEYMASYEEQEAKIERYDKRIEEIAEQTKYHDKVKKLECFLGIKTHTALSLIVETGDFERFAKGNQYASYLGLAPGENSSSDSIHRLGITKAGNSHLRQLLIEASGGICKGAVGHKSKDLRARQNGNTAEVIAYADKANTRLRSRYYKFIRHGKKCGSSCNSKRTGMFCMGHDDR

SEQ ID NO: 356774 - protein, 418 aa, unidentified
MTVFVGDDWAEDHHDVELVDDTGRRLGRARLPEGMAGMTRLHEMIAEHLDDADVDGETGMLAAGTVVVGIETDRGPWVAALVAAGYEVFAINPLSAARYRDRHSTSGAKSDPGDAHVLAEIVRLDRAHHRPVAGDSAQVEGLKMIARTHQSLVWDRTRHVQRLRQALREYFPAALDAVAAGRLELTDPDALELIERAGDPDRAARLSRSKIAAILKKSRRRDVESRAESIQTALRAPALRQPAALESAYTVVAGTQIRLLLGIIAQLPELEEVLGAGFGRHPDAEIYTSQPGLGVILGARVLAEFGDDPHRYHDAKSRKNYAGTSPITRASGRRTVVLARYARNKRLGDAVHQWAFCALTSSSGARAYYDDLRARKVGHHAALRQLGNRLVGILHGCLKTHTAYDETTAWGHRAASAA

SEQ ID NO: 356775 - protein, 344 aa, unidentified
MKSSKIIGVDLAKTVFQLALADEHHHVAQSKRLNRTQFREFFVKHPPVHVIMETCGTAHYWARTLVAMGHNVTLLPAQYIRPYVRRNKTDANDALAIVEAARNQSIHTVPIKSEYQQALQSLHRLREQWKHTRTARINALRGVLREFGVLVPMGPKAAITTTRASLESLPVWLHVSVQDVLDELTDIQTRITSLEKQLKQMVKADPVIQQFMKINGIGLLSATAMRASVQSPAQFKNGRQLSAWLGITPREYSSGDKRYLGRITKKGDKYLRTLLIHGARSVMARNKIRLRENEKLTGLQQWAIQLEQRVGHNKATVALANKMVRILWATWMHQREFDGDYAVR

SEQ ID NO: 356776 - protein, 313 aa, unidentified
MHVGIDVSKNHLDVAIRETGESFRVENTALGIASLIERLQNGRATRIVMEATGGYEREVAVACAAAELAVAVVNPRQVRDFAKAAGKLAKTDAIDAKVLAQFAELMRPAAQEVLSEDAHALQELVSRRRQIVEMLSSEQNRRHQARDKQVRSDIDEHIKYLKKRLRGTNGEIEQRLKSSQFWKQNADLMNSVPGVGKVTTVSLITYLPELGTLNRKKISALVGVAPLNRDSGNYRGTRGIWGGRAEVRATLYMATLVATRCNPIISKFYRRLVSAGKAKKVALVACMRKLLTILNVLMRTRMPWQEAVALSPA

SEQ ID NO: 356777 - protein, 331 aa, unidentified
MKFEEIIGIDVSKLTLDACIHSQQIFTQVPNTKKGYLKLLSWATKSTGCSLEQALFCFEHTGMYSHALACYMSEKQMNYIMVPGLEIKRSLGIQRGKNDQIDAKKIAQYAYRRREEVTLYKLPEKSLNNIRQLLSLRDKLVRQRAGFEATLKDLSDFIQSSGNKLMFTSQRNLIKALTREIENIEKEIDHVLEGSPGIMNNYRLITSITGVGRQTALQLIVVTSNFLLFEDHRKLASYAGVAPFPFSSGTSIRGKTKVSPLANMKLKALLSACAISAIRHDPDIKIYFERRTEKGKHKMNSINAVRNKLLARVFAVVRRGTPYVQLHQNVA

SEQ ID NO: 356778 - protein, 347 aa, unidentified
MEYVSTIGLDLAKHVFQVHGADIAGSPLFNRKLRRGEVLRFFEKLPSCLVGMEACGGAHYWAREIANLGHDVRLIPPAYVKPFVKRGKTDAADAEAISEAVIRKTMRFVPIKTAEQQADAMVLKTRALLVQQRTQSVNALRAHLAELGIIAARGLPSVAALMTIVREGEDTRLPAAARFALMAVADQIDALADQIFKLERAIVTEAKRDEDMRRLTTIPGVGAITAATIKALVPDPGGFKSARHFAAWVGLTPRPHSSGGKERLGGISKMGNPELRVLLVLGATAVLRIARNDDRARPWLKALLARRPFKVAAVALANKMARIIWALLNKGGIYHRPEPLSIAAVAR

SEQ ID NO: 356779 - protein, 342 aa, unidentified
MEVAVLGIDLGKNSCSVVGLDGTGQIVMRRRMQRDSVIKLAAGMAPCVVAMEACCGAHHLGRIVRDHGHHVRLMSPEYVRPYVKAQKNDDRDAEAIAEAATRPTMRFVELKSVEQLDMQSLHRVRDRLVGERTALMNQLRAVLMERGITVPQGRRKLEQHLAVILDGEELRLSPRMISLVGDMRAEWGALDRRIEAFDDEFAAQAKTDDAARRLASIPGIGVLNATALAAAVGNAASFARGRDLAAWLGLVPRQMTTGGKPRLMGISKRGNKYLRKLLVHGARAALPSLSASTTPLGKWLWNLLQRAHKNTVIVALANKLARIVWAVLRYGGTYNAGALTAA

SEQ ID NO: 356780 - protein, 401 aa, unidentified
MQYIGVDIAKHTHVAASELDDGAPHGRPFSFPNTEKGFAGLLQRFDELGATPDDCLIIMESTGHYWMALWEFLDAHGFKVAVVNPVLTDAFRKADTLRKTKTDGIDALLIAEFARFKRLGPSRISPEAAEGLKQLTRYRHHLVTERTSLKNRLTAACDRIFPELASLFSDKHGATAMALVREIGSARAIAATDIRTIERVVRTASRGHHGRAKAEEVKHAARHSVGCSFAEGALSFEAKHIAALIGHLDAEIDALDEEISRAVDPEIDELLRSIPGIGPVCAATIAAEVGDPDRFGDPRKLMAYAGLDSSTCQSGKFKGDEQHMSKRGSAPLRNALMTAADKARMRDPYFGDYYGQMRSRGKHHYVAVSGCARKLCGVILAVLRERRPYERRPSIQSQDRG

SEQ ID NO: 356781 - protein, 445 aa, unidentified
MHLHAAGIDVGATEHWVAVPEDRDEEPVRRFGAFTADLYALAAWLQQCQSATVVLESTGVSWMTLFAVLEERGFDVKLVDAHYARQVPGRKTDVKDCQWLQELHTYGLLHGAFRPEDQVCVLRSDLRQRRMLVAMASRAVQHRQKALEQMHLKLTEVVSDMNGKTGMEILHAILAGERDPQRLASHRDRRCQHDQATIAKALEGHWRAEHLLTWQQALEPYAFLQQQLQACETQIDACLQTFVTHVEVDAPPPAPARQRRARQRHAPGCDVHGYLAAMTGVDLTQIDGIDALTALKVISESGRDMTRWPTGKHVASWLGLCPGNKVSGGKRSRMRSKPTANRAASALRLAAQGFVNSHSALGASDRRMRARLGAPKAMTATAHTLARLVYSMLRYGTAYVDAGQQAYEQKYRERVLTNLQRKAKAFGYQLVHVKGLESGEVPVAS

SEQ ID NO: 356782 - protein, 458 aa, unidentified
MKAKTRTVGIDLALKHSHMAFIRDEAGGPLGQSFSFPRTSAGFNQLLEKALAGMPETARLTVVMEPTSLAWVPLATYLSLKGHIIYLVNPRRVSDLRKFYSRRKKSDRLDAKVLSNLPNFEEDILTELYLSTGELNALKRHSQQRDKLKQSIGDQKNRIQAVFTEANPTALEAFGEDKFSRVGRAFLRKYINPLKVKGLGLKRFTQVLERKAYGELKQSTVNRLFEACCDTINIYREALEKDKLPFSYEQIQEEINLELDLMEFKEAQVKKLDKKIANLYQQVDPRGDLKSLRGVGDVHAPIILGYAGYIGRFGNARSYCGFTGLVPGKKQTGGIDRKGLKITKEGPNLLKKTYYMVGETARHWDLEMAERYHRLIGRGLHHKQAITAIGRISAARAYAVMKRMELARKGLIKPEEVPYKLRDLEGREISAQEAREQILIRYPSKNSLKKRGRAATAD

SEQ ID NO: 356783 - protein, 406 aa, unidentified
MNAAGIDVSKGKSTVSVMRPLGEVVAKPFEVRHTGSELRRLADYLKSLDGETRVIMEHTGRYYEPVAQFLHDSGVYVSAVNPKLIKDYGNNSLRRVKTDKADSRKIAKYGLDNWVELRQHTPMDTIRYQLKTLNRQCGLYTKTRTMMKNNLIALLDQTYPGVNDLFGSPVREDGSQKWVDFAASFWHVDCVRSISQTAFTERYRKWCKRHGYNFSGSKASEIHAAALDRIAMMPKDAMTKLMIRQAIDTLNAVSATLEKLKAESLKLASQLPEFPVVMAMRGVGDSLGPQLMAEIGDVTRFARRSAITSFAGVDPGADQSGSHEAKSVPTSKSGPPELRKALFLVMDCLLKTMPQDDPVYQFMDKKRSEGKPYLVYMTAGANKFLRIYYGRVKEYLASLEDGASQT

SEQ ID NO: 356784 - protein, 424 aa, unidentified
MFAMKVVYQICCGVDVHKTFLVATIIKTTKGIQPSYQKKRFATFNSSIRQFKQWLLDNECYDVCMESTGKYWIPVFNLLEDSINVTIANPKWVKSVKGNKDDTKDSKWIGDLFRLGLVPGSFIPSREIRILREFTRYRFKLVSCNSSEKNRFQNAFTVCNVALDSVVSDMFGKSASDITNYLITSDVFDPKICSSFLQKSLKKKATTVIDSIEGYQMTSSQKERILLVRTHMEFIQKSLQTLDAKLDELVAPYENAITLLCTIPGVDRSSAITILSEIGTNMSQFNSSKRLCCWAGLTPGNNESAGKKKSVRITRAGVYLKPALVQCAHAAVKSTTTPYYKSKYERLAKRRGKKKAIIAIARMILTAIYHMLTNGETWNPCDLYKIDMPQEMQNKQKSKAIKQALKLLLSEGVISQSEILLSVT

SEQ ID NO: 356785 - protein, 283 aa, unidentified
MTRIICGVDICSASLQARIGRDGASGSFPNNAEGITALATFCRARAVELVAMEATGGYEQQPFALLWEQGLPATILNPRAVRRFAEGMGLLEKTDALDAGVIAWFAEVKGSKPHPLPSIHQKQLRALVTRLRQLTAIRTAQRNQSRLVTDPAVLASFTELLTLLARQIRELEIAIAALISQDPLWREFDAVFRSIKGVADRTVARLMAEMPEIGTLSNKVISKLAGLAPLARDSGQRQGKRPVRGGRPAVREILFVVASVVGRYEPDFIAFQQRLNAAGKPGR

SEQ ID NO: 356786 - protein, 389 aa, unidentified
MIYVGIDIAKLNHFAAAISSDGEILMQPFKFTNDGDGFQLLASRLETLSLGDSIIIGLESTAHYGDNLVRYLVAGNFKVCVLNPIKTSSMRKNNIRKTKTDKVDTFIIAKTLMMQDSYRFVTFYDLDLMDLKALGRFRQKTVKHRTRLKIQLTSYLDQVFPELQYFFKSGLHQKSVYSLLKEAPTPQAISSMHMTHLAHLLKVSSHGHFSKEEAKELRVLAQKSVGSNDSALSIQITHSIAQIELLDSQLKQVEAEMADIMKFNDSVLMTIPGIGYINGGMILGEIGDIHRFPSPGKLLAFAGLDPSVYQSGNFQAKRTRMSKRGSRVLRYALVNAAHNVVKNNTTFKAYYDAKMAEGRTHYNALGHCAGKLVRIIWKMLSDEVEFNLD

SEQ ID NO: 356787 - protein, 408 aa, unidentified
MEVIHERCAGLDVHKETVVGCVRVREGGEVRREVRRFATSTRGLLELADWLREAGCTHVAMEATGVYWKPVWHVLEGELELILANPAHIRNVPGRKSDMKDASWIAELLAHGLIRASFVPPGPILELRDLTRTRKQLMRELVQHKQRIQKVLEDANVKLASVVSDVLGESGRRMLNALIAGESDAHKLAALGSERLAASHATLAEALQGKVTAHHRFLLSQHLRMIEHLEQTVTEFEAQIEAALEPFPAAVERLMTIPGVSATAAHVIIAEIGVDMNRFATVGQLRSWAGLCPQLNESAGKIKSRRLRKGAPWLKTVLVQCAWAAARSKNSYLQAQFLRLRARRGPKKAVLAVAASILTTAYYLLRNQAVYRDLGPLHFARLDQEKTAQRLVRRIKALGYEVEIRKAA

SEQ ID NO: 356788 - protein, 387 aa, unidentified
MPQPNDLSRSLVALDQNSTIIAVIEMSQSSWLVAGMLPGIERQARKKLDPSPERLLALLHRWQDEAVRAGRTITRIALAFEAGRDGFWLARWLEARGVEAHVIHASSVTVSREHRRAKTDRLDTELLKRGFLGWLRGERGHCSMARVPTIAEEDGKRPNRERDCLVGERTRIVNRIKSTLARLGIRNFKPTLRKAAERLATVHTPEGMPLPPNTLAELQRDMARLGFVVSQIREIEQARQKRLEQQPESGPHAMVRLLARIVGVGVETADLLVHELLSRPMRDRRAVARYAGLTGSPDESGARRREQGLARAGNARVRRGMIQLAWRFLMFQKESALALWYRARTADSRIGTRKTMIVALARKLIIALWRFVTTGEPLEGVVLRPAS

SEQ ID NO: 356789 - protein, 354 aa, unidentified
MIIIGVDFHPEFQPIALLNTTTGEVEEKRLAHPEEAEKFYRALAGAGETVRIGMEASGHARWFERLVAELQFDLWIGDAAEIRTKRVRKQKTDRQDAQLILSLLLEDRFPKIWVPSWENRDLRQLLWHRHRMVQARTRVMNQLQAVALNEGLRCKKKLWRERGRQQLESFGLAPWASRRRRDLLELLDRFNPAIAELTQAIEREVENCPAAQRLRTHPGVGVLTALAFVLILGDAERFHCGKQVASYLGLVPLEDSSGNRRRLGHITKQGSSILRFLRVEAAQVAVRSLPEWRSKYFHLVLRRGRKIAKVAMARRLAVQLFWMMRKEWNYEQLKKFGSHAGQPGNRHGVQSNTE

SEQ ID NO: 356790 - protein, 341 aa, unidentified
MLKNTFFIGIDIACDDFAASIYQGPEKPITTKEAIRNNPEGFAMLISWLKKHNIDSTNSIISMEATGVYSEAIAYYLLTYGFKVSLEPPLKVKRAFDPVGHKTDPVDSRQIAEYAYRYSDELRFWQPREDIIEKIKQLLTAREQFTKQSTAIQNAIASYKRHVVQVPLIVKAHHQTLKELKKHIADIDKELDRLIRQNPTISQMTNQLKSIPGVGLLLASDLIAITGAFNDISSYKTLSAFLGICPYQHRSGKSIHKAAHIRNFGPTYARKLLMLAARSVATHNISFRKYYVRKLAEGKAKQLVLNNISNKLIKIACALIKNNSQYTEGYYSINPLCLNLT

SEQ ID NO: 356791 - protein, 312 aa, unidentified
MIEHSYGGIDVSQDRLDVVVLPQGKGFSVTNDRAGWNALIERLRGLPLVAIGLEPSGGYERGVVRALLGAGLSVRRINPNRLRQFARARGALAKNDRLDARLIAEYVAIMPTRAVRHDPAAGRIAEVVTMRRQLSDEHVAVENQAAHLDDAMLRRLAKRRLARLEADIRLLDKRLAEMVAAEPALARRDEVLASMPGVGPVLAFTLIALLPELGRMSRKQIAALVGLAPYDFDSGKLRGHRSIYGGRMPVRNVLYMAALSACRYNPALKAFHKRLAAAGKKPKVIIVAVMRKMITTLNAMLRDGASWQPQAA

SEQ ID NO: 356792 - protein, 411 aa, unidentified
MELLHPRCAGLDVAKDEVVACVRVPDGRGGRSQEVRTFQTFTSGLEALADWLAAEGVTQVVMEATGQYWKPIWYVLEERGFQLLLVNARHVKILPGRKTDVADAAWLAELLEHGLLRGSFVPPAPIRELRDLTRYRKRLIQAHSSEGQRIQKTLEDAGIKLDSVAADVLGVSGWAMLEALVAGERDPQVLAELAKGRLRAKLPQLRQALRGRFGAHHALLIRLAMAHLEQLERSIAELDTHIDQVLAPFAQARDRLDTITGVGKRAAETIIAEIGVDMSVFPTAGHLASWAGRCPGNNRTGGKRRSGKPTKGNRWLGEVLIECAWAAARSRDTYLSAQYWRLARRIGKKKAAVAVGHSILVIAWYLLTDDCDYQDLGGDYFVRRDTDRQRQRAVAQLQALGYQVTLEPVAA

SEQ ID NO: 356793 - protein, 392 aa, unidentified
MLYIGIDVAKSKHDCFIIDSDGVVYTDNLRITNDRIGFNKLLETILNALDGEPATNAKVGLEHTGHYSINIKRFLESQGFVVTCFNPLETSAFRKASTLRRTKTDKCDAKIIATMLFSDESIPTSSPSYQIQELKSLTRHRFRLIGYRGKLKVSFARIIDVVFPEFPGFVRSVNQKSSHQLLLELPTPDTIAACHLTRLTNLIRKSSHGRYGREKAVALRDLAASSIGLSDEALAFELQQTIRMIQNVQAEIDALDRKIKSIVQELDTPLLTIPGISYTLAAIILAEIGDINNFSNPSKLQAFAGLDPSTYQSGKYTASYATMVKRGSTYLRWAMFQAARLVAMRDKTFADYLAKKRSEGKHFNVAISHVSKKLLRTIFYMLKHNEAFVPQS

SEQ ID NO: 356794 - protein, 329 aa, unidentified
MQSEVHVGIDVSKFTLDVFILEVRSHRRFKNNSNDFPAILQWIEKCTKHQSAFICFEHTGIYSMALAAFLESQHIVFAMVSPLEIKRSMGIVRGKNDVVDSKRIAEYASRFRDKIVVTKLPAKDITRLHFLLTLRDKTARTLSGYIAAVNEVQRGIRHEELPELFASYDVIITALKSEIKKIEATVKHIINNNPELKTSFKLVTSLKGVSLIVGTYMIVYTCNFTKFATWRKFACYCGIAPFGHQSGTSVKGPAQVSPIANKQLKRLLHLAAVSAASHDPELHEYYIRRQSEGKSKMSTLNIIRNKVVARAFAIVKRGTPYVNIRQYAT

SEQ ID NO: 356795 - protein, 365 aa, unidentified
MKWLAPIADVVTQNGATARRPAVEHIAIDLGGRESQLCIRGADGKIVKELRCRTGALGGLLATMAPSRVVLETCAESFAVAEQARAHGHEVRIVPATLVRSLGVGARGKKSDVQDARTLSEVSCRIDLPSVHLPSEQSRRLKTVCGMRESLVRARTLLVNSVRGFLRTQLRRVKGRYNGQFTTRVRDRYTELLRAIPADIERQLVVIDCLSTQIHQADRDLALEAKSNALCRRLMTVPGVGPITALRFVAAIDDVTRFSDASRVASYIGLVPGEWSSSDRQQRTGITKAGSPKLRWLLVQAAWSALRSKRGQELQDWSRQVEHRRGSRIAVVALARKLSGIMFAIWRDGSEYQASRAARAVPAAS

SEQ ID NO: 356796 - protein, 331 aa, unidentified
METDQYIGVDLHKVFFQACAMTRHGERQWEGRFPRTPEGIGALVARCTATSAIAVEATTPTWHFVDQIASRVATVCVVDTRKTKLKAGYAAKTDRLDARRLADALRRDSVVSIYVPPPAIRELRELSRHRLMLTQLRTRVLQRMRALLLRQGLGDPPASRLRSAAGQAWLDQVRLPPQAQAALTTMRRVEHDLTAQLAVVEADVAREALADPIVERLQRLHGVGPVLGLMLRAEIGEIARFPSPRHLASYAGLVPYVDSSASHTRYGRITKAGSPWLRWALGEVGLHTLRRKDPLGRWGRKLAVRKGKLTAQVALAREMCQEIMTMWQHVA

SEQ ID NO: 356797 - protein, 323 aa, unidentified
MAKRITICAGIDTGKRKLDVALEGGSERLQAGNTPDGHKALVEWLQRHKVKRVGIEASGGYEQAVVAELRRQRFVVVVFQPAKVHAYAVFHLQRAKNDKMDAVLIAACTAAVKKIHPAPDPRLLPFAEYLTMIDQITEDIARLKNRIESCRNVRLQKLWKEDIARLAKRERVELKALAAAIREHRDLAKRLDLINSIDGIGLKTAMVILVRMPEIGQITREQAAALAGVAPYDDDSGDRTGVRQIAGGRERLRHALFAAALPASFRWNPQLIAFYGRLKGAGKEHKRALIACARKLLIFANTVVARGTPWQKKLPEAASMPAT

SEQ ID NO: 356798 - protein, 407 aa, unidentified
MEVLYPRCAGLDVHAGSVTACVRIAVDARVTYEHRTVSANSRGLLDLSQWLTAHGCTHVAMEATGVYWKPVWHVLESDFTLILANAMHIRNIPGRKSDMNDATWIADLLAHGLIRSSFVPPAPIQELRDLTRTRKQLMREVGRHTLRIQKTLEDANLKITRVVSDILGASGRAILTALVAGETDPERLADLTRGRLKATHAELVDALPGRVTTHHRFMIQLHLTQVDALGAAVRDLDARVGDALGPFRAAVSLLTTMPGLSDTAARVLVAEIGTDMTRFPSAAHLVSWAGLCPRLDESAGKRRSTRIRQGAPWLKTTLVSAAWAATRKKDSYLRAQFLRIKSRRGAKKAILAVANSMLTAAYHMLRDGVEYHDLGSQHFAHRDKDQITKRLLQRLRDLGVVVEVKAA

SEQ ID NO: 356799 - protein, 349 aa, unidentified
MTKVTIGVDLGDQYSQLYVVDAEGTCVETGRVRTTRAGLERWFAGQAPARVVLEAGTHSPWASRALQALGHEVLVANPRKLRGLYENDSKDDRVDAEYLARVGRLDPALLKPITHRGAAAQADLAVLHARDALVRTRTQLISHTRGVVKALGGRLPRCSAEAFARRASGDVPAELQPALAPVLAQVQQVTAAIRAFDRELERRCAEQYPATARLRQVSGVGPVTALAYVLVLEDPSRFARSRAVGAYLGLRPRRSQSGERDPQLGITKGGNPFLRRLLVQGAQYILGPRGPDCDLRRHGERIAARGGKNAKKRAVIAVARKLAVLLHRLWISGAVYEPLRHSTALAQAS

SEQ ID NO: 356800 - protein, 439 aa, unidentified
MLSIINPHAAGIDIGDTVHAVAVPPSAADVPVRIFGTMTCDLTGISKWLNECEINTVAMESTGVYWKPLFSHLVREGFEVLLVNARNVKNVSGRKTDESDAAWLQKLHSCGLLSSSYLPGDEQEALRTLIRFRKTLVSDSSRCVLRMQKSLELMNIKIHTVISDITGQTGTAIVEAILAGERNAESFLPLISKRIKADKDTIMKSLEGTWRTEHLFTLGQSYDLYRYYKARIEACDKQVEQQLCNYEALRNEGEVKTGDKDIAKRQTKKAKHKNSPRFNVRGYLHGILKVDVMAIPGLSEIAGLQILAETGTDMSKWATEKHFVSWLNLCPNNKLSGGKLISSHVMKGRPSIAGQAFRAMANAVQRSDHWLGDYFRRMKAKGGNKYAIVATANKIATIYYKMVSTGSEYSPPNLEDYQNKRKEHKIKYLERMLHHLRTM

SEQ ID NO: 356801 - protein, 326 aa, unidentified
MLGSRQFPATAAGYTALLAWLASLGTVIRVGIEGTSSYGAGLATVLTAAGVTVVEVDRPDRSTRRRHGKSDPIDAEAAARAILAGRATGAAKTHDGVVECIRVLRIARSSARDQRADCMRRIKSLLVTAPEALRAKLRGLSDTKLVATCAALRPDHRDASTPTTATKIAIRALARRHTELTGELTDLDGLIRPLVARANPALLDMHGVGPEVAAQLLITAGDNPYRLHTEAAFAMLCGVAPLPASSGKTNRHRLNRGGDRQANNALWRIALCRMKTHAPTRDYLTRRITEGLSKPEIIRCLKRYIARDIYRVLTAGTTYNGPALAA

SEQ ID NO: 356802 - protein, 398 aa, unidentified
MNAVGIDVSKGKSKIAIIRQFGEVVVKPFDIAHYPDQLAELCEYIRSLDGESRVVIEHTGKYSDPIANFLCESGIFVCMVNAKLIHDYGGDTIRRVKTDKVDALKIAGYCLDKWTKLSRYEPASEQRKLLKTYNRQLSEYTKIKSMLKNNLISLLDQTFPGINELFSSPAREKDGHEKWIDFVLKFSHCNTVSTLPRQSFAIKYEKWCRKNGYNFCPHKADQVYSAALNCLPTLPNNDFSKMLIIQTVHQLNAFCETIATVKAEMSKIASALPEYPTVLAMHGVGKTLAPQLIAEIGDIRRYPKRSSLARFAGIEPPENQSGAYNQHSRRISKQGSPHLRKTLFQVMSCVLQNSNQGEPTFQFIDRKRAEGKPYKVYMIAGANKFLRIYYARVSECFA

SEQ ID NO: 356803 - protein, 414 aa, unidentified
MFIKLAVASMFTNLFLLPLSLKPLPGVDPSYQKKRFSTFNNSILQFKNWLIENQCRDVCMESTGKYWVPVFNLLEDEMNVTIANPKWVKAVKGNKDDTKDSKWIGDLFRLGLVQGSYIPCKPIRILREFTRYRYKLTSCRTSEKNRYQNALTVCNVALDSVVSDIFGKSATSVIDCLIEQSGNSINHEEIASRLLRSLKKKSDSVIESIEGYQMTDPPKYRMRLVRAHLDYITSTINDIDTMLDSLIAPYENAVQLLCAIPGVDRNSAITVISEIGTDMTPFSNSKRLCCWAGLTPGSNESAGKKKSVRITRAGVYLKPALVQVAHAAVKSDKSPYYKQKYERIMKRRGKKRAIIAIDRMILTAIYQMLSTGEAWNPTDLYKTDMPEPLKEKQKEKAIKQAKKLLIREGILSEL

SEQ ID NO: 356804 - protein, 361 aa, unidentified
MAETRIAHDDQVRVTVGVDTHKDTHVARAKDQLGRRLGERAIPTTPAGYADLLGWAEGLGVLEAFGLEGTSSYGAGLARHLRREGQVVVEVIRPNRQARRRNGKSDPADADAAASAVLSGDASGPPKAGDGTVEMIRALRVARSTALKARTQAANAMQALVVTAPDQLRQSLRGLSKIELVRTCARARPGKLAGTTAATKAALRSLAVRHEALEAEVKALDGEIGPLIATTAPELLAVFGVGPDTAGALLVAAGDNPDRLRSDAAFSMLCGSSPVEASSGKVTRHRVNRGGDRQANAALYRIVVVRLRHHEATQDYMRRRTTEGKSKPEIIRCLKRYVAREIYTVLCLMATNRAGLADAAP

SEQ ID NO: 356805 - protein, 416 aa, unidentified
MQVVYARCGGVDVHQKTVVACVLLTEPTGRVQREVRTFGTMTADLLALNDWLNALAVEQVALESTGVYWRPVFNLLEADHEIILVNAQHLRAVPGRKTDVKDSEWLADLLRHGLVKASFIPPQPIRELRELTRYRKTLVQSRAQEVNRLHKVLESANLKLGAVATDVLGASGRDMLAAILAGEAAAAVLAELARGRLRAKLPQLRQALEGRVTTQHRLLIRHGLAHIDFIEQQLAELATEIEAQLTPFAEAVALLQTIPGVAEAAATAIVAEIGVDMTRFPSAKRLASWAGLCPGNKQSGGRRLSGKTTTGNGWLRAVLGEVAWAISHTSGNYLAAQFHRLARRRGKQKAVLAVAHSVLVILSHLLRDHQPSSDLGADYFEQLDRTRLERRYVHQLERLGYSVTLTPSVTLTPSAA

SEQ ID NO: 356806 - protein, 346 aa, unidentified
MEASVEKVSIIGLDIAKSVFQAHGADASGGVVFRKKINRAKLLEFFASQPPCTVAMEACGGAHHWGREMAKLGHEVKLIAPKYVKPFVKRQKNDAADAEAICEAACRPAMRFVAVKSETTQASALVFRTRDLLVRQRTQITNAMRGHLTEYGLVVPQGAGHFKKLVAHLEDPASPLPNEVRSILSLLSQTAMRLDEKISLLDKEIARRTRDDEIARRLMTIPGVGPITATAIAALAPPAATFRKGRDFAAWVGLTPLQKSTGGKQKLGATSKMGERTIRRLLIIGAAAAIHHATRRGVPPTTWLGRMLARKPRMLVTVALANKMARIVWALLVKGEDYRAPGGAAA

SEQ ID NO: 356807 - protein, 414 aa, unidentified
MEVLHERCAGLDISKRDAKVCIRVPGGRGGRYRNEVTTFGSMTGQILELRAFLLEQQVTLVVMESTGDYWKPFYYVLENAPFELLLVNPRHVRGLPGRKTDVSDAQWLADLGAHGLVRGSLVPPPPIRELRDLTRTHADLTRDRTREYNRLQSVLEDAGIKLTSVASKINGVSCRLMLDALVAGERNPKVLAGLAKASLREKRDQLTLAMTGRFTDHHAFLVALHLQVIDQLTAAIDQLTTKIQVVTEPFHAQVALLETIPGVSQQIAQVIIAETGGDMTKFPTAGHLASWAGICPGHNQSAEVTKKAKTRPGNSYLKGALGTAAMSSMQVHDTFLQDRHHRLKPRIGGLKTIVALEHSILRSVWHMLSTNQPYRELGAGYHQRRHPQNALRSITRQANGLGYTVRFDPITQTA

SEQ ID NO: 356808 - protein, 413 aa, unidentified
MDVMVERCAGLDVGKDEVVACIRTPKTSGHGRHSELRVFATFTSALETLADWLTENGVSEVVMEATGPYWKPIWYVLEDREFDLKLVNAKHVKMVPGRKTDMADAAWLAELLEHGLLRSSFVPPPAIRELRDLTRYRKRLIQTHTAEQQRVQKILEDAGVKLDSVASDIFGVSGRAMLAALIAGERDPDTLAALAKGTLRQKLPELREALRGRFRDHHAIILKITMDHVAHLEDAIAALDAEIERVMVPFSKARDHLDTIPGVAKRSAECIIAEIGIDMTRFPTAAHLASWAGMCPGNNITGGKRGSGKTTKGNRWLGEILNQCASAASHTRDTYLAAQYWRLVRRIAKRKAAVAVGHSILVICWHLLTNDCDYADLGGDWFTRRTDLDKRRDHLVRQLQDLGYGVSLTKAAA

SEQ ID NO: 356809 - protein, 438 aa, unidentified
MINKKIRKINHFSAGIDIGASDIFIGVENKEVRSFPTFTENYLEAISYLKENKITTVAMEATGVYWYALYDMIEASGIEVYLVNGRAMKNVPGRKSDVQDCQWLQELHSYGLLRRCFIPDDITRQLRTYCRLRQDHLSLSSQHIQHMQKAFDSMNIKLHNVISQINGVSGLRIVKAIIDGNHNPIELSKLCENSILKKKQDLVIVSLKGHYREDYIFTLSQAVDGYEFYQKKALECDKQIEKLLEKITKDKSIPQKIKPAKRIRHNAPKIENLHRMLMQLTDGNDPSQVVGLTDKALLELIAETGTDLSRWPTEKHFTSWLCLAPGKHQSGKKNKNRNRKGHTKAGQIFRNAAFSLTKSKHTAIGAFYQRIKAKKGPLIAIKATARKIAVIYYNVMTRGIEYVEKGIIGYQQKVKEQRLKYLNNQAKKLGFNLLPINT

SEQ ID NO: 356810 - protein, 342 aa, unidentified
MAIVAGFDVHRAQITFDALDTDTGEVSRGRIDATPTAVARWTQRFDGCEIDVAVEACTGWLFVCDALVAAGAVPHLAEPVETRALRGRKRRAKTDREDARWLCELLADGRLPEAWIPPEHVRQWRSRARLRHTLIGERTQWMQRIQATLFHHGIGGTPDKLRTPTGRAYLEGLQLPDDARERIAIALAMVDAIDAQIAPLERDLRQLARRQTGCKALMGLYGMGELTSLVTLCELGDVQRLSASRKAVRMAGIDIGVHRSDRRSRVGKLNRQGSPQLRWALYEAALAACRPSSPDHADYLALKARGLSHTRASLTIARKLARRSFHVLRELGPNAVEPIPTR

SEQ ID NO: 356811 - protein, 400 aa, unidentified
MLSIGIDVSKGKSTVCGMKPGGEIVYTPFEVQHTREGMSELVSLLRGSGEEVRVVLESTGSYHCPVVAALLENGIFVSVVNSLRMKRFCSQSIRRVKTDQIDAMQIALYGLAYWQELQPTRLPENTYRELQLLARQYYQMTSILIKAKVDFNALCDQVLPGMQELMNDHAGRHKLSDFVLRYRHTAHILEMGETRFRKDYCKWAEKKGYRNRERMAALIFATAQNGIPVLPNAPSTQIVITEAIRVLHTVEASRDAILTQMQALAKTLPEYSLVREMPCIGDTLAPRLIAEIGDVRRFHSKRALIAYAGIDAPPYQSGKFSANNRHISKRGNRYLRKTGYEVMQSYVMHKPANDPIFTFIEKKRGEGKSGKLAMVAGLNKFLRVYYGKVTELYRSLPAIK

SEQ ID NO: 356812 - protein, 343 aa, unidentified
MAIVNVGIDLAKNVFALHGVNEFGQVDLRRPSVPRAKLHELVAALPPCTIGMEACSGAHHWARLFAQRGHTVKLMAPKLVTPYRMSGKRGKTDAADAAAICEAVQRPNMRFVPVKTVEQQSRLMVHRTRQGFVQTRTAVINRIRGLLAEFGIVLPHKAQVVRREAARHMDSLPGFGKLVIEDLLDEIRHLDERTQAYDAHVRSMARNCTAAQQLLQISGIGEVTATAIVAMVGNAREFSSSRQFVAWLGLVPGQYSSGGKTRLGRITKAGDAYLRGLLVMGARAVLNAAGAKDDALSRWAKNVALRRGYWKAVVAVAAKNARLAWAALTKGASFTMPACARQP

SEQ ID NO: 356813 - protein, 347 aa, unidentified
MRFYTNQHPFYCGIDLHARSMYVCILSHDGEILVHRNMKAAPEPFLKAVAPYRDGLVVAVECIFTWYWLADLCAQEGIPFVLGHALYMKAIHGGKAKNDKIDSQKIAALLRGGMLPQAYVYPAEMRATRDLLRRRTHLMRKRAELLAHVQNTNSQYNLPEIGKKIAYKANREGVAERFTDPAVQKTIEVDLALITYYDQLLSDLELSILQTAKHHDANTLYLLQTVPGIGKILSLVLLYEIHQIDRFPRVQDFASYCRLVKCAKESAGKRLGTAGTKIGNAHLKWAFSEAAVLFLRNNPAGQRLLARWEKKHDKGKALSILAHKLARAVYYMLKRKVAFDKELFLQS

SEQ ID NO: 356814 - protein, 374 aa, unidentified
MMDYNEVFVGIDTSKLRNVVAVAEGGRNGEVRYYGEIENTEAATSRLVKKLAAQHRRLTFCYEAGPTGYGLYRRIKMLGHECVVVAPSLIPKKPGDRVKTNRRDALNLAKLLRAGELTAVWVPDARHEAMRDLVRAREAAVDDLKSKRQQVLSLLLRLGRHFTGKRTWTRAHMNWLVSQKLAHREQRIAFEEMLLAVRQADERVTRLEKAIAAAVPDWSLAKVVTALMAVRGLDLISATVFLAEIGDLSRFASPRQLMAYLGLVPGEVSTGDRVWRGGITKAGNHRARRILVECSWSYRHPPRVGKKKLAKVEAAPPAVREIAWRAQARLTARYRALARRGKRPTLVVTAIARELSGFIWAVSRAVGAPATPAA

SEQ ID NO: 356815 - protein, 419 aa, unidentified
MKLFVGLDVSKAHLDTCFLLREYDSDTILLEKRVKNSDAGSSMIKKYIFEFHKEFDFDKIVVGMEATGQYSLHPSLFFSNDSDLILINVQTVVENPRVISRYSKVFTEEKNDRIDAQLIAEFLSTEKYTETTLRSEKHLALLRLTRTRYQLIHQKNEAQQHYLETLYYKCNTLTSDLKEADISTSVFSSTMVELMNGDFSMAQLQAMKTAELVDYLQKLGRQRFKAPDKLAKVLKKSIRDSYRLGKVAQNSIDINLGVQMRVIRALEKEIKVLDQAIKDIMETMSESKVLLSIPGIGPVFAAGIMAEIGSIDRFDHEAQLAKYAGLHWPKHQSGNHQREHTPMSKSGNRYLRYYLVQAANSVRHHIPEYTDYYNKKYNEVPKTQHKRALVLTARKFVRLVFALLSKHQLYIARSEAIES

SEQ ID NO: 356816 - protein, 411 aa, unidentified
MEILHPRCCGIDVHKASVCACISIKEAGVVEKHKRRFDTTTAQLRELVLWLQQQQVSKVAMEATGVYWKPVWNLLEEEFELLLVNPQHLKSIPGKKTDFKDGERIADLLQHGLLRGSFVPPRPIRELRDLTRMRATLAQERSSIINRIEKTLEDPNLKLGVVASDVVGASGRAMLEAVVRGETDPAVLADLAKGTLRNKIPQLKLALQGKITDHHRFMLLQWLDMLDLVDRKIALLEQQIVEHSRPFEAMIHTWMQVPGLRRINAFSLLAEIGADMSQFPSAAHLASWAAVCPGNRESAGKQSSGKIRSGNPWLRRTLCEAAWAASRTKNSYFRALYQRLARVRGKNRALIAVAHSLLVTVYSFTVAGQPYQDLGLDYFNRLHKHHLEKTLIKRLEKLGHRVILEPRGNAA

SEQ ID NO: 356817 - protein, 428 aa, unidentified
MSERDYNRQAARRQRISKATLIVGVDVGNAFNALGFMNKDGKVLGSCSKLCNSREGFEQFVKMIEGLKAKHRLRDVLIGMEPTGHYWRKLAYFAKEHGYEVRFVRTTALKHHRELDESSSAKSDRRDALTIANITREGKYIDTVIEDGVLRQLRTLSKARERLLRYSVSAKNSLHAALDDYFPELHEIFRSMGARSLWVILEKCPFPEDVVLMKASTLQEMIARSSRKKAGSAGKAKAFYEAAQNSIGVKQIGTADRYRVRMCLEEVKRTVLTLKDMDRQLKSMVKDIPASSYLMSIPGIGPLSAAVFLGELGDPSHFHNAHQIVKYAGYDPQESDSGSRVGRKFISKKGRWLLRKYLFFMSMRVTVLSKYFHEYYHRKLETKNRVGQQPRRKEIICAVAIKLIKVIFALLRDKRSFEDTASPAVAIA

SEQ ID NO: 356818 - protein, 369 aa, unidentified
MGEYSEAFVAFDTSKTKHAVAIADGGRGGEVRFLGDISSSPAAVERLIRKLAGRYGKIHFCYEAGPTGYGLYRQIQTLGHACLVIAPALIPKRPGERVKTSRRDAVTLARLHRAGELTGVWVPDAVHEAVRDLVRAREAAADDLRRKRQQLLSFLLRHGRIYSAGGHWTLAHRRWLAKQAFEHAAQQIVFQESIDAITDAAQRLRRLEQQLTLIVPSWSMAPVVEAYQAMRGASFLVAAIFAAEIGDVRRFETPRQLMSFLGLVPAESSTGDTVRRKGLTLAGNRRARRALVEAAWTYRYPARVSETLRVRLDGLPKPVRDIAWKAQVRLCARYRRLSATGKKLPVVVAAIAREMAAFLWAIGREVVPA

SEQ ID NO: 356819 - protein, 355 aa, unidentified
MMNDKQVKVYGGIDTHADTHHLAVIDQAGRRLADAQIPTTATGYQAALRFLGSWPGLVSVGIECTGSYGAAVTRVVREAGITVFEVNRPNRFDRRLHGKSDPFDAYSAAEAVLGGRASAAPKGGDGLVESLRVLRTSRSSALQARTATINQIKGMLITAPEDLRTRYKGLSTPKLIAALAASRPTPTPVTAAEATAYSLRLLARRWQALTGQIEDLAGHLQRLLDDHAPDLMRVFGCGRDTVAQLLITAGDNPDRLRSEAAFAALAGVCPIPASSGKTKRHRLNRAGDRQANSALYHIVMVRLRYNQETRDYVARRTAEGKTKMEIIRCLKRYLVRQLYPLIVETLHPRKEVAAA

SEQ ID NO: 356820 - protein, 304 aa, unidentified
MFGIGIDVSGENLDVAVHEQAFRQFKNNKRGWASLIKWLQQWPAKQVVLEASGGYEQKALDALHGAGLPMVRINPGRGRSFASAAGKQAKTDRIDAMVLAHMADALKLTRYVPPAAWQRRLGELCQRRRHLVQMRVSEHQRMRAFSEPSLISMLNQHLREIQRSIKQLDSIIAALLAEQDGWRDFAKLKGAGPVLMATLACELPELGRLSGKAISALVGVAPMSRESGTWKGRRSITGGRAVVREALYMAALTAKRYEPRLKEFFESLVNQGKPGKVALVAVMRKMLVILNARKRDAEAQMASA

SEQ ID NO: 356821 - protein, 363 aa, unidentified
MQYLNDTELSSHEETRCQFNGSTGAIKLGIDVHQDFYVVVKQEGGSNPKPPQRFHKEAFLHWAAKLRKEERDVHAVYEACGFGFGLQRRLSMLGIQCYVVCPQKLDERNKRVKTDGLDAKALCLRLDRFLQGNREALALVRVPSKEEEQKRAIHRQREQLVKARKVLEAQGRSLMVNHGIEPVNTWWKRRAFAKLQVPVWMKELLCNSQPILLALEEKIRALTVQLQAAAGPNQPRGFGALTSVVIDREVGNWHRFKNRRRVGSYTGLCPGEYSSGNTRLQGCVTKHGNPRLRAALVELAWRLVRFQPHYKPVIKWREVLAKGALATGAARKKAIVAVARQLAVDLWRIRTGRLSAQKLGLIN

SEQ ID NO: 356822 - protein, 387 aa, unidentified
MSKQNDLSKSLVALEQDATLIAVVEMGQTSWLVAGIVPGLNRYPLKKLGPDRDALLQLLHRWREEAAKAGHAVNRIAVAYEAGRDGFWLARWLRAQAVEAYVIHPSSVPVPREHRRAKTDRLDTELLKRAFVGWLRGEPKHCSMAAIPTLEDEDARRPSRERQTLVGERTRILNRLKANLARLGIRGFRPNLARSEGQLEALRTPEGAAIPRNTLAEMRRDMDRLQVVKRQIKEIEKTRAKRLSKEPSEQRDAMVRVLGRVVGVGVETADMLVQEVFSREIRDRRALARYAGLTGAPDESGQRRRERGLAKAGNSRVRRGMIELAWGHLLHQKGSPLTEWFWKRASDGRGGTRKTMIVALARKLLIVLWRLATTGETPAGLQLRPAA

SEQ ID NO: 356823 - protein, 466 aa, unidentified
MKRNRRRPSPKPRTSPAALERLHPDAAGIDCGSAEHFVAVPPDRDATPVRSFATFTGELHRLADWLAACRITHVAMEATGVYWIPIFEILDARGFQVILVNARHVKNLPGRKSDVSDCEWLRDLHILGLLRGSFRPADQIVALRGYLRHRTTLIESTGALVQRMQKALIQMNVQLPLVVSDITGVTGVRILRDIVAGQRDPHHLAQHRDYRCRASEAEIVAALTGNYRTEHIFVLQQNLELFDAYQRQLVACDTAIEAHLARLTATVAAPTTPLPPSRRRRNAREKNEPRIDLRTPLHQLTGADLSQIDGIGPYNALRLLSEIGTDMNRWPTEKHFTSWLTLAPHNKISGGRLLSSRTQPSANRAAAILRLGAMNLGRTQTALGAFYRRLAFRVGKAKAITATARKLAILVYRTLKNGMVYADPGAEVYDAQHRTHVVRRLRQRAQNLGFGLIDLSTGEVVEGAVS

SEQ ID NO: 356824 - protein, 367 aa, unidentified
MLTSIALTYVGLDTHKDSISVALLRPGQSVPDEDRIANTPEEVRHLVSRWGDRTAVRACYEAGPGGYELQRLFTALGVDCAVIAPALIPRRPGERVKTDRRDARKLCRLFRAGELTAVRIPPPEEEALRDLLRLREDLGEDILRARHRLSKFLLRHGRTLDGASWTKRHLRWVREQRFGLPQLERLRDEHLAAIDMRVVQRDQIERELLRIAAAEPYASPVRRLSALRGIRELSALTVLVEVGDFQRFGSARAFMGFTGLVPSEESSGERRRLGAITKTGNAHLRRVLVEAAWHYQRKPARNLRGRPRLQDQPASVLAFALALEQRLHERYWRMVNRHKLGNVAVVAVARELAGAIWALMRLEPATA

SEQ ID NO: 356825 - protein, 385 aa, unidentified
MTYKIAGIDVHKKVLMVVVIDASMPESKPERRRFATMPSDLRRLLTWLREQGVEEAVMESTAQYWRSVWLELEPYMRLQLAQAFSNRAPRGRKHDFKDAERLVRRLIANELILSFVPDGEQRSWRNLTRMKLQLTRDRVRLQSQMECLLEEMRIKLSIVVSDLLGASGLRILHALAEGETKPMHRQMLGLQLERLQLLDGQIAKLNGLIAQAMKPHQDAVIRLAEVPGLGVDSAQQVNAEVGVRATFPSASEFASWVGTCPGKDESAEENHSSRCAKGNKYLRRVPNQAAHAAVRKNGSHFQAVFRRLLPRLGYQSAVWAIAHRLCRLVWKILHEGVRFIERSSQSDPKVRKQRARILARALRKLGYDVAITPINPATTEMGMQM

SEQ ID NO: 356826 - protein, 324 aa, unidentified
MLEELPDRKEVKLVFVGIDVSKARLDGAVRPTGEVFSQPHSPEGIAQLVQRLQAMQPSLVVLEATGGLEQPLVIALAESDVPVVVVNARQVRDFARATGRLAKTDKLDAMTLALFAEAVRPQLRSLPDAEHRALAALVARRRQLVEMIVAERNRLHASRDSAVAEDIRAHLAFLEERLAQMDRELVQAVVAHSGLKMRFDLLLTTPGVGRVVALTLLSELPELGRVNRRQIAALVGVAPLNRDSGQLRGYRGTWGGRAEVRRVLYMAALVAARWNPVIRRLYQRLVAAGKPAKVALVACMRKLLVILNAMLWSGTCWAPRAMEA

SEQ ID NO: 356827 - protein, 358 aa, unidentified
MKHYIGCDAHKKYSVFAGISEGGEIIPPQRVEHDRESYRSFLKSLPPASKIAIESVGNWYWLIDEMEKAGHIPSLVNAGKAKLMMGNINKTDKLDARGLAILARNGTLPEVWIPPGELRDQRELARMRIFLVHIRTGLKNRIHATFSKYAITFEEVSDLFGVRGRNLIAKCLVELPPETENSVKEQLKLLDQLQWQISTAEERIRQVVRISPEMRLLMSIPGVGPILAILIALEIGNVARFGDGAHLASYCGAVPRVKSSGGKTHYGKTRPDVNHYLKWGFTEAANVIVLNQHRMTGRHVVALYRRICQSKGHAKAIGALRRHLAEAAYAVLKSGQPYHEPILSKRPSVTKEVCARLA

SEQ ID NO: 356828 - protein, 298 aa, unidentified
MLGLDVGKSSHWACLIDRDGEVLSSAPVRNREAELDALFASVPAGTLVVVDQFRNIGSLAVRRARAAGLGVAHLPGLAASRAAGLFAGEAKTDERDAAVIARTALGVPDSLSGVPGRGEALEAARALSSQRDHVVACATRDKNRLRAVLLESCPALEAAVDLSDRRWLELLAGFGGAWGIARSGAEGPQAEAAGEAAAASTAPPPALIEAENRQVRFLAARISEALDEAGALEAETAALLEGDETYACLLTVPGIGPRTAAQLAVSVDIGRFPDHDHLASYCGIAPRVRSSGTLLALL

SEQ ID NO: 356829 - protein, 411 aa, unidentified
MKSQLETLHKCVAGIDVHRMKHVVTVLIEDATGTITRHTREYGGFKRDLKALADWLRELGVELVIVESTGIYWKSVYARLEDVGLRIWVVNAHHVKHVPGRKTDVADSEWLAQLGRYGLVRPSFIPPKDLRELRLVSRYRRKLEAMRSAETNRLHKILDDAGIKLGGLVSDINGKAARAMVDGLIDGLAPCELIKLSGRLKAPKESLLASLEGDLTARHRLVLEEIREHLRELERHLEKLDAYLREAMAPYAWAWTLLQTIPGIDEIAAALILIEIGDDLSHFGSADRFASWAALCPGNHESAGKRKSGKTRKGNLILRYLLCEAANGAIRTLSVFREKYRGLMIRRGHKKAIVAIAHKLIRTIYFMFTRRQTYHDSGFDYAAANVKKNAPRWIKALERHGYVVKHSAAAA

SEQ ID NO: 356830 - protein, 351 aa, unidentified
MNILAMDLGKSKTVICFYDSRTGKYEFAKVKTMTQHIHDLIVKQSPDRVVFEICSSAGWVYDIVKALGIEVEVANPNTQAWRWKNVKRKNDRDDALKLAQLSAMRQLPTVHVPKREVRQKRSLIQYRQRLVKRRTQIKNNIRSILDKEGLRLVSGKSGWSKQSLAKLRQMSLSIEKCGFDNLWRGQLHVELDMLKATEKCLADVTAKLDVQAKNDEQIQRLQTAAGVGPRLAEAIVAFLDEPDRFATGKQVGSYAGLTPKQYQSGSMDRQGRISGQGNKLLRALLVEVSWLGLRHNSWMRQTYERLLRGSPSRKKIAITAVARKLLVRCWAMLRDEQPWQNLEVELEKEAA

SEQ ID NO: 356831 - protein, 372 aa, unidentified
MTQSNILFIGMDVHKESIVISLADDDRSEVRRYGAIGGTMEDFKKLLRKLVSTGKELFFCYEAGPCGYELYRYITSQGHQCIVVAPSLIPKKAGDKVKTDKRDADNLTRLLRSGDLTSVYVPNAEDEAIRDLSRAREDAVLGLKSAKQRLKSFLLRHGIRFNGSANWSEKHLRWLAEDVNMSYPAQKVVFQEYVNTVTEANARVKRLEQEILYHTKQWRLYPIVKSLMALRGVRMVVAVTMMAELGDLTRFDNPKQLMSFLGLTPSEHSTGDKKKKGAITKTGNQHARRVLVEAGWSYRFPAKVSKEMQKRQEQLPLPVRDIAWKAQLRLTKRFRTMANNGKLKNVIVVAMARELAAFMWAIANEVPILPRD

SEQ ID NO: 356832 - protein, 400 aa, unidentified
MYKYFLGIDISKDSFDFCFTDETEKVLYRDHYQMDITDFTKLSDYLAPFSKDEILIVMEATGIYHLNLLSFFLEQGLNVSVVNPLFIHAFTKSMTIRKTKTDVKDAHIISIFAKRNYSSLKLSKSTDLETIKPIVREKDKLTAQISAIKTDMKSIVNQLFPEMLKNTNIFTKSSLNLLLQAPSKRVIRNLKEKKIAKLLSCDNAKGKKPSITANEILSLAKNSIGINNQSLEKILVSKIKQLEFIQIQLDEFNELIEQFVDEYHNNDIDLLTSIGGVGKPSAASFLTELGDINNFATYKQLTAFIGTDPTIYQSGTSVNVKGSISKRGNSHLRRIVWHMARAASVWNATLKAYYNKKREEGKTFKQSVIAVANKLIRIIFSMLKNNTKFDLNYQPQGVAE

SEQ ID NO: 356833 - protein, 367 aa, unidentified
MPFVSMGAAPFLRSRDLEQSPGRRARIRQDRERAIASPTREVWVHKNEGAFVGIDVSKAHLDVAVHGEEDVRRVVNDEQGIQDLVAELVQLSPELVVLEATGGFEMPTAAALAAAEVPVVIANPRQTRDFARSTGQLSKTDAIDARGLALFAARVQPNVRELPSEDAQALDALVARRRQIIGMLTQEKNRLGFALKPVQKGIRKHVAWLERQLAEVDEDLDARIRKSPVWAAKSDLLQSVPGVGPNLSRTLIAELPELGSLTHKQIAALVGVAPRARDSGKFRGKRMIWGGRAPVRTALYLSVWSASRWNPVIRRFYDRLRAQGKPPKVAQTACMRKLLTILNAMVRDGRSWDPSIPLDQLRLQHSC

SEQ ID NO: 356834 - protein, 418 aa, unidentified
MNSDPESIPILRFIAIDIHKHYVVVGGMNRQKEWLLRTRRVRMSRLPAWLQKNLSPTDAVVIESTSNAWDIYDLIHPLVAKAVVANPLKVGEIAGAKVKTDRLDVERLLTLLIADIVPEVWVPPHHVRDLRSLISHRWRIHKQIAMTKNRLHSFIHRFNLIPPDGPLFSKNNRSWWQHQEFSSIVRLQIDQDLLILEHLTTHKEAIHQELARLSNRKPWADDMVFLMQIPGLGVVLSMTVLSAIGNIFRFEHAKNLVGYAGLGAGVHDSGQKHQGKGITKRGRKELRWAMVEAAWGAVRSDPHWKSQYEHIKLRGKHANEAIVAIARKMLVSIWHVLSKRQPRRHSSDEDLAYKMLIWSQRMNETALDGMTRQQFAKFGLLRLGAGQDITRIFRNGKPRRIAPAQDILALKPELNLLE

SEQ ID NO: 356835 - protein, 341 aa, unidentified
MKQFIRIGVDLAKNYFQIHALSSEGAPAIKRKVTRRKMREFFSQIAPCCVGMEACASAHYWARELKAMGHNVLLMPPAYTKPYVKRGKNDAVDAEAICEAVSRPGMRFVPIKTAEQQATLMLHKTRELLVKQRTMSVNAVRSHLAEFGIVVAKGIGRVEELLELAEADATLPNATVMAVQVLGRQIEALDRGIEDLEKEIAKAHARSEMSQSLSEIPGVGKLVASVIAASVPDPSVFGSGRHFAAWLGLTPRQNSTGGKQSLGAITKAGNRYIRKLLVLGATSLLNVVSKRKGGLRDWIVGLLAKKPARLVTVALANKLARIIWAMMKNGECFRTETFAKA

SEQ ID NO: 356836 - protein, 340 aa, unidentified
MEQYVGLDVSQAETAVCVIDAQGKRHWQGSCRSTPQAIAQILKQRAPFAFKVAMETGPLAVWLWHSLRRAGVPIICLHARHVKAALSIQMNKTDANDAYGLAQIVRAGWYREVEVKSIESHRLRLLLAARAKLVSMRTTLYGQVRGLLKTFGVVLPAGKGSSFERLVLKGVPADGTVTMVVNSLLATWKQLTTEIRKLDRVIIKTAAVSPICRRLMTVPGVGPTTAVAYLATIDQPRRFAKSRNVGPYLGLTPRRHQSGEVDFAGRISKCGDRTMRSLLFEAAGVLLFRNKQPSPLKDWGLRLVRRVGSGKARVAVARKLAVLLHRLWVDETVYRRAVAS

SEQ ID NO: 356837 - protein, 412 aa, unidentified
MEVVFERCCGLDVHKVIVVACLWMRDHSGKIHKEIQKFGTMTADLLVLYDWLKANKVTHVAMESTGVFWQPVYNLLEEEFQVLLVNAEHIKRVPGRKTDVTDCEWIADLLAHGLLKGSFIPPKPIRELRDLTRYRKSLTDERVREVNRLHKLLQSANLKLSSVVSDVMGMSGRRMLEALLEGKTDPEVLADLAKGKLRKKLPELKKALHGRFSPHHSFLLEHILGHLDFLDEAIEKISEEVAARTAPFAKVIQMLDTISGVDRKGAEGAISEIGLDMEQFSTHRHLASWTGLCPGNHESAGKRKRGKTRKGDVWFRRYAIEMATAASRTKGSYLNALYHRLVRRKGHKKAIVAVAHAIVVIIYHVVKHKVPYQELGADYFDKLNVTYIKHHHVKRLEGLGFKVILEPLQAAA

SEQ ID NO: 356838 - protein, 356 aa, unidentified
MKYVGIDVHKKMCQAAVLDEDGELLDQIRFLNKKEDIKEFALKLLTFRDDVKAVVESTGNLWIQIHDILEKFGIDVSLSNPGKTRLIAEAKNKTDKVDAKILARLLRADMLFTCYVPGEEIRNRREFLRHRLNLVKMRTMVKNRIHSLLDKYTLRSPYNSWTKKWVAWLREQDLGFMDNAIIKGQLAILETFNEQIRVMEDKIAAIAVDDSQVKLLMTIPGIGYFTASLLVAEIGDINRFSNDKKISSWAGLAPRISQSGETTHIGRVGKGNKRVAALMVQSAHNARRYDARFSRAYKQVSRRGGKGKAIVAVAHEMIRIVYFMLRDNAPYRGQNVELTTRKLKNMEGRASIGLRI

SEQ ID NO: 356839 - protein, 410 aa, unidentified
MEQVVERGCGLDVHKKTVVACVRVPGGTGQRDQHVRTFGTTTAELLALRDWLDAYGVTHVALESTGVYWKPIFYLLEDAFTCVLANAAQIAQVPGRKTDVKDCVWIAQLLEHGLIRGSFVPPVPIRELRDLTRYRKALIHEHTREANRLQKVLEDAGIKLASVASNILGVSGRAMLAALTHGTTDPDILAELARGQLRKKLPALRQALAGRFRSHHAFLVSQLLAHLDYLDEVIETLSTHIDEVIAPFAQEVSRLDTIPGVNKRTAEVIIAEIGVEMGVFPTAAHLASWAGLCPGNNESAGKHKSGKTRKGNRWLRTALIEAALAAGTRATKGAFAARYRRVMRHRGHQKAVVAVAHAMLVTAYHLLIRKTTYQEPGAHYYERRQADRVRHRAVQLLERQGYRVILEPAA

SEQ ID NO: 356840 - protein, 387 aa, unidentified
MEKKKGRVVGLDVHPDSFAGAVVEGTDPAGARVLSSSTRVELERLEQWALRHTREEDTLVLEASGNAFSVAMRLRAIGRKAEVLDSHRAGKVGKVYCANDRVDAVKIARIYLSALSPIVWQPDEKTLERREIFSAYQAVVKESTRAKQQLRSMLNEHCVRLEKGFRLCHPNALTRLLALREWTPARRMLLQQLHDTLVGARTRRTLLRRHMAQEIVAEEALLRLTRLCGINLITLYGVAAAVGDVRRFPHSKKLVAYLGLNPSVSQSGNFEGSGALKRHGRGALRALLIQSGKKLLEVNNPLQKWGLAVASRRGRNKAAVAVARKLCVALWHVLMGHAIGALERLDTLQTKLSKFASEMGPAALRAFGYNNKADLVEKKLYVLRTYP

SEQ ID NO: 356841 - protein, 348 aa, unidentified
MTQILAIDLGKFKSVPCSYDSETADATFRTIRTCPQEVHDLLIELQPDRLVIEVCGIAGWIHDLATELGIAVEVANPQHEGWRWNKVKRKTDRDDALKLARLSAMNQLPTVYMPSRRVRQWKSLIAYRHALVDRRTAIKNTIRALLDVQGLRMPPGAKGWSIESIDRLKGLSRPIGRCGRDDLWRGHLHSELTALRQANELLERIEGRLDRIGAGDERVQRLQSMPSVGKRLSELVVATLDRPERFRSAREVSAYAGLVPRQYESGTMSRQGRISKQGPSLLRRLLVQIAWGMEQRSAYVAALFQRISGGQKSRRKKAAVAVARKILVWCWAILRDGTRWRDPSPRAA

SEQ ID NO: 356842 - protein, 411 aa, unidentified
MIKENYVYVGIDLHKETHTAVMIDCYNQKLGEITFPNRPADFPKLVTKVKKCNTDGKEVVYGLENAYGYGRALAVWLIDKGYLVKDVNTAISHRQAKHRGAMYRKSDSDDAGAIALATLNMLDKLPDACPNDTYWSLGQLVHRRDNIMKQRTRLVNQLHEQLCIAYPSYKQFFNDISRPTALYFWEHYPSRKYLKGKTVEALREELVPVSHNKCSTKTCEKILDAVASDKVKNNDFQDARDMVTLSIVSDLQHYDKQLAEVDKMLEKMYEMLGCTLTTITGVNTITAVKILSEIGDIKRFPNANKLAQFAGIAPLHLSSSGKGKDFATKQGNRRLQATIYFLAIQMVQVSSKGTPRNPVVRAYYEKRKAEGKTSQQALICISRRLISIIYGMLKNGTEYRMPVVENAGEKL

SEQ ID NO: 356843 - protein, 370 aa, unidentified
MQTIHRSQTLFVGVDVHKDTHTAVALSPFGKKIFEMTIGNEAEDFISLVEKTKVEAEKSGLVPSFGLEDVHSWGERLSSFLVEGGLPVIAVAPILVDHRRSKTTHPEKNDSLDAQGVAEVMIQKIDTLPVYTLTEEAQEAKQIRELSLEREWLVKERSRLKNQLHILLHRIHNTGYRAKFKDPFSKKALRYWSRSIPKNTDAILAQRTKRALRRILDLREEIQEIEEELETMMKENKQTLSTASGCGTVIAAEMIGEIGDIARFHSPGALAKYAGCAPREHSSGKTIRWRKTKSGNRRLNRSFHRMALSQISRSGNDAARVYFKRKISEGKTKAQALVCLRRQLVNVVWMMMGHKTEYRYPQEKVVDFFS

SEQ ID NO: 356844 - protein, 348 aa, unidentified
MAHFVGLDVSVKETSVCVVDNAGKVILEQQVPTEPADIIALLTSLGVPFGRIGIEAGPLSQWLVNALTAAELPVICVETRHMKALLTAPQINKTDRNDVRGIAQMMRVGLFKPVHVKTLVAEEQRMLLTSRKLLQRKLLDVESDLRGTLRNFGLKVGVVSGGRYEARVRELVVGFPRLAAIAEPLLSVRRVMRQQLAVLHKMLLDTVRDDPVCRRLMTAPGVGAVVALTYRATVDQPQRFVHSRAVGAHVGLTPKRYQSGEIDYDGGVSKCGDALLRTMLYEAAQVLLTHGSKWSWLKAWGIRVAQRRGMRRAIVAVARRLAVVLHRMWVDGSEFRWRKDTTAVPTVA

SEQ ID NO: 356845 - protein, 352 aa, unidentified
MLNAGVDYHKRFSQVDVVDDLGRRIAAARLPNELNQVTEFFRSLGEPCRAVLEAGWNWGLMHDWLEGMANVTEVQLAHPYRVRAIAAAQVKTDAIDAHTLAELLRANLIPKAHIPCRETRQLRDAVRQRLFLVRLRTMVKNRIHALLDRHHVAMPPVSDIFGKKGSSYMRAVWLPEAGRRLLDQDLDLLEFLAKEVRVTEAELKEALKGDRRVELLLTVPGLGVLLSAVVALEIDDIRRFATSSKLVAYAGLVPTTHSSGGKTFQGKLIKQSNKWLRWAMVEAAWIAIRHDPYFRTHYGRRVRAKGSQTAIIAVARRLLEVIWHVLSEERAYENRPATKRRIENAPVALNVD

SEQ ID NO: 356846 - protein, 457 aa, unidentified
MPRSRKTQRRLSGQLSTIHPHAAGIDIGSRFHVVAVPSERDERPVRTFHTFSGDLHQLADWLHAVGITTVAMESTGVYWIPVFEILEARGFEVLLVNARDAKHVPGRKTDVSDAQWLQQLHQHGLLRGSFRPRDGLVRLRAYLRHRERLVDYAASHIQHMQKALMQMNVQLHHAVADITGATGMRIIRAIVAGNHAPEQLAAYRDVRCHASEATIREALTGNYRSEHVFALRQALELYDFHQAKIAECDAEIEAVLRGLSEPRLAPETPLPSARHLKKSPNEPLFDARPALYRLLGADLSQIHGFGPYTVMRLVAECGDDMTKWPTAKHFTSWLSLAPANRVSGGRLLSSRTRRSSNRATTLLRTAAVNVGKTQTALGAFYRRLAARTGKAKAVTATARKLAILFYRALRFGLTYADPGASAYEQRYRQRVIHSLHRRAKSLGFTLVAATSAPEGVS

SEQ ID NO: 356847 - protein, 315 aa, unidentified
MTNLKKSKTIVNVGIDVGKWFLDVCIHEKDIYWQDENNPEGIKRILKRLAHYEVKLLVVEATGRYEFALAEAAFNKNMPVCIAKPLSVRRFAGAVEQLAKTDKLDAAIIARYAAIIQPRATPRKSKNLIAIRDLLARRRQVMQMRTQEMNRLKIMGKAFEVSCKRLIKVFDTEIQRLEKKLNQYIEQQAEWSERREILKTAPGVGDTLAYTLLAEMPELGQLSNKQAASLVGVAPINRDSGKSRGKRRIQGGRANVRTILYMATLSATQCNPVIKAFYQKLVAQGKHKKVALTACMRKFITILNAMVRDNVEWAV

SEQ ID NO: 356848 - protein, 309 aa, unidentified
MNKAVVYIGVDVAKASLDVAWAERSRRFANNKSGLSALTKWAKQSPFAVHLICEASGGYERGLLDAAEQNRIKVSLVQANRVRQYARAAGILAKTDKVDARVLCAFGSAMQPEPTPPLSAQQKRLRELETQRQHLSRMMVAEQNRLAQLNDKELQRLTRSLLAMLKKQMAAIDARIAGLIAQDQSLKEKAQKLTAITGVGTRTAVLLLAQIPELGTLNRAQAAALAGLAPFNRDSGTLRGKRTIFGGRRALRCGLYMAALVAARHNLILRNFYQRLRSKGKPHKVALTAVMRKLLLALNHTLKPAASFA

SEQ ID NO: 356849 - protein, 332 aa, unidentified
MMNMNQQDRVANGIVVNAGIDVSKQHLDACWGTSELRVGNDAAGWDGLIAKFKADRVDLIVVEATGGYERGLVCALQQAGLVVARLNPRQARDFAKSLGALAKTDRIDARCLRDFADVLARHKDRLKYVTLPTDARREELSALMKRRRQLVDMRVAETNRLDQATKRAVRSIKSVMRVLDKHIEEIDREAQRFIDDHFDGQRALLDSIKGVGPVTILSVTASLPELGKLDRRAISKLVGVAPLANDSGPRKGARRIWGGRSQVRAVLYMATVSAMTHNPVIRSHYQRLLAVGKPVKVAIVACMRKLLTIMNAMVRDATPWDASKSLASPTSA

SEQ ID NO: 356850 - protein, 340 aa, unidentified
MTIVTLGLDLGKNWVHMVGLDADGRIVLRRRVRRDRLLVETVDMPPCLIGMEACCGAHHLGRALAAQGHTARLMPPQYVKPFVKSNKNDHRDAEAAAEAVQRPTMRFVPLKSEAQLDLQTIHRVRQRLVGRRTALINQLRAILLERGITVARRRRVLELRLRAILADESARLSARVRHLIEDMRAEWRDLDARIDAFDAELTAKARQDDACRRLCEIPGIGALNATALVAAVGNGAVFDRGRDMAAWLGLVPREYSTGGKQRLLGISKRGNKYLRTLLIHGARAALPYLAARNDRLGSWLRSLLARAHRNVAVVALANKLARIVWAVLANDGCYAMPTTA

SEQ ID NO: 356851 - protein, 346 aa, unidentified
MKHYAGLDVSLKEISICVVDETGAVQARKTVACDPAAVTRFFAEKQIAPLLTVHESGQLSIWLQRSLSDLGLAVTCVDARVAHKVLSARLNKSDAADAEGLAQLARTGWITPVHIRSLDADRLRTLIGARDRLLRLRNDLERHVRGVLKTFGIRMAGVHQGKLRQSFRDQLADAANREPVFGVVAEGFMTVHATLCSAAAAIDKELRDLAKRSELARRLMTVPGVGAIVALNFIAVVDRADRFGRSASIGAFLGLTPRRYQSGETDYQGHISKCGDAALRSLLFEAATSLICRVKRFSPLKSWALRLAARKGFKRATVATARKIAVLMLTLWKTGAEFRWTAEAAA

SEQ ID NO: 356852 - protein, 313 aa, unidentified
MSSPLVYVGMDIAKATLDLYAPLGPRPQSRQFANNAAGHRALVRWLQKLGSMHIVCEATGGYERAVVTALQQATIAVSVVNPRRARDFARAQGRLAKTDRLDAQVLAEFGQRLQPAATPVPSAAQRQLAELVSRRQQLQQLRVAENNRLEHTTHPAVRRQLQRHLVGLDRQLDQLDAWISALVAAEPWLAHKVARLCTVVGVGQITAVVLLATMPELGTLNRRQAAALAGVAPFNRDSGPRRGHRLIGGGRAVARRALYMAALVGAFANPRSQVFYQRLIAAGKAPKVALVAVMRKLIILLNQLLKNPEFQPT

SEQ ID NO: 356853 - protein, 280 aa, unidentified
MNIIGVDYHPSFQEIAFLVEETGECGERSLMHSNGEVENFYRDLKARGISVRVGMETTGYSRWFERLLAELGFEVWIGDAAEIKTRRAKKKKTDREDARLLLKLLLEDRFPRIWVPSPENRDLRQLLWHRHRLVQMRTRIMNQLQALAMNENRCWKGKLWSARGRAELEQLPLAFWASHRRQGLLELLDRMNPAIDELTTAVEKEARKRPEALRLMTHPGVGPLTALAFVLIIGTPERFGCAKQISNYVGLIPSEDSSGGRQRLGHISRVENHCTCAWLD

SEQ ID NO: 356854 - protein, 427 aa, unidentified
MSYRIAGIDVHKKMLAVVVSDVEIESEFQFERRMFGSNPDQLRALVEWLQQQKAEEVVMESTAQYWRPVWETLERYWKPTRQKREGARSTSGTLHLAHAQSNRGRRGRKKDFLDAERLVKRLVARELNLSFVPDAEQRLWRTVTRRKCQLRQNRVRLQNRVESLLEEAHIKLSSFVSDLLGLSAQRMLRALADGETNPAALAALADRKLHATPEQLCDALGACTELNVVYRRLLNMMLGELRLIDEQIGQLNQEMANLLSEHQDAVQRLAEVPGLGVDSAQQIIAEVGATAATFPSAKQLSSWVGACPGEEESAGVNYSHRSPKGNRNMRRILNQAANAAVKSKGTIFEIVYRRMAPRLGHKQTIGVVAHRQCLLIWKVLHDRVRYEERGPAVTKQSRQKRTARMIRQLRSLGYRVEPANPQPSNPT

SEQ ID NO: 356855 - protein, 356 aa, unidentified
MNKYIGFDIDCKKIVACVVESGKKDIYQTLRPGIESMRKFLKEQKRHGDKVELVFEISGQAGFIYDSLIDCVDDIKVANPSKMTWIYRTAKKNDRIDARKMAVLLSIGEIPSVHMPSREIRQWRETILHRKKLVDKVVQLKNRIRATLKSQGYSKPVNKGGWWKKSNRLWMRDICEQSIGTYDLWHMHLCNLLDELKLLESQLKRITQYLDSYLGTKSAGKLLMTIPGVGPRTAETVLAYTDDIARFGNYKQYCSYFGMTPKLDESGSCRRLGHISKQGPSVVRWVLCESSWKVIRHSKGLRSFYKRVMADQNGRKKIAIVAVARKLLSIMRAMLLSGELFNEKLVNKVDEMTEVA

SEQ ID NO: 356856 - protein, 347 aa, unidentified
MVTTIGIDPHKATHTAVAIDEAEMVLGEITIPADRSQTTRLMDWAGEVNGDGSRVWAVEAAGGLGYLLSQQLVAHGERVLDVPAVLASRVRVLSSGKSEKNDPNDARSVAIAALRQPGLTAVGREDYVQVLRMLAKRHRELTSLRTQAVCRLHAVLAQLKPGGHSRHLSAKAASRMLQGIRTLDVVGEQRRATAKTHLADIRRLDRDIKANKALVRKAVNAADTTLTDIYGVGPLVAAFVIGYTGDPTRFATADHYAAYNGTAPIEYSSGGNTKHRLSLRGNRVLNHAIHMAAIAQISKPTSAGWAYYDKKQAEGKTKKEAIRALKRRISDAVYRQLTADQERHQQN

SEQ ID NO: 356857 - protein, 339 aa, unidentified
MELYAAFDLHSNNNHLGIINSNDKRIYKKKLPNDPQTILTALEPYKDDLTGIVVESTFNWYWLVDLLMDHDYTVHLANPSAVKKYEGLKYSDDNHDAFWLSHLLRLGILPEGYIYPKIERSIRDLLRKRGHLVKLRTSLILSLQGIISRNCGLRVNANKIKAIRENNVLPLLTGDENLELSGSVSKEAIDFLTQKIRKIETAVKKKIKLKKPFILLQTICGVGDILSLTIMLETGTISRFPEAGDYVSYCRKAPTGWTSNGKSKGKGNKKNGNRYLAWAFSEAAELSRRFDDNARAWYNRKSAKKNFMVAHSALSSKLARAAYYIMKNNVPFDPGKLFA

SEQ ID NO: 356858 - protein, 362 aa, unidentified
MEVAGNAVGLDLGKRTYEMCLIAPNGKAARTGGKTDFAGIDNLCRKLKKDDVIAMEACNLAFRIERTIREKVGCRVVILNPGRLAIIFMSTRKTDKEDSMKLAKYIKSHEEGEMPVVAPPSDEEWARRKLLSEYRSLKSQRTREINRLHAIFEHAGFTQFTRKDMCVPKNREEILPLLKGYEKEEAGRLAERLLLLEKQIELLYEKINDETEKDEKVQRLMTVPGIGPITALSYVAYIGDVNRFENAHQVSNFIGFVPKVDCSCTINRLGHITKQGNSLLRSLLVQAAWSCVRSKNGAALREKYNYMSAVRGIGKGKSIVTIARKLGELLYTLLKNNKTYEPKKFISSAERLSKMTEEALGA

SEQ ID NO: 356859 - protein, 341 aa, unidentified
MHPTTIGLDLAKHVFQVHGVDAAGKVIIRKKLLRSELKAFFEKLPPCLVGMEACGTAHYWGRELAALGHNVRLMPAAYVKPYVKRGKNDEVDAEAICEAVTRPTIRFVPVKSAEQQSILMLHRTRDLFVRQRTMLVNSLRGQLAEFGLIAPQGIWRIPELHALAQNTDNSVLPEPARACAELIMMQIEDLQAKIKAIERTLMARHRANEMSLRLATIPGIGVITATAMVATVVDASAFKSGRHFAAWIGLVPQQNGTGGKVHLGRISKKGEPYLRRLLVLGATAVVRYARNKPEFAGWVNALLARRPARVVTVAVANKLARIGWAIMRRGGSFRQRPLGIA

SEQ ID NO: 356860 - protein, 331 aa, unidentified
MEIKEVIGIDASKLTLDCCLHKSGAQEVFDNTAEAIAHMADWSMKSSGLDKDELLFVFEHTGLYTHQLARYLSEQGYCFHLVPGLEIKRSLGIARGKDDKADAKRIALYGYRLREEIKPYQMPKESLETLKRLMSMRRKLVAQRAGHIVTLREQKRVLDKELGPMLFQVQQEIIGVLDVQIAKIEKEVDRIIEQDPELQDLYRLLMTIKGIGAVTARFLMVYTVGFTAFTTWRKFASYCGIAPFPNRSGTSIRGRAKVSQLANKEGKTLLNLCAGSAIQCNPEMKAYYERRIANGKNKMSTLNIIRNKLLARAFAVVVRGTPYVNTMGYVS

SEQ ID NO: 356861 - protein, 357 aa, unidentified
MKKVAYLAMDVHAGHCVLGHMDFDGTFIGNRRFPTSEQHIIEALKAIKAKEKYLALEESNLAYWAAQVARPYVSEVISSDPKENALIYRSPNKRDKVDTHKLCRLLRLGELKRVYHPENDERAIFKAAVQHYIDLRDQQVVLKNKIKAMYRHWGVIEVGGQFVYGIRTRDDYLQRVKHLHIRNQLHRLYCLMDETESMQKKALKAMKQLGRKYPEIKEFEKMPGIGEILSHTFDAFVQTPHRFADKRKLWRYCRLGITDRSSDGKPLGFKRLDKSGVSELKAVSYRAWLSAMRSDNEVRRFYSRSLRLTVNHVHARLNTQRKIIAVMYGMWKRGEAYRPQLFLDSPQMSVVQVRQHH

SEQ ID NO: 356862 - protein, 401 aa, unidentified
MVSDFMKGRYNLMKIFVGIDIAKLNHFAAVISSDGEILIEPFKFTNDADGFQLLVSKLESFDKDSIIIGLESTAHYGDNLVRYLVAEFYQVCVLNPIKTCQMRKNNVRKTKTDKVDTYVIAKTLMMQDDLRFISFFDLDMMDLKALGRFRQKTIKQRTRLKIQLTTYVDQVFPEIQYFFKSGLHQHAVYALLKEAPSPKEIASMHMTHLANLLKVNSHGHFTKEQAKELRVLAQKSVGANDSAISIQITQTIQQIELLDSQLEKIEAEMTDIMRFNDSVIMTIPGIGYINGGMILGEIGDIHRFSNPNKLLAFAGLDPSVYQSGNFQSKTTRMSKRGSRVLRYALVNAAWNVVRNNATFKAYYNAKRAEGRSHYNTLGHCAGKLVRVIWKMLTDNVEFNLE

SEQ ID NO: 356863 - protein, 369 aa, unidentified
MTIIPDAGKRPQSRTSVFAGVDTHKEIHVAAVIDPAGTVLGTHSFSTTRAGYRALLTWVRSQGDLVRIGVEGTGSYGAGLTRHLAKHDVVVLEVDRPDRSDRRRKGKDDDLDAINAARAALHERRTTIPKSKDGAVEALRILRVARAQAVRERRNSLQLLRMSIVAAPDEVRDQVRNLTRMQLIRHLAAWRPDVSNATDPVVAYRVALKSFGRRYLELTDEIADLDDLINPIVQALAPQLLERVGIGIEVAGQLLVTAGDNPDRLRSEAAFAMLCGVSPLPASSGMTQRHRLNRGGDRQANRALHLAVISRLRIDPRTKAYVAKKTAEGHSKMEIIRCLKRYLAREVYFLLNPGIEHIAPNTKPRKTAA

SEQ ID NO: 356864 - protein, 406 aa, unidentified
MIFVGIDWSEEQHEVELQAGSGKVLKRLQVRADLAGLTRLQEVITDEAEEPSQVVVAVEASHGLLVNALVASGYRVYAINPLTSARARQGESPAGTKSDVGDAHLLANLVRTKRQDLRPLAGDSEQGQAVRVRARSHVRAIRLQQRARSQLRSALANFFPGALPLLGEEPEDLRDALAVLSLAANPVQARRLSLNKIRASLARHGRQRYLEVKAAEIQAQLRAPQLELNAPKVVSAYSDEVSYLARTLLQVRSEIVLLEKQLAQDFEEHPDAEIILSQPGLGLVLGARVLGESGDDPTRFAHAKARKNYAGNAPITRRSGKWERVSRRVARNRLLADATFLWAKSALSASPGARRYYDQLRARNKTDNVALRALANRLVGILHGCLRTRYIYDESIAWPGVLEHAA

SEQ ID NO: 356865 - protein, 365 aa, unidentified
MIVIGADPHKLTHTAAAVECATGELRSSETVAARDSGHAALLDWGRALGSERVWAIEDCRHVSGGLERFLVERGERVVRVPPKLMAGARRGARERGKSDPIDAVAVARAALREGIETLPAAFLDEAALAIKLLLDHREDLVAESTRAQNRLRWHLHDIDPELAPPQRSLRSQQVLRSLGARLARRQQTVRVRLARELVRRCAALRRELRELERELQARVREQAPALLELPGCGTLTAAKLIAEIAGAGRFASDGKLARHAGIAPLAASSGARHRHRLDRRGNRQLNCAFHRIAVTQARIHPPARAFLERKRSEGKSNREALRSLKRHLVRRVHRLLAPPASGSSQPTSPSPTTATTAPAVMPCLT

SEQ ID NO: 356866 - protein, 349 aa, unidentified
MSHNLNNAVAVIGIDIGKNSFHVVGLDSRGAIVLRQKWSRGQIEARLANMPPCLIGMEACVGAHHLSRKLGTLGHDARLMPAKYVRPYSKGQKNDFRDAEAIAEAVQRPTMKFVATKTAEQLDLQALHRVRERLVSQRTGIINQIRAFLLERGIAVRQCLRFLCVELPRLLATPPDVLSPRMVGVIEGLAEDWRRLDQRIEQLSGEITALAHQDAGCKRLVSVPGIGPIISSAMVAAIGTGDAFSKGRDFAAWLGLVPKQISTGDRTILGKISKRGNRYLRVLFVQAAWVVLIKPQSWERHGLKRWLDAAKQRLHRNVLAIALANKLARIAWGVLARGRAFEASKFQAA

SEQ ID NO: 356867 - protein, 408 aa, unidentified
MNAVGIDVSKGKSMVAALRPMGEVTLLPQEFLHTEVGLEQMAYAILALGEDTRVVMEATGRYHEPVAAALHEYGIYVCVLNPLYIKQSGGGSIRKVKSDKADAMKIAKYGLDNWVDLREYTPMDTVRQQLKLCSRQYNLYMKTVVSLQNNLISLTDKTFPGVNELFSSPERADGHQKWVDFVMTFWHCDCICRVSEKAFTERYQKWCKRKGYHCSVEKALDIYASSCGHFTTLPKNDNTKLLIVTAAQQLLAGKTTLAALRAEMTRLASQLPEYETVRAMYGVGETTAAQLMAEIGDVRRFPHRSSIVGFAGIDPAVNQSGKHETQSTSTTKRGSPHLRKTLYQIVCTYLRKAPADEPVYQFLDKKRAEGKPYFVYMTAAQNKFLRIYYARVKECLETFDAHQKNTQG

SEQ ID NO: 356868 - protein, 343 aa, unidentified
MDHFAGLDVSVKDTSVCIVDGTGKIVREVKVASEPAALLPVLTSPTYHFKRIGLEAGPLSQWLYSALAEAGLPAICVETRHMRAMLKVQINKTDRNDARGMAQMMRAGLYRPVHVKTLRSQKLRMLLTHRKLLQSKAIAIENDLRGTLRNFGLKVGMVGKLKFETRIKELVENLPDLAVLVEPLLVVRRVLREQLVIIHRRLLAIVRDDEVCRRLMTTPGVGPVVALTYRATVDVPVRFRKSKSVGAVFGLTCAKYQSGESERSGRISRCGDEMMRVMLYEAAQAMLHSKRWSWLKAWGMKIARHRGMKRAVVAVARRMAVIMHRMWADGTEFRWANTTAAVA

SEQ ID NO: 356869 - protein, 410 aa, unidentified
MQVLYPCCWGLDVHKKFVVACLITTTAEGQVHKETRTFSTMTQDLLALLDWLHATGCTHIALESTGSYWRPVYNLLEGQFTLLVGNAQPMKTVPGRKTEVKDAEWIADLLRHGLSRGSFIPAPAPRELRDLTRYRTHVVEERARLTNRLQVVLEDANVKLASVVTDIRGASARAILAALVAGETEPTVLAELARGRMRSKRELLAQAVVGRFTAHHAFLITEHLSQLDYLEEAMERVSAEIGRRLAAEQEALELLDTIPGVGQRAAEIILAEIGTELARFPSAKHLAAWAGMCPGNKESGGKRLSGKTRKGNPWLRHVLIEVAHAASKSKDTYLAAQYRRLATRRGKQRALVALGHSSLVMVYHILSRRVPYRELGPLYFDARNRQRVQQRLVQRLERLGYSVNLQPVAA

SEQ ID NO: 356870 - protein, 355 aa, unidentified
MDIRRIQDFVVKGKEIFVGLEDSKKTWKLAVRSERMIIHRASMEAEYQVLSRYLRNNFPACTIHLIYEAGFKGFTLHDQLAGDGIDCVVIPPHVVTEPKVNRVKTDKRDANRLALILENHDFKDVCHVPDKERREDRQISRTLIGIQKDIVCTRNRIHKLLNFHGIKVATSRWGRDDFRALATLSLSEPLRISLHILLDELQHLWTYRTTLRAALRRLCQKERYRKAWEIVRSLPGIGWFTAIRLILELGEDLSHFTNGKKIASFVGLTCSEYSSGETEWKGRITGMGSGFIRMTLIESSWVAIRKDPALLAKFSRIWHSSGSKKKAIVGVARMLIVRLRACMVLGTPYRIGVVQ

SEQ ID NO: 356871 - protein, 333 aa, unidentified
MYYSGVDLHSDNCYITTVDENGSVVKRQRIENNNELILDYFHSLPGPHQAVVESTTGWYWLNDLLSDHGIELVLAHAKYLKAISYAKVKTDKVDSQTLAILLRQGLIPRAHKISRELRGLRDTMRIRLRLVQQRTACLLRLYSIHAKFNGAVPDPYRFQLAVLEHTRDMFTEQILALEKSLHPALIPNDDIQLLLYIPGIGKLSAFTVYLEIDGIERFDSDKRFVSYCRLVPAADNSNRSVHHRSSKDGNKYLKIAFSDAAVHAIQFYPEYKRLFQKLARRSNDATARTVVAKELAKIVYYVLKNKTPYKGLKGQPISRQKSQQWPRLSSPLS

SEQ ID NO: 356872 - protein, 446 aa, unidentified
MKKSSRMSVIHPHAAGVDIGAEFHVVAVPPDADAAPVRTFQRFTGDLHRMSGWLKTCHITTIAMESTGVYWLPAFEIPEAAGFNVILVNARDAKNVPGRKTDVNDAQWLQKLHSFGLLRASFRPEHDISVLRSYLRQRERLTEYRAAHIQHMQKALMQMNVQLHHAVSDITGVTGLSIVRAIVSGERDPSVLIQYRDVRCKKTPEVLQQALTGNWQPEHLFAPEQSVAFFDFYQEKIRECDDQIETSLLQLSTGTEEPEGVLPSARHRTKQPNQLSFDVRPLLWKITGADLTQIHGFGPYLALKFVAECGTDMNRWPDASHFTSWLCLSPGNKISGGKVLSPKTRRSSSRIAAALRLAATTIGRSDTALGAFYRRLSSRIGKAKAVTATARELAILFYNALKYGQKYVDPGADYYEERYRNRVLDGLKRRAKSLGYSLQQDPELCV

SEQ ID NO: 356873 - protein, 410 aa, unidentified
MRSIALDVHRSFAQTAILENGKLRDAGKIDLEYSRLLRFARKLKPDDEIVIEATGNTSAIVRVLLPFVGRVVIANPILVRAIAWAKVKTDKIDAAVLAKLHASGFLPEVWMPDEETEARRRVVAERTQLVSQMTRLKNRIQSVLHANLIPPYKGALFSQRGRAWLEAQPLAEDQRRVIVRHAGELDRLGAELAEVDKSLAQKALDEPQVKRLMTITGVNSTVAMSVLAAIGDIHRFSSPEKLVSYFGLNPRVRQSGDKPAYHGRITKQGRAHARSMLVEAAWVMSGAPSPLRAFFIRIRDKRGKHVAAVATARKLAVIIWHILSKDEDYTWERPALLQWKLRKLELKAGHQSRRGGRQKGSAAAYSNKSVRDSERETIANAEDEYRRFVATWKQQSPKGRSGATKEVRRS

SEQ ID NO: 356874 - protein, 347 aa, unidentified
MKYIGVDLHRDFFVAVAQDASGTELFKKRYGNSSESVEQLLSEFSEPPMVVVEATRNWMWFIAALQEKGCTVQLAHPFRTKAIASARIKTDSIDAKTLCDLLRADLIPQAYISNSLEMDNREVSRARINLVHDQTMLKNRVLAILAKDNLRFKGTDMFGVKGKVWLQKQQLSETKREVIEVYLDRLTNTANAIKRLDDIVKQRSGSIPEVSLLQTIPGIGTTTAFLLASEIGTIKRFPNNKKFTSYFGLVPRLSQSGNHAYYGRITKLGNPYVRWSLVQAAHRLVRTNKETKWFADRISFKHGKKKAIVAVARKLATIVYAVLKENRSYQKEHKKTVVCPGIIPERS

SEQ ID NO: 356875 - protein, 433 aa, unidentified
MQDVQDEPLFAERVAGLDIAKAEVEVTLRVPSDTTAGRRQQETRTYGTTRRELDSLADWLHCWAVTRAGMEATGEYWKPVFFLLESRGFDCQLYNAGQVKALPGRPKTDRADSIWLAKITERGSVASSFVPPEPVRRLRTHTRYRRHLTQARTAEKQRVEKLLEDGHLKLSSVISDIHGVSGRAMLEALAAGQRDAKALAQLARGTMRGKIRRLEEALDCSFFTAEHAAVLAMMLAAIDCYTAQIEALTARIETLTEPYLRQVEQLDQIDGIGAICAQDIIAEIGANMTVFPTASHLVSWARWSPQVKQSAGKRKGSNATGRGNPYLGAALGEAVICAGRTQSYLGAKYRRLARRMPKKKALVATGNSMLTIVHTLLSDPAASYQDLGADYYEQRMHARRQARNHVRSLERLGYKVTIQALNPDTGEFLTPAG

SEQ ID NO: 356876 - protein, 371 aa, unidentified
MKSILSVGMDVHKNSFSLCAYDGYTGEIVSESTFASDVKLVIKFIETLKSRYENDVEIKCGYEAGCLGYSLYKSLTARGVDCVILAPTTMQVSAKNKMVKNDRMDALNIAKNLASGSYKAVCVPDEEAVEIKEYIRMIHDFKKELKRVKQEICAFVLRHGYQYDGKSKWTIRYMNWIRELEMSEIQRETLNEYIAEMENLNDKIDRFMNRIDEMYQSDRYNEKVSKLRCFKGIDTFAAMTIQVETADFERFPSAKAYASYTGLTTGEHSSGDKNNQIGITKQGNTVIRKTLVECAQSLVKGNVYAKKSQRLKSRQKGMDVNIIVYADKATERLKKKYQKLIERNVPRNKAIVAIARELACFIWGMETGNIH

SEQ ID NO: 356877 - protein, 317 aa, unidentified
MLEAILERCAGLDVHQETVVACLLTGPLDRSPKSEIRTFGTMTDELMELGQWLVDEGCTHVAMESTGIYWKSVWNVLEAFDLNLLLANAHHVKNLPGRKTDMKDAEWIAKLLRCGLIEGSFVPSEDIRDLRDLTRYRKKLVQDATSEKNRIHKLLQDANIKLTTHMSDIFGASGRLLLQKIVDGEVITMEFLETHMKGALKHKSNKLLQSLNGRLRKHHRDMIRFSWDHLIYLEQQIEQVEQDIRRRLTDKQEALDLLTTIPGVNEQAASIIIAEIGTDMKNFKDDHHLAAWAGVSPGNHQSAGKKNELGPGPETTT

SEQ ID NO: 356878 - protein, 334 aa, unidentified
MEQITTMGIDLAKAVFSLHGVDGAGHVVLRRTVRRDQLVEVVAGLSPCLIGMEACSGAHEWGRRFQEHGHTVRLMAPKFVAPYRKSGKNDGNDAEAICEAVTRPNMRFVPVKSVEQQALLAMHRVRQGFVVERTATINRLRGLLSEFGVVLPLRSVTVRRQAAAAAENLPELARRAIGDLLDQLRVLDERIGAYDREIEAQARLCEPAQRLMKIRGIGPTTALAIVATVGNAREFKNGRQFAAWIGLTPSQYSTGGKPRLGHISKRGDAYLRNLLVQGARSVLNSAGMHQDRMSRWILELQLRRGYYRTLVAIANKNARIAWALLAKNESLRAA

SEQ ID NO: 356879 - protein, 343 aa, unidentified
MGDVITIGLDIAKSVFQIHGVDADGAVVIRKRVSRAKVLEFFAAVPRCLVGIEACPSAHYWSRKLEVLGHTVKLMPPSYVKAYLKRSKNDANNAAAICEAVTRPSMRFVSTKSEQQQSGLMLHHSRRLLVRQRTMLSNAIRGHMAELGIISAKGRNGTAELLEIIANAKDNCIPAAARFSLEVLARQYIAIATEIGVLEKRIHAWHRSCEESRRLEEIPGVGPIVATALIAEVGDWKAFASARSLAAWIGLVPKQHSTGGKERLGGISKQGNRYLRWLLVAGAMAVIRYARRHGTKRLWLTRIMERRPIKVAAVALANKIARMAWAIIVRGERFREPRLLLAA

SEQ ID NO: 356880 - protein, 311 aa, unidentified
MTLSTIGIDISKETLDVHRMSDGASRRFSNDKAGHKALIVWIGGDRRAVVFEPTGPYHRAFEHALAKAGLPLVKVNPRQARRFAEATGKLAKTDRLDAALLARMGALLAIEPRPARSKALAELKELHIAREALVKDRTAAKNRAKIRTLALLKRQNAQRLDQIERQIAAIDAAILAFIEANAELAKRFAILTSIPGVSQITAFALLIEMPELGTLEARQAASLAGLAPVARQSGRWTGRAFIRGGRASVRQALYMPALVAARFNPELKAKYTQLVKAGKPAKLALTALMRKLIVLANALLRARRTWTPKLA

SEQ ID NO: 356881 - protein, 339 aa, unidentified
MKHTTVGVDIAKNVMQLHYIDAETGEIVNKPVKRAAFLEHFANLTPRLIGMEACGGSQHWARKLIAMGHQVKLMPGRFVKAFAMGNKNDATDARAIWLAVQHAGKAVAVKTETQQAVLGLHRMREQLVKFRTMQVNSLRGLLTEYGEVMAKGRAALDKAIPSVLERLVDRLPSILIDTLREQWSGLSELDRQIAEIERRLQAWQREDKACKAIVAIPGVGLLTATAAVATMGDAKTFRSGREFAAWIGLVPRQTGTGGKVQLLGISKRGDTYLRKLLIHGARSVLCLAKEPGLWAEGIKKRRPLNVAVVAQANRMARTIWAILAHDRQYDKDYVSVKPV

SEQ ID NO: 356882 - protein, 364 aa, unidentified
MSNTKPRKLTLVRKPNEPIRLEEGEAVHVGVDVPKASSSVALFSDRRGLIATWVQPARPEALLERLRPIREGTAQVVYEAGPTGFGLARRLRAEGFKAQVIAPSKLLAPVGPEAKSDRLDCRRLAQLSAKGLLHPVRVPTVPEEADRQVLRLRDLLVRKTHAVQSQIKSFLLQHGIAEPAGLGHWSKKSVAALRGLALLPELRFCLDVLLDELAHAQEQVKRVTVRLKGLAEADRHRKATAVLCSVPGVGVLTAAAFRLERPEPERFDHEGQVARMAGLAPQVRQSGQTRREGGLLKSGNARLRAALVEAAWRWVRSDEAAAGRYRHLVGSTGNGKKAIVAMARRLGVLLWRLSVHGESYRPAA

SEQ ID NO: 356883 - protein, 368 aa, unidentified
MENSVRYVGLDVHKRFITVAIAQAGAGAEVRSYGQIGGDLESVDRLVRRLQSQGGDLYFAYEAGPCGYQIYRHLTARGFSCLVAAPSRIPRRPGDRMKNDRRDAATLARLFRAGELTPVQVPDADDEAMRDLTRAREDAVAVERRAKQRAAAFLLRHGRVYEGRTTWGPGHWRWLLEQAMKHPAQQIVLQEYLDAVREAGARVARLTGQIRELTAAWRRAPQVAAYQALRGVSLITAATVAAEVGDLDRFDSPTELTAYLGLVPSEHSSGGVVRRGPITKTGNGHARRVLVEAAWAYRLQARVSRHLHKRQEGLPEPVRGIAWQAQVRLCARFRRLRARGKHQNTTVTAIARELAAFLWAIHGALARP

SEQ ID NO: 356884 - protein, 410 aa, unidentified
MDTLIERCAGLDVHKDTVVACVRVPARGGGREQSIQTFGTTTAQLLALRDWLVAQGVTRVGMESTGVYWKPVYYVLEDALECLLLNARHLRNVPGRKTDVADAAWICQLVEHGLVRPSFVPPKPIRELRNLTRYRKAQIEERTREAQRLDKVLQDAGIKLSSVASDVLGVSGRAMLRALIAGTRDPETLAELARGTLRRKIPALRQALHGRFGPHHALLVGTILAKLEFLDEALGHLSAEIEQVIAPFAAEAALLRTIPGVDRRTAEAVVAEIGVDMSRFRAAGRLASWAGWCPGNNESAGRHGSGKTRKGSKWLHTYLTEAAKAAARTKGTYLGAQYARLRGRRGSARATVAVGHSILVAAYHILDRHEPYRELGPDYFRRRHSREHQTRRLVSQIEALGYHVRLEEVA

SEQ ID NO: 356885 - protein, 358 aa, unidentified
MIGNTDIIIANVGVDIGKNAFHICAMNAKGTIVLRERLTRTALPKRLANILPCLIGMEACAGAHHVGRKLASLGHDVRLMPAKYVKPFLKGHKNDYRDAEAIAEAVQRPTMRFVPFKSDEQLDLQALHRVRSRLVGQRTAVINQIRAFLLEHGVPVRQGPGALRQALPSILAQRTDTLSSRIIRLIEGLIDDWRRFDQRIADVTSEVEQLAKQSENCKGLMSVPGIGPITASAMVAAIGDGSAFSKGRDFAAWLGLVPKQISTGDRTILGGISRRGNSYLRTLFIQGARSVLQRFEGWEKKSFGRWLIAASKRLHKNVLAVALANKLARIAWSVLYNARGYDATYANSGMTTVAASEK

SEQ ID NO: 356886 - protein, 377 aa, unidentified
MKNIRFVGLDVHAETMAVAVAESSGEVRSLGTIRNREESIRKLVRKLGPVEQLRACYEAGPTGYVLYWQLTALGVKCDVVAPTLIPVKSGDRVKTDRRDAEKLARCHRAGDLTPVWVPDAAHEALRDLVRAREAAKRDQHRARQRLGKFLLRHGIRRPDTMKTAGSKPHLEWIKMKVHFDLPALEITLIDYVHEVEHGAQRLTRLETAIGEAARSAPPCMRAVIQALQALRGVAEIGAVTIVAEVGELSRFPGARQLMGYSGLVPSEYSSGARRIQSRITKTGNAHLRRVMVEAAWAYQFRPWLGGYLLKRQTHLSPEVKEIAWKAQHRWHGRYRELLRQGKNKPQIVTAIGRELLGFIWAIGVMTENQHHTLAAAA

SEQ ID NO: 356887 - protein, 316 aa, unidentified
MVLSPLFVGIDVAKATLDIAVRPTAETWSASNDATGIDALVLRLGALAPTLIVLEATGGYQGPLVAALVAAALPVVVVNPRHIRAFAQAVGILAKTDRIDARVIAHFAEAVKPAPRPLPDAETQELRALLVRRRQLVEMVSAERARLDTAPPSIQDAIQAHIAWLTTQIAGLDDALTRASQTHPVWQAKDDVLQSIPGVGPVLARTMLGQVPELGTLGPKPLAALIGVAPFNRDSGTLRGRRTVYGGRAEVRAVLYMGALVATRHNPVIKTFYERLLAAGKAKKVALTACMHKLLTIMNAMVRDLKPWQPQEVPSA

SEQ ID NO: 356888 - protein, 350 aa, unidentified
MKQHSETREVKVMGIDLAKNSLHVYGVDDNGLKAVGKKFSHQKFKEYVANLPVCTIAMEACASAHYWARLLKSYGHEVKLIAPQFVKPYVKSNKNDAVDAEAVCEAAQRPNMRFVPIKTIEQQDIQSVHRMRSLSVERRTAQINQIRGLLLEYGIKVPKGRSKLRLRLPEILEDAENGLTELFREELFGLYAELRHLNERIAHYDEKIEQIARTDERAQRLQTIPGIGPKIATALLTATGDLHAFKNGRQLAACLGLVPRQHSTGGKATLLGISKRGDVYLRQLIIHGARSLLLTVDRKGDRTSRWAATLKERRHTNIATVAMANKMVRIAFALLKNGDTYRAASTPATA

SEQ ID NO: 356889 - protein, 369 aa, unidentified
MGDRITYVGLDVHKDGIVVALAEDGLRGEVRDYGRIANTAAALQRLARKIGQEGVELRLCYEAGPCGYGIQRQLSASGHGCIVVAPSLIPKRAGDRVKTDRRDAASLARLHRAGELTAVWVADAGHEAMRDLVRARLDAVHALRRARQQLSGFLLRQGCHYRRPAWTKLHRRWLAGLRFEQAVHHIVLEDYIAAVEAAQARRDRLTAQIEAMLPNWTLAPVVKALQTMRGMALVNAATLIAKLGDLSRFANPRQLMVYLGLVPSEHSSGTSIKRGGLTKAGNSVARRLLIEAAWCYRFPARVSRELRLRQEQQPKPIREIAWKAQLRLCARYRRLARTGKPANVVTAAIARELAGFVWAIARQVPPALG

SEQ ID NO: 356890 - protein, 341 aa, unidentified
MEQATTIGLDIAKHVFQVHGADAAGHVLFRKRITRAKLLNFLAAQAPCVVAMEACSGAHCWAREIGKLGHHVRLIAPVYVKPFIKRQKNDAADAEAICEAAQRPSMRFVPAKSEEQQANGIVFRARDLLVRQRTQCVNALRGHLMEYGYVFPKGITHVETLVALVEDLQSALPNSVRVILKLLVDTFTALEAQIAALDAEINQRSKSDPTARRLMTIPGVGPIASTAITALVPAAEGFPAGRDFAAWLGLTPLQKSTGGKQKLGAVSKRGERTIRRLLIIGASAVVQQASRRGAPQGSWLAQMLARKPKMLVTVALANKMARIVWALLVKGGTYRTPAAAA

SEQ ID NO: 356891 - protein, 292 aa, unidentified
MSTKTTKKRRSFIGIDVSKKLLEVGVHQSDYHFRCPNDPKNFPALITELISLRPARILLEATGGLERALLQALHAAGLPVVVVNPRQVRDFAKALGLLAKTDRLDARVLAHFAAATQPAIRPVKAQQETELDALMGRRTQLSDMLAQEKNRRGSAATKGTRDDIEAHIEWLEERIQELDEKLKEQLKGSAVWQQKDQILQSVKGIGFVTSMALLADCPELGQLNRHQIAKLVGVAPLNRDSGQQRGARTFGAAVPRCAASSIWRPWLPFASIRCSSLSTSDSSPSTNRRRWP

SEQ ID NO: 356892 - protein, 462 aa, unidentified
MALTLGIDVAVRAAHQATLVRDGTTVWRGCKFSTRPTDLQRLWSALDLADPGDLTVVVEPTRNAWIVVAEWFRRRGAQVVMVPTTQSADLRKYYSKHTKNDRIDSELLAGLPLLHPEGLREYSGQGPADPLRRLVKQRSTMVKRRVAVYARLDALVELLGPAWYAVLGSNYGIAALEFLARYADPNVVVRLGQGRLSRFLSARSRGAWREDHAAGLIVAAKETLALWGPDGMNFAELAEDIAHEAEQALFLTRQIKQIDERVANLYADADPDGIVASAPGVGPVISAVIAGRIGDPHRFTSLAAIRAYTGLIPKISQSGLSKIESSITKAGDPLLREMLCTAADQARKVDPQIAAKYQRLMTGDRHHDSAICHLATMLVTRIATCMRAGQPYQLRDVDGTAITESEARAIVKQRYQLDPRQRDHVRHKLMRERRKRPARSHRSRQALQHPIPLNASLRRAPN

SEQ ID NO: 356893 - protein, 351 aa, unidentified
MNILAMDLGKSNTVICYYDSESGRHKFGKVKTTPPQIHDLLADYKPDRVVFEICSTSGWVYDICRGLKIETQVANPNTAAWRWKNVKNKNDRKDALKLAQLSAMNQLPTVHMPTADVRRKRALIQYRQTLVGRVVQIKNSIRAILDKQGYSMSSGKTGWTKKSVELLNEMAMPIEKCDTNNLWRGQLYVELEMFTANDKALSDVTGKLDELSKSDSQIKLLRTAAGVGPRLAEAVVAFVDEPGRFKSGKAVGSYVGLTPRQYQSGSMNRQGKISGQGNKLLRALLVEVSWLGLRYNRWMQETYQRILRGSPSRKKIAITAVARKLLVRCWAMLRDGTEWRDKETGIDRQAA

SEQ ID NO: 356894 - protein, 321 aa, unidentified
MSSSSTSVVGIDVSKKSLDVALLPEGKSFNVPNNTDGLARLLEHLPQPGACLIVVEATGGYQRRLVAEATAAGHRVAVVNPRQVRDFARSLGILAKTDKIDAKVIARFAQHIQPRIVDKTPEKQAELQQLVARRRQLVGLRTAESNRMETASSKEVRKSIRQVLDLLKKQIERVEKQIAALIEANDDWKHKADIVDSAPGVGPKTAAALVAELPELGKLNRRQIAALAGLAPFNRDSGNFRGKRAIWGGRGTVRSALYMAALTARRCNSVIRKFAQRLEAQGKRHKVVMTACMRKLLVILNTMVKNNTHWNHNLPHEILDN

SEQ ID NO: 356895 - protein, 338 aa, unidentified
MKVNVVGVDLAKNVFQLHGIDRKGRPTLVRRVRRDQLLKILGELEPCLIGIEASTGAFYWQRQFEKLGHTVKIMAPQYVKPFVRRQKNDTNDAEAICTAVQQRNMRFVPKKTLEQQDIQALHRARQRLVNHRTALISQMRGLLLDRGIAIAVSATRARQLIPKILAAPSDELTGLMREIVSSLYAFMLQIDERIRAFDRKIAAIFKASDVCQRIAKIRGIGPKTATAMIAAIGDGSDFKNGRHLAAWLGLVPRQHSSGDRRVMMGISKRGSQHLRTLLVHGARAVVRTALRKTDSRSRWVNELRQRRGYNRATVAVANKNARVIWAVLTSGEPYRATA

SEQ ID NO: 356896 - protein, 319 aa, unidentified
MATVSIPTTPAGYQDLLAWARGLGEVEAWGVEGTGCYGAALTRFLVAHGQVVLEVNRPDRQARRRRGKSDPVDAEAAARSVQAGEVTTVPKAGNATVEMIRSLRVARQTAIKARTQAINALKALLVTAPVELREQLRGRSAAMLVRQAAALEPGPLVTPTAAAKLALRCLACRYQALQAEVATLDTELARLVAKAAPGLVARFGVGPDSAGALLVAAGDNPGRLRSDACFSMLCGSSPIEASSGKTRRHRLNRGGDRQANAALYRIVVVRLRWHQPTKDYMARRLTEGKTTKEIIRCLKRYVAREMFTVLNQTVPTPAT

SEQ ID NO: 356897 - protein, 366 aa, unidentified
MKKKIAYVGIDYHKNTLTIAVRIEGEKEIHDTIRIRNEDKIIQKYMKKISKDFDIRACYEASSSGYYFYRKMTSWGYHCDVIAPSSLPKKRGDRRKNDFRDAINLAQNYANGTLSVVHVPTETDEAVRSLVRCRMVFKEDEKRAKQQINSLLLSQGLHWPRSKWTLRHRKWLWELKMSDEHFQKVLDEYLSHLDYLETRLKHLDQQIERIAASDLYAPAVTKLRAFKGIGTLSAMLLLAELTDFRRFPDPRALMGFLGLIPSEDSSGDRVKGGPITKTGNRRCRTQLIESVQHYVKKPKISSRMQRDLAQVDSRSAAIAIKCLERLHKRYWSLTMKGKLRPVAITAIAREFVGFIWAMMQPQAAVA

SEQ ID NO: 356898 - protein, 349 aa, unidentified
MKTTSYEGEQVYIGLDVHREFFVASCISDGVVVKRCRIPGTSEAVEALVRKELPGATVLAAYETGYSGFWLHRKLEAAGIRCVVVHVASIEVSSRDMVKTDKRDSLKIAEQLASGRLRGVRVPSVEEEQKRLLTRTREQLMNKKRRVMVQIRMRMHYFGLFPESINRRLKLSDVDYMLVSLEGELQRTIGMLRDEWYHLAKQIKEIDRILVEEGKNDPLDAVYRSVPGVGPLIARVLSSELGDMSQFPNERALFSFTGLTPTEYSSGGHICRGHISRQGNARLRHMLVEASWKAVKKDSVLKEYYTKLSERIGKRRAIVAVARKLIGRIRAALRKHEQYQLGYRAQVAA

SEQ ID NO: 356899 - protein, 470 aa, unidentified
MKRQPRPRARRRAPKPRQSPAALERLHPHAAGIDCGSAEHCVAVPPDRDPTPVQSFPTLTGDLHRLADWLTACRITHVAMEATGVYWIPVFEILDARGFQVILVNARHVKNLPGRKSEVSDCEWLRDLHILGLLRGSFRPADGIVALRGYLRHRATLIESAGSLVQRMQKALVQMNVQLPLVVSDITGVTGLRILRDIVAGQRDPHQLAHHRDYRCHASEAEIVAALTGNYRPEHVFVLQQNLDLFDIYQRHLATCDEAIEGHLAHLAAATTAPPATPLPAARRRQKPRENEPRFDVRTPLYQLTGADLSQIDGIGPYNALRLIAEIGTDMTRWPTDKHCTSWLTLAPQNKVSGGRLLSSRTQPSANRAAATLRLAAQTLGRTQTALGAYYRRLAYRIGKAKAVTATARKLAILVYHTLKGDLRYQDPGAEAYETQDRMRAIRRLRQRADHLGFALVDLTTGDLAEGTVS

SEQ ID NO: 356900 - protein, 347 aa, unidentified
MLHVGLDLSRTRVDVHAMDESGTSVLVTRAAPDAGGLASLVDRLGGFGQPVTAVIESMNGARFVHDQLELRGWTVEIADAVKVKGFGPLACKTDKIDAWVLAELSRRDLVPAIWLPSPGVRGDRERARWRLHLVRHRTALKNRIHATLMAFGHPCPVSDLFGVAGRRQLDHLELPEPWTGDVVAALRLIAVLDGEIDACEAALREAGADHRYVPTLMTAPGIGWVLGYTIAAEIGDITRFPTPKKLVGYTGLCPSVDQSGGHDWRGSLAKNGPKYLRWAMIEGAVHAARHPVYAGRYQRTKTRLGRQRGPSVARVDIARKLTEAIWHMLTTNKPFAPAGATTTALAG

SEQ ID NO: 356901 - protein, 333 aa, unidentified
MNQVRAHIGVDVGKEWLDICYPDGEKEKVRNIKSCRTKVIKRAARINAIVCFEATGPYEEPLADECLAKSVRAVRLDAWGARRFAESQGRIEKTDRIDCEMIRDYAASLKDEKLHFIKPRSEAQKRLKKSISVRRNLMKARAIVYNQLEHIRDRDSRRHLESSIAKLDKEIARIEAECDKAIADDERMKHLSDRFLKVKSVGPCLVRTVLACCPDIGDFNSKSIAKMCGNAPIDHESCTVRHKAKPKRGRPDLKKAFYMAAVSASRCNHVLREFYQRLVAKGKARKLALTAVARRIAILLNCIARHPDFVPAQDPKDIARAESRKRRRHSKNA

SEQ ID NO: 356902 - protein, 412 aa, unidentified
MQDILTCAMGLDVHRDVIVACLAKGELGTDPEIELRSFSTLIPEMRKLRDWVLEVDCHHVAMESTGIYWQPIYEMLEPCFDGQINILVVNARHMKNVPGRKTDMRDAQWIATLLRAGLLKGSFIPDKTFRELRHLTRYRKSIVRDITAQKNRIDKFLQSSGFRFTAFLSDAFGASGRNIIRHLMEHGSISREALDKCLKTQTRKRIDEILIALNGSLSEHQRSFLRMIFGHLESLEQHRHAVEDAIAEEIVKHEDALGLLCSIPGIDVTAAAAIIAEIGTDMSAFPDSQHICSWAGLSPGNNESAGKRKSAHINKGNPYLKSMLCEVGWVISGKRTLYLSGWYWRIKQRKGAKRATIALARKLLALIYTMLKTGTPYNEECFEIRRKQSERKRANRMVNELQRLGYFVVAPD

SEQ ID NO: 356903 - protein, 375 aa, unidentified
MTGVDSRHRPRRDRKPAVASESKPRMSLELRSLVPYPNSCLGTSPYQQERDTKMATVSFCGIDVAKDRLDVVVLPEQRCWSVCNDAAGWAELAKQLGSFSIAAIGLEASGGYERGVMRVLLAADMPVHQINPFKLRQFAKASGVLAKSDRLDARVIASFIAIMPPRRAQRPSPAIERLTEILSVRRQLTDQKIAAQNASAMLQDAMLLRLSRRRIGRLAADIEMLDRSLVEIVRTDAALAHRYRLLTSMPGVGPALACTLIALLPELGSMSRKQVAALVGVAPYTFESGKLKGKRCIWGGRAPVRHVLYLAAMSASNWNPVLKAFHSRLKIAGKLHKVAIVAVMRKMITMLNAMVRDDVAWAGHLGGRQILPTAR

SEQ ID NO: 356904 - protein, 409 aa, unidentified
MRRIVGMDIHRTFAEVVFWEEGRLRPAGRVDMTRSGLEGFARQLTKEDEVVVEATGNSMAVVRVLSPFVGRVIVANPLEVKAIAHAHVKTDKIDAGVLASLRAADFLPEVWLPDAETERRRRLVTRRNQVVRHRTRIKNEVHAILHAHLIPLCPHADLFGRRGRAWLANQPLPEDELAAIERHLRELDRLGEDLQGLDREIAQAVCDDPAVKRLLTISGVNLTVAAGLVAAIGDIHRFDSPQKLVSYVGLNPRVHQSGLGLAQYGRISKRGRSHARALLVEAAWAAAKAPGPLRAFFLRIRARRGHQVAAVAVARKLAVVCWHLLTKDTDYQWARPALVAHKTRAMELQAGAPMKKGNRRGAAYAYNVKDLRDHEIAMAQQAQQAYEEFVSRWQPRRPKTAPPAKAAPA

SEQ ID NO: 356905 - protein, 316 aa, unidentified
MDHNNAVYGVDISKAKLVTARYDVQTLVEVDNRPESIAAWLAGLPKGAVVAMEATGIYHRLLAHLAHAAGMRVYVLNPQTLKHYAWAIGQRGKTDNCDARMIARYAVHELAKLRRWQPPARAADRLSQLLERRHTVVGVRQTLAQSLSGLPMLKAARQSLLASLERTVGRLDILIRHEMARLPGAAALYERLKSIAGIGPVVAAQLVAVFSTLSFARAGAFIAYTGLDPRPNDSGDRRGRRSLSKHGPALLRCLLYNAGMAAANSKVFKSVYTQLRQRGLQTTEAIVILARKLARIAFALYKSGEVFDAQKHFKAA

SEQ ID NO: 356906 - protein, 409 aa, unidentified
MDMIHPRCAALDLGKDVLVAAVRTQHGSRIERECRTYGTTTVQIQTLKQWLLGHQVRQVVMEATGAYWKAIWHLLEEDFELTLANPAAVRNLRGRKSDVNDAIWMADLHAHGLIRGSFVPPAPIAALRDLTRTRKQLGREIARHTQRIQKTLDIANIKITGPISDLLGVSGRAILRALIAGETDPEVLAGLVHPRVRASRETLQEALNGLLTVQQRHLIRMHLGLIDNLQAAVAGLDAEIEKVVEPFRPILTAVAAIPGLGEVNTPALIAEIGVDMSRFPAHGNLISWARLCRRLDESAGQVHSSRTLPGANWLKPLMIQAAHAAIKVKTSYFHAQYLRLRARRGSKKAIVAVAASILTTVYYVIRDRKPYQDLGADYFDRLDRGRIAHRHLARLRQLGYDVEIKDAVA

SEQ ID NO: 356907 - protein, 346 aa, unidentified
MEYFIGIDVSLEASAVCVMDQGGAVVKEAKILSEPDALIAFVRGLGHEVSCIGMEAGPLSQWLYKHLIAADLATVLMETRQVKGALKAMPIKTDRRDALGIAQLLRMGWFRPVHCKSVSSQEIRALLAARKTLQGGAIAIELSMRGLLRGFGLKIGLVSKRLLDARARELAEGNSTLMALVTSMLRSRAALRAELLRIDKRLRDIARTDGVCRLMMSVPGVGPLVALTVKAGIDDSGRFRSSKMVGPHFGLTPRRDQSGERDVVGGISRAGDAGVRTALYQAATSMLYRSAKNSWLRAWGMRVAQRRGMKRAVVAVARRLGVVLHRMWTDETQFRFSQADAPVKGA

SEQ ID NO: 356908 - protein, 352 aa, unidentified
MNQITTVAADLAKELIVVCAADASGRTLFFKQFGFRGFAEWAANLPPCTIAMEACSSAHFWARTLAALGHCPKLLAPDLVQPFRKSKGAKNDRNDAQAILIAALQPDMRFVSVKSVEQQSMLAVHRMREGWKVERTALINRVRGLLAEFGIWLGRSPQNLARSLPRLIQDEELPARMRGLLGQAQEHLQQLQALMEQGERDICEHARESEAAQRLCALKGIGPITASALVVSVGDARDFRNGRQMAAWTGLVPKQSSSGGKDRLGKITKRGDTYLRGLLTQGARSTLNAALARPLDKRSQLEHWIVALRQRVGYHKSLVAIANKHARICWALLARGERYDPHVASRHVRAAA

SEQ ID NO: 356909 - protein, 371 aa, unidentified
MGESSKTLYFGLDVHKDSIAVAYAPEDRGAEVASLGSIGTRQCDIDKLIRKLQSKGATLVFVYEAGPCGYWLYRYLTRKGLSCHVVAPSLIPKKPGDRVKTDRRDAITLARSMRSGDLTAVYVPQIEDEAIRDLSRGREDAMRDLKATKHRLKAFLLRQDIRYEGRANWNAAHLRWLSEVVCPTRAQQIVFQEYVRAVTEQHERLQRLETELHEEVKGWRLYPVVEAIQALRGVELTGAVIVIAELGDLTRFDTPRKLMSYLGLTPSEYSSGERRRQGGITKAGNSHARRALVEGAWAYRYPAKVSRHLQLRLEKLPAEVQAISWKAQVRLCKRYRQLTARGKHLNQVVVAIAREMAAFAWAIARTVPLAP

SEQ ID NO: 356910 - protein, 523 aa, unidentified
MATRSHSKKRRSARSHLIHKPQGVVHPRVQAVGPEHFGIVSVDCAKARSKWMLADFYGKVLVPPTPVEHTRKGLEEMVLSVHKAIAQFDLRDVIVAIERTGRYHLPVKRAFVKALLETRLVHPLTSKQFRQPANPGNKTDDTDLSAIHRAAVNGFGLIEQPADPVTVRLQLLARHRRDWVEKKSALHCQIHEHLQMIMPGYARCFDDIYKCHIPLLIARRFGSADTILRAGLPGLTEQVRQAGIGPHRPTLEKILAWARTAPPAAVEASIHHRIMIELDDDRVSKLRAVKAVEGELAEQLVQTPYVLLLAVPGIGVVSAGEFAGEMGPIQYYTKGRSITGRAGLFPSRYQSDEVDRPDGRLVRCANHRLRQAIMMIADNLIECNDHFRVLATQWQQEGKDPRAIRVRVAGRFCRIAYQMVAGRATYRHPSCQQRDYVLRKLIRFYNAHSIDIIRIMRELDAAVAQLPGAEHREEGAALAAELDQLQKKRGSGPRSLAEILPAVLAKLGVQLVTSTKSGEADLT

SEQ ID NO: 356911 - protein, 356 aa, unidentified
MPSFEFFGEVPIVIAVGIDIAKRTHEACFMGQDGRQIGKTRRFHNTRRSVRALLDDLQQLPEPATIGLEATGHYWLALHDELVRAGHTVQVLNPLQTHAYRKTTIRKLKTDRKDAWLIADVVRIGRGRAAYVPDETILQLRELTRFRWAVVDQIGDAKRRSLSILDRVFPEYETLFSDVFIKSSRALLQQATTAAEFADADLAELTAVLKQKSRGRLGAEKAEALQLAAHDSLGITRLGGVASFELRALLDQIAFLEHQVAAIEQQIETRLAEIAQHVTEIKGISPVMAASLIAEIGDVQRFRRFESLVAYSGIDPSVFASGEFKATETSMSFSETTARTRCGERRCWLSGATLVK

SEQ ID NO: 356912 - protein, 319 aa, unidentified
MRKASTAALGRRRKLQEGQLTIGLDLGDRSSFYCVLNGAGEVVLEAKVATHPEAMKKAFEKMPASRIALETGTHSPWVSRLLTELGHEAIVAHSRNVRLIGESRRKDDRLDAQALARLARIDPKLLSPIQHRSVQAQADLSVIRARYALVRTRTALVCAARGLTKSFGERIRGRNPKGFGSATAEALSPQLQVALAPLLSALETITARIREYDAQIEQLAEESYPEVALLKQVKGVGTLIALTYVLTLEDPRRFRKSRDAGCYVGLQPGRRNSGQSEPSAAYHQGGRFLSAHGPGTRGTTHPGSIRRGLRSAPMGTEVG

SEQ ID NO: 356913 - protein, 340 aa, unidentified
MKQFIRIGVDLAKNSFQVHGLESEDGRATARKLSRSAMPGFFAGIKPCLVGMEACGSAHYWARELRAMGHDVRLMPPAYVKPYVQRGKNDAVDAAAVCEAVSRPQMRFVPIKSQEQQATLMAHKTRDLLIKQRTMGVDALRGHLAEFGVIAAKGIGRVEELVEKAAEANLSEMARAALNVLVGQLDGLDAAIAEVTRQIAGAHARDPFSCLVASVPGIGALAASAITASAPDPRVFKSGRDFAAWLGATPRQYSTGGKEKLGAITKQGNRSLRRLLVLGAISLLRVAAKRKGALRDWLVALRARKPAKVAAVALANKLARIVWAVMTTGEPFRAHMFSRA

SEQ ID NO: 356914 - protein, 341 aa, unidentified
MEQYVGLDVSMRETSVAVRQNGKRVWRGKCPSDPKALADVIRQRAPDAVRVVLETGPLSTWLYHALKAEALPVVCIDARHAKAALDMAPNKTDANDADGLAQIAEVGFYREVRVKGYAPMLARTLVGARGQLLRISIQLSNQIRGVMKTFGLIVPKGAGRVFETHARALLGTNEAVARVVLPLLEAWRAVRARAAELDRQLIAAARTSPACRRLMTIPGVGAVTAASFVAAVEAPENFGTSRAVGAWLGLTPRRHQSGEADYDGHISRRGDGHLRALVYEAAAAVLTRTRTDSALRSWGLELKEKVGFKRAAVAVARKLAVIMHAMLKTGATFDPAPSTTA

SEQ ID NO: 356915 - protein, 413 aa, unidentified
MDVLYPRCCGLDVHKSSISACILLREAGRVQKHQRRFGAMTQDLRELAEWLRQFGVTQVAMESSGVYWKPVWNILERQFTVVLGNAQHIKNVPGRKTDQKDAEWIAQLLQHGLLRPSYVPCEIIRDLRDLTRMRTSLSQEGSRISSRIQKVLEDANIKLASVATNALGKSGRAMLEDIIAGEDDPEHLASLALGHLRVKIPQLRLALEGKVRSHHRFLLRRLLDQMQFVEHEIALLEERLEDIGRQRPELAQAVARWDTIPGVDLVAAWALLAEVGDNMAQFPTAEQLASWAALCPGNHESAGKRLRGTTRQGSPWLRRMACQCAWAAARTKNTYLSSQFRRLAARRGKKRAIIAVAHTLIVIGYHLQKNQSNYHDLGGNYFDRIHSDGLKRYLVKRLQQLGHKVTLEPIEAA

SEQ ID NO: 356916 - protein, 411 aa, unidentified
MEVIHARCAGLDISKKDAKVCVRVAGAGRRKTVETVTTWGSMTSQILALREHLIAERITCAVMEATGDYWKPFYYLLEGAGFEVLLVNARHVKNLPGRKTDVADATWLAQLGAHGLVRGSLVPPEPIRQLRDLTRARTAITRERSREVQRLEKLLEDAGIKLSAVASDILGVSGRAMLESLIAGNRDPAALADLAKRRLRSKIPALTEALTGRFTDHHAFLARVHLNLIDQHTAAVADITARIEATIKPFHWFRDLICTIPGISTLTADVTIAETGADMTRFPTAAHLASWAGTTPGNNESAGKVKSSRTRPGNPYLQGALGAAAMACAQNPVTYLGARYRRIAARRGPQKANVAIQHSMLIATWHMATNGCLYHDPGADYFNQLHPERAAKRAISQLEAMGYHVTLTRAS

SEQ ID NO: 356917 - protein, 346 aa, unidentified
MPVMIGVDPHKVSHTAAALDEHGQLLGQQRVPATLDGCQQLRQWAGRWPLRCWAVEGAYGVGRALAQRLVGDGELVVDVPAKLAARVRVLSIGHGRKSDPHDAVSVAIAARSAPQLRQVAVEDQAVVLHLLTKRRQDLVAARTQTINRLHRLLMDLVPGGARRNLTANRAATLLAAVTPARGPAVIRWQLATNLVADIRHLEQRIAAVEARIKTAVAQANTSLLELFGVGPVLAATFLGEVGDVRRFPSKHHFAAHTGNAPLEASSGQVVRHRLSRAGDRKLNHALYMMAMVQVRRPSAGQAYYRRKLAEGKSPREALRCLKRRLSDAVYRCLIADQQRNVAEVTS

SEQ ID NO: 356918 - protein, 348 aa, unidentified
MCQRNQYVGLDVSLKETSICVIDEADKIVWRGRVDSTPKAIASAVKQHSPHAVRIGLESGQLSNWLFQELQAAGLPVICVDARHAKAALSLKVNKTDANDAVGLAQIMRVGWYREVTVKSLDCQAVRALLVARAQIVSQITTLKNSVRGILKTFGRVLPKGLRSQFPVRVRAAIDGHPVLEAIIEPTLRVLEAARAQLLVYDRAVIQRARSDSTARQLMSAPGVGSVVVLAYITAIEDPARFKRSSSVAAYFGMTPRRYQSGEVDYAGRISKCGDGMVRCLLFEAAKVLLSRSARPSALKTWGETLGKRVGAKKATMAVARKLAVILHRMWTTDTTFQWSAEAGSSAA

SEQ ID NO: 356919 - protein, 309 aa, unidentified
MKQSVVYIGVDVAKLHLDVAWAAECRRFPNDKRGQAALVAWIKPSLTAVQLICEASGGYEQGLLESLERSEVKFTLVQANRVRQYARAAGILAKTDKIDARVLAAFGAAMQPSPSLPHSAEQKRLRQYDAHRRHLSVLLVAEQNPLAQLNCAELRALSRSLINKIQKQIDTLDARIGDLIAHDQQLRAKAQKLISITGVGTRTAALVLAQMPELGKLNRRQTAALGGVAPFNHDSGKVHGQRTIFGGRRALRSGLYMAALCAARHNPILSSFYQRLRAKGKPHKLALTAVMRKLLIALNSCLKPQPILA

SEQ ID NO: 356920 - protein, 338 aa, unidentified
MELYAGIDLHSNNSVVLVLDENDRAVYQKRLPNTLDKIVQALQSCGTPIRGVAVESTFNWYWLVDGLQAAGFVVHLVNTAAVKQYDGLKRSGDFEDARHLAHLLRLGILPTGYIYPRHERALRDLLRKRSQMVRTRTTQILSMQNLLARNLGARSSSNQLKKWDNAVIDALDFLPEQKLAIKANLAVMTCAHREVDALEREIVNRAKLRADYQQLLTVSGVGKVLALTIALEVGDIKRFDGAGNFASYARMVDSRRESNGKTKGVGNTKCGNKYLAWAFIEAAHFAVRYDEAINRFYQKKSAKTLAVVAIKAVAHKLARACFHVMHDGVPFDVKRAFG

SEQ ID NO: 356921 - protein, 284 aa, unidentified
MTFVGFDLHKRYITACALDAEGEIIAEVRQLATSLDAILAWLEPLPGPITVGVEATLYWEWLTTRLAARDIAVKVAHAFHVKLIWQARAKTDPIDARKLAELLRVNLFPAIWIPDAETRERRQLLRGRAFLVRERTRLKNRIHGHLTSENLVAPGSDLYGKGGRAWLASAPLSPVLRTQTEHLLTLHDSLTVEITALDGDVKKAAKGNPVVKQLSSLPGVGMFGALFLQAEIGDIDRFPSSHRLAAYAGLVPTTRSSGGKTAHGDSARQATAGSSGSSSRSSSR

SEQ ID NO: 356922 - protein, 427 aa, unidentified
MNFTQNEKLKQLSERSIVIGVDIASELHYARAFDWRGVELGKVFKFENSAEGFKDFYAWIEHLKRQAQKDCTVVGAEPTGHYWFGLASYLKEQSIKLVLVNPFHVKRSKELDDNHPSKTDAKDPKTIAKLVIEGRYNEPYIPEGIYAELRIAMVCRMRIQKELNSIKNRIQRWLKIYFPEHETVFGKFDATSSMLVLQVAPLPKDIERLGVEGINRIWRDNKLRAVGMKRAKSLYEAAQKSIGCTEGESCSRMEIQLLLQDYHTKTAQYQAVTETIDGLCCQIPEVAKLLEIKGVGLVTVAGFLSEVGDIKRFNSPKQIQKLAGLALRESSSGKHKGQTTISKRGRARLRAILFQAVMPLVAKNAEFAEIHNYYTTRSKNPLKKKQSLIALSCKLIRVFYAILTKGTDYDPKKLITDIHRPAEYLAA

SEQ ID NO: 356923 - protein, 463 aa, unidentified
MSNRHRITKAARRTTKRVSVEGSLPLLRPNAAGIDVGAEEHYVSVPADRDSESVQRFGCYTSELRRMAEWLKACRIETVAMESTGVYWVPVFEVLEEYGFEVYLVDARQTKNVSGRKTDVVDCQWIRQLHSYGLLSAAFRPAQEIAAMRAYWRHRQGLVESCTRQIQLMQKALEQMNVQLHKAVSDVTGVTGLSIIRRIVAGDRDPKALATMRQRGIRRSEDEIAEALNGNYRDEHVFALAQAVEGYDFLQGQIERCDREIQQCMIGIATKISPPLESKRSSRQRAKNQPHFDLRGELHRIAGVDLTRIEGIDALTAQTVISECGVDMTRFPSDKNLASWLGLCPNNKKTGGRIRSRRTKRIKNRAADALRRAAQTLHHSKSALGAEYRRLRARLGAPKAITAMAHKLARLIYRLLKYGEAYVSEGLEQYETRHRERALRSLNHQAQELGYDLVLRATGEVVS

SEQ ID NO: 356924 - protein, 411 aa, unidentified
MEQIYERVAGCDVHRDQVTVCVRTPGPRGGVHKDKARFKTTTAGLIEMADWCGERAVELVAMEATGVYWKPVYYALEDRFRVWLCNAYHVKNVPGRKTDMSDADWLADVAAHGMVRPSFVPPVPIRELRELTRYRKKQIDTRASELARLEKVLQDAGIKLTSVASKVLTQSGRAMIQALIEGEGDPGALAELAKGKLRPKIPELIAALSGHFGAHHALVADRVLAHLDFLDDTIAQLSRQIAERVAEGYEPVLDLLLPIPGLQHTSVEVIIAETGADMSCFPTPGQLASWAGLCPGNHESAGKRRKVGTTAGNQWLRRTLIESARAAARTKGSYFGAQYHQIARRRGPNKAAVAVAHSLLDVIWHALSTGEVFTDPGADYFTTRQDPEHRTRRLVNQLERLGYTVELTQTA

SEQ ID NO: 356925 - protein, 315 aa, unidentified
MVNVPCFIGIDVAKAQLDIAIRPSGERWAVPNDASGVTMLVDRVQALQPTLIVLEATGGLERAATGALATAGLPVVVVNPRQARDFARATGQLAKTDALDARALAHFADVIRPTPRPLPDAQTQELRALLGRRQQLIGMRTAEQNRLAGTSERLTQDIKAHIAWLNTRIATLDDDLETMLRASPLWRENDDLLQSVPGIGPVCARTFLLELPELGTLTRQQIAALVGVAPLNCDSGTLRGRRTIWGGRAHVRTVLYMGTLVATRFNPQIKAFYQRLLAAGKIKKVALTACMHKLLTMLNAMLKHRTSWQAQEVQN

SEQ ID NO: 356926 - protein, 313 aa, unidentified
MDRCSVGIDVSKDRLDVAVLPQGTRWQVPNTKAGLLDLGERLRTVEPALVVLEATGGLELAVARHLVECGLPIRVLNARQVRDFGKAIGKLAKTDAIDALLLARFAQRVEPEVRPLPDELTQALGALVTRRRQLMEMLVAEENRMERAPRSVQGELRAHIAWLRRRLKALDQDIGTTLEQSPVWKELSDLLQSVPGVGEVLTMTLLADLPELGSLNRKQIAALVGVAPFNQDSGKLRGKRMIWGGRACVRSVLYMAALVATQHNPVIRAFYQRLLAAGKPKKVALVACMRKLLTILNAMLKHKTPWRLEVLHV

SEQ ID NO: 356927 - protein, 343 aa, unidentified
MPLYGAIDLHSNNNYLVVSDEKDELVLRRRELNLLEHVLRDLEPFAGSLMGVAVESTYNWYWLVDGLMEAGYRVHLVNTAAVRQYEGIKYTNDWSDARWLAHLLRLGLLPEGYIYPAAQRPVRDLLRKRSQLVRQRTAQLLSLGNIVTRTTGVRVSRSQLKELTLEEVGQQLVQPQVTLSADCSLQVVWTLDRQIERIEQAVSQQLKLDAAAQQTEQLLETVWGVGEILGRTILLETGPVGRFPQVGDYSSYCRAVTSQCWSNGRQKGENNAKCGNRYLAWAYVEAANYAARYYGSAQRFVERKTAQVNRALAIKALANKLCRASYWVMKEQVKFEPTRLFGS

SEQ ID NO: 356928 - protein, 356 aa, unidentified
MSVYLGVDFHARTQTVCWCDTTDGLIRQRTLDHEHDDVRGFYTQFAVPATVGLEATGYARWFHRLLESLGHRLLVGDAYVIRKCALRRQKNDRRDAELLLDLLLHGDFPAVHIPPIASQAVLRLLRYRQRLVGIQTKLRNGLQALALNYQLRLGPKLWNKQGQLQLLALEIDATDVLQREHSLALLEQIRTRIRAIEKELTLRAEQDARTRLLRTHPGVGLLTSLAVVHTLEPVTRFDRARRVAAYCGLDPRESSSGDMVRMGHISKQGNRLLRHLLVEAAHRAVHSKADSDLRSFYYRLMEKKKHSAVAITAVARKLVLRLYRMLRENIDYTEFRRRGREARCARKPASPTVGGC

SEQ ID NO: 356929 - protein, 373 aa, unidentified
MGEDSEVFVGIDTSKLRHAVAIAQGGRGGEVRFLGEIEATDAAVTKLVRRLAAKHGKLFFCYEAGPTGYGLYRLIKELGSDCVVVAPSMTPRKPGDRVKTNRRDAVSLARLLRAGELTEVWAPDERHEAMRDLVRARSTAVADLRRKRQQASAFLLRLGRHFPGKKTWGRAHMKWLLGQKLAHREQRVAFEEMMLAISEAQGRVGRLEQAIGAAVPDWSLAEMVTALMALRGVDLISATTLLAEIGDLGRFSTPRELMAWLGLVPSEASTGDRVRRGSITKAGNSRARRTLVECAHSYRYPARVGLAKQARVAAAPRAVREIAWKAQTRLTARYRALIKRGKLRNVVVTAIARELAGFIWAIHRALTEPRTAA

SEQ ID NO: 356930 - protein, 311 aa, unidentified
MTDHTIGVDISKSHLDVFRLEDGAAQRFDNSAAGFRALTKWLGKAPVARIVFEPTGPYHKAFEAALGEKFPLVKVNPLQARRFAEAHGTRAKTDAVDARMLARMGAAFDLAPQVPCSKEILVLRDLHVARAGLIKDRTRLRNRGQTQDIAVLKRQTKARLSQVERQIVELDTEIAALIAAGQTTARNCNILSSMPGIGAVTAAAMLTLMPEIGTLERKQVASLAGIAPITRQSGQWQGKAFIGGGRKPLRDALYMPALVAMRHNPDLKAKYEGLRAAGKPAKVAIVAVMRKLIETANALVKADRLWAKKTA

SEQ ID NO: 356931 - protein, 388 aa, unidentified
MPQPNDLSRSLAAFQQDSTLVAVVEMSRSSWLVAGIVPGIGRHPLKKLDPSEEALLALLGRWRDEAAAAGCTITRLAVAFEAGRDGFWLARWLRARGVEAHVIHPTSVAVSREHRRAKTDRLDTELLKRAFLGWLRGEPDHCSMAAIPTLEQEDAKRPSRERESLVGERTRIVNRMKGALARLGVRGFKPTLRGAPERLEAQRTPEGAPLPPNTLAELRRDMARLRLVRDQIAQVEAARLEQLQQAPAEDRPHAMVRLLARVIGVGIETADMLVREVLSRNLRDRKAVARYAGLTGSPDESGARRREKGLARVGNARVRRGMLQLAWRFLRFQGDSQLARWYRARTADARGGTRKTMIVALARKLLIALWRLVTTGEAPEGVALRSAP

SEQ ID NO: 356932 - protein, 395 aa, unidentified
MFIVGIDIAKRSHEAIIIAEDGQVVRKAFSFRNNCTGYNLLLEQVRRLTLVKSQIVFAMESTAHYWLALYARLLKDGYAVMVLNPIQSHSLRELYIRKAKTDARDSLIIADLVRFGRCKASNVPQDKILALRELCRSRAYLVDMAADLKRKLIALLDRIFPEYEFLFDSVFSKASIAVLSKYSTPQKVKNANLRKLTDILMESSNGHFGEWKAHQLKEAACSSFGIDDSGGVYSTLLGMFLEQILSLTAQADSLEKQISVFFQEFNNPLTSIPGVGTVLAATILSEIGDITRFSSADKLLAYAGLDPSVKQSGEFKSNQNRMSKRGSPYLRRAIWLASTVAVHRDPMFQTYYEKKISEGLHYMNVIGHVSRKMTAVIFAVLRDGQPYQPILQSAG

SEQ ID NO: 356933 - protein, 349 aa, unidentified
MIVIGADTHKSTHALAAVDAATGQLLREREIVAKEAGHLEALRWAHELDGEIVWAIEDCRDFSHHLEQALLAAGERVVRVAPKLMGASRRGEREPGKSDQIDARAIARAVLREGIERFPVAFLDEDAMEIRLLCDYRETLVNERTRLINRLRINLVILDPELEASIPSRKLDYPGQRQRVTRRLRAMPQTARVRVSREQVKRIGVLTREAEELKRELRDLVAAHRPELLAETGCGPLTAAILIGQTAGAERFHSDAHFARMAGVAPIPVSSGRKDRHRLDRGGNRQINRALHVIAITRGRRDPATREYLQRKEAEGKSRIEALRCLKRLLARRYHRLLLRPSATHATRP

SEQ ID NO: 356934 - protein, 466 aa, unidentified
MKRNRRRTTGSPRVSPTVLAQLNPNVAGIDCGAATHYVAVAPDRDAQPVQHFSTFTADLIRLADWLTACRVTSVAMEATGVYWIPVYEILETRGFEVLLVNARHLKNVPGRKSDVADCEWIRDLHSVGLLRASFRPTAEIVALRAYLRHRDTLLETCSMHVLRMQKALMQMNVQLPLVVSDLTGVTGLRILRDIVAGHRDPEQLAAHRDHRCHASHTEIVAALTGHYRPEYLFILQQNLALYDACQTQLTACDVAIETHLHALAASAAAPPTAVPAPRVTKKARDNAPRFDMRTPLHQLSGGVDLSQIDGIAPYTALRLVAEIGTDMARWPTEKHFTSWLTLAPKNKISGGRLLSSRTQPAANRAAAILRLAAMSLGRTDTALGGFYRRLAARIGKPQALTATARKLAILVYRALKGELAYRDPGADGYAQQQRTRSLRRIRQRAAALGFDLLNRDTGELLQAVPA

SEQ ID NO: 356935 - protein, 346 aa, unidentified
MKQSNTIGVDLAKNVIQASVVTPANRELSNREFSRSQFAEFIAKQKPSLIAFEACGTAHHWARYANLHGHQVKILPAIAVAPFRQGHKTDRNDALAVAEAATRPNIKVAPLKSVEQQTMQSIQRSRELVIQERTATSNHIRGLLLEFGIAIPKGLIYLRQRIPMILEDAENGLPMAYRPTLHRMYMRFCGMEEDITFLDNQIKTLVNANDGCRRLLKLEGVGPIGALLLYATLGTGEAFKNGREFSAYLGLTPKQFSSGGKTNVIGISRHVANRRLRAVLIQGARSYVHKHKQADTRKAAWMLALKERSGAGRAAVALANKNVRTAWAMLTQGTEYRAHTLSAVAA

SEQ ID NO: 356936 - protein, 342 aa, unidentified
MDKQIGTIGLDIAKRVFQVHGADSRGAVLFRKRLRRGQVLSFFAGLPSCTVAMEACASAHYWGRQIGKLGHSVKLIAPAYVKPYVKRQKNDAADAEAICEATQRPTMRFVAVKTEEAQAAAILFRARDLLVRQRTQVINALRGHLAEFGMIVAQGPQHVPKLIAVVDDRTSELPTMARQILALLVDNLRGLDSRVTELDREIGRRAKEDVVACRLMTIPGIGAVTATALTALAPPAQTFRRGRDFAAWIGLTPLQRSTGGKQRLGRTSRMGERTLRRLLIIGASAVARWATRKGVPAGSWLERMLRRKPPMLVRVALANKMARTVWALLAHGGIYRAPVATA

SEQ ID NO: 356937 - protein, 338 aa, unidentified
MHVTTLGIDLAKQVFQLHGVDARGHAVLSRRVKRGQLVAAVASLPPCVIGMEACASAHHWGRAFEQLGHTVKLMSPQYVKPYVKTNKNDCRDAEAICEAVSRPTMRFVAIKTVDQADLQAVHRSRTLLIKTRTAFINQIRGLLAEYGLVIAQSPEKVRPALVRFLDDAESGLTAFARETFSELYEQLVELEQRITKVNQRLDRLFNTHPVCRKLAAVPGIGPLTATALLAAISRPHVFQNGRHLAAWLGLVPRQFSSGGHARLGGLSKRGNRYVRTLLIHGARAVVQRAAHKTDARARWMWALKCRKGTNVAAVALANKNARVIWALLAHDDVYRQSV

SEQ ID NO: 356938 - protein, 386 aa, unidentified
MRQPNDLSRSLAPFDQDTTLIAVIEMSQSSWLVAGIVPGLERHPLKKLAVDEGSLLRLLQRWRDEAIRAGRRIERIAVAFEAGRDGFWLARWLRGHNIEGYVIHPTSVAVPREHRRAKTDRLDTELLKRAFLGWLRGEPDHCNMAAIPTIEEEDGRRPHRERESLVAERTRIVNRMKGCLARLGIRGFKPTLQRAPKLLSTLRTPEGTPLPPNALAEMGRDLARLHFVEGQIREIETARLERLEQAPTEKSHAMVRLLARVIGIGIETADMLVREVMSRNLRDRRAVARYAGLTGAPDESGSKRREKGLARAGNARVRRGMIQLAWRFLMFQKESALAQWYRSRTADARQGTRKSLIVAMARKLLIELWRFVTTGETLVGVEMRPA

SEQ ID NO: 356939 - protein, 358 aa, unidentified
MRAVCGLDVHKDSIFLCILRDSGEIIERVFGVLTFQLEQMRRLMQSYGVTEVTMESTSVYWIPVWRVLEPHFLLRLVNPYFIKQLPGRKSDVKDAEWIAVCTMKELVRGSFVPPERIQQLRQYDRRIFDLGAEIVRKLCKLDGVMQRCNIRLSNYVSNTDTKSYKDVVRKLCEGVTDPEQLIEGIHGRIIKRHGRETILASLAGVVSEAEKDAMRQLRDEIDLAEMHKQECQDKMLHICKTYYPEELARLMTIPGIKERAATSLIAEIGTDMTKFQTAAHLASWSGLKPRNDESNKKVKSRRITHGNVHTHAGGLTAWWQEIDIAVVLPCPPVLLLRQRNGPTAVRRAVRPANVQALP

SEQ ID NO: 356940 - protein, 317 aa, unidentified
MEQGQSNTKIAGIDVGKRQLDVAVYGHCDERQASNTAAGISELVAWLRAREVGRVGMEATGGYERAVRSALEAAGFEVVVHQPIEVRLFAKLKRRRAKNDRLDAQLIAAATAQVDTVRAAQDPRLVELAERLTTYEQVTDHAAEMKIALEHVTLKDLAGVLRTEIRSLERLKAKLAEKVIETIKAHPDLVARFRLLTSLPGVGPIVAANLLVRMPELGAMRRGQAASLIGVAPFDRDSGQFKGLRFIAGGRARPRRMLYLAALAAKRCDPGLKAFAQRLLARGKPPKLVIVAVMRKLIEAANLVLSRGQPWARHPAT

SEQ ID NO: 356941 - protein, 338 aa, unidentified
MIHVGVDLHQRFCYMTALETRGKLLQSGAVNNERLALKRYFRQFRGQAVEVAVEACGFWPAFREVVEPEVKRLVLVHPQRVKAIASAKLKNDRVDSATLAHLLRCDLLPESWKADRDTQARRQQVRLRATLVRQRTRLKNQVHAVLHQQGQRSPVTDGFGKRGRQWLGQVKLPEKARQTLAVCLRMIDYYTQEIEEQNRQLSVEALKVARARWLMTIPGIGVYSAMLLLAEIGNIERFADKAGLCSYAGLVPRVRESAGKAARGGITRQGSPYLRWIMVEAAQVATRCSPAAKAYFERLRKKKHAHVARVALARKLLSAVHALLRDGVGFEESEFAAV

SEQ ID NO: 356942 - protein, 319 aa, unidentified
MAQNNLVVVGIDVAKDKVDACIRPSSARQTFPNSSIGQRQLAAWLRRHKVGKAVMEASGGYERHWAKVLRQLGVEVRIVDPKRVRSFARSAGRLAKNDKIDAAMIAWFAETFDQAPSQAYDAAREELVQMVNARQGLLDLQTTLQNRDEHSEVSAVQKMHARLLKRVAGEVLRLEAAIAALIKMTKRFAELAEIIASVPGLGDITCAGLIAAMPELGQVTNKVAAALLGVAPYDDDSGKRRGERQIKGGRRRMRNLFYMACLGAATRHNPVLKTFYRRLIANGKPPKVALVACMRKLIVILNIMIARRQKWDASLYLAS

SEQ ID NO: 356943 - protein, 328 aa, unidentified
MQESEEYVGVDVSKENLDMVVHSTGETRSFGNDDTGIAKATTWLKQVSPAIIVMEATGGMEVSLYVALQEGKLPVAVINPRQIRHFARSMGILAKTDRVDAKVLARYAAIIQPEARPLPDEETRQLKTLVTRRRQLGEMITAETNRAQATRDKDMKQRIHVHIEWLQEELANIDKDIGRMIKENPAWHAKDKLLRSVPGVGPVLSATLMAELSELGVLNRKEIAALVGVAPFNRDSGRHHGQRSIWGGRPGVRRSLYMAALSATRFNPTIKVFYERLLANGKKKKVALTACMHKLLIILNVMVKHNSAWSCSPPILYRVCIPADKTVA

SEQ ID NO: 356944 - protein, 450 aa, unidentified
MSKKAKTKTQGNFQLAVINSNTAAIDVGSMLMTVAYTGKDNQQYLMETDGFTESLEELVVTLKEAGITHVAMEATGVYWMALYELMEKEGLKVTLVNPKHFKNVDAQKTDVKDSQWLQQLHAHGLLRSSHIAPELYRELRSYVHERNNYQAQKSDTLNRIHKVLSQMNIKVQHIISDIEGVSGMKLLRGIAEGITDPEELLSLVTTKLKASREELLKSLKGVYKNQYVVILKSHLKAYDFLKRQMKEYELFIEGVLKQMLPPVQENKSVKILPKTSHVRKNQYSINLSAYLREITGVDLTKIDGLDEISVLEILSVTGIDMSKWKTADHFTSWLNLSPRPKITGGKVVGFDKRITKNSASQALRNAAQSLWNSKCSLGKLYRRIAAQKGSAKAIKAVARKLAVILYNMLKNKSEFDPLKVQPDTEREQKRKLSYLAKEAAKHGYLLQKAA

SEQ ID NO: 356945 - protein, 426 aa, unidentified
MKKSHQSKLDNQEVIYERCAGIDVHKNAITVCLRIGRKAQVREYGTITRELREMVAWLKENGCEMAAMESTGSYWKPLYNVFELEDIPAMVVNAGHMKAVPGRKTDVKDAEWIAKLLSQGLLKPSFIPDREQRELRELTRFRKSQIEERARNLNRLQKMLEGANIKLSSWLSDISGKSATELLELIIGKEDFTMEDVEQCRRGNMKATTEELFNSVAGIITPVQRELFKHVMKVIREQSVQIAETEHLISSYMSEAYKAASEAIDVIPGIGPISAQQIVAEIGHDMDRFPSAAHLCNWAGICPGNNESAGKRKSGKTNYANKTLKSTLTQCAQSVKKKKNSFFNAQYKRLVVRRGKNRATVAVAHSMLIAIYHVLKGAEFRDLGDDYYTRFNKEKKIYSYVNQLKKLGVNVPDCVIRPAVMPKKVA

SEQ ID NO: 356946 - protein, 347 aa, unidentified
MDQQCHYVGLDVSLETTSICVIDDAGAIIWRGKCHSDPDTITAIVRHRAPGAVRVGLETGQLSNWLTLSLRRRGVPVVCMDARHAKAALSLQINKTDANDAFGLAQVVRTGWYREVAVKSMDAHTLRMLLVARSRLVSQRQATANTIRGLLKTFGLVVARGSKGLFPVRVREQIAGNPAVIAIIEPLLAVWHAIRDQVAMLDRQMLARARNDQVARRLMTIPGVGVVIALAYTAVIDDPARFRRSVSVGAYLGLPPRRYQSGEVDTTGHISKCGDSLLRGYLYEAAAVLLCRDARASILKSWGLGLAKRIGMRRAKVAVARKLAVIMHRIWSDHSEYRWTAIPPTAA

SEQ ID NO: 356947 - protein, 418 aa, unidentified
MERIVKRCAGLDVHKASVTACVRLATTASEGEEPHQQTRKFSTTTGGLLELRDWLASFEVTLVGMEATGVYWKPIYYMLEDDFECWLLNARHLKNVPGRKTDVKDAEWICQLLEYGLVRPSFVPPKEIRELRNLTRYRKRQIQERAEEVQRLEKVLQEAGIKLSSVATRVLGASGRAMIEALLSGTTDPKVLAELAKGRLRKKIPKLEEALEGNFSSHHAFMVGNILAHIDYLDESIARLSEEIERVMAPFCEEEVALLSTIPGVDRRTAETLIAEIGVDMSRFPSSAHLASWAGMCPGNDESAGKRRSGKTRKGSKWLRSALTESAHAAARTKGSYLSAQYGGIRGRRGSKKAAVAVGHSILVIAYHLLERKVPYEDLGEDYLHNRRCTREARTNRLIRKLERLGHKVVLEPLVQSA

SEQ ID NO: 356948 - protein, 410 aa, unidentified
MEIIVQCCAGLDVHKDPVEACVRRMEPEGKLYHQIRHWGTATRELMAMADWFKAEGVTQVAMESTGVYWKPIFNILEGEFEVLLVNAQKLKHVPGHKTDVQDCQWIAQLLQHGLLKGSFIPPRWQRELRDLTRQRAQVIGEHSRISNRIQKVLEDANIKLGSVASDVVGVSGRQMLQAIIGGESDPAQLADLARRRLRGKIPQLQEALYGKISEHHRWMLALLWDPLAAAEAFIARLDERIAQLTRPQQPALEKLDAIPGIDRRVAEVVLAEIGPDMSPFPSHAHLASWAGVCPGNNESAGKRRSGKTTKGSRWLRQALVQAAWAASHKKDSYFHAHAHNLMRRRGRKRGLVGVAHSLLLVIYHILHDGTDYRDLGRDFLDRIRATHLIRYHLKQLQQLGFTVTLAPAPA

SEQ ID NO: 356949 - protein, 316 aa, unidentified
MTGLICAAGIDVGRDYLDFAVAPEGRGGRVRNEPSGIAALVRRLRQAGVTRVALEAIGPYAERLLQALAGAGIAVGAVDPRRIKAWRIAEGRRAKNDRLDAALIARFALLMPDIVRPVPDRESRAIRALSARRRQIVEMIAMEKTRLKQALEPEMADSHRKLIAQLGEERERIEAELDGRLRAAGHGTKLALLQSAPGVGPAVAVTLVADLPELGHLDRRALASLAGLAPQISQSGITQGRASIAGGRPCVRSAMYLAALTAVRIDERYKSEYQAMRQAGKPAKVALIAIARKLLIALSAIVKQDRPWQASHDQIP

SEQ ID NO: 356950 - protein, 357 aa, unidentified
MTVYCGVDFHARSQTICYCATTDGEVRRHELHHQKDDVRAFYQQLSGEVIVGLEASGYSSWFEEMVEGLGHKVWIGDATEIRRLARRRQKNDKRDAEHILELLLKAEFPRLHRQSAESREVLRQLRYRQRLVKISTMIKNNLHAIALGAGLSLQTQLSTVKGRERLEALPLSQALAHQREAWLGLLEGVRDQIASVERWLKGQASTDTRVARLRTHPGVGLLTSLCLVHTLGDVSRFSTTRKVAAYAGLEPMEHSSAETKRYGAISKAGSRLLRFLLGEAAQVAVRTDDELRAFYQRLLARRGKAKAVVAVARKLLVRCFIMLRDEIDYAEFRRRGVAVQGVAPSGLPALTHGLVNA

SEQ ID NO: 356951 - protein, 329 aa, unidentified
MHRTQFVVCTRWENGEQEIRQWRIGELAKFVAQLQGDDQIAVEAMGTTARFYDAVAGRVARVVVVNPHQFKVISESVKKTDRKDAEALALYLEKDLLPEVRMKPKQNRELMHLAETRDLLVKQRSALKGKINNLLAMQGIELKREALSSKIALERVLALPVSGMVQLELRILVEQIRSLSESIVELDERLEEEGQQLPGYENLTSIKGIGSLSATVLLTVIGKISDFADENKLASYLGLVPKIANSNESERSGRITKQGNKLARTALVQCGLVAKRYSPYLSRFYDRIKQRRGGGKAKIALARKLVKIVYDTLKNQWVFEDFPSFTLAA

SEQ ID NO: 356952 - protein, 394 aa, unidentified
MRENTNKEEVKEQESVSRAGRMLLKKLEIARKKKEAASSGLRVEYYIGIDLGDRKSYYCILDGEANILVEGNFPTTAAGFDGHFKGLCRSRIALEVGTHSPWASDLLERHGHEVYVANTRKMGGRKNRRKNDRLDAELLARQVRSDPAQLYPIRHRGEKTRRGLVLLRARDAMMNARTKLVNGVRGLVKSSGHRLPKCDSDRFHKVDMPGLPKELQVALQPMLDQIGQLTEKIKAYDKDVKRVSLQDYPETEVLRQIKGVGFLVALAYVLTIENPEFFSKSRDTGSYLGLVPKQYDSGKSTPQLRITKTGDRMMRKLLVQSAQYILGPFGEDSDLRRHGLKIAERGGRNGKRRAVVAVARKLAVLLHRLWQTGEVYEPLYNNRSGDGNNLQKAA

SEQ ID NO: 356953 - protein, 363 aa, unidentified
MAVKAKTLVGLDVHAAQTHAAIVEPATGEVRVVKLRMAPLEVAGFLAGLGPDVLGVYEAGPTGFGLARAARERSVDVRVVSPGSIPKGSGDRVKTDRRDAIRLVRLLAAGELTFAFVPTVQDEHFRDLLRTVEDVRGDLMRARHRLGKFLLRRGERYPGPGRAWTAKHLNWLRALRFEDACSQATFADYLASVELLLTRRATLIATLDDVVPASSHAPVIARLRCFRGIDTLSAAGVCAEVGSFTRFPRPTLLSGFLGIVPSERTSDTRRRQGSITKAGPTHARRLLTEAAHHYRHRAAIGEVLARRQAGQDPRVIEIAWRAQTRLHQRWQRLHRERRKPSGIVAIAVARELSSFLWEAAVLD

SEQ ID NO: 356954 - protein, 356 aa, unidentified
MDSTKYIGMDVHKESISIAVRNAAGKIVMECVIETKANMILEFVDGLRGDVHVTFEEGTWAAWLYDLLKPHVTKLVVCDPRRNALLQDGNQNDRIDARKLAELLQNNQLRPVYHGDHGLRTLKELVRSYLTITKDLSRVMTRVKAIYRSWAIACTGKQVYSPRHRSEWLGKIHEVGVRRRAECYYQQLDALRSLRQEARRDLLAESKKHKAWKRLCQIPSIGPIRAAVLLGILQTPHRFRTKRQLWTYSGFGVEVHSSADHQAVKGQLQRKMKRHMEVRGLNENCNHDLKNLFKGAAIVASTKPGPFEEFYAALLAKGMRPEMARLTLARKIATIVLIVWKRGVCFDAQHLKPQTV

SEQ ID NO: 356955 - protein, 409 aa, unidentified
MSEDRKLGICGGVDTHRDVHLAAVVDTAGRVLGTAPFRADTTGYEQLGDWLRSHGNVIRVGVEGTGSYGAGLSRYLTKRGVEVVEVNRTNRQLRRRLGKSDVTDAQAAARAALNGEAIGLPKSGDGPVEAIRMLRVARRSAIKARTQAINQLHALVVTAPHQVKHHLQGLSAKARVKTCAGFRPGTDRTTIAYAKMALRLLARRYQTLTAEIGELTTEINRLCARANPALLATPGIGADTAATLLVTAGDNPERMRSESSFAALCGASPVQASSGQTIRHRLNRGGYRQANNALWRIAITRMSYDQTTIEYVRKRQAEGKTRREIIRCLKRHIAREIYRLLTNPPPTPHGTHLRTIRQKARITLTHAAQALHTHPNRISELERGIYHNHHLATRYQQWLTAPRPQQNSI

SEQ ID NO: 356956 - protein, 517 aa, unidentified
MTMLRSRKRRQTPTSVGKPRGVLHPRVQQVGPERFGIVCFDCAKVRSKFLLADFYGRVLIAPTQVPHTRPDLDTAVAQIRSAFAEHQLRDGLIAIERTGRYHRIVQRAFTSAGFETRILHPFVTKQYRQPVDPGNKTDDKDLAAIHRATVTGCALLEATRDEAWTTLQLLIRHRRDLVRKGAALNCQIRDHLEAALPGYAACFDKLWESSVPWHLLRHYPTARLLQQAGVTALCQTLRQASIRYHQRTLQRVVDWAEQAAPGDIAAEQHLRIALALYDDRQRKTQEIKALERDIAGRLVQTPYVLLLSFPGINVVSAADFAGEMGPIEHYLNAKAITGRAGLRPSRYQSDQVDKANGPLVRACNHALRAAILGIADNLIVCNHHFGVLAIQWAAQGKDARHTRIKVGLRFCRIAFQMVAGRQVFRHPCIQGRHYILDKLSAFHRAHDTGMVQVLRDLQAAVAQVPAREHATEAKPLAEELRRIQDGRRRGPQLLGDILPIVLARLGVGVVQSTKSGE

SEQ ID NO: 356957 - protein, 337 aa, unidentified
MKRIPVYVGLDYHQGSVQVCVMDAAGQTLMNRRCANDWLAVVDAVAGYGQVAGAALESCCGAADLAEELIEHAGWSVDLAHPGFVSRMKQNPDKSDFSDVQLLADLERVGYLPKVWLAPQEVRELRRLVRYRQQLVADRRNTKLRVGALLRDQRVRDAPARPWTRVWTAWVVQTSQLSEQSRWLIGRHLHRLALVVEQIEEVEAHLEELTGDDSVVCVLRTHRGIGPVTAWTLRAEIGRFDRFRTGKQLARFCGLSPRNASSGTRQADAGLIKAGNRQLRATLMEAAHRLIEFDDYWKGFAMDLIKRGKPKCLAVAAVANRWVRWLFHQMQPERLAA

SEQ ID NO: 356958 - protein, 440 aa, unidentified
MNDLRVLDAHAAFVDVGSEQMFVSIAGGSPEVFGTVTSQLHALRDWLLTHEVRSVAMEATGVYWLPLYAVLEAAGLEVLMVNGRQMRNLPGRKTDMKDCQWGATLHAHGLLHAGFVPPAHIRRLQDYLRLRANHITSAAAHVQHMQKALERMNVKLHHVISSLTGTSGLAVVRAILRGERNPEQLLALCDTQIQRAKAQRVKESLRGTWAEEHLFALRQALASWEHYQNQIAECDRQIEALLPASADHHTPPNTAVHTRPRKRAGPNAPEIPKLREILTQMCGGQDLTRLPAHTEYSVLQIVSEVGTDLTKWATEKHFTAWTGLAPGSHQSGKRKGSVKRQRNRAGRIFCVMARSLARSKDIALGGFYRRMAARRGGLIANIALARKLAVLFWRVMVKGTDYVEHGLAQYEAKVLQTKQRALRRLARQLGQQLVPSPVPT

SEQ ID NO: 356959 - protein, 323 aa, unidentified
MSQPNLQCMGIDVAKLSLDIATTDTIEPFTVGNDEDGFAVITDKLKHTKINLILMEATGDLEAAIACKLQSEGYDVVVINPRQARDFARSMGYLAKTDKLDAAMLAQLALVIDRHPDRSRYIRHLPDEARAVLAAMVVRRRQLNHMLVAERNRLYPSHPQSRKSIDNIIDALQNELDRINEQMKQHMTAFIQEQARLIGSVKGVGDITVASLIAELPEQGKLNRREISALTGVAPLNRDSGKMRGKRTTFGGRAGVRATLNMAALVATQFNPAIKLFYQRLLAAGKPKKLALVACMRKLITILNTMLRKGEEWNASFQSQVIS

SEQ ID NO: 356960 - protein, 419 aa, unidentified
MKTWQELTHYAGFDWAGDHHDVIIVDKGGAVAVEFCFPHSVEGWEEFRKKTAGYVALGVAIETRSGAAVEELLRCDCTVFPVQPKAAARYRERKAPSGVKDDQLDAWSLADALRMDGRTWRALAPEDPLIQELRLLCRDEVALIEQRTALVNQLRAALREYYDPALEAFDDWTQPSAWALIVQFPTPIELAQAGKRKWEKFLHVHKLWRPETAQKRLELFARAADWKRSEPVMRAKSRLAVSLAKTLQTLERQLEEYRQAIEALFGKHPDHDLFGSLPGAGSKLAPRLLSELGADRQRFDTPQSLQCLAGTAPVSFQSGQIHRVKMRRHCNAHLRHAVHLWANCSRAMCGWAQAYYQAQRERGKSHACAVRCLGHRWLEVLWKMWQSQTRYDGELHARNQQKHGSWVIKILTAPTSKPV

SEQ ID NO: 356961 - protein, 400 aa, unidentified
MISVGIDVSKGKSTVCILKPYGEIVSKPFNITHTQKDLSELSSMLFRLNDEVKIVMEATGIYHLPFLTYLQEKGFFVSVINPYLMKSYRNESLRKAKTDKIDSRIIANYGIDHWFKMKEFQTSGEIYEELKLLGQQYRHYMKLHLLSLAELTHLLDLTMPGIKNLLASWNETNRKDKRSDFVERFWHYDVITSMSEQEFTEEYILWAKEKKYVPSQEKAKVIYTLAQESIPTLPSETSSVKMLVTEAVRVLKEVDATLGLILSRMQEIAKTLPEYSVVREMGGVGNTLAPKLIAEIGDVRRFRNGKALVAFAGIDPPPYESGQFVGCNRKISKRGSASLRKVGYETMRSLKMRSRPEDPVYLYVVKKESEGKSKKSAKIAGLNKFLRIYYARVTELYKNI

SEQ ID NO: 356962 - protein, 395 aa, unidentified
MFIVGIDIAKRSHEAIIIAEDGQVVRKAFSFRNNCTGYNLLLEQVRRLTLVKSQIVFAMESTAHYWLALYARLLKDGYTVMVLNPIQSHSLRELYIRKAKTDARDSLIIADLVRFGRCKASNVPQDKILALRELCRSRAYLVDMAADLKRKLIALLDRIFPEYESLFDSVFSKASIAVLSKYSTPQKVKNANLRKLTDLLMESSNGHFGEWKAHQLKEAACSSFGIDDSGGVYSTLLGMFLEQILSLTAQADSLEKQISVFFQEFNNPLTSIPGVGTVLAATILSEIGDITRFSSADKLLAYAGLDPSVKQSGEFKSNQNRMSKRESPYLRRAIWLASTVAVHRDPMFQTYYEKKISEGLHYMNVIGHVSRKMTAVIFAVLRDGQPYQPILQSAG

SEQ ID NO: 356963 - protein, 355 aa, unidentified
MPVYIGVDFHTRTQTVCWCDTATGECGEQELENGDLEEVRRFYQQFPQAVVGVEALGYAGWFHRLIEEVGHALLVGNAQEIRRRAGRRHKNDHRDAVLILDLLLHEDFPEIHHLPPASREVLGLLRYRHRLVKMQTMLKNGVQAVALNEGLRLKSKLWTEAGRELLAALPLEGAGAWQRETSLAMLGELGKQIERTEGELQKRAQADECVLRLQTHPGVGLLTSLAVAHLLRPTKRFARTRQVAAYCGFDPREQSSGDRQRFGHISKQGSRLVRFLLGQAALSALDGDDELRPFYYRLLKHRHKHPGVAITATARKLLIRLFVMLRDQIDYAEFRRRGRDARCAREAQRPALCSA

SEQ ID NO: 356964 - protein, 387 aa, unidentified
MPQPNDLSRSLVALDQNSTIIAVIEMSQSSWLVAGMLPGIERQARKKLDPSPDRLLALLHRWQDEAVRVGRTITRIALAFEAGRDGFWLARWLAARGIEAHVIHASSVAVSREHRRAKTDRLDTELLKRGFLGWLRGERGHCSMARVPTIAEEDAKRPNRERDCLVGERTRIVNRIKSTLARLGIRNFKPTLRKAAERLATVHTPEGVPLPPNTLAELQRDMARLGFVVSQIREIEDARQKRLEQQPETGPHAMVRLLARIVGVGVETADLLVHEVLSRPMRDRRAVARYAGLTGSPDESGARRREQGLARAGNARVRRGMIQLAWRFLMFQKESALAVWYRARTADSRIGTRKTMIVALARKLIIALWRFVTTGEPLEGVVLRPAS

SEQ ID NO: 356965 - protein, 397 aa, unidentified
MEVFIMEVMIETCCGIDVHQKTIVCCVLDGPLDTNKPKKSYKIFGTRTSELRKALEWLVENEVTDIFMESTGQYWVPVFNIFSEGNFNMVLANPEHIKNVPGRKTDMKDAEWIAQLGRVGLIQNSYIPEPEVMELRLMTRRRLSYTQKRTQSKNELHNILQRSNIKLTSYLSNIFGKTGQALLQLFITGEVLTLESVEACLHARVRASTKDIFQAMDGKISLTDRRLLDDSLDEYQFYTRKIKKIEHDIEQYILSHFPLEYELLQSIPGVKQHSAAIILAEIGPSIEAFRTASHLASWAGLSPGSYESAGKKKSSRVTRGNKYLKTALITSGGMAGRSRDPAFKLLYHRVSNRGTKMKAVVACGHKLLRIIYKILGDKVQYDEKRALGLRQQKLALN

SEQ ID NO: 356966 - protein, 475 aa, unidentified
MPGASRRPALRAVPMLPNESLYVGVDIGKARHIAGFVSKTLLERHERFEACPVLSFENSRAGFRALVERIRAYVPAEQCFVLLEDTGHYHRALVQYLLELDLPVYRMHVQQRPKGMVKTDKRDALGLANHLYNQLELGVQTANKKQLVRRAVPPTETAALLRGLIQHRYELSRESTRRKNKLIAITDELFPEFTQVLKDPTSPTALTLRERFPTPHTIATASLEDLCKTRAGVRPSREKLALLQQLAAQSIGIKDLGRQRGLALEQQQLVRELRLLQEHIAQLEQEIKQIVAQSREGRILTSIPPIGPIQAATLIASIGHIDNFRNAAALKSYLGWAPIDVQSGTSLEQAHQTHGGTRPGKKMMFLIVGSAIQMRDGEWAKLYQRLLPRKCRYNERQQDYQDKLLLVGRLAGQMIEMIFAFLKIDADLLKKYPPGGPIPEPMLYDQAIHQAHRQGQYHPLRPDRKPNTIVDLSQL

SEQ ID NO: 356967 - protein, 345 aa, unidentified
MSTIDYIGFDVHKKSISFCAKAQDGQILDEGTIPARRADLSAWAQARPRPWVGALEATLFTGWIYDHLRPFAQKLKVAHPAMLKAIAASKKKNDRVDGRKISDLLRCDLLPECYMAPSSIRDLRRVLRYRNLVVREATRMKNRIAGLLMETGTPYNKKRLHGKGYFSELLGTLQETPASVVELLKLSRGQLQMFETVQQRLLKELRENPALRERIERLQSIPSVGQILALTWALEIGEVERFGSIAQAVSYCGLTSAQRSSAGKEERGPISKQRNKHLQTVLIEAGKLAPRWNKQLAALHARELGRGNRNRATLAVARKLVAYLMAVDKSGKPFQVRASGAGGES

SEQ ID NO: 356968 - protein, 345 aa, unidentified
MEKSSTVFVGMDVHKESIDITLAEPGGEVRRLGQIGGDRGSLLKMLRRQQSKGRKLVFVYEAGPCGFWIYREITALGHACMVVSPSLIPRRAGDHVKTDRRDSERLASLARAGELEAIHVPDIRDEAIRDLVRGRDDAVIAQRRVRQQLKALLLRNDIRYVGRTSWTGAHRRWLSELKLPEPAQRIVFEEYVDAITVATGRIERLTRAIQTEVLTWRFAPVVAALQAMRGIQFVHAVTLIAELGDLTRFASARQLMGYLGLVPREDSSGEHRHQGYPARVTRIIATRQTGIPKAVCDIAWRAQLRLSAKYRRMNARHVNHNKIVVALARELSGFVWAIGQSVKPQ

SEQ ID NO: 356969 - protein, 413 aa, unidentified
MRESYRIAGIDVHKRMLAVVVADAAAEGEWQFERRKFGTTDSGLQELSEWLKEQQVVEAVMESTAQYWKSVWHQLEGGCELFLAQAHSNRAPRGRKWDYRDSERLVRRHVAGELILSFVPDAEQRMWRTITRTKHQLTRDRVRLQNQLESLLEEAHLKLGTRVSDLLGVSSRRMLQAIAEGATDPAAVAGLALPELRATPQQLADALAAVPHMSGLHRQILKLFLERLQLIESQIATLRDSIAGALEEHQSAVRRLAAVPGFGVDSAQQVIAEVGPEAATFPSAGELASWVGVCPGQNESAEVSTSSRSPKGNRTMRRVLDQVAQAAVKTKGSIFESLYRRWLPRLGHQKAIWAIAHRLCRLTWKILHQKIEYIEYGQLRSLKAVQRRTSKLIRELRSLGYQVTPPALPQVCS

SEQ ID NO: 356970 - protein, 443 aa, unidentified
MSNLAVLDPRAAFVDVGSEKMHVSIAGGPPAVFGTVTSQLHALRDYLAEHQVRSVAMEATGVYWLPLYGVLEAAGMEVVMVDGRQTRNLPGRKTDMKDCQWGATLHAHGLLRAGFVPPAHIRRLQDYLRLRGEHIAAAAGHVQHMQKALERMNVKLHEVISSLTGASGLAVIRAILAGERDPQVLLGLCDVRIRNVKAERIVESLRGDWAEEHLFALAQAVQSWDHYQGLIAACDRQIAVVLRQMPDAKAPPSAASTKTGKPRTRPGVNAPDIAGLREILAQICGAKDLTTLPAHSEYSVLQLIGEVGTDLTKWRTEKHFTSWLGLAPGTAQSGKRKTSIKRRRNRAGQMFCVMARALARSKYVALGGFYRRMAARRGGLVANKALARKLATLFWRVMVKGLDFVETGVAQYEAKVLETKHRILQRLARQLGHQIVPNPAPVV

SEQ ID NO: 356971 - protein, 316 aa, unidentified
MYLGIDVSKLTIDCCLIADGQNHQKKFQNNERGFEQLTKWLQSHKVSDNLHCVCEATGTYYEELAEYLYSRYTITVENPRKIKGYAIAELQRSKTDTQDAKLIAQYCQDRKHKLKAWQPPAKEQKQLQEIARYLDYLKQQRATEKAKQHEAPDYIKSHIQTTISNLTAQIQTVKKQLLQFYKDNPSYNNLRKRLKTITGIGEQATAVLLSTYKRHEFKNAKQFTAYLGLDPRKYQSGTSVNGKSRISKIGSSEIRKSLYMPAVVAYRCNAFPEFVGRLKKKGKHIKLILIAIMRKLAVIAFTLMKNGQEFQAERYK

SEQ ID NO: 356972 - protein, 424 aa, unidentified
MNFTQNQKIDQVKETTLVVGVDIAKFTHYASFLNARGQELEQVRSFKQSREGFESFYMHLQAVMARHQKTDIIVGIEPTGHYWLNLAYYLEDHGIRLVMVNPMHVKKAKELDDNLPTKHDAKDARTIGRLVKDGRFSYPRILHDHEAELRAGSALRASMTEELGMIKNKMIRWTDRYFPEFTQVFPTFGKMALAVLEQTPFPEEVATIGIEEWLDQLRQSEGLKSPQKPKARRLQALASQSIGIQEGHQMARIEIATLVCRYRQVEQEIAALSEQLTLLVRETTSYEVLQTVPGLGDATITDLLAETGDLTNYEHPRQLLKLAGLTLKESSSGQHTGQKRISKRGRRRLRALLFRVMIPLVRHNQAFRKLHEHYTSRPLNPLRKKQSLVVLCGKLLKVLYALVVKREPFNGSKLLADVMRFQAT

SEQ ID NO: 356973 - protein, 421 aa, unidentified
MKKKVRIVGFDCAEDEHAAVLLDVSGEIERRVDVINERGQIQESLAELMLAVGPNAQLVVVVESKRSHGRIVADVASELGCEVWQVNTVALNHYRDLEGQPRKDDEWDAYLAARMVYLRMGGCRVAIETTEEERVLSRLTRTYSRLIEDRKRQVARLRAVFLELAPEMLHASWAGPQPGSKAMLYLLECWPGFEGLERAQMRSIEKILRRCRYGSRATQVAKLIRKMARGISVPAEERSAITMELDFLVRQIRLCNESADQVYTEITHRVERHPVGQKLLEMHGNGPVITGVLVSELFPVARTSTEPKCATYAGVTPLSRKSGKSLDKDRLTQGVNKRVLHGLYTASVVAIKNSAVDRAYYQKKLRDYAGHPKPHVAAFIALSRQRHKLVYKLMTTDARYDKEILIATHLARLEQERTAAA

SEQ ID NO: 356974 - protein, 363 aa, unidentified
MEVTTIGIDLAKSVFAVCGADARGKVVVRKQLRRAQLAGFMSQLKPCVVGMEACGGAHYWARRFAAAGHTVRLMSPALVAPYRKGHKHDRNDAEAICEAVTRPTMRFVAVKSVAQQDLLALHRVRAQLVKQRIALTNQIRAMLHERGMAIAKGAAGLKRGLAQALAADDDQFSGELRELVGELNGWLREFERRIAGVAARIARHFRDDERCARLAAVPGVGPLCATALVATVGNAREFKSGRELSAYLGLVPRQHSSGGRTVLLGISKHGDRYLRTLFIHGARAALHGQRFAAHPRGRWAARIMAARGPNVAAVALANKNVRIACALLRSGARYHSELAVVRPGPPAGDRRARVEPRLTLRRH

SEQ ID NO: 356975 - protein, 345 aa, unidentified
MKIKTIGLDLAKNVFQVHGVDEQGKTVLKKTLKRSQVLPFFANLPACLIGLEACASAHYWARKLSEFGHTVKLMAPQFVKPYVKTNKHDAADAEGICEAVGRPNMRFVPVKTVDQQGLLALHRGREGMVEARTAQANQIRGLLAEYGIVIPKGLRHLGKRIPEILEDGENGLPGVFRQLLQRLGDHLKELDRQVNELEREIHLWHRASEASRRLAEIPGIGPITASALVASVGDARSFANGRQLAAWLGLVPKQHSTGGKPTLLGISKRGDRYLRKLLIHGARAVVRVAEHQVDQTGRWLNRLLDRRNKNIAAVALANKNARIVWALLAQDRKFQLDYAPAVPGV

SEQ ID NO: 356976 - protein, 329 aa, unidentified
MSVHSQGREAVAAARPNAGIDVSKEHLDTAWADRIERVSNDAGGWDALAAKLKADGVDVVALEASGGYEKGVACALQLAGLAVVVLNARQGRDFAKAMGQLAKTDAVDAKVLEQFAAVIARHPQRDRYIHALPEGKRSYLAALVTRRRQLLDMHRAESNRMELAHEAAKPSLRAVLRALDKQLATVDHDIDQYLRQHFKEVAKLLDSVKGVGDVTISTLTALLGELGHLPRRQIAKLVGVAPLACDSGKRHGVRSVWGGRTEVRRVLYMATLSAMTHNRVIREFHERLIAKGKPPKVAIVACMRKLLTILNAMMRDGTAWDESKHPQKA

SEQ ID NO: 356977 - protein, 323 aa, unidentified
MLVSDEKDRIVLQKRLPNELGQIQAALEPHRDELVGVVVESTFNRYWLVDGLMDAGYRVHLAHPSAIKKYEGLKYSGDFADAGYLAQLLRLGLLAEGYIYPREERAVRDLSRKRLQLVRYRTAQVLSIENILARQTGARLSSEAVKRLTAAQVEELGFAPDVALAVEANRAVSQALAQQIAALEQRLKERVRLRGEFKLLKTTPGVGDTLATTIMLEMGTPTRFAKVGNFSSYCRCVDSLRESNEKKKGEGNAKNGNKYLAWAFVEAANFARRYCPQAKSFYERKKRKTNGILATKALAHKLARACYHMLREQKPFDVSRCFG

SEQ ID NO: 356978 - protein, 340 aa, unidentified
MIGTTKFFIGIDVSKPHFDVALMAVVNHVKQEIATARFDNTAPGIKLFEKWLKSQKTTFNEDSLVVMENTGIYHRLIWTFCSNRNLPIHIGNAAHIKWSFGIARGKNDKVDSVRLCNYAFKEADDLKATAALDPELMLLKDLVSARTKLLKQKSGISVSVKELGNVNGKEHQKLIEKALKNAIEGVAKSIKNLEDQIKKIITGNQGFKQNYKLLLSIPGIGHVTAVYLIGCTGNFAGRPSGKELACYAGVAPFEHSSGISIKGKTRVHRMANKELKRLLHMCALSLIQHNQEFKTYYNRKKDEGKHSMSIINAVRNKIALRVAAVIKNQTSYKNNYKIAA

SEQ ID NO: 356979 - protein, 327 aa, unidentified
MNLSVAALGVDIAKLKFDVCLIKENGKAKHKVFANTNPGFEQLVVWLNSHTVAGLHVCLEATGSYGEALAVHLFDAGYRVSVVNPAQVKAFAVSRLTRTKTDKVDAELIARFCLLQQPPAWKPPAPAVRELQALVRRLESLIEMRVSEENRLSSGGSTDSVRRSLEEHIAYLLAEIKQTEAAIREHIDNHPDLKEQSELLDSIPGIARTTAALLLAEITDFKQYQSARQVAAYAGLVPRERRSGSSVRGRTCLSKIGNARLRKALYFPAMTALRCSGFFQQWASGMRERGKSKMAVIGAAMRKLIHLAYGVLKTGKPFDPNWTAKTA

SEQ ID NO: 356980 - protein, 340 aa, unidentified
MSIVTIGLDLAKNVFQVHGVDADGGVVLRKKLRRSEVLRFFEALPRCVVGMEACATAHHWARTLSALGHEVRLMPPAYVKAYVRRQKNDAADAQAICEAVTRPTMRFVPIKSAERQSVLVLHRSRDLLVRQRTMLINAVRGHCAEFGLIAPQGALRMTDLVMQIRSADKAYLPLIVKSAMLLMVAQLDALMAQINRLGRALLAWHRQDEASQRLASIPGVGVITATALAATVTDPTHFRSGREFAAFLGLVPRQNSSGGKERLGRISKMGDRYLRKLLVVGATSVIRRARTSTLGAAVWIRSLLERRPARVVTVAMANKTARIAWALLARGDVYRAPSHA

SEQ ID NO: 356981 - protein, 344 aa, unidentified
MSKHSIRAGDVAGLLVRLAQLKEKARGRTGRDFPIIAIQEAGLDGFWIHRVLQSEGIESHVVDAASILTSRRRRRAKTDGIDGETLVRTLLAYKRGEPRVCAMVKVPTPEEEDRRRICRERKTLVGERVEHVNRIKGLLFAQGVSNYEPLKRNRRARLEELKTGDGRPLPAHLKAQISRELDRLELVLPQLKAVEAERDALLKPVSEGCPTPAAMLAQLKGMGPEFTAILWSEGLFRSFSNRRQLAAYAGLAPTPWQSGSVAHEQGVSKAGNPRLRTTMIQLAWLWLRHQPTSALSVWFQERVQSKGGKIRKTTIVALARKLLVALWKYSTSGVVIEGAAMKTI

SEQ ID NO: 356982 - protein, 340 aa, unidentified
MTLTTLGIDLAKSVFQLHGVDEAGTVIIRKKLRRSAVLDTLRMLEPCLVGMEACATAHYWAREISALGHEVKLMPPAYVKPYVKRGKNDMADAEAICEAVTRPTMRFVPIKSAERQGVLVLHRTRDLLMRQRTMLLNAVRGHLAEFGLIAPQGPRKVMELIAQMREGARADLPEIARTALLGIGLQLDALARQIHALERQLLTWHRQDAASQRLETIPGVGIITATALAASVPDPSVFRSGRQFAAFLGLTPRQNSSGGKDRLGRISKMGDGYLRRLLVIGATSVIRRAETNPSATGAWVRSLLTRKPPRVTTVAMANKTARIAWAVLARGEAYRAPAMA

SEQ ID NO: 356983 - protein, 402 aa, unidentified
MAVPELAWVGIDAGKGSHHATAVDAGGTVLWSKQVPNDQAAIEQLISRAGEAATEVRWAVDLTSAEAALLLALLITNGQRVVYVPGTMVNRMSSAFVGEGKTDARDAKVIAETARLRRDLTEITTPSELVVELSLLVGHRSDLMADWVRGVNRLRDLLTRVFPALERAFDYSTRAPLILLTGYCTPAAIREAGTQGLSAYLHTHRAHRASIPGIVSKARAAAAAQTVALPGEATTATLITRQARHLLDLDREIKDLDKLLTERFRAHPQAKIIESMPGMGPILGAEFLAITAGDLAAFGTSARLATYAGLAPVPNDSGRRTGVLHRPLRYHRRLRHVFYMAAFSSLKTDGPSRRFYQRKRAERQRHTKTMIALARRLVDVLWALLRDNRPWQPTPPTAPAAT

SEQ ID NO: 356984 - protein, 341 aa, unidentified
MDKELYIGVDVSKKSLDLAYYDGETIDWKNAHIQVSNDDAGFKKIGSWVAKVGKDFDTFLFCMEYTGLYNQNFRLWLESKEYIYSMVEPRKMHRFEPDLDDDQRSLDRIKTDEQDAFRIAIYCEQNHKKILRNPSKLPSPVYFKLKRLLAERKQNTKQSTLYKQQLHDICAYDTDLSVERKKLLLKNMQENQKAIDKEIDSYMNEDTSIRKNYNLLTSIPGIGRIIALETIVLTENFTAINNPRKYACYIGIAPFKKESGTSVRKKTGVSKKGFSEAKADLSIAVLSAIRNNPSIRDYWICKRKEKCGGIVLNAVKFKLVLRMFAVIKRGTPYVETDAYKN

SEQ ID NO: 356985 - protein, 430 aa, unidentified
MDEVNRNRLEEFRQLRKEIRHSEEYLIVGMDIAKDQHYAFFGTATGQTLLRRIVFSNDHEGFRKLLDQAEALRVQHGLKKVVYGMEPTANYHKPLGEYLIKLEKTVVLVSGVTVARNRESLDGRWDKNDGKDSVNVADLISQGKCLYYEHPSAELRGLRGLLSLKRRLKKQEHGYKVRIRNQLIAQYFPEMDRDYERLGAEGLSIVKWCLAASEIAQFEVDPFIQRVTSRGIRREKRRRLEEIWEKAGESIGCDGVPGVDHEAKVMVEGLRQIREMIKETEDQIKELCKQFPEYQYILTIPGFGPDVSAKVLGAVGDPDRFLNGKQVLKMGGLDLSADRSGKDSNKAIPEISKRGKADLRYALYQAALVASVKNRELMIYYTNKIRGREKEKGIHTKMRVKLAAKLLVIAWTLMKKKESFNPAYLKAELS

SEQ ID NO: 356986 - protein, 412 aa, unidentified
MDILYACCAGLDVHKRTVVACVRRLGADGKVAREVRTFGTMTADLLALSDWLAEAGVTQVAMESTGVYWKPIFNILEGRFPVLLANPQHLRRVPGRKTDVKDCEWIAQLLQCGLVQASFIPPRPQRELRELTRQRTQLVAQRASVANRIQKVLEDANIKLAAVATDVLGKSGQDMLRALVAGEQDPVALAQLARGRLQEKIPALQQALRGQVTAHHRFLLELLLDQVQSLDALVKRLDGRIQELTSPFEETTQRLDTIPGVNRRVAEALLAEIGPDVAAFPTEGHLAAWTGLCPGQRESGGKSRGGKTRKGNRWLRQVLVQAAWAASRKTGSYLRAHYRRLAGRRGGKRAAVAVAHTLLGIIFHVLQRGSTYQELGEVYLDRLQPDRLTRSLVKRLERLGHKVVPEPQGRVA

SEQ ID NO: 356987 - protein, 410 aa, unidentified
MEVLHARCCGLDVHKETVVACVRRVIDGKTVKEVRTFSTTTADLIALSEWLAESKCTHVAMEATGVYWKPVWHILSDGGFELVLANAAHIKNVPGRKSDVKDSDWISDLLAHGLIRASFVPDGPTQEMRTLLRTRKQLVHEKARHILRIQKTLEDANIKLDSVITDIMGLSGRKMIEALIAGESDPAKLARLADPRVKASRETLHQALRGRVTGHHRFLLRLHLEQIDVLDAAIAKIDREVEVGIEPFRTAVEQVSSTPGIKTLAALQILSEIGTDMSRFASDANLISWACICPRSDESAGKRRSTRIRKGSPWLKTALVQCAWAAVRKKDSYLHAQFHRIKARRGPKKAIVAVAASILTAIYHMLKDGTMYQDLGPNHFDARTKERQKNRLVKRLADLGYTVQFAPIPN

SEQ ID NO: 356988 - protein, 381 aa, unidentified
MIVIGTDTHKRTHALSAVDEGTGKVRGARQIDADEPGHLAAVKWARGLDQERVWAIEDCRQVSRRLEQALLAAGERVVRVAPQRMGASRRGERQPGKSDQIDSLAIARAVVKDGVEQFPVAYLDEQAMEIRLLFDHRNDLVIERTRVINRLRWHLLELCPELERSLKRGSLNQSRVLDRVARRLRQLASGARVRVAREQVTQIRSLTARIDGLKRELRVLIEAHRPELLAELGCGELTAALLIGRTAGAERFKSDASFALQSGSAPIPCSSGQRTQYRLNRGGDRQLNHALHIIAITRAHHDSATKEYLARKERDGKTKKGALRCLKRYLARRFHRILSLPALPPHNAPDTPGEIPPHPRRAEHSNVKPITAAPSPMPCLA

SEQ ID NO: 356989 - protein, 353 aa, unidentified
MENLPCVGIDIAKRTFDVATFVDGKKKHKQFKNNIDGFALLIEWFCQLGIARAHVCMEATGIYGEALSVFLHETGHRVSVVNPARIHGFALSQLQRAKTDKADAIVIARFCAAMVPDAWVPPSPATRKLRDLVRHLQALTENMVHESHRRDHCISPEVAMRIEDHIWYLKDSINALKKDIMLFVREHPDLSADVKLVETIPGVGTQTAITLLAELPNLDCFKSARQLASFVGVTPRLKESGSSVRGKPRLSKCGNSRLRKALYFPAIVARQQNSNVVDFCQRMRQHGKSEMCIIGAVMRKLIHQVFAVLTKKVPYSDRGDNTSFVSGAHRLQRLRNTTGSGAPPSNPLERSVV

SEQ ID NO: 356990 - protein, 444 aa, unidentified
MRTSKGRGTRGKLEVMHPDAAGIDVGGTAHFVAVPNEAAEESVRQFGVYTRDLHALADWLQACSVKIVAMESTGVYWIPLYEMLESRGLEVMLVDARQVKNVSGRKSDVLDCQWLQQLLSYGLLKAAFRPQDQFCQLREFNRLRTRLLVDQGRSVQHMQKAMTLMNIQLGQAISDVAGVTGQKIVRAIVQGERDPVMLAAYRDRRIKASEEEIAASLQGTWKAEHLLALKQALGRYDFFAEQLQECDQQIEAVMQQLQAHTKELSKGKKRSKAKNAPKFNLRDRLLKMCGVDITRIDGIDETTALNVVAEVGTDLSRFPSDKHFASWLGLCPGTKISGGKVLGSKTKRSVNRAAQAFRQAASALRSSKSALGAYYRRLCGRMDKGKAVTAAAHKLARLFYALLTKGQEYVDQGQQYYEERYRERVIHQLQRRAQTLGMALVPAT

SEQ ID NO: 356991 - protein, 347 aa, unidentified
MDHYAGIDVSLEYSSVCVVGANGTIVREGKVASEPEALIAWFASLGLNLERIGLEAGPLSQWLYAAMRAVGLAVELLETRHVRKAFEAMLVKSDRNDARGIAQLMRLGWFRSVHCKSLPAQETRALLTGRKLVQSKLYDVEMSLRGILRGFGLRVGSTTPKRFPQRIKDLVAGHTSLEVVAAALLSVHEVLLRELDGFEKRMRTMARTDARARLLMSAPGVGAIVALTYVAAIDDPARFASSKGVGAHFGLTPKKHQSGEKDITLGISKIGDASVRTALYEAANVILTRPIKGGRLKSWAMKLAKRAGMKKAKVALARKLAVVLHRMWVDGASFVFGLPDNLAADAA

SEQ ID NO: 356992 - protein, 416 aa, unidentified
MKIVRPICCGMDVHKNIIVATIGITNKKTRITEYIQETFSTLNPDLLNLKQWLINHKCFDACMESTGKYWIPIFNILEDEINIYLTHPKYVKAIKGKKTDKKDSKWICDLFKHDLIKFSFIPPKEIRALREISRYRYKLVGMRSSERNRYQNCMTVSNIGIGSVFSDPFGKSAQAIMKEVLESDIIEDEKILKCIHGSCKNKDKILDSIKHCNIETDQRFKMNESMTHMEELQVHINNCEIEMMKRAAPMFDRFMHITQLPGISTLSAILIISEIGVDMKQFESDKQLTCWAGLAPANNESANKKKSVRISKAGQYLKPLLVQCALGAIKDKEGYFGIKYSRIKKRRGHKKAIIAIARMMLISIYHMILTGETFNPSDYESFRNPNPPIKQQVLTEESAIEFLKKSGFDVSKLTKP

SEQ ID NO: 356993 - protein, 343 aa, unidentified
MSTVVTIGLDLAKSVFQIHGVDDAGKAVLRRRLSRYELVSYFAKLPACLVGMEACSAAHHWARELSRLGHCVRLIPPQYVKPYVKRNKTDAADAEAICEAVGRPNMRFVPIKTLDQQGVLSLHRIRSLFVRQRTAAINTVRGLLTEFGIVAGKGIRRVAELRQRMDKVGSDRLPAEARAAIAEAFDHVDELTERIGAIEERIVAWHRNSEAGQRLASAPGVGPITASAIIASVGGGRQFRSARHFAAWLGLTPRIHASGGKEHIGKISKGGDRYLRALLIHGTRAIVGTSFRKDVKPRPWLKQLLARRPVNVAAVAVAHKTARALWAMITREEEYRRIAAQAA

SEQ ID NO: 356994 - protein, 317 aa, unidentified
MEQGKASTKCGGIDVGKRWLDAAVHGLTGTVRVSNDAAGLARLVVWLRERGVVRVGLEATGGYERAACTAMQEADFEVVLHQPIEVRLFAKLKRLRAKNDRIDAVLIAAATAQADAVLAAQDARLIDLAERLTAYEQLCDQAAALKGFMEHNTLKDMAKLLRGQIRSLETCKAKIAADILRRIKAHGDLAERLALLMSLPGIGPIVGATLLVRMPELGRMKHGQAASLLGAAPFDRDSGQWSGQRHIAGGRRRPRRMLYLAALSARRWDPGLRAFAERLAQKGKAPKVVLVAIMRKLIEAANLVLARGTPWTKLQPT

SEQ ID NO: 356995 - protein, 339 aa, unidentified
MNTLWVGIDMAKASLTAAAVWQTESFPLGDFSNESEGFTALATQIQAAQARCGAAAVQWVVEPTGGYELPLVTYAHEQGWAISLPNPRQVRQWAQGTGQRAKTDRQDALLLARFGAAQQPVPHRPLALEVSELDSLLQRRQDLEQMIQQEKNRLGALRDRPGTASPVIANLERVMHALPEALQEVEQAITDHQRQHAHLHDDAQRLLALPGIGPKIVLPLLVLLHRWQTLTTEQGTTKGLTAFVGFDPRPYESGRSVRKRSSISKMGNATLRRLLYMGALSAVHGRGAHWAPLHAFYQRLVGRGKAKKLVVVAAARKLLTWAWTLFSRQSAWNPALHAL

SEQ ID NO: 356996 - protein, 347 aa, unidentified
MNTITIGLDIAKAVFQVHGEDSGKIVLQKRLRRAQMLDFFAKLPRALIGIEACGSSHYWARTLQDLGHEVRLIPAAYVKPFVRRNKTDARDAAAICAALGRPDMRFVAIKSVAQQAARGVERSRDLLVKQHTQLMNSVRSQLAELGIIAPQGRRGFIGLAQLVSTGDGRIPAPLMAALRMLIGHIEQLGKAIAALERQIVAAARAHPMMRRLATIPGIGPLTAHAIVTAIGDGKQFASARDFAAWCGLTRRVDQTADTRRERGISRQGEMRLRKLLALGASTIMRHLRSCPARATAWQYGILARRPIKVAVLAQAAKNARIAWAMLQSGQVYRMPAIATAAATTLAG

SEQ ID NO: 356997 - protein, 338 aa, unidentified
MNITTIGLDIAKSIFHLYGINSVGRLLKKKQLKRHQLLKYLANLDASLVVMEACGGANYWAREIMLLGHEVKLISPQYVKPYVKGNKNDYNDAQAIAEAAQRSNMRFVPIKSVEQQDVQNFHRQRERIKKERTALVNQIRGLLAEYGIVIKKGVAAVRRELPRILEDAENGLNTLSRELFAELQDELHALEERFVQCNHRINLMNQDNAVCRRLEGILGIGSITASATYAAVGDGKEFKNGRHFSAWLGLVPGQHSTGGKPVLLGISKRGNSYLRTLYIHGARAVLRYSANKQDRFSRWAQQVLARRGHNKACVAVANKLARIAWVIMARGESYRALV

SEQ ID NO: 356998 - protein, 390 aa, unidentified
MIYAGIDVAKDKHDCLITNSDGIILSEPFVIENSNIGFAGLLRRLTDCSKDLSMIKVGLEATGHYSDNLIEFLITKGLNTTVINPLHTSLYGKSLIFRKTNTDKVDARSIVTLLRTERLAPYSHSSYQIRELKSLTRYRLSLVQKRAVLKSSYARLCVILFPELEKLVPTLHGASVYALLSEFPNSKAIANCHLTRLVNLLSVASRGRYRKEKAVEIRAAAKTSIGSFSDVKSLELQQIIQLIRIMDTQVEQVEARINPIVDALQSPIMTIPGISYRMAAIIIAETENLTNFGSAEQVLAFAGLEPSVYQSGQLTSTHARMVKRGSKYLRYALFNAAKYVCLWDPVFSAFLAKKRSEGKAYNVAVSHVAKKLTRVIFHLVKTNRAFVSQA

SEQ ID NO: 356999 - protein, 412 aa, unidentified
MEVVYTHCCGLDVHKKSVTACIIVPGADGKPRKETLTFGTTTKEISRLAERLIADGVTHVAMESTGSYWKPIWNILEGRFTLLLVNAKAVKAVPGRKTDVMDCEWIAKLLRHGLLPGSFVPGREQRELRELTRYRTTQIEERTAEVNRLQKVLEGANIKLGSVATDIMGLSGRQMLAALVSGSQDAAAMAALAKGRLRDKIPQLEEALQGSFGPHQRFLVAKQLAHIDFLDETIEGLDKEIAQRLRPFEEIIVRLDEITGVGRRTAEIILAEIGVDMSRFPTDKHISSWAGMSPGNNESAGKRRSGKTRKGNPALRRVLVQAAHAAGRSKDTYLAAQFRRLAARRGTKKAAVAVGHSILVIAYNLIKHGTSYSDLGGNYFDRRDREALEQRLVLRLKGLGYRVTLEPAEEAA

SEQ ID NO: 357000 - protein, 350 aa, unidentified
MVILGIDAHKQTHTVVVVDERGRKLGERTVKTTTKDHLDLLVWASRFGAERRWAVEDCRHLSRRLERDLLGAGQQVLRVPPKLMAHARTAARTYGKSDPIDALAVARAALREPELPVARLDGPAREIRLLVDHRDDLVAERTRVINRLRWHLHELDPSWQPPARSLSRAPATHLAATEAFISRLDGMVAWLAGQLVARVQELNAQIDQLEADLVPRVRRYAPSLLALRGCGVLTAAKLVGETADIRRFHSKDAYARHNGTAPLPVWSGNKQRYRLSRTGNRQLNLALHRIALTQARHHPDAQRYLARRRANGNTPTEAIRALKRRLSDVVYRALLADAGVADEAGQAAAA

SEQ ID NO: 357001 - protein, 351 aa, unidentified
MLIIGCDYHPSVQQIAWVDTETGETKERRLKHSNREAERFYRELKEQGFRVRVGMEATGYARWFERLLGELGFELWVGDPGQIRAKQVKKQKNDRLDAEHILKLLMKDDFPRLWVPTPENRDVRQLVLHRHRLVGMRTRVMNQLQAIAMNEGIRRKRGLWNKQGRALLESLSLPPWSSRRRQELLELLDRLDPSIEQLSQAIEQEAEKWPEVQRLLTHPGVGPITALAYVLVIGTPHRFRCGKQVASYLGLAPSEASSGDRQRLGHISKQGNAMLRHLLGQAAQSAAHSEEKWRGQYVHLTLRRNHAIAKVAMARKLAVQLFWMWRKEWDYQQLKNFGSHVGQLVKSHGVE

SEQ ID NO: 357002 - protein, 428 aa, unidentified
MGVSVQPDRSHEYTDHALPYQWFVGIDWGSQTHQVCVLDRERHRVGERSVEHEGIALAECAAWLTTLAAGEVHRVAVAIEVPRGAIVELLVERGLHVFAINPKQLDRFRDRHTVAGAKDDRRDAFVLADSLRTDRPSFRQVHVEEPHLLMLRELSRTEEALLTEFRRATNQLREQLHRFYAPLLQLCPAADEPWLWDLLELAPTPAHAADLTEAHVAGVLQTHRIRRVSAGDVLKVVQAPALPVAPGTAEAASAHCALLLPCIRVLAAQLQTCARQVESLLTTLGTVEAPSAPPSDVAIIRSLPGVGRKITAWLFAEAAQPLAERDYQILRTQGGVAPVTKQSGKRRQVVMRRGCNPRLRNALYHMAHCVAQRDAYFASVYAALKTKGQSHGRAIRSIGDRLLRMLVAMLRNHTLYDPSCRQPVLMER

SEQ ID NO: 357003 - protein, 427 aa, unidentified
MNYNQNRKIMQITPSTLIVGIDIAKDKHVARMQDDRGIEFGKRLTFENRIHGFEQLLERVIKIQKEQDKNKVIFGVEPTGHYWMSLAYFLTARGYDFVLVNPMHVKKSKELDDNSPTKNDTKDARVIAQLIKDGRYSVPNLLDGIYAELREGMKLRDQLTKQLIVIEGRVQNNLQRYFPEFDDVFKDWDGKTAWFTLREFPYPSDICGMTPEEVLAQWKTVIKQGIGIKRANNLVEKANKSIGIEIGLRFARKELHSLLDQYELHYQQLERLDQEIEELLENIPGAKEMIAIKGLGVVTVATFFAEVGDVRKYHHPQQLVNMAGLALREHSSGKFKGQTRISKRGRKKLRKALYIAVRPLVANNPTFKALHRYYTTRPNRPLKKQQSLIALCCKLLRVLFVIGQKQCEFDGSKLLKGLPQTESLQAA

SEQ ID NO: 357004 - protein, 339 aa, unidentified
MKVNMIGLDLAKNVFQVHGVDASGSVVLRKRLSRGQVERFFAALAPAVVGMEACGGAHHWARRLQGLGHEVRLLPPAYVKPYVKRNKTDGRDAEAICEAMQRPSMRFVAVKSAEQQAVLALHRARELLVRQRTMAANALRAAFAEFGVVAVQGRRGLQGLLAELPAPDAVPAPAHAALASLARHWQALDADIQALERRIVQAVREDRTARRLLAIPGVGPIGASAIVATLPDAKAFRSGRGFAAWLGLTPRQHNTAGKRRSAGISKQGQRSLRTLLIVGASAHLRQERARGVKDPWLAGLLARRPVKVAAVARAAKTARIVWAMLARDEAYRAPLAQAA

SEQ ID NO: 357005 - protein, 400 aa, unidentified
MISVGIDVSKGKSTVCVLKPYGEIVCRPFEMQHVEKDLEAFHNLLQKLDGEIRIVMEATGIYHLPILIFFHNKGYFVSVINPFAMKKYAKDNSIRGAKTDKLDSIMIANYGIEKWFKLQRYEGDEEIYAELKLLGRRYRYYMELHVKALQELTHILDYVMPGIKKLFSSWNEANGKDKLSDFVERFWHFDLITSMSLETFTDEYLVWAKEKKYHRSRSKAETVYELASSGIPTLPSSTPSTKMLVQEAISVLRTVDSSLSLIVTRMQVLAKSLPEYSTVREMGGVGDVLAVKLITEIGDVRRLHSAKALIAWAGIDPPPYESGQFIGSKRKITKRGSSTLRKIGYEVMRVLKSHPAPKDDAVYNYILKKEGEGKSKKHAKIAGLNKFLRIYYARVIAVYQ

SEQ ID NO: 357006 - protein, 392 aa, unidentified
MDSPPPRHHSATVAFEEANGSEGETMKKHSSKHDSLSSTDVELCTTICVDLAKQVFQLAGEDATGRVIYEDRIKSRQAFHDFLTRLPTTVAVLMECGPGAQAWARLLQTKGNPVRILPAQRVAEHRSGAKNDRNDAHAILRAGRDTSIASVPIKSTTALAIQALHRIRRGNIKRHTALGNQIRGLLLEHGVSMPQGDAAISQQVPRALEDASLPLPDLLRELLDELLTDWLSLGERIAALSGRLEVTAQQDKVAQRLITIRGVGPIIATAIVAKQTEPSRFASSRMYSAFFGIVPDQHSSGNKIRLGRMSKRGDGYIRSLMIQGAHAVLSQLRPDSDQPDDRRLLRWLSRLGRKEAAIRLANRNLRIIWALLQSNQVYQRKPNSNPEAAMSL

SEQ ID NO: 357007 - protein, 340 aa, unidentified
MNATTYGLDVAKRVFQMYWVDAQTGEIVNRRFGRDELIRFLAQRPAGRVALEACGSGHWWARKIKAVGHEVVLLHAKFIRPFVQTNKTDAADARAIWTAVQQPEMRTVAAKTEDQQAMLALHRMRSLLVKFRTMQVNQLRGLLYEFGATFRAGRVAGLAEVRARMAELAEALPGTMVCGLQDQLQRIDALEQDIDRLERQIGSWQKQEAACRAIAEVPGIGKLTATALVATMGDAKTFKSGREFASFLGLVPRQSGTGGKIRLGSISKRGDPYLRTLLIHGARSVLCHAKVPTPWQTGIQARRPANVAAVALAHKMARTAWAILARGQAYQRNYVSVKPA

SEQ ID NO: 357008 - protein, 338 aa, unidentified
MQWTVAIGVDTHKDMHVAVALDRFGAQLDSREFATTETAYRALLVWALELGVPAFAVEGCGSYGAGLARFLKLAGVTVWECERPRRQDRRRGKNDLIDAALAARRLLSGEGLSRPRGGGRREELRLLLLERRSATQARTGALNQLNALVVTAPDQLRQRLSKLNGERLAHAAARLRPGNNISNTVLHRLGRRVERLSNEIAEVDRNLLNILTDVAPELLAECGVGPVCAAQLLVSSGDPQRMASEASFAALAGTNPLDASSGQQRRHRLNRGGDRQLNWALHVIALARIHHHAETAAYYQRLLATGKTVREARRCIKRALARYFYRQLREIQAHTLTT

SEQ ID NO: 357009 - protein, 406 aa, unidentified
MRYYIGVDWADAADAVWAEDEHATKILSRSVAHTVEATTEWGRWLDEQRAAGVELWAAIEKPEGRAVDFLLDHGVLVFAVNPKAVDRARDRFRVSRSKSDPFDARVLATFLRTDHDHLTALRPNSEAAQELKGLTRDYARHVRQQTRLLNQLTAALKAYYPRALEICGDLKTQWARDFLRDYPTPAALSALTERQWQRWGHGRRLSAERLAELWSMLHALQLPVPPHVVRVQTRLVGALLDQLAVAIHTVQSYREAINDFFGRVPAATWATSLPGGRSGTTVPTLCAELGDAVGRWESFRHLQAHAGSVPVTNRSGTYVAVGFRFACNQHLRQAIHQFALNSLQHSEWAKAYYARCRSRGHRHHHAIRALGAKWLKILFVLWTRQVPYNETHHLATMAQQQLRQAA

SEQ ID NO: 357010 - protein, 402 aa, unidentified
MTFVVGLDWASQVHAVCVLDATGQVCWQGRAEHSANGLAELQRQLARFGPPTSLPIAIERPSGLVVDTLMDAGHPVVPIHPNALKASRPRYSAAGSKSDPGDAFILGDLLRTDGHRFRPLQPLSDETRALRALVRGRDDLVATRVALANQLRALLDRFWPGAAAIFADIATPIALAFLSRYPTPHSAARLGEKRLARFLVQHAYCGRRPVLELLARLRAAPIAHTGELEVEASGEVVRTLVAVLLPLVAQIQQLSAAIAAALPQHPDGPLLQSFPRSGSVNAAQILAELGDDRTRFPTDEQLAAEGGVAPVTHESGKHRGVAFRWACNKRLRQALTTFADNSRHASPWAAAIYVAARRRGCRHPHAIRILARAWIRVLWRCWQDRRPYDVMLHCAAQRVAAA

SEQ ID NO: 357011 - protein, 408 aa, unidentified
MQVLYTRCAGLDVHKDTIVACVRCVSPPMHQEVRSFGTTTTQLLELADWLGEHGCTHVAMEATGVYWKPVWHVLEDEFELVLANAAHIRNVPGRKTDVNDAMWIADLLAHGLIRSSFVPPHAIQQLRDLTRTRKQLVREVSQHSLRIQKVLEDANLKLGSVLSDVLGKSGRAMLDAIVAGETDPARLAALAQGTARNKTAELREALRGRITEHHRTMLRLHLQVIDALHRTLGELDTAVGKALAPIQQRTRLLTSMPGVSDLTASVMVSEIGVDMSRFPNAGHLISWAGLCPRSDESAGKRRSTRVRKSGTWIKTTLITAAWAAVRVKTSYLRAQFLRIKARRGAKKAILAVAASMLTAAFHMLRDGTEYNDLGSEHLDRQDRSKTIRRLLKRLQDLGCEVPQMAHET

SEQ ID NO: 357012 - protein, 347 aa, unidentified
MNYKRIGIDIAKNVFQLHGVDSHDKPTLKKKLKRSEMIPYFTQLKPCRIAMEACGSAHYWSRKLTELGHSVYLIAPQHVKPYIQGGKNDANDAQGICEADSRPHMRYVATKSESQQAMQLVHRARRVAIKARTALVNEIRGTLGEFGIICATLGVACTRRTLSEAIHDDTRHYPQPLPQLLELLEQRLNSLDGEINVLDDLLASHAMSDERVKRLQQIEGVGPITASAIVCAVDANQFNNSRDFAAWLGLTPRQNSSGGKERLSGITKRGDSYLRTLLIHGARNVVRYCVNKVDARSLWLQSLLLRRHANVVAVASANKVARVIWAMLTSGADYRVPQLVALETSET

SEQ ID NO: 357013 - protein, 404 aa, unidentified
MRFCGIDWANDHHDALSIDEQGRQLGSIRVAHSPEGLSQLDTYLERMAGPGGREQIACIVETTHGLLIAHLLEKGWPVYPVNPRTVEKRRAPSGAKTDTIDAYLLAKTGRADFQDLHRLNPDSEQIQEIKTLTRDQDALIQMQTRLVNQLTACLKAYYPVALEVFGKLQQPSTLAFLRAYPTLQAVRAASAEELTAVLKQARYPGASQKAQQIVKHLQQPCLHASEVITRTKARLMLALVDQLEPLLKQIAEYDKEIERLFLIHADSELFSTLPGAGARLAPRLLAEMGDDRSRYADASSLQALAGTSPVLFQSGTYQKAHRRLGCIKPWRNALHQFAWQSTLQEAWAKEYYQRKRAEGKSHTVAVRALANIWARILYAVWKTKELYQTTTFEQARQAHALRSA

SEQ ID NO: 357014 - protein, 319 aa, unidentified
MKVTYPIVGIDISSARLDGAILDAGGKFEATSCANTRPAARKLARGFARSKVALVVFEATGGYETVIMAALAAEGVPFARVNPRQVRNFAKGIGRFAKTDPIDARVLALFGERARPRLTTLPSEEEARLKALSLRRRQLIDARVAEKNHRTQIVDKDIKASIGRMIEALDDEVEIIEGAIADLIAACEKMRKRQELLESIPCIAAATSATVLAELPELGDRSTSVLKALVGVAPFNADSGGVRGERHIQGGRAPLRQALYMSAQTGYRCNPMLKAFYERLRAKGKSHKQSIVACIGKLVSIMNAIIKTGTPFNANLATM

SEQ ID NO: 357015 - protein, 361 aa, unidentified
MPGTMTYVGFDVHARSTHAAAIDVMTGELTRMRFGAGIDAPVDWLKTLSGPVRACYEAGPTGSGLYRAAVAAGVGIEVIAPGLTPRGKSDRIKTDRKDAELLARCLIAGSLTPIVVPSMHVEAAREVTRAHDACRRDLMNARHRVSKMLLRHGRVYPEATTWTQKHRRWLAAQQFREPMSEFTWADLIACVDGLTARKKTLAERIGKLATDPAWWPTVARLRAFRAVDTLTALAVHLELGGDWARFEKATRVGSWLGLTPSRSQSGEHDYHGSITKTGSQLARRLLVEAAWHYGREPRVGATLANRQEGQPDHILQISNRCQHRLHHLYTSMRARGKHHNVTTVAVARELSCFLWAAATAP

SEQ ID NO: 357016 - protein, 363 aa, unidentified
MIVIGADIHKSTHALAAVSGDGGVLAGELGIRADEAGHRAALRWARELDAERVWAIEDCRHLSRHFEQALIAAGERVVRVPPKMMGQSRRGEREPGKSDQIDARAVARAVVREGVERFPAAFLDERALEIRLLNDHRSDLVAERTRQISRLRWHLVDLCPEFEAQIPARHLDSSVTLDRIARRLRREERTARTRVALELVVSIRAISRQASELERELRTLVIAYRPTLLAEQGLGVLTTATLIGRTAGAERFPTDAHFARQAGVAPIPVSSGRKDRHRLHRGGDRQLNRALHVIAITRARIDPETRAYLERKRAEGKTNREALRCLKRHLARQIHHLLSMPPANPDRRTRIQLNTATSVPCLT

SEQ ID NO: 357017 - protein, 412 aa, unidentified
METQIERCAGLDVHKETVVACVRVPGADRERQQLVQTFGTTTAALLALRDWLVAHGVTVVGMESTGMYWKPVYYVLEDALECWLLHARHLRNVPGRKTDVADAAWIGQLVEHGLVRPSFVPPKPIRALRNLTRYRKAQIEERTREAQRLDKILQDAGIKLSSVASDVLGVSGRAMLGALVDGTRDPAVLAALARGTLRKKIPALREALRGRFSPHHALLVGTMLAKLEFLDEALAQLAAEIEQVLAPFAAAAALRRTIPGVDRRTAEALIAEIGVDMSRFGTASRLASWAGMCPGHHASAGRRGPGTTRKGSKWLRTSLTEAAKAAGCTKATYLGAQYARLRARRGAAKATVAVGHSILVAAYHILDRRQPYHDLGPDYFRRRHSREHQTRRLVRQIQALGYKVTLEEVAAA

SEQ ID NO: 357018 - protein, 315 aa, unidentified
MDSATVYVGIDVAKEQLVIAVHPTQLCWETTNGRQAFPSLISRLLALRPTGIIVEATGRYHQPLARALAEAGLSVAVVNPRQVRQFAAASGRLAKTDAIDAHVLATFGSVFRPPARGVRDPEAQQLHDLVGRRRQLVQMRVAESNRLDGVSALVAQSGRRILRTLDREIATIEAALEHLLGVERWRETAAIVRSVPGVGPHSTHTLLTALPELGTLNDKEVAALVGVAPLNHDSGTHRGRRTTWGGRRELRSMLYMAALSATRCNPEIRAFYQRLVAAGKPKRVALVACIRKLVVLLNALVRQRRHWTLEVPHAA

SEQ ID NO: 357019 - protein, 409 aa, unidentified
MRIIGLDIHRAFAEAVAWDDGKLKRLGRIDMRRPLLEAFARKLTKEDVVVIEATGNAASVAAVIAPHVKKVVIANPKQVRIIAHAKIKTDTIDASVLAQLYASGFLPEVWIPDEPTQALRRQVTRRNQIVRQRSRLKNIIQSILHSHLIPSCPHADLCGASGRAWLSHQVLPEDERLAVERHLREFDRLGEDLKVIERDLARSALGNEGVKRLITIPGVDMVVALAIVAAIGDVGRFERSEKLASYLGLNPSVRQSGPGPAHHGRITKQGRGHARGMLVEAAWAAARAPGPLRAFFLRVRARRGQHVAAVAMARKLAVIIWHLLSKGESYAWARPALHAKKLRDLELKAGYKAERGQRGPACAYNVKSHRDQERRWVEQAEAAYARFVAGWNPRGPRPARTGAANEVRR

SEQ ID NO: 357020 - protein, 362 aa, unidentified
MFTERTSVGLDVHARSVAAAAIDGVTGELVQAKLTPSHEHIRSWLAGLQGPVAVAYEAGPTGFGLSRSLNAAGIRCEVVAPSKLQRPSGDRVKTDAKDAVHLARLLRLDEITAVSVPSVDQEAARDLVRAREDARGDLMRARHRLSKLLLRQGYVYSGGKAWTGAHDVWLRHTGAQLDSSATRLTFESDYDAVLHVKARRDRLDDAITTMAADCEFTPMLRRLGCLRGIGTLTGLALAVEVGDWERFTGKTIGSFIGLVPSEYSSGQSRVQGSITKTGNTHLRRLLVEAAWHHRCAYRVGKTMRDRWELAGPAARARGDEGNRRLHHRWNTMRARHKRHTVANVAIARELAGWCWSLAVLRE

SEQ ID NO: 357021 - protein, 347 aa, unidentified
MIIIGCDLHTRTQQIAMLDTETGEVVERRLEHEKGEAKRFYEELKEPALVGVESTGFARWFQEMLAELGHELVVGDAAKIQAMEPRQQKHDRRDAQHLLNLLVRGDFPRLWLPTAEERDVRVLVEHRHQLVELRTRAKNGLQAMALSYARRRRGRLWSRAGQEELQKLPLREGMARRREDLLRLLAQLDQWVKELDLRIGQEVARRDDAQRLMTHPGVGPLTALGTVLGLGPVERFPDARHVTSYVGLIPQEKSSGGRQRFGPLTKQGSRLLRFLLVEAAQTASRFDPGLRRTYRRLAFRKGAASAKVAVARKLVIRLYIMLRDQIHYAEFCRRGSHAGMLGDVARV

SEQ ID NO: 357022 - protein, 419 aa, unidentified
MGKQRSKVCGIDVHKKFLVATITDRTENKETKKFSNEIEPLLRLREWILVEHCEAVAFESTGEYWYSLHDVLNGYVEIIVANAYHIKWIPGKKTDTIDSEWIAELALNDLITSSRILPKEQREIRALSRLREKLVKERTDHKNRVHKILDSACIRLSVILSDIFGKSGLTILKGILSGVPLDDIIKKLPKRYQSRSDEIKGEIQSELSERQMIQLQTSIVMIEYLNEKIKEIEQVTLNEMRKQRRELQILMSVPGIGYIGATTLLAEIGDVRDFPSPDKLTKWAGITPRVYQSADKLHTGSITKQGSKHLRWILVEIAHACVRVKNTRFRTFFDRIFARSGYKKAIVAVARKILKLVWHLLSNDELYEEENAPVHKSSRLPNLKKSPSFTLSEAIELIVKAGFHIVEHDNSVNKRSLGN

SEQ ID NO: 357023 - protein, 334 aa, unidentified
MSIVSTVGIDLAKNVFSVHGVDAQGVVLIRRTVSRGKLAQLIAQLPPCLIGMEACSGAHEWARRFAAFGHIVKLMAPKFVTPYRKSGKNDGNDAEAICEAVARPSMRFVPIKSIEQQAELTLHRVRQGFVEERTAMLNRIRGLLAEFGHVLPLRAAEVRRRAPELLEKLPIRVANCVRDLLEHAGQLETKVLEYEREIRAQVRTNALAQRTQTRLGIGPITASALVATVGNAHDFKNGRQFAAWLGLVPRQYSTGGKTRLGHITKRGDPYLRTLLVMGARAVLQGALRLNDPLSRWALALRQRRGYHRACVAIAAKNARIAWALLAKDIVIATT

SEQ ID NO: 357024 - protein, 344 aa, unidentified
MNYVGVDLHKQVISLCVVVQEANRRKVVLRKTFRCSEVDGIRAFFAELRPFQVVVEATSSYEWFVQLVEPLADRVLLAHPKKLRIIAESTRKTDKLDAQVLAEFLALDMIPEAYRPTPRQRDHRTLVRHRRYLQRRAASVKNKLRSILARHNADIRELFRPEGRRYLDQVTLPEADRFVVDQLCEELEHRKKQLQTIDKQLLRFAQQGAAAEREAREVLETIPYVGTVTIDVVLSELGDVRRFRSQKQVTAYAGLAPGLRESAGRTKQLAITKEGSRLLRWALVETAWRLVGRLRRWAFVYQRIKLRRGAKKAIVAVARRVLCVMVSMLRSGRRYSMASEILTS

SEQ ID NO: 357025 - protein, 442 aa, unidentified
MRRPSEESVPVLPNAAESEFDWYVGIDGGGATHQVCVLDAAGRAAGERAVAHAGADLATLAAWLHELAGPSLARVAVGLESRHAGPVALCLEHGAAVFAINPKQLERFRERASAAGAKDDRRDAYAAASALRTDRGAFHRVVPDDARVVALRELSRTADELREDTRRLSNRLRAQLERYFPQMLTLAAAADEPWLWTLLERVPTPAAAARVREAGVARVLKAHRIRRVGAPEVLAALRAPALVVAPGTVEAVSAHVALLVPQLQLVSEHHRRCLAQLEAAVAALAGPGADPPTRPTPNAPAPSPDALGTAVRLVRSLPGVGGVIAGALVAEAAGALLAGDYQALRTQGGTAPVTKQSGKQRLVAMRYACNRRLRTALYHWARVSTQHDAAARQYYATLRGRGHSHPRALRSVADRWLRILTAMLATGTPYDRTRFVSSVATP

SEQ ID NO: 357026 - protein, 356 aa, unidentified
MEQLTTVGLDLAKDVIAACVLDVHGAVIERRVLRRGAFERWAEQLPSCKVAMEACGSAHHWGRWFAAHGHTALLIAAEFVVPFRKGGKNDTADAEAVAIAARQPTMRFIPIKTVDQQAILAWHSVREGWKEERTALLNRVRGLLAEFGIVIGRSSDRLLTELPRLTEDPRLPDAIRAMLLEAREQFVALHARLARCDAQIAAHARNSSAAQRASELLGVGPVTASALAATVPDAKVFKSGRQFGAWLGLTPRQHSSGGRTRLGRISLRGNVYLRTLLIQGARSTLQSAINAEPSRASRLQRWIIELYGRKGYHKTLIAIANKHARILWAMLAKDERYDAAAWQRHPMHELLLAGNA

SEQ ID NO: 357027 - protein, 368 aa, unidentified
MSNNVLYVGLDVHKNSIDVAIAEAGSEIRHYGSIGGELKDLEKVIRKLHSQGSELYFAYEAGPCGYQIFRFLKEKNYSCLVAAPSLIPRRPGDRIKCDRRDALTLARLFRAGELTAVRVPDADDEAMRDLTRAREDAISVERRAKQRTAAFLLRHGRRYPGKTTWSRGHWSWLFQQVMEHPAQQIVLQEYLDAVREAGVRVQRLTDQIRELVPQWRRAPFVKAYQALRGVLLIVAATVVAEVGDLNRFLNPKELMAYLGLVPSEHSSGASVRRGRITKTGNGHARRVLVEAAWAYRLRARVSRTLFKRQEDLPESIRQIAWKAQVRLCARYRRLLAQGKSKQTIVTAIARELAAFFWAINQAVVPVTA

SEQ ID NO: 357028 - protein, 368 aa, unidentified
MSKTITSFVGLDVHKDSTAIAEAEAGRETPRFVGTVGPDLGQLLKALKSLGKPETMLVVYEAGPCGYGLARQLRSRGYGCEVVAAGKIARRPGERIKTDRRDALTLARLARSGDLVKVIVPDERDEAMRDLSRAREDAVRARLKARQQLKALLLRHGHRYSGKSSWTLAHERYLAAVSFAHPAQDIAYAEYRQAVREGHERVERLTQALRTQSEQWRMKPLVAGLSSLRGIDFVAAVTLAAEIGDFSRFAHPSELMGFLGLVPSEYSTGDSRRQGDITKTGNSHARRVLVEAAWNYRFPARISRILQIRQEGQPKAVRDIAWRAQLRLAHRHRRLSSRKLHPNKICVAIARELAGFLWDIARQVRVPT

SEQ ID NO: 357029 - protein, 339 aa, unidentified
MDLYVGIDLHSSNSYIGVINKNAERIMSRRVSNDKEQILMAILPYQEKIKGIAIESTYNWYWLVDALMGANYKVHLGNPAAFQQYKGLKYVNDKHDAFWLAQMLALRLLPEGYIYPKEQRGLRDLLRRRSMLVRQRTSLKLSLQQICINQTGSRLTNNFIEQMDGREILEIFDGEDWQMNGESLFSTLKFIKKEIDKIERYILSQMNGESYYKSLLSIPGVGEILGLTITLETGPIERFGSAGQYASYCRCVPSSYWSNEKKKGQGNTKNGNKYLAWAFGEAASFCIRYCDAAKRYYQRKKAKTNIPKAYRAVSNKLAKSSYYLMKDGTRYDAEKLFGS

SEQ ID NO: 357030 - protein, 454 aa, unidentified
MQETTQHDAVDVFVGVDVDVGKGRHHAVALRRNGKRLYNKALPNDEVKLRALIAELKTHRRLLFVVDQPSTIGALPVAVARAEGVLVAYLPGLAMRRIADLHAGEAKTDARDAAIIAEAARSMPHTLRSLRLADEQLAELTMLRGFDDDLAAQVTQTSNRIRGLLTQIHPALERVLGPRLDHPAVLDLLERYPSPSALAAANEKTLANRLTKLAPRLGKNWAAEIVQALNEQAGIVPGTQAAAIVMPRLAQQLAALRKQRDEIAAEVERLVLAHPFWPVLTSMPGVGVRTAARRLTEAAPKAFATAAHLAAYVGLAPVTRRSGSSIRGEHPSRRGNKVLNAPCSSPPSLPYETQSHGPITRARSSRASATTKHSSRSHGDAATSCLPCCATAPFTHPSQPLTLDERHRGTRACCAATSPRGAAPLRRMRSRPDVARAPTPLHAVNLSPGRRRPL

SEQ ID NO: 357031 - protein, 336 aa, unidentified
MGKRITADGELTIGLDLGDRFTEGRVLDESGEVVEAFRVRTTEPALSKRLTSFPPSRVVLEVGTHSPWVSRVVVREGHEAIVANPRRVRLIAENDSKSDGVDAELLARLGRIDPSLLKPIVHRGEQAQRDRILIQSRDGFVRARTQLVNQVRGFAKALGARLPSSSTEAFPKRVRAATPRDLFPGLETLLETIEQLTATIRQMDRKIERLCRERYPETELLRQVPGVGAVTALYYVLTLEDPSRFAKSRSVGAYVGLRPKRRDSGEQSPQLRITKAGDRLLRSLLVRCAHYILGPFGPDADLRRAGLRMTERGGQAAKKRAIVATARRLAVLLHRL

SEQ ID NO: 357032 - protein, 496 aa, unidentified
MGDGSWVGVDLHARSAVAGVLDAASGELWTERVPAASEPLVVWLSGLPQPVRVAYEAGPTGFALARACARAGIECLVAAPGRIPRAPAERVKTDRRDAERLARLLRLGELTAVRVPSELEEQARDLVRAREDVRGDLMRARHRLSKLLLRHELLWQRSAWTREHDRWLRGLRFAGPFAICFDESYGAVLQAKARRDSLDRAIATLAAAPPYADAVGRLCCLRGVSTLTALALTVELGDWTRFEPAGLGAFLGLVPSERSSGEQRRQGRITKTGNGHARRLLVEAAWHQRRPLRPSLALAARRNGQPAAVRAQAEAVARRLHRRWWTSSSAARDARSSPSRSRASSPATAGSWRRCRKPAPAGRGRGERAGDHTRGATRGPTTSNPTGRCSTLESGSAPDRTPGHAVPTRAYQSDRRVDDSRRALPAQGKGPHRRAFLARPLTDTHSISVGARGQLLHGPAVAVRVGEEHEGAPGKLLHVADFDSPPNERGVRRFDV

SEQ ID NO: 357033 - protein, 335 aa, unidentified
MKKFDYYIGIDVSKLTLDVTVLYECKNTTKTDYYKIENKEKSIVQFVKKKLGNLDAKQILFCFEDTGIYSLPLAYYLSKNNFLYWQVASIEIKRSKGITRGKSDKIDSKDIAFYAYSHIHKLRPSNMSSKSIQQLRLLFTEREKILKSLSSFEKTSENKGFVPKEVFNTVATINKTIIRQLKNAQKQIEQKMLAVIFSDENLKQQFGLITSIPGIGRQTAIYLIIVTKGFKSFENWRQLACYAGVVPFPYQSGTSTQGRNKVHHLADKKLKSMLCMCALAATTHDKELNVYYERKVKEGKSKMLVINNVKCKLLARVFAVINRKTPFINTYKFAS

SEQ ID NO: 357034 - protein, 344 aa, unidentified
MATKSIIGIDEHIVNCNYSGIGEKTGEILGTGDFPTSATNLIRAVNQFPAPRIVVIEQGPLAEWTARVLEKYVEEVVVADTQRNSWIARDPLKNDDIDGEKLALLYIGGYIKRIIPRSTEKQELVSLVIHYHSLVQESTRLKNKVGAKFRQGGKRKIGENSYRKESIERDMGYLSHNKGLQMIVRNYHAQLEIVEQQKERVTQRIQKLSCNYPEVAFLDSFPGIGFVGSATLSALIDVPERFATVKKLWIYCGYGLDCPSSGSRFGNTRITKRGNRYLKGVIGIATHNIVTISKNDNLYKSWYDENLKKGKNPGNLKANLARKLIKDIWLGWRAFNQSALKQAA

SEQ ID NO: 357035 - protein, 367 aa, unidentified
MSSIAAARGLTYLGLDVHQDTISVAVLGPDRDAPEVSRIAHDEPSVRRLVAQFPDRRGLRACYEAGPTGYELARLLHRMDVRCQVIAPTLIPTAPGDRVKTDSRDCRRLARLHRAGELVAIRVPTVAEEAVRDLCRARADLLADRTRARHRLSKFLLRHGEVWRGGATAWTVAHERWLVSQRFDDPALTATYGHYRAVLDARDAQLEAIEADLAGWYGRPPFADAVARLSAYRGVTRLGALTLASEVGDWRRFASAPQFMGFCGLTPSEYSSGNSTHRGRITKCGNSHLRAQLVESAWAYQHRPQATLELRRRQHGLPPEVVARAWTAQLRLCGRFRRLQARKNAKQLVVIAVARELAGFLWAEMTA

SEQ ID NO: 357036 - protein, 343 aa, unidentified
MKEISIIGVDLAKNVFQLHGAAADGTVVFRKKLSRPQFQRFMTEHPQCLVVMEACGGAHHWARELVRVGHEVKLIAPRYVKPFIKRQKNDAADAEAIVEAALRPTMRYVEPKTGEQQARSILFRTREQFVKQRTEAVNALRSHLYEFGFTAPEGIGYLPRLGAVLEDPSSNLPPLAREICREMLEQIANLSDRINAMKKRLDAIAREGETSRRLQTMPGVGPISALAVETFAPPMEQFKRGRDFAAWLGLVPRQASTGGKQKLGKTSKMGQRDIRRLLITGAMAVIRWALRHGAPRNPWLARLLERKPPMLAASALANKMARGIWAMLMRGEDYRGPEIGSAA

SEQ ID NO: 357037 - protein, 367 aa, unidentified
MKNTIVHHEGAASLKVAVNKIGLCGSIIKIGLDVHARLYVAAAQYDQLLPKPARRLAPLEFVPWVEQLLRAGHTVHVVYEACGFGFGLYRELKALGVHCYVIAPRKLDEGCTRVKTDPRDATTLCQRLSRYVEGNTRELAVIRVPSEAEEQARHVSRQREQLVRHRQKLEAQGRSLLINHSLPSPAHWWKNQTWSRLSKLLPAWICLRLQVHRPALLTLEQQISALSAELEAAAPALVPAGVGKLTTVVMTREICSWERFRNRRAISSYTGLCPGEHSSGTKRIPGSVTKHGNPRLRAALVECAWRMVRFQPNYPPVRKRLSVLAKGARATGGQRKKAIVAVARHLAVDLWRVHTGRNTAAQLGLTI

SEQ ID NO: 357038 - protein, 416 aa, unidentified
MKVVYQTCCGIDVHKSFLVATIIKTTSGVDPSYQKKRFSTFNNSILQLKNWLIENQCRDVCMESTGKYWVPVFNLLEDEMNVTIANPKWVKAVKGNKDDTKDSKWIGDLFRLGLVQGSYIPCKPIRILREFTRYRYKLTSCRTSEKNRYQNALTVCNVALDSVVSDIFGKSAASVIDYLIEQSGNSINHEEIASRLLRSLKKKSDSVIESIEGYQMTDPQKYRMRLVRAHLDYITSTINDIDTMLDSLIAPYENAVQLLCTIPGVDRNSAITVISEIGTDMTPFSNSKRLCCWAGLTPGSNESAGKKKSVRITRAGVCLKPALVQVAHAAVQSDKSPYYKQKYERIMKHRGKKRAIIAIARMILTAIYQMLSTGEAWNPTDLYKTDMPEPLKEKQKEKAIKQAKKLLIREGILSES

SEQ ID NO: 357039 - protein, 356 aa, unidentified
MIKNKLAVAVDHTFHPEPVAPIPGLAAAGAALPGVADPEAALPAECWVGIDVAKAHLDVAIWPTQERLRVPRDEAGLAELMAWLQPWTPTLIVLEATGGLETLVAGMLIEAQFPTAVIHPRQARDFAKALGVLAKTDALDALVLARFGQSIQPEPRPWKDEETQALTALLQRRRQLIAMLTAEKNRLTSAHRQVQADIRTTVAWLEQRIKALDDDLQGRLRASPVWRESEELLRSVPGIGPVTAVTLLAALPELGTLDRRPISALVGVCPLNRDSGQCRGQRHIFGGRAVVRTALYMATLAASRYNPVIRAFYQRLCAAGQPAKVALTACMRKLLTILNAMLKAKTPWRPTEECRA

SEQ ID NO: 357040 - protein, 452 aa, unidentified
MEKDSISMDVVNPKAAGIDIGSRSHWVAIGQNEEDVREFGVFNEDLYEMAHWLFQNQIRTIAMESTGTYWQNLYAVLIAKGFNVILCNGKFTKNIKGKKTDIKDCQWIQKLHSLGLLSSSFLPDNDTEQLRTYCRHRANLIHMAASTSKKMQKYLRLLNLRLDVVVKDICGLTGLKIIRSICDGETSPEKLAEMRHFNCRKSEEEIAKALQSNGRQDYLFTLKQELETYDHLQNKISQCDIEIEQMLNKIIDNDDNKKQHYTNPKPHKRINKNTPKDIDLNLKSYQMFEGTDLMAIEGMSYSTVLALMSEVGIEGIKKFPTAKHFASWLRLAPNNKISGGKILSSKVPKGSNRLKIALRNAANAIGNLKESTPLRDFFHRINFRKGRVSAISATARKLAIIIWNMVVKNTPYVNPEGYLFLDQKRKLGITKRIRKQIDKFNINPDDLGFSTT

SEQ ID NO: 357041 - protein, 353 aa, unidentified
MTDIATHNDRIATIGMDLGKRSFHLIGMVSRGKVIMRQQLSRGRFERHMANLQPCLVGVEACAGAHHIGRRLSAFGHNVRLIPAQYVKPFRKGQKNDYRDAEAIAEAVQRPTMRFVPIKSAEQLDLQALHRIRSRLVGHRTAVINQLRGFLLECGIIVPQGPGTLRKILPSVLAQRTDVLSPRMVRLIEELADDWRRLDDRVDAVTGEVQALARQDEGCRRLMSVPGIGALTASAVVATIGNGAAFTKGRDFGAWLGLVPKQLSTGDRTILGRLSKRGNKYMRTLFIIGARAVLAKPGSWAKFGLEGWLAAAAKRLHHNVLAAALANKLARIAWSVLYHGRSFARDFEPQSVS

SEQ ID NO: 357042 - protein, 354 aa, unidentified
MNTTQNSTKSKIVKVIGVDLAKDHCDVIGYDENGKICLRLDGCSYAKLREILANLPQAVVLMEACKGSMFHARSIADLGHEVRLVKGTDVKALRNVNHKNDLRDAAYIANLYFVPGIKYVYIKSQQQQSLQFLQNEYKSLQELRIQVGNQIHAGLEEFGCPVRKSSKFIKTRMVAHLEKHAELIPEDVMASFKRRREIWLNLLQQEEEAKRRLEQVAATDANAKRIMTVPCVGPQTAVGLLVHVGVDFGRFKNSRQFAASLGLVPKQNSTGGNNTLNHITKCGPKSLRSNLVQCAQLVLMYAEKWKGNFGDWVRKMRDSGKKHGVIVCAIAAKLARFIYRLMKDKVDYTPILSC

SEQ ID NO: 357043 - protein, 370 aa, unidentified
MHKRITVHVGLDVHKDSIEIALADGTQEGEVRHYGRIGGDLASLDRAVRQLGGAQRSLVFSYEAGPCGYAIYRHLTAQGHVCHVVAPSMTPRRPGERIKTDRRDCIKLARLARAGELTIVRVPDAQDEAIRDLVRARSDAVRNQRDARHRLKALLLRHEIRYAGKTAWTPAHERWLATVKLAHAAQQIVFQEYVDGVRESTQRIARLTQSLHDAVADWRWQGVVQALQSLRGIQLVNAATLVAEIGDIERFAHPRQLMAYLGLVPGEHSSGSHRRQGSITKTGNAHARCALIEAAWQYRLPARITPIIAKRQEHVSEPIRALAWKAQQRLCHRYRRLAARQLHKNKIVTALARELSGFVWAIVREARAVR

SEQ ID NO: 357044 - protein, 453 aa, unidentified
MAQGSGLTRGDRNRNRRIAVLREAVRRDRAVLAVDLGEDKQAAVLVDHEGRVLARKIVKAKAYQLGGLLEWAADGAARAGFAGVTVACEPTGHRWKAVMGLADAAGLGFVCVQPLAVHRSRVADDYTRDKTDHRDAWLIGRLVIRLDCYLPERAGEAWGRLRHLGARRFALVADVTSCMQQVGDLLGCAWPAALGAAGRPLESTTWLAAMSAVTGRCGGNPARLRTMGYEEFTAAVRRELPRWGGSKLRYRIVQGLWEALADTGGVAAERPGALERVRLLLGDWMSLRARLADAEERMTGMLGELGLTALVTSIDGLSAVGAAVILAETGDLTRFRSARAVVKHAGLNPAENTSATIAGRARITRRGRPRLRAAAWRAVWGGIRHNQVLQDKHAHLTGRDSGRLNDGQARTACAAALLRWLHAVVTTGQPWDPRIASGTVPSRAAAPLTRQAA

SEQ ID NO: 357045 - protein, 412 aa, unidentified
MQVIHCRCAGLDVHKATVVACVMITGVDGSVCSETKTFGTMTKDLLELSDWLKSHQVTHAAMESTGSYWKPVYNLLEGQVELLVINAQHIKAVPGRKTDVKDAEWIADLLRHGLLRGSFIPAKPQRELRELVRHRSNLVGRKAQSINELQRTLESTNIKLANVVTDITGVSATEMLQAMLAGQTNPEVLAEMARGRMKQKKGLLQRALEGKVEEHHRLMLSQLLMDIAHYEEQISEVGAMIAKRLGDQRQLLDRLDEIPGINQRVAEVILAEVGTEVKRFPTAAHLISWAGICPGNNQSGGKRRSSRIKPGNRSLRSAIVEAANAAGKKKDCYLSTMYRRLAGKRGKKRALIAVARTILQTCYYMIQRGSKYRDLGADYYDRRDPHGLARRLANRIQKLGFAVTLQPQPKAA

SEQ ID NO: 357046 - protein, 352 aa, unidentified
MEIQQFWAGLDIGEGKTAVCVTSDAGEVLLEQMATSDIPGVAEVLEPFTQIGGVRVSIEAGMGNQLARKLRKLGYPVVVFDTITSNKFLTIRRNKTDANDARGLADLGRMRRTAAVSVHVKSVEIQRLRSQLAFRDQLLRQRTALDSAVRALLRENGGDPKAAPPNKGWRGRLEQELIRLGRDEEVDLTAQVGPMVEVREALDRYVKSADKKVLQTAESNPVTKRFLQIPGVGPISALSFYSAIENPIRFATSADVGAYLGLVPRVKQSGTICQRSRITKAGNKLTRGHLVMAAGVLISRTKSECAIKDWGRQLAARAGHGKAKVAVARKLATVMLSLWKSGRDFQPFPIPS

SEQ ID NO: 357047 - protein, 317 aa, unidentified
MNNSENQTLINIGVDVGKAKLDIALHPSGQFFTIPNSEAHIRELVKILKGFPIERIVVEATGRHEHALVQACSHAGLPIIVVNPISVRRYAQAIGVLAKTDRIDAQVIAKYAATLKPEFKPIPDKSSQKIKDLLARRSQLMEMSTMEKNRLQILPKSLHSSIKSLLKTLQTQIKSITRQIEQEVAKVDHWQTKTDILTSVPGVGKVLAFTLLSELPELGELNRKEIAALVGVAPMNRDSGKLTGKRRIRGGRHRVRTVMFMAMLSAIQCNPVFKHFYERLKAQGKLPKVALIACMRKMIVMLNTMVKNQEPWREKTA

SEQ ID NO: 357048 - protein, 343 aa, unidentified
MKLSRIGVDLAKNVYQLHGVDRHGKTVWKRRLRRGQWLQALLDKAEPGCEIGMEACTGAHHWARELQVRGYTVRLIAPQFVKPYVKSNKNDANDAEAICEAMSRPHMRFVTVKSVEQQDIQATHRVRSEIKDQRNAKANQIRGLVAEYGLVAPTTLLALRRAIPCWLEDADNGLTDYFRSLLHGLWGDLVALDDRMAELDKQIKTLADSNEVTRRLQQLRGVGPLVATALVATVGTGEQYKKGRQMAAALGLTPRQCSSGDKQRLLGISKRGDVYLRTILIHGARAVVSQAKHREDRLSQWVTSISKRSHPNVAAVALANKTARMAWAMLRNEANYDPDFAIG

SEQ ID NO: 357049 - protein, 319 aa, unidentified
MQMIHFLGVDVSQDWFDVAIFGAAKPAQFQNNEAGFDAFAQHCVDLDWSKCFVVVEATGGYETRLLRYLIAQGAHVHRATPLHAKHFIRSLGLKAKTDKIDALALARYAVERHAELPVFVFPDKEQSAFNDLMMRRGDLVAFAAAEKARASQPRYKDAASSVMQSVEAMLGFIEAQIAAIEAELDALVEASPTLSRRIETLRTIKGVGRLSAYALQAFMPELGTLTRRTAASLAGCAPHPRDSGIKNRKRSVFGGRGTVKRMLFLAAMTARRYEPALKAFFEKLVATGKPKMVALTALMRKIIVIANARLKELNLQSTW

SEQ ID NO: 357050 - protein, 447 aa, unidentified
MTDLAVPPQPDFTACAGIDWGNKKKHAWALQAEGSSNIEQGEIPHTPEAIEEWAAGLRQRFPTGRLAIALEQSRGPLVFALSKYEHLVLYPLHPTSAADDRKIFRPSGAKSDGPDAAMHLDMLIRHRDKLRPLNPDTAETRALPLLTEDRRQLVNERTRLSNRLGADLKSYFPQVLQWFEDPYAPVALDFLERWPTLEELQKARPATLRKFFQEHRCRDEAKNQERLEAMRTAVVAITDFAVVTAGRAAARAAVRLLRELGQSVREYDRQIEALAQAHPDFAIFDSLPGAGAVLVPRLIAAFGTQPDRYQRAAGMQQYSGIAPVTEASGQQHWVHWRWSCPKFLRQTFHAWAAQSILHCDWAAAYSRAQRDDKKKSHHAAVRSLAYKWIRIAFRCWKDRTPYDNAPYELALKRHRKAAPEPKQSSPFELPIQWTSCGSFQKIALKNG

SEQ ID NO: 357051 - protein, 343 aa, unidentified
MQTITTIGLDIAKSVFQLHGIDTAGTVVIRRQLKRRYVLGFFEKLPPCLVGIEACATSHHWSRELQALGHTVRLIPPAYVKPYVKRQKNDCTDAEAICEAVGRPNMRFVPTKTVEQQSGLVLHRTRSLLIRQQTSVINAIRGHLAEFGMVAPVGRNGLEALLSVVASEDDTRLPEVVRASIEALALQLRALKAQILEFDRKILQWHRSNELSKRLDEIPGVGPALATALVASIADPRSFRSGRDFSAWIGLVPKQHSSGGKPRLGGITKQGDRYLRSLFTIGALAVIRYAKIHGTQHRPWLAALLARRPTKVAAIALANKIARMAWALMVKGERYREPAALAA

SEQ ID NO: 357052 - protein, 369 aa, unidentified
MEQNITVVGLDVSKRMLAMAVLPPGTDRIRENKMMENHPKVIEKEVRRLAVGGSLVVVYEAGPCGYPIHRQITQMGYRCAVIAPGLIPSRPTDRVKTDRRDAEKLARLWRAGELTEIRVPTCEEEAGRDLVRAREDVLVDRLRVRHRLSKFLLRQGRVYSQTRAWGVAYQIWLKKQRFEWRPLQQTLEAYARACEEAQAHLETLDQQVEDLAQREPYRTPVRNLRCLKGVSTLSALTMVVEVQDLHRFETAAAFMGFTGLVSSEHSSGEKVWRGGITKAGNAHLRRVLVEAAWSNRHNTVVSRELALRRRGCPAAVLQIARKAQDRLHRKYWRLVSRSKHPSLAVAAVARELAGFVWAIGQQIPSRTAA

SEQ ID NO: 357053 - protein, 346 aa, unidentified
MLYAGLDLSRKRLDFHLLDREGVTVEVGAAPPDADGLHSLTARLGRHGETIRAAIESMNGARFVHDRLELAGWQVEIADAQKVKGLAPLACKTDRIDAWVLAELSRRDLVPAIWLPDPRVRAERERARWRLHLVRHRSSLKQRVHAVLLTHGKPCPVSDLFGVRGRQLLARLGLPQPWQATIDASLRLIDELDREIGECERELRRLGADHRYVPLLCTVPGISWVLAYTIAAEIGDIGRFAAPRKLAGYSGLCPRVYQSGERDLRGPLAKQGPRYLRWALVEAATHACTAPVYRDRYQQTKARIGKQRGAKVAQIDLARRLSEAIWHMLSRGEPFAPKGATDPLAA

SEQ ID NO: 357054 - protein, 361 aa, unidentified
MRIIGCDLHARQQTLAMLDTETGEVVNLTLMHEGNQVREFYSQLLRPVLVGIEATGSMQWFLNLMEELGIECRVGHPATIRAAAPRRQKNDRLDADLILRLLAEDRFPAIWLPSKELLDLRALLLHRHQWVRIRTRIQNALQAIALANGLRRGPSLWSYDGQAQIAFLPLPPHASYRRSALQAMYKKMEEEIKPLTQQVAEQASQRSDAQLLMTHPGVGPVTALATEVFLGDPERFADGKALSSYVGLIPGERSSGRRQRLGKITKQGSPLLRFLWNEAGAHAVRHDPELKRFYRRKLVQKGLGKARVAVARKLGIRLWIMLRDKIAYQEFCRRGQKQQSGAACAGMPETGYGVNRHRPID

SEQ ID NO: 357055 - protein, 342 aa, unidentified
MAIAIVGLDLAKHVFQVHAVDEAGRAILRRQLRRAGVEAFFKTLPPCIVGMEACASAHHWARRISALGHTVRLIAPAKVKPYVQRGKKNDANDAAAIVEALMRPHMVFVPIKNEEQQAVLMLHRTRDLLVRQRTMLVNAIRAHLAEFGIVAAQGRRKVKDLITGLDNTEIPELARIALWQIADQIDECDKHIDVLERQILAWHKSDEASRNLATIPGIGPITASAIAATVPNPSAFRNGRQLAAWLGLVPRQHSSGGKDRLSGITKAGNTYIRRLLVIGATSVIRYARSKAPGTAEWLKKLLDRKSARLASVALANKMARIAWSVLTRGEVYRNTYPVPKPT

SEQ ID NO: 357056 - protein, 403 aa, unidentified
MNNVAGIDVSKGKSMVSVLRPFGEVVAKPFSIGHTGSELKELADYLKSLDGETRGVMEHTGRYYEPVARFLHDEGVFVSAVNPKLIKDYGNNTLRKVKTDKADSRKIARYGIDNWAELRQHTPMDTIRMQLKTLNRQQSLYTKTKTMMKNNLIALLDQTYPGVNALFDSPVREDGSQKWVDFATTFWHVDCVRNMSLTAFAERYRKWCKRHGYNFSQSKAVEVHAGAQDLIAMLPRDALTKTMVRQAIDALNAISASMERLKAEMQALAAQLPEYPVVMAMHGVGDSLGPQLMAELGDVTRFTHRNAITAFAGVDPGADQSGTHEAKSTRVSKSGAPELRRALFLVMDCLLKTQPQDDPVYRFMDKKRAEGKPYLVYMTAGANKFLRIYYGRVKEYLASLEGN

SEQ ID NO: 357057 - protein, 398 aa, unidentified
MTESSDYESVLVFIGVDVGKDTHHAVAINRSGKRLFDKALPNDENKLRSLISDLKQHGQILLVVDQPATIGALPVAVARSEGVLVGYLPGLAMRRIADLHAGEAKTDARNAAIIAEAARTLPHALRTLKLADEQIAELSMLCGFDDDLAAQTTQASNRIRGLLTQIHPAPERVLGPRLEHPAVLDLLQRYPSPEKLASLGEKKLAAQLCKLAPRLGKRLAADIAQALAEQTVVVPGTNAAAVVLPRLALQLITLRKQRDEVALEVEQRVLAHPLYPVLTSMPGVGVRTAARLLTEVACRAFASAAHLAAYAGLAPVTRRSGSSIRGEHPSRRGNKALKRALFLSAFAALRDPLSRAYYTRKMSQGKRHNQVLIALARRRCDVLFAMMRDGTFYTPQGS

SEQ ID NO: 357058 - protein, 387 aa, unidentified
MPQPNDLSRSLVALDQNSTIIAVVELSQSSWLVGGVLPGIERQPCKKLEPSAERLLGLLHRWRDEAVRAGSNITRIAVAFEVGRDGFWLARWLQAHGVEAHVIHPSSVAVSREHRRAKTDRLDTELLKRSFLGWLRGERGHCSMARVPTMLEEDAKRPNRERECLVGERTRIVNRMKGTLARLGIRTFKPTLRKAAERLATLHTPEGSPLPPNVSAELQHDMARLSLLISQIKEIENARQERLEQEPETGPHAMVRLLARIVGVGIETADMLVNEVLSRRMRDRKAVARYAGLTGSPDESGTKRREQGLARAGNARVRRGMIQLAWRFLLFQKESALALWYRARTADSRLGTRKTMIVALARKLLIALWRLVTTGETLEGVVLRPAG

SEQ ID NO: 357059 - protein, 419 aa, unidentified
MENSKTKKLRVVNGKTMIVTIDIGKTIHYGYFRGTDGQDINPFPFHNVKKSYEEFWMKALQFKQQKNLEDIVVGFESTGPYAEPLMSFLAKKPVRLVQVNPMHTKRLKELTGNSPNKTDSKDPRVIADVIALGHALTVVVPEGPAAELRRLTQARQRVSKNRNAMINQLHHLVFVIFPEFTQAIKMIASKSALYLLKNYPSPADIVDLGLDGLQTRLRKVSLGRLKQCQIKSLFEAAGNTAGIDNGRKSLLIEIKHLACCIEQESEFIAHLEKQMSQYLKQIPYSQNILSIKGIGEVTLAGLIGEVGDFRQFKTIAEIMKLAGLDLYEISSGKHQGQRHISKRGRSYLRKLLFFAAINTIRTKGIMNGPYRKMIDRGMPKVKAVVAISRKLLRIIFAMVRNHTTYKENYEQQYHEKLAA

SEQ ID NO: 357060 - protein, 355 aa, unidentified
MIDEHPEREVFAGVDTHTDTHHAAVVDPLGRPVADQEFPATTQGYRALLTWLGTFGQVQAVGVECTGSYGAGLTTVLTASGLVVVEVNVPDRGTRHSRGKSDPIDAYVAARAAASGRAQAIPKSRTGTVEALRQLRVTRASAIKARTQAINQLIGLRVTTPEPLRQTLAGLTRAALVNSCLRLRPEPDLGDPVHASRFALRQLARRIRRLTEEIDEVDEHLSVLTAAAAPELVALFGVGTETAGQLLVTAGDNPERLRSEAAFAALCGAAPVPASSGRTDRHRLSRGGDRQANRALHMIAVVRMRYCPRTRAYVARRVQQGLTKKDIIRCLKRFIAREVYHALNQPRARHAISTT

SEQ ID NO: 357061 - protein, 347 aa, unidentified
MLIIGCDFHPGFQQVAIFDNLTGEIQEKRLQHRAEAEQFYRGLAGQEVRVGMEACGHYPWFERLLAELGFELWFGDAAKVRASVVRKQKTDRRDAEHLLDLLRENRFPQIWVPSLEVRDVRQLLVHRHKQVQARTRTKNQLQAMALSQGVQKKYKLWTKAGREELEQLPLLPYAAQRRKQLLQSLDGLEAEISELDRRVADEARQRPEAVRLMTHPGVGPVTALALVLTLGPSDRFESAKQVGSYFGLIPSEDSSGGKQRLGRISKQGSSFLRFLLVEAGQTAARLDPQLKRFYRRLAARKNRSVAKVAVARKLATRLYLMLREDWTYTQLCQAVMQVSPSHSVAGQ

SEQ ID NO: 357062 - protein, 412 aa, unidentified
MKTVHTKRTGQAGRPSVGADRCVARVVPSLLPKSSNSCQGYPSPHLSQGRASLEQIKSIKEDCLLEAPLIFVGIDVSKAQLDVAIRPSAQSLSVTNDRAGIKSLIKHLKKLRPQLVVLEATGGLQRQVLSALIAGEIPVVMANPRHIRDFAKSIGQLAKTDRIDASVIAHYAEAVRPKPRPLPDEASLELRALSARRRQVVDMIVAEKNRLATASKVVKKRITAHIAYLEQELNDPDQDLDRFIEKNAAWKENQQILCSTPSIGPVSSRTLLVELPELGALDRKKISALVGVAPFPRDSGTLKGRRTIWGGRASVRSALFMATVVATRFNPVIRDFYKRLKAKGKPSKVCLVACMHKLLTILNAMIKNKIRWSENLLTRPLDMKHSCYISGLRLRLARSCTGEFIPSADCGF

SEQ ID NO: 357063 - protein, 342 aa, unidentified
MEEVTIIGIDLAKNVFQLHGAAADGRPVFRKKLTRLQFQRFMAAQPPRTVAMEACPSSHYWARELAKLGHSVKVISPQYVTPYVKRQKNDAADAEAIAEAATRPHMRFVEPKSAEQQARAVVFRVRQKVIAQRIELVNALRSHLYEFGYIAPVGLQHLPKLVAVLEDETSDLPRPARIACRGILRQIESLGAEIAALDAQIAELSKESRWARLLQTMPGVGPITAMAIESFAPPMETFRRGRDFAAWLGLVPRQSSSGGKARLGKVSKAGQHDIRRLLVVGAMAATVGACRRGIPNDTWLGKLMLRKPRILVAIALANKMARRIWAMLTKGESYRDPALAAA

SEQ ID NO: 357064 - protein, 366 aa, unidentified
MEKTIYIGMDVHKTNYTLCAMGVEGRKYFAETQIEPDIKILVKYFKRIQEQHTYARLVCGYEAGCLGYSLYNEVVAKGYECVILAPTKMPHIQNEIKTDKRDARKIAECLANGTYSKVYVVSETDNAVKEYIRMRNASKENLKATKQQIISLCTRHGKHYPGRSYWTKAHLEWLKKVEFDNALMNETLNEYMITFNYLTDKIERFDERIEELSKQKEYAEKTSMLGCFVGIKTHTALSAVSEIGDFSRFPTATQFASFLGLVPGEHSSGGSQNRRGITKTGNTHLRKLLIEAANCYSRCTTKKSAALKARQKGNSPDVIAYADKANDRMRRKYMRIAMRSKSNIAKCAVARELACYIWGMMNEKIY

SEQ ID NO: 357065 - protein, 412 aa, unidentified
MEVVYACCCGLDVHAKTVVACLVTKGRKEIRTFATMTDELLQLGDWLSSAGCTHVAIESTGVYWKPVFNILESLLKVILVNARHIKAVPGRKTDVRDCEWLADLLRHGLLKASFIPPREIRELRELLRYRQTVVTEHTAVANRITKLIESANIKLGQVASEVLGLSGRLMLRALAAGETNAETLAELAQGKLKSKKAELRRALEGCLTQVQRWVLTELLTRVEELEAALTRVETRIGEEVAACPDPFVPEAVELLESIPGVGKRTAQTIVAEIGVEMSRFPSAKHLASWAGVCPGNHESAGKRKSGHPTKGNKSVRTILVEAAWAATHAKGTFLQAKYHRLVKRMPKQKALGAIAHRLLVISYHLLSRRVPYAELGTAPVDEQQVTRQRRRLVEQLVGLGVKVTLDEGGAVA

SEQ ID NO: 357066 - protein, 602 aa, unidentified
MGKRGPAPEPIPLRILKGRGNGKDVAGRPIPKVPAFERCAPEAPGWLDPEALAEWSRIVPALDAVGSIKPEDRGIITARCVAWSRAVHAEAIIAAEGCTVVNPQSGRLATHPAVYIAAAAWRSKRTMPVKTCVDAGDKDVLLMSLTGLVSQNSQEDVVVQGSGLSRGDKRRNAKLARLRELVPTDNAILGIDLADEKQAIVLTDHDSQVLARTRVKAKAWRLGPVLRWGREQARKHGFADVTVGCEPTGHRWRVLDQLAAQQNMVLVCVQPLLTGRARESEDYTRDKRDDKDAVLIARLVAQLDCYAPERTDETWARLRHLGARRDRLISESTACVQQLRDLLECAWPAVLSAAAQPFDSVNWCAALAVVLERCNGDPRRLARLGPRGFEAAVRRELPRWGGQRAWRRIITAVFTALTDAAGVFAQRRGALERARWVLADWRTCQARLAEVETRMVEVLDELGLTEYLTSIPGISAVGAAAILAETGDPTRFDSPRALVKHAGLCPRENTSGTYTGQSRISRRGRPRLRLAAWRAVWGALPNNPVMAARYQHLTTRERNQLNDGQARAAIAAALLRWIHVIVTRRVTWDAALAGANELPAAA

SEQ ID NO: 357067 - protein, 359 aa, unidentified
MKIVGCDFHPSWQQVAVFDPETGEIAELKLVNGDGEAERFYRELEAPALVGIEACGNSQWFIELVEQLGHVIWVGDAAKIRASYVRRQKTDWRDAGHILKLLMENRFPRLWTPTAEQRDLRQLLIHRHKLVEIRTRVKNGLQHLALNRGIQKHSRLWSVRGRAYIEKLPLEGWTARRREDLLRLLAELDRHLGELDEAATRAAEDHPQARLLMTQPGVGPITSLAFVLTIGDVKRFEHSNQVSSYLGLIPSEHTSGGKQRLGSISKQGNRFMRQLLVEAAQSVTRLDEGFRKEYAARCHHKPKAVAKVAAARKLAVRLYWMLRQNVGYPEIALIESSPRVPLVGASQTEGLIERSRIQH

SEQ ID NO: 357068 - protein, 242 aa, unidentified
MSGAVVGIDIAKRKFDVALFLKGKFKHKACMNNKQGFEDLSRWLKKQGVEHVRVCMEATGTYGDELATYLYDAGHLVSIVNPVRIKGFAQSELLRTKNDKVDAGLIARFCVAMNPGTWTSPPPEIRRLQSLVRRADTLIDMRTQEQNRLGTTHETIEPSIKEHIGYLDQEIEKLKRQIAEVIDHDPNLRGKRDLLDSIPGIGETTIAVILSALHVFEGVKCVQKTVAFIGLAPKETLSGSSI

SEQ ID NO: 357069 - protein, 341 aa, unidentified
MTEVSTIGLDLAKNVFQAHGADAAGAPVFRRKLRRDQVLAFFASQPSCVVAMEACPGAHHWGREIGKLGHTVKLIAPAYVKPFVKRQKNDAADAEAICESAQRPTMRFVAVKSEAKQASAVIFRTRDVLVGQRTQLINAIRGHLAEYGQIAPQGPAHVERLIAQIEDPASDLPPAARASLAVLVGTLRHLQEQTATLDAEIAARAKADDTARRLMSVPGIGPLIATAIEALAPPVETFRSGRDFAAWVGLTPVQRSTGGKERLGRTSRMGERTLRRLLIIAASAVVRWAKRKGVPAESWLGQMLARKPPMLVIVAVANKNARIAWALLTKGGVYRAPAVTA

SEQ ID NO: 357070 - protein, 337 aa, unidentified
MGLYCGIDLHSNNHVLTVIDEADRRVYERRLPNDLAITKAALEPHRAELVAVAVESTFNWYWLVDGLMEAGYAVRLVNTAAVRQYEGLKHTDDEHDAFWLAHLMRLGILPTGYIYPKSERGLRDLARQRMRLVQHRSSLITSVQNQVWRSTAVRLHSETIKGRGTRAWPELSDPDLAVSVKAGRAAIDTLTVQIERLEKLILKRVEPSPQFRMLKTVTGIGRILAMTITLEVGDIGRFAGVGEFASYCRCVDSQRLSNGKKKGEANRKCGNRYLAWAFMEAAHFAIRNLPAAKRFYERKRRQRHAVLAVKALAHKLARACFYVLRDQVPFAPERLFV

SEQ ID NO: 357071 - protein, 320 aa, unidentified
MRNAVGLDISKLTFDASAMVGNAEYSAKFDNDSKGLDQFSDRLKSLGCQNLHICMEATGNYYEEVADYFAQYYSVYVVNPLKISKYAESRFKRTKTGKQDAKLIAQYCRSAKESELVKRQKPTDEQYRLSRMIAAYAQIKSECAAMKNRHHAAKDEEAAKAYAQIIKAMNEQLEVLKEKIKEQTEKPNCKEGVKRLETIPAIGRMTAAVLFHHLTSSKFETSNKFAAFAGLSPQQKESGTSVRGKGKLTKFGNRKLRAVLFMPAMVAYRIRAFPGFIARLEEKKKPKKVIIAALMRKLAVIAYHVHKKGGDYDPSRYKSA

SEQ ID NO: 357072 - protein, 344 aa, unidentified
MLMVLNVVGGVDTHADTHVAAAIDSNGGVLGVESFPADQAGYRELFKWLVGFGDVTRVGVEGTGSWGVGLNRFLHNQDITVVEVDRPNRQTRRKVGKSDPTDAVSAARAALSGAASVTPKTRNGPVEQMRVLLVARRSARQQRIQTLNQLRHLVFTAPETIRVRFKDRYKTGLVTEAAKLRPRKGSDPILFTTQTMMRGLARRIQQLTVEMRTIDQALIELLDEVAPSLLELHGVGVDTAATLLVTAGDNPDRVHSEGSWAHLCGVTPIPASSGKTTRYRLNRGGDRQANAALHRIVLTRMSNHPDTRTYVTRRRGEGLSTREVMRCLKRYVARQTFKHLPRTI

SEQ ID NO: 357073 - protein, 353 aa, unidentified
MKPKTESDTALPMVIGVDIGKEVFHLIGFGGDGKIVFRRKIKRLGFAAVFEKVPPCIVGMEACLSAHFVSRTLRTLGHEPRIIPAIYVKPFVKGQKNDYNDAEAIAEAALRPNLRFVQEKSQDQLDLQACHRVRARLVSRRTATINQIRAFLIEQGIAVRSGPRALRTSLCAILENRKDEISPRMARLILDLYKDWCHLDERIDTVTGEIEELSRIEAKCQRLMTVPGIGPVISTGLVAAIGSGEAFERGRDFGAWLGLVPRQYSTGGRSVLGRISKRGSKYLRTLLIQAAKVLLMRPRNWPRYSFGAWLKTASERLHRNKLAVALANKLARIAWSVLRHDKAFDTHLETAAI

SEQ ID NO: 357074 - protein, 356 aa, unidentified
MSRNIKYIGMDVHKEAIVIAVLNGSGELVMESVVETKASSILQFIHGLRGELHVTWEEGTWAAWLYDLLQPHVHRVLVCNPRRNALLKEGNKSDKVDARKLADLLRTGMLRPVYHGEHGLRTLRELARSYQTLSQDLNRVMNRLKALYRGWGIPCNGTQVYAPRYREEWLHNIEHAGVRRRAELLYQQLDGLQQLRRTLRPELLAESRKHKAAKLLRQIPCIGPIRAARLIALMQTPHRFRSKRQLWTYSGLGIETRDSAQYRFVRGQLQRAKKPQQIRGLNQNHNHEMKEIFKGAATRASCGVGPLREFSVALLAKGMKPEMARLTLARKIAAITLTLWKKEERFDAEQLKTQAA

SEQ ID NO: 357075 - protein, 340 aa, unidentified
MRLYTGIDLHSSNSYLAIIDETGKRVFKRKLPNDPEQILSALSPYKDAITGIVIESTYNWYWLVDALMAEGYKVHLANPSEIKQYTGLKYSDDQHDAFWLAEMLRLGILPEGYIYPKEDRPIRDLLRKRSHLVKLRTSLIISLQNIICRNNGFRLKTNDVKALNTDRVAPFLEQNEDLALAGKISKESIDFLTLKIKSVERVIEERMELREPYRNLLTLQGVGKTLGLTIMLETGPISRFAQVGNYCSYCRKVSTKWISNDKKKGKGNKKSGNKYLAWAFSEAAEIARRYYPEARAFYQRKMQKTNAMIAHQALSHKLARAAYYIMRDGVSFMPEKLFTQ

SEQ ID NO: 357076 - protein, 267 aa, unidentified
MRVIGLDVHRSFAEVAILENGTIQHAGRFKLEHWRVIAFGKTLKRNDEVVLEATGNTSVIVRLLTPFVRRVVVANPLQVRSIAWAKVKTDKIDAGVLAKLHASGFLPEVWIPNEETEALRRRIAERNQLVSQMTRLKNRVHSVLHANLIPRYAGKLFSERGRTWLDTQPLPEDQRRQIGRHIDEHDRIAIELVALEKNLAENALRDDRVKRLMTIGGVNAIVALGVLAAIGDVARFSSPQKLVSYFGLNQRPMWRSCGSWCLGANRN

SEQ ID NO: 357077 - protein, 360 aa, unidentified
MTTMTETRCRVTGGVDTHKDAHLATALDEVGRVLGTEAFPATLAGYRQLSRWLRSFGEVVAVGVEGTGSWGAGLARFLTAAGVAVIEVTRPNRQHRRRHGKSDPADAIGAARAVLSGEATGTPKAQTGTVEAMRMLRVARRSAVKARTQAANQLHAVIDTAPADLRQRLGSVNTEQIVAVAARFHRRHPGTPAEAARLALRTLARRWEVLDDEITMLDAHLDELTAAVAPALRAINGVGPQNAAALLAAAGDNPDRLRSAASFAALCGTSPIDASSGRQQRHRLNRGGDRQANCALYYIVMSRLRWHQPTKNYMARRIAEGRTPKEVIRCLKRYVAIEVHRAITTDLGTRATSKPSRIAA

SEQ ID NO: 357078 - protein, 415 aa, unidentified
MKVVFPTCCGVDVHKSFLVATIIKTPKDSLQPSYQKKRFSTFNSDLNQFADWLHEKDCLDVCMESTGKYWVPVFNILEKRGIRVVIANPKWVKAVKGNKDDTKDSKWIGDLFRIGLVKSSFIPAKDIRILRELTRYRYKLTSMKSSEKNRFQNAFTVCNVALDSVVSDMFGKSATAITDYLTSDEDFDPQHCVSLLHRSLKKKADDVLASIEGYEITLEQKYRIGIVRDHLHYIEKLIERVDLCINAMVEKYDGAISLLCTIPGIDRSSAITVISEIGVDMAQFGSSKRLCCWAGLTPGNNESAGKKKSARISRAGVYLKPALVQVAHAAVKDKLNPYYALKYERIAKRRGKKRAIIAIARMILTAIYSMLSTGEIWNPVDLFKVDIPEHLKEQQLQKAVKQAVRFLEAQGLKVS

SEQ ID NO: 357079 - protein, 422 aa, unidentified
MLEETQEREEIIERVASLDIGKAEVVCCARVPGGPGKTRRVQEVTTYRTMTRSLLVMVDRLRELGVTRVVMEATSDYWKPPFYVLEAAGFETWLVNAKDVKHLPGRPKTDRLDAVWLCKVAERQMLRPSFVPPPPIRVLRDLTRYRSDLVAARTAEKQRVEKLLEDAQIKLSVVVSDVFGVSGRDMLAALIAGQRDPKVLAQFARGRMRGKITDLEEAFTGRFSDHHAFLLTKMLHRIDEIAADIAELDARIDAEIAPFAHAVARLDEIPGVGHTAACVIVAEIGVDMSRFPTAAHLSSWAKFAPGVKESAGRKKGNGATGHGNRYLAAALGETAVSAGRTDTFLGERYRRIARRRGKKKAIVAVGRSILIIVWHLLSDPEAPFIDLGPDFYNAHRSTGAVTRQHVRQLEALGYKVTLEPAA

SEQ ID NO: 357080 - protein, 424 aa, unidentified
MIPVPSLRALRHKLLYLEGILKIKHMDRNRTVPGLDVHKDTIYLCIMGHDEAIIFEKTYGVLTTELRQMCNDMVEHGVTEAAMESTAVYWVPVWNELCESMDLKLVNPYFIKQLPGRKSDVKDAQWIAECLLKNLIKGSFVPKPIVQDMRKLNRRIMDLNEDINYNSNKLDAALQRCGFRLSNYVSGTNSKSYQKVLQAIINGERDPEVLVKMVHGRTTNKHGKGTIKAAVMGSFSQTDITVFRQLKEMLDTINRQIDECQKELTDLCEKHFPEEYKRIQTIPGVKERAATAIIAETGVDMKMFATAAMLVGWCGLKPRNDVSNGRYKSRKVTHGNKYLRRILIEVAWAASRKKNCFFSNFSYVQVTQKHKSKMKIQVAIARKILVAVWHMLSKGEDFIDIYHRRLEQQRQMEEQLKSLASKMA

SEQ ID NO: 357081 - protein, 334 aa, unidentified
MRSTKYIIGVDVSKPKLDYYIADSVRGTVDNTTGGISQLLDTMAGGLEGTPHVCLEHTGIYGRPLAEACHARGIDFSLLDSKKIHHYKKARYGMRAKTDRHDAQLIRDYALDFKPAPTVPATQRQIQLRELDNLRALLVSQCAELKTSRRQATSQSVITHYDRRIASLGKETAKLEKRIAALLDADEAMALLRKRFLQVKGVGPATASAVLVHLDGVIGKVADKRIASLTGLAPVPDESGNTSLPRRIQGGRLRVRNALYMASLSASRYNPVLKTFYKRLKQDKRKTSKCALVAVARKLVCLLNLIARDPDFKPIGTRATPLPSPPAPLSSIPS

SEQ ID NO: 357082 - protein, 344 aa, unidentified
MKISTLSIDLAKNVFQVAGFNSNHKRECNKRLNRAKINAFIANIPPCRIVMEACYSSHYWGRVFSSYGHTVDLIPAQHVTPFVRGNKNDSNDALAIYEASLRPNIKFVPIKTEAQQEILMLHKIRERLLQNRIAATNQLRGLLVDFGYVFPVGIKAFEQGIIALESDSELRPQLRIMVSDIYTEYKTLVKRIKAIEAMLTELVERDTNAKILHSIPGVGVLNASAYAASIGNGQAFKSAKELGVWLGLTPKQYASGDKSKMSGITKRGNSYLRKQLIHGARALIARSHHKTDALSLWINQLREKKHFNCVVVATAHRLARLMWVLLTKQTLYSPQYVQNTQKEA

SEQ ID NO: 357083 - protein, 502 aa, unidentified
MLKMNCSFYYMGGDVSKGYSDFVILNHDKEIEEPNFQLDDTPKGHKILGDRLREFFARRPHCTLYVGLESTGGYESNWYNTFLNLGESTSPTSPGYNINVVRLNPLGVRRHLESGLARNKTDKISARVIADYLISHGKKIIYNQPDSQMSLRKYWNYIKLLKKQKTQLMNRFEKALYNSNPELLTYCKNGVSQWLFKVVEKYPTAYLLARASEETLAQIPYVTLVRAKELISNAKISIGAEQDYVAARRIRSLVSRIANQEQLIDEEIEEMSKHCSGEDLEILTSFTGIGIYSAVGLLFIIGEVNRFETSKKMSSYIGVHPVIGDSGDGKKMARMSKKGSKEARVILFNVAKSAIVDNEMIKELYEGYLEKGKCGMSALGIMMHKIFRIIYGMLKNRQKYDPSIDEANRNKTREKEKNTDKSKQESDKNRRYQPHDQNAPISRRQAQKRNNLQLQKNSNDNDNDNDVEGVGVGEVDGDEENVMNKKGKKTRRSRLDKDKMKT

SEQ ID NO: 357084 - protein, 356 aa, unidentified
MSIVADNHPFVVGVDTHARKHVYTILIAATGVVVDSKDFPTTTAGLNRAIDWVARRTQADADTLWVIEGAASYGAIITGTVASHGYPVAEAPRMDAKQHHGVGKSDALDAHRIAAAALPLPVDKLRRPRLNDGVRQAIQILVTARNSMTKDRTRSINALTAIVRYNPLGMDVRKALKKTQITEISRWRPRQEELSLSVARAEAIRLAKHVVELGVNLIDNEHQLAELVQISEAAPLLQEKGMATISAARCFTAWSHHGRVSTEAEFAALAGVNPIPASSGNTVRHRLNRGGDRVLNSALHLVAVSKMGHDPETRAYVEKRIKEGKTKKETLRCLKRYIARRVFKILNTQQPVMQPA

SEQ ID NO: 357085 - protein, 333 aa, unidentified
MVYAALDIHKKVFQAAVLDAESGELVQERLPASREALNDWATRWQGKLEAVALEATTGWRWVWRELSARGFEVRLCDPGQARALLGSKRRPKTDRLDAAWLARLLAKEMLPTCWLPPADIQYLRDRTRLRRALAQDRMRFAQRLHALLTHEGWPCSRGRLLSVAGQRWARSLALPPAARANVEAMFALIAVLDEQLAVIDAELRQRARSDRRLQALCTIFGVGPVLAAHILAELGEAGRFRRARQAVRVAGLDPVVSESADTRRRGKLSKQGSPELRWALVEAAHHACQRRSPDHSLYLAGKDRSGSKPAALTVARKIARRAYHVLAELEQAA

SEQ ID NO: 357086 - protein, 384 aa, unidentified
MQKPNDLNQSRIVLKQDSTLIAVIEMSLSSWLVAGIVPGVERQPLKKLAVDESALLKLLNRWREEAEKAGRRIERITVAFEAGRDGFWLARWLRARGIEAHVIHASSVAVSREHRRAKTDRLDTGLLKRAFIGWLRGERDHCKMVAIPTTKDEDAKRPHRERQSLVGEQTRIVNRMKAALIRLGIRGFNPKLKKAAGRLEDLRTPEGEPIPPNTLAELRRDIERRRLVSDQIRQIEEARLERMEQAPGDGPHAMVRLIARVIGVGIETADMLVHEVLSRKLRDRRAVARYAGLTGAPDESGSKRREKGLAKAGNARVRGGMIQLAWRFLLFQKDSALAQWYRTRTEGGRNRKTMIVALARKLLIALWRLVTTGEVPAGVVLRAA

SEQ ID NO: 357087 - protein, 322 aa, unidentified
MQVNAILGVDISKKKFDVCLLVDSKKRHKVFQNNQDGFAKLVVWCNGHGANLTHLCLEATSWYGEDLATFMHDLGHNVSIVNPAQIKAFGKSELLRNKTDKSDAAMIARFCIANKPALWKPITPEMRHLRELYRCMQSLKDDKVQQTNRLENKNMHSSCKEAISKVILAIEEQIIVLEKEINEHINNYPHLKDMVENLKTIKGIGYLTAVAVVAEMPSVDNFDNAKQFTAFAGLNPGHYQSGSSVSKRSCICKIGSERIRKALYMPAIVVKNHNNHFQKFCQRLASKGKCPKVIVLALMRKLMHVFFGILKNNQPFNCNFVG

SEQ ID NO: 357088 - protein, 441 aa, unidentified
MEEKREEKLPQVSEFPEYCTPVGVTVGRIRKAIHPSGTKRFIGLDLSKQSCYVCIINRDGQIELLGKFSLQSDKRSELYEKLQEGDLVLMEASTGTFNIARAMNKLPGVLACVVNPHSTRINETKKKTDKEDSLFLAKLILRTPVEELQLVSIPSDQEMENRDVISHYRQVDNRHTQVVNQLHALFFDKGFPEVGKTHDLHTKVGRYGAIEKYFGTDRAYSFTKRIAKDLSKELSLLEEQQAVGERQMARIVKQNDRVAAILGSIPGVGLKTIAAFIAFVGDVHRFSQGKQLSAYCGLVPRVYQSGQKDGIRKITKEGQAALREYLVEAVFAMMRTKFNFPLKEKYLELRQRMKSRKAAIAVARKLVVMIFSMLKNGTLYMVEKEENREQVAAYHKRKYIQSVGRYYKFRESCKDISAMIEITNTFYSNELGVLKFKQQGA

SEQ ID NO: 357089 - protein, 452 aa, unidentified
MQVMYRRCCGLDVHKDSITATILVFEQGKEREKRTKEFGTHWKELQRLAQWLRSCHVEKVAMESTGVYWKPVWNVLEKTLSLVLANPYQVKNMPSRKTDAKDSEWLAELLAHGLIRPSFVPGEEIRDLRDLMRYRVKLTGEYNRTHNRIHKVLEDANIKLDTVLSDLLGASGQAMVRGIVKGHTDPGWLADYAKGTLRGKREELELALRGRIREHHRFMLQELLADLDFIASKIGRLEVELARRMEPHAETVTRLCTIPGLDVLTAWTLLAELGTDMSVFASPGHAASWAGLCPGNRESGGKRLSNRAKKGNRWLRRAMCQAAWAVSHKNDCYLQANFLRRVAKGGLKKAVLATAHQLLVIAYCMIRDGSVYRELGGNHFDTLRPQRTTSKLVRRLQKLGYQVILQPISTQPGQPKPRRGRPCKCKERGIDCKHVAAVPPAPAPTTQQQLSD

SEQ ID NO: 357090 - protein, 379 aa, unidentified
MEIITQNEKILYIGIDVHKDTYSLCCFDFFRNELSDEMTIKATTKAVIKYLEAIKKKHKEEILFACGYEAGPTGYGLCRGLQKAGYGCVVMAPTTMSNPDGKKRVKTDRIDARAIARILAYKSYSQVHLPSEEMEALKEYTRARDAKKRMFKKAKQELLSFLLRNGKTYPESGNYWTEKFFKWIKTVQFSEKWMQEAFNEYLAEVYSLKAKIELMDMKIREIAELEIIKDKVDKLVCFSGIDVTTAVETVVEIHDFTRFATAAQFVSYLGLCPGEDSSGKTKNMLSLTKTGNCRVRALFCESAKAIKRTNPYGQKSKRILERQKNASPEIVAYADKATKRIRTKMKHLEERGKNYNVSSAAGARELACFVWGMMNGKIA

SEQ ID NO: 357091 - protein, 391 aa, unidentified
MIYVGIDVAKDKHDCFITNSDGEVLFKAFTITNNLDGFNDLYQKIETVMKDITKVKVGLEATGHYSYNLLGYLIDKGLPTYVINPLHTNLYRKSLSLRQTKTDKVDARTIASMLMSDVNLKSYSDTFYHNEELKSLTRYRFDKVKERAKLKSSVSRLICILFPELEKLVPTLHMASVYALLSEFPGAKQVANAHLTRLTNLLSEASKGRYSKDTAITFRDAARTSIGSNMPAKSLELKHTIKLIKELDSEIDEIENEIKIIMDEINSPILSIPGINYRMGAMIIAEIGDFSRFDSPDKILAYAGFSPSTYQSGHLYGAYAHMEKRGSRYLRYALYNAAKYVCHWDPTFTAYLAKKRAEGKHYNVAISHAVKKLIRVIYHLEKTNQQYIKAS

SEQ ID NO: 357092 - protein, 349 aa, unidentified
MRFTTKQHRFYCGIDLHARTMYVCIMDHEGTILTHRNMPAATETLADVLQPYREDLVLAVECIFTWYWVADLCSRIGVEFVLGHALYMKAIHGAKVKNDKIDSLKIAALLRSGMLPMAYVYPQLMRSTRDLLRRRLYLSRQHAQLQTHIQNTNTQYNLPSFEKRIDRSSNRTGIEDRFTDPMVRTTVQVDAALMDALHKQILAIERQINAQVPEHDPVAIHLLRTIPGVGKILALVIFYEIHDINRFPKVGNFISYARLVKCTHESAGKRRTGKNLKIGNVHLKWAFSEAACLFLRRNERAKFYHKRLVSKYGNAKALSIIAQKLGRTVYVMLKRRTPFDAKLFFEIAR

SEQ ID NO: 357093 - protein, 407 aa, unidentified
MLAIGIDWATRTHVAVFMTKPTEALARVAFADTYEGYLHLLDRIRAHAAKLKTDEVAFAIERKDLRLVDFLLANSIAGYLVDPNRMEGYRLRYCSSGAKDDDRDGFVLADVLLKDRDQLAPIRNESEAIQRLRMLLADRAGFVTDQVVLTSRLRTCLREYYPAALEIFADVTGPTALAFLARYPTLDRTKNLDDQTLRDFLKAHHAFSRQRMRRILGALVKPAIPVPRVIVEVKHKTVLDLVAQLQAVQQIIDRCDADIRTAMAGNLETKRFDGLPGAGTIVSGTLYVLFGDDRARFANAHEVQSYVGTAPRTIQSGQQRAVGFRFRCHQGYRAVITRWAFSSLRQAQWAKRYYNQKRKEGKTHYHALRCLANILLKLAFTIWKHQTGYDENNYLAQVARHRMNNEE

SEQ ID NO: 357094 - protein, 334 aa, unidentified
MEQITTVGIDLAKNVFSLHGVDAAGKTLLRRTVRRDRLAETVAALPPCLIGMEACSGAHDWGRRFQGHGHTVKLMAPKFVAPYRKSGKNDGNDAEAICEAVTRPSMRFVPLKSVEQQALLALHRVRQGFVVERTALINRLRGLMSEFGQVLALGSVTVRRQAAQAAEPLPELARGAIGDLLEQLRVLDERIAKYDKQIEAQARLSEPARRLMQIRGIGPTTALAIVATIGDAREFKNGRQFAAWIGLVPAQHSTGGKSRLGHISKRGDAYLRNLFVQGARSVLQVAGAHQDRISRWALELQQRRGYYRALVAIANKNARIAWALLAKRESLHRT

SEQ ID NO: 357095 - protein, 411 aa, unidentified
MTKEDFIYVGIDLHKEIHTAVMIDCYNQKLGEITFPNSPAAFPKLVTKVKKCNTDGKEVVYGLENAYGYGRALAVWLIDKGYLVKDVNTAISHRQAKHRGAMYRKSDSDDAEAIALATLNMLDKLPDACPNDAYWSLGQLVHRRDNIMKQRTRLVNQLHEQLCIAYPSYKSFFNDISRPTALYFWEHYPSRKYLRGKSVEDLRKELVPVSHNRCSTKNCEKILDAVASDKVKNNAYQDARDMVTLSIVSDLQHYDSQLAEVDKMLEQMYKMLGCTLTTILGVNVIIAVKILAEIGDIKRFSNANKLAQFAGIAPLHLSSSGKGKDVATKQGNRRLQATIYFLAIQMVQLSSKGTPRNPVVRAYYEKRKAEGKTSQQALICISRRLISIIYGMLKNGTEYRMPVVENAGENR

SEQ ID NO: 357096 - protein, 410 aa, unidentified
MQALVERGCGLDVHQATVVACLLIVRKDGKVQKQMRTFGTTTQELLSLREWLLSEGCTHVAMESTGVYWKPVYTILEGALEIVVANAQHVKKVPGRKTDVKDAEWIADLLCHGLLRSSFVPPKPIRELRDLTRYRRKLVESQAAERNRLLKLLETANIKLASVATDVFGMSGRLMLRALVEGKATPQEMAELAKGKLRKKIPELEPALEGKVEEHHRFLLRLQLDRLEAAEKDLAVLEQRIQEKLKAYEAQLTLLDEIPGVDWTLAAGIIAEMGVDMSVFGSVSQLASWAGVCPGNNESAGKRKSSRIPKGNVYLKTALVEAANSAAKAKGTYLRDKFYRLKARRGYKRAAVAVAHKILVAIYYMLSHRVCYNELGDAYLDKRNKHQLTRNLILRLERLGYSVTLEQKAA

SEQ ID NO: 357097 - protein, 362 aa, unidentified
MKITTVGLDLAKSVFQVHAVDGDGNVVVRRALRRAQVLTFFKQTPPCLVGMEACGTSHFWARELSKFGHEVRLMPPAYVKPYVERGKTDANDAEAICEAVTRPTMRFVPIKSVEQQAALALHRTRDLLVKQRTQLVNMIRSLLAEFGIETARGLHHALELAARIAGGATPDVPELTVRIITSLAGQIGDLQVRVTSLEKELLAWHRANELSQRLSTIPGIGIISATALAASVTDPSRFRSGRQFAASLGLTPRQNSSGGKERMGRISRMGDRYLRRLLVVGMTSLVRRARANPSAVDPRIVAMLARKPVRVATVAMANRAARVAWSIMTRGEIYRAPTGLAAWPRAEAAAACPTATGSARRI

SEQ ID NO: 357098 - protein, 399 aa, unidentified
MEHHSEAFVALDTAKLRNTVAIADAGRNGEIRYLGEIDNTEETRKLVAKLASKHARLTFCYEAGPTGYGLYRLIKSIGHDCIVVAPSLIPSKPGDRVKTNRRDAVNLVKLLRAGELTAVWVPDERHEAMRNLVRARDAAVKDYRIKRQNVSSLLLRLGRYYPGKKTWGRTHINWLAGLKLEHREQRIAFEEMLLAVGQVRERIERLEGAMREAMADWTLATVVEAVQAMRGIDMIGAIAFLAELGDLSRFENPRQLMAYLGLTPSERSTGESVNRGGITKAGNTRARRLLIEAAWSYRFPPRVSKDMQTRIGAAPRTAREIAWKAQMRLCGRFRTLTRKGKRPTIVVTAIARELSAFIWAINREVTGISCNGELTNRPGLWTARAIKGSTGPQPLRPHT

SEQ ID NO: 357099 - protein, 354 aa, unidentified
MLGLFTSTTMREAPVDEYDGRQYVGIDLHRRRSVIVRMTPEGERLGSVVRIDNDPFTLAQQVALWGESPEVVLEATYGWYWAADVLADAGANVHLAHPLGVKGFAYRRVKNDEFDARDLVDLLRMGRLPEAWIAPPEVRGLREEVRHRCKLVALRSGLKAQVHSTLAKQGVQVAVSDLFGVGGTKLLDEVGLDAPYQARVLSLRRLIDAFTFEIDILAKRTAAQLAHHPGYRAVQTIPGVGPVLGAVFVAEIGDVTRFPRPEKLCSWAGMTPKHRESDTKVHRGRITKQGNHLVRWAAVEAVQRLYGGPIGHTRARLTERRGANIAKVAAARKLLTLVFYGLRDGHIRCLARPA

SEQ ID NO: 357100 - protein, 359 aa, unidentified
MVELSKIGMKTVGLDLGDRSSHFVVLDAEGQLVEEGRVATREPALRKHFSGCERMRIALETGTHSPWVSRLLKDCGHEVIVANSRKLRLIYENRRKNDRVDAMYLARLARLDPQLLSPIAHRGPQAQKDLALLHSRDALVKARTLLINHSRGLVKSIGQRLPSGSSEAFPRKVLGAIPGSLQAALLPVLEMITSLNAQIKALDRCIDALAEKFYPETKLLRQITGVGPITSLGYVLILEDPERFRKSRAVGSYLGLTPGSNKSGQSDPQMRITKEGDALLRRLLVSAAQYILGPFGPDTDLRRFGLRIAQRGGKNAKKRAVVAVARKLAVLLHHLWRDGEVYEPLYQQTRKAARLGKIA

SEQ ID NO: 357101 - protein, 351 aa, unidentified
MFFAGIDAHTRYVVVVVINKIGERVLGPTRVRVSQPRRLLELLAPYRPLDAIMETSSSWPWLHELLAGADIHFVLAHARRLRAIAEANYKRDDLDAELLARMRVAGLIPEVYPTPFAQREWATLLRHRTTLVTQRTALVNRIHAQLHLRGLHLARGRLLTRDGRRWIRTDAWPHLGLEQRALVRSHLRVIAGLRPLIRALDRHIAHVAATIPQAQLLGTITGVGAQRALVICAEALPISRFRTPGHLASYAGLVPRSKQSGLGPVRHGPIPAGANRWLRGALVRAVVSHVQHAPDSWLTHYYVAQKARVGWPTARVAAARKLARAIHAMLRRNTGWKNDPARGELQETHAA

SEQ ID NO: 357102 - protein, 460 aa, unidentified
MVRKARRASQSQQLPPSLKQVHLNAAGIDVGAESHYVAVPVDRDEQTVREFPAFTPDLESLADWLKACGVDTVAMESTGVYWIPLYEVLDRRGFKLYLVSPEYLKRVPGRKTDVEDCQWLQQLHTFGLLSGAFRPEDQEVILRSYMRQRGMLVSYASQHIQHMQKALVQMNVLVNQAVEDITGVTGMRIIRAIIAGERSPITLASMREAGCKKDADTIARALQGNWREEHLFALRQAVEMFDIYQEKIRECDQKILDQVHRMEDRSLTGTSTPPKPEGGHARKNELTFDGAAEAYRMSGVDLTKITGIKGHTAMKILSEIGTDVKHWPTAGHFTSWLTLAPRNRISGGKRLSQRKGPPKANRVAQMLKIAAQSLHHSYSYMGAFYRRLASRVGKAKAIQATARKIAIQVYYALKYGTDYVERGQNYYEENYRNKVLMSMARKAKEMGYLLVKQEPVSSTA

SEQ ID NO: 357103 - protein, 408 aa, unidentified
MEVYIGIDWSQSKHDVAMMNEAGAVVVQGVIAHSEEGFLKLELLRRRLGVQPEQCMVGLETAHNLLIDFLWSRNYSHVYVVPPNVVKSNRGRYRQSGARSDASDAVVLADLLRTDRGRLQPWHPDSALTCQIRAKVSLICFLTREIVALSNRLRASLLRYYPAAVSVFSSLRTRIALQFIQAYPTPEAAAALTFSDFASFARQHGYHRPKDLPACFERLQAGHPPTMAHTLLAYKDEGPFLAQRLLQTLEAKASLLSQLQLLFQQHPDYPVFSSLPGAGQFLAPALLAKFGDDRQRFPTPGAVQALAGTCPVTDSSGQYKVIRFRYACDHEFRHITQQWAVAATWHSPWARGYWQQVRPRCRSDSQAYRCLANRLLAIAWKLWQTRKPYDEAYHWQQCILRRKPRENS

SEQ ID NO: 357104 - protein, 514 aa, unidentified
MFKKPDSNQGLNVKSNRLSLLAFEFNGDTFIVIPIGIISKLVVTFLGAYFIIFKKQTIMKRKQISLEVVNPNAAGIDIGSRSHWVAVGQNAQDVKEFGVYSQDHQELCEWLKKHKVTTIAMESTGTYWQNLFSSLVVFGFDVILVNGRQTKNIKGQKTDILDCQWIQKLHTLGLLSSSFLPDSTTAVIRTYSRHRQNILKQSASAILKMQKYLRLMNMRLDVVVKDIVGLTGTKIITAFIAGEKSGKVLAQNRHYNCRKSEEEISKALQYNGREDYYFALKQEWETYLHLQKQIDQVDVQIKRHLEKVIDTDDDKKQHIASNKPYKRKNKNTIRNTDMNQLSYQYFEGVDLMAIEGVNDALLMAFISEIGLEGIKKFESSKQFTSWLRLAPNNKISGGRVLSHHLPKGSNRLKVALRQAANTIGNLKDGHLSDFFRRINYKKGRATAISATARKLAVIIWNMLTKGIPYHPPTEYLFLDQKRKLKMLSRIKKNIVKFDIRPEDIGLSKILNIST

SEQ ID NO: 357105 - protein, 351 aa, unidentified
MESRVTAQPKLFIGIDIHKRSWKIHCSTDLFAGKSFTMPPEPDKLHAYVQKHFPDYQVTTAYEAGCCGYSAHRSFESYGWKSLVVNPADIHRKGKERYTKTDRIDAQLISRELKDGRLDSIIIPNIEREELRSLFRRRNELVKDFRRIKCMIKMQLLYFGIKVPEEFDNDHWSHAFRHWIDNQQFNYPTARETMASKMRNFRFIDKELRDVSSQLRAYCRKHFKKDYYLLRSVPGIGGIVAVGILSELGDLRRFNNLKHLAGYVGLAPGLYESGTTSKSLGMNPRCHRLIRSYFVEAAWQAIRTDPVIQGYYRKHLGKDVKKIIVKVAHKLLSRTLAVIKTETPYEIGVIS

SEQ ID NO: 357106 - protein, 472 aa, unidentified
MGKGSGTTRGDRRRNARREQLRGLLPRDGAVIGIDLAEDKQAIAVVDHDVRVLARKTVRVKAFRLGEVLDWAVAQARAKGFTAVAVACEPTGPRWLQVQRLCGERGLPLVCIQPLVSHIAREQQDYTPHKTDESDCVLIARLACELHCYIPEELDETWAHLRQLGRRRAQLITAATASAQRIRDFLSVAWPVVIEACAYPLESTTWLAGLQVVTSRCGGQPGRLAEMGPEAFTALVRDAQRGWGGQKAWGPICRRVFAALTDTEGAVVSCRRGLLRRCAGELGDLQRARAQLRAVEADMAGVLAELGLARLAGIPGLTAVGAAAVLAETGDPRRYDSSSSLVKHAGLSPSENASGVFSGQAHISRRGRPGLRLAVWRAVWPMLRFNPVMAAKYAAMTGPAAAAADAAAAAEAGSRQVSAAAARARRAKARVACAASLLRWIYSMTVHGTSWDAAIASGDACQRAPRRPAEAA

SEQ ID NO: 357107 - protein, 341 aa, unidentified
MKHKTITIDLAKNVFQVCGVNEHIKPQFNKKLKRNELLDFMRQQSPTVVVMEACYSSHYWGREIAKLGHDTKLIPAQHVTPFVRGNKNDHNDAFAIAEASQRANIRFVPVKSEHQQEISCLHRIRERLSKNKTALSNQSRGLLSEFGVVFPCGHKALLNGLNSVIDNPQYSHRLQDMVIDMLNEYNVAIERLKSIKKQLDEFVDESESGKILLSIPGIGVINASALLAAIDKGQAFNSPKEFAVWLGLTPKQHASGNVSKMGSITKRGDRYLRKQLVHGARALVSRAAKSTDPLSVWATKLRVTKPFNKVAVAVAHRLARLIWILLTRQERYRLEPVQVSA

SEQ ID NO: 357108 - protein, 373 aa, unidentified
MKTMITYVAMDTHKKQHQVAWMDPDTGEIQDFAVANTPREIERMVQKLRKQAPGEIRLCYEAGVCGFVLQRQLQKLGCVCSVIAPSLVPTKPGDRVKTDRRDAQKLLGPLVAGQLTEVYPPDAAQEADRELTRCRDCAQVDLQRARQRLNSLLLRQGYLYRDGDLWTRKHTQWLQTLTFDSARLQAVVAEYQSEVEPGRQRLESLDKQLEQLAQSEPYRAAVAALRCLRGIDTLTAITVLTEVYSFGRFARPRALMAYLGVTPSEHSSGESRRGGGIPKTGNRRVRRILTETGWHSRHAPRVSKALQARRKDQPVWAIDRADRAALRLYQRYQHLLARGKPVHQAVMAVVRELVGFLWALLRHLQPPGPVSAT

SEQ ID NO: 357109 - protein, 355 aa, unidentified
MGHDITNDIYVGIDYHQSSVQVCVLDPAGSILLNRGLANRWQAIASAVVPLGRMRGAAIEVSCGAADLAEELVDKAGWSVELAHPGYVARMKGSPDKTDFSDARLLADLTRVGYLPRVWLAPPYLRELRRLVRYRQQQVDQRRAIKLRITGLLRDHRLRPAASVKAWSRPWWTWLFEEVLLTMPKASAWILHRHVERLKAAGAEIASVEEALREYPCTDSVVEDLLEERGVGEVTAWGIRAEIGQFDRFGKAKSLSRFCGLSPRNASSGQRMADAGLVKAGSNLLRATLIELAHRLTRYEPRWRAMKEHMRADGKPGSVAAAAVANRWMRGLWHRMRERQLSRQQGGGELVPWLG

SEQ ID NO: 357110 - protein, 352 aa, unidentified
MSMLADLVEVVIGVDTHKDTHTAALLDTRTGGVLATVTVSTDPDGYAQLVALAEQHSGLRAWALEGSGGYGVGLARHLADAGELVVELDRPQRPARRGGAKSDLIDAERAARDALARTRLAQPKTGPERAALQARLTARRAAVEASATAQRQLHAMVITSPEVVRARFRGQSTRLMLATATRLRPTTSTDVEVFTCLTVLRDLARRVRFLEAEALEHEKAIRTIVRSWRPDLLQLTGVGPIVAATVLTVWSHPGRCRDDAAFAMLAGAAPIPASSGKTVRYRLNRSGDRQLNRALHTIVLTRLQRDERTRAYADRRRAQGKTDREIKRCLKRYVAREIYRRLETTPQPLDAA

SEQ ID NO: 357111 - protein, 355 aa, unidentified
MDSVKYIGMDVHKEAISIAVLNSSGKLVMECVIETKAITILDFLKGLRGSLHVTFEEGTWAAWLYDLIKPHVTELVVCNPRRNALLKEGSKSDRIDARKLAELLRSNLLRSVYHGEQGVRKLKELARSYLAISKDLGRVMSRVKAIYRSWGIPCGGKQVYAQRYRSEWLGKIQEAGVRRRAEFYYQHLDALRPLRQQVRQELLAEAKKHSAWKLLRAIPFIGPIRAALLIALIQTPHRFRTKRQLWTYSGFGIETHSSAEQRFINGELRRAKKPTSIRGLNRNHNHDLKNLFKSVATVAAAKAGPFQEYYDALVAKGIRPEMARLTLARKIAAITLIIWKKGARFEAQHLKPQTA

SEQ ID NO: 357112 - protein, 263 aa, unidentified
MLPTLGIDIGKDSFHVELSVNEKLRHRKFSNRKEGFADLYVWLTKHKTTQVHACLEATGPYSEDLALYLHQQGHTVSIVNPAQIKAFGQSELLRNKDDRPDAGLIRRFCEKQRPAAWTPPPPQLRELQALTRHLENLIETRQQQLNRLESAKTKGVIKSLRKLVAYVDTEIARTEKQIQEHIDNHQDLKQQCGLLESIPGIGKRTAAKLLAEIEDITRYKSARQVAAYAGLTPRNYRSGTIRGKTRLSKTGNARVVRHSFFQQ

SEQ ID NO: 357113 - protein, 395 aa, unidentified
MFIVGIDIAKRSHEAIIIAEDGQVVRKAFSFRNNCTGYNLLLEQVRKLTLVKSQIVFAMESTAHYWLALYARLLKDGYAVMVLNPIQSHSLRELYIRKAKTDARDSLIIADLVRFGRCKASNVPQDKILALRELCRSRAYLVDMAADLKRKLIALLDRIFSEYESLFDSVFSKASIAVLRKYSTPQKVKNAHLGKLTDLLMESSNGHFGEWKAHQLKEAACSSFGIDDSDGVYSMLLGMFLEQILSLTAQADSLEKQISVFFQEFNNPLTSIPGVGTVLAATILSEIGDVTRFSSADKLLAYAGLDPSVKQSGEFKSNQNRMSKRGSPYLRRAIWLASTVAVHRDPMFQTYYEKKISEGLHYMNVIGHVSRKMTTVIFAVLRDGQPYQPILQSAG

SEQ ID NO: 357114 - protein, 408 aa, unidentified
MFFIGIDLSDRFFDSCISNSSGDVLSNSRFDFNDDGFSSFVRKISEHESDSKNCIVGIENPHSRLVDFLIQRGYNLITTNPQSIAKYRESRIPSRAKSDSVDARIIADYVREHHKSLRPINIPDETIRELSILLEDRDKLVEQKVRFSNQLTSTLKDYFPQALDAFGSITNKSALEFLAKFDTHQEVKALSKDKLDKVLHDCACFRTDSRERFHQAMGNNPSLISPAVVKAKVRFKNVLVGHLLLLVEQIDEYDKQIQKIVDNIPNGGIFRSLPGADYILGARLLVLYSSRDFASANEAQAFFGTCPCTKSSGQSIFIYFRKGCHEFGRSTFHQLAFCSLKSSQWAKKQNAKKRKEGKKSNHALRCIANSWVKITYAMWRSKTPYNESKHLASIANHIINQPSFILGG

SEQ ID NO: 357115 - protein, 310 aa, unidentified
MEQTFIGIDVSKDRLDVHVRPSGEAFAVARDGEGLAALIERLGKLDPFLIVLEATGGFEQTVAAALAAGRLPLVVVNPRQIRDFARATGQLAKTDALDAKAIACFAEKIRPEPRPIPDAQARALGELVLRRRQIIDMTTAERNRRRQLTTRRLIKGVDRLLAALQTELSELEREIGDTIRGTPAWRERDELLKSVPGVGDVVSRTLIADLPELGGLDRKQIAALVGVAPLNRDSGKMRGRRTTWGGRAKVRAALYMAALVASRCNPVLRAFYQRLLQAGKPKKLALTAVMRKLLTILNAMVRDNKRWQSV

SEQ ID NO: 357116 - protein, 334 aa, unidentified
MEHIAIDLGGRESQVCVRNEKGVIVREGKHPTADLEMILQGRTKSRVILETSAEAFKVADAALRQGHEVRVVPATLVKSLGVGARRTKTDQRDAQALSEVSCRIDLPSVHIPTPKAREYRSLCTGREALVDSRTQLINSVRGYLRTQLVRPASGKTETFARRVRKLLEQRPEGMPAMVERLLVVIEALNEQIAKSDEELERIAEEDPTCRRLMTVPGVGPVTSVRFVAALDKIDRFESPHKVEAYLGLTPGENSSSERQRRTSITKAGPASLRWALGQASWSLWRSRPMDRNVIWAQEVAKRRGRRVAIVALSRKLAGILFAMWRDGTDYDPAQ

SEQ ID NO: 357117 - protein, 404 aa, unidentified
MFYVGIDVAQEKHYVCILDDTKEMATKPFWIHSDILGLRELIKRISDLSWDADDFIIAVESTGAFSENIYEYITDSGYSCTLLNSYQTAKYRDFSTMKKVKNDVIDAYVIAELLATGNYKESYISSGDFHSLKVLGRLKRSLADKIKTIKREISTVMATVNPEITRVFPNIFTKTALAVIKVYPTSTQMSKATPKKLTKLFRHIKGNNFSEDKAKFLIDLALTSVYAGRAYEARALMITTNIKILELLSQEKDEIEAQIKLLIETTMDKALEEPIDNLRSIPGVSDKTITAVIGECGDLKRFTSAKAFIGYLGLYPTQYQSGNSFSTGRLAQRGIPIAKHALYMAAVASVRHNEQLRKVFMDKVSSGKSKKEALIIVAKKLAVMMYSIVKYNKPYEPKRVLVSR

SEQ ID NO: 357118 - protein, 403 aa, unidentified
MNAVGIDVSKGKSMVTILRPFGEIVSSPFEIKHTSSDILSLIKLIHSIEGESRIVMEHTGRYYEALAQQFSAAGLFVSAVNPKLVKNFNNDSLRKVKSDKADSIKIARYALDKWQNLKPYSIVDELRTQLKAMNRQFHFYVKQKTAMKNNLINLIDQTYPNANTYFNSPPRSDGSQKWVDFVYTYWHVDCVRKMSLNSFVKHYQNWCKQKKYIFNKSKAEEIYTKATELVPVFPKNEITKRIIRQAIAQLNSTSATVETIRILMNETASKLPEYSIVMQFKGIGPSLGPQLMAEIGDITRFTHKGALTAFAGVDPGVNESGSYAQKSVPTSKRGSSNLRKTLFQVMDVLIKTMPQDDPVYQFMDRKRAQGKPYYVYMTAGANKFLRIYYGRVKEYLCILSESS

SEQ ID NO: 357119 - protein, 337 aa, unidentified
MIVIGVDVHKHSLTAVAVDELGRALAEWGGPVEGEVVSWARALGEERLWAVEDCRHVTRGFEQTLLGEGERLVRVPPRLTAPQRRRGRSRGKSDSIDALAVARAALQEPLLDGPRPGEETLRELKLLVDHRDDLVAERRRCQQRLRWHLHELDQRLAVPLGALDRAVWIDRLGRQLARGEQTTQVRIARDLLARCRTLTRSIVELDRELRARTKTIAPGLLELAGCGALSAAKLLCEIGPIDRFRTDAQLARHAGVAPLDASSGKHQRHRLDRGGNRQLNCALHRIAVTQGRVHAPARAYLERKQNEGKTRREAIRCLKRQLARTVYTTLKNEPLLT

SEQ ID NO: 357120 - protein, 389 aa, unidentified
MPSTMPTPATALDYESTIITAVELSASSWLVGAQVPSVLRQCRQKLAPSAEALLEHLGRLRQRAERAGKRVSRVVVAYEAGRDGFWLARWLIAHGIEVYVIQPSSVPVDRRARRAKTDALDVEMLLRTTLAWLRGEPRVCSMVPIPSEAEEDGRRPLRERQELIKERLAITNKIDGMMATLGIGGYRPLRRDRREQVETLRQPSGDPLPVHAKARLTRLLDRLELVLEQIKGLEKARDAVVAQDDVVSGGEADSMIRTLAGLKGIGPELATLLAWEAFVRPFRNRRALAGYAGLTGTPFASGGTQREQGIGKAGNRRLRAALVELAWLWLRYQPDSTLAAWFRDRTRAAGSRTRKVMIVALARKLFVALWRFCRDGVTPEGAAFKTAMA

SEQ ID NO: 357121 - protein, 391 aa, unidentified
MVCVGIDVAKDKHDCCILDSDGMVRADCFTIPNNMDGFKQLLQTIRNCTKKSDKIKVGLEATGHYSYNILGFLLDKDLAVYVMNPLHTNLYRKSLSLRKTKTDRVDARTIATMLLSDVDLKSYTDIAYHNEELKSLTRYRFDKVQECAKLKQSVSRLATILFPELEGLVSSIHGTSIYALLGEYPGAKQISEVHLTKLTNLLTTASKGRYGKEKAIQIREAARASIGSVMPAKSLELKHTIKLIQELASEINEIEDSIQKIIDELNPPILSIPGMGVNSAAVILAEIGDFSNFSSPDKILAYAGCSPSTYQSGKLTNCYAHMEKRGSRYLRHALYNATKYVCHWNPVFAEYLAKKRSEGKHYNVALSHAMKKLVRLIYALQKSGKAYLTAA

SEQ ID NO: 357122 - protein, 407 aa, unidentified
MFCGIDWAEAHHDVAIVDPEGRLVARQRISDDAAGFAALVELLASHGDRPTDPIPVAIETSRGLLVACLRATGRQVFAINPLAVARYRQRHSVARKKSDRGDALVLANILRTDLAAHRPLPADSELVRAIAVLARAQQDAVWDRTLAHNRLRSLLREFYPAIFAAVAGKRGGLLRPEARAILAAAPTPTAAARLSLAQLRSLLTRAGRRRGVDGEARRLRAVLHASYLHQPPLVEEAMGRQALALLRQLEAACSSAEELAAATIAQFATHPDAELITSHPGLGALTGARVLGELGDDRSRFADARAVKAYAGAAPVTRASGKRHQVSHRRVKNQRLAAAGYVWAFSALTASPGARAHYDRRRTAGDGHIAAQRNLFNRLLGCLHHCLQTRTPYNEHAAFPTQTATAA

SEQ ID NO: 357123 - protein, 410 aa, unidentified
MRYYLGVDWADQTHAVWVVNESGTKTAARTVPHTAEGLSEWGRELDEWRAQGIELWAAIERREGRVVDVLLDHGVVVYPVNPKALDRARDRFRQSGAKSDPFDARVLADFLRTDHTHLQALQPSSEAAQELKLLTEDYQQQIRQQTRLVNQLTATLKAYYPRALEIAALPTPLAREFLQAYPTPEAAAALTERQWQRWARAHRLSETRTQALWDVLQQPQLPVPVHVLRAKARLMRSLVAQLTLVVAVVEEYREAIEDFFARMPAAQWARTLPIGKHGITAPTLWARLGDAPGRWESFRHLQAHAGAVPVTKRSGKQQGVIQFRFACDKALRYVIDHVAFLSLHSSVWARAYYDQQRARGHAHRRALRALAAKWLKIIFVMWQHQVPYDEQYHLATMTRQQLRHGQKHIA

SEQ ID NO: 357124 - protein, 386 aa, unidentified
MAKIDDLSRSLTALNQEETLICVVELSRSSWLIAGMVPGVERQPLKKLEPDAAGLMGVIERWRGEAIKADRAINRVVLSYEAGRDGFWLGRWLRTRGVEVHLIHSTSVAVSREHRRAKTDRLDTAMLMRVFVGWLRGERGHCSMIIVPTIDEEDAKRPGRERASLVGERTRIINRMKATLARLGLRGFKPELRSAPARLEFLRTPEDIVLPPNTLAEIRRDMSRLTIIREQIKAIEQARLERIEHAPDEPAHAMVRLLARVIGVGIESADMLVREVLLRSFRDRRAVARYAGLTGAPDKSGAKRREKGLAKSGNSRVRRGLIQLAWRFLFFQRDSGLARWYVERTSAKGARKTTMIVALARKLLIALWRLATTGLVPEGILLRSAV

SEQ ID NO: 357125 - protein, 340 aa, unidentified
MLYIGLDVHKEFCQACVIDESGRALSNERFSSTNEELDRFLDRFQDAKFVLESTGIWEFIYEGIERRGFEAVLAHPLKVRAIAEARVKTDKVDAETLAQLLRADLIPRSWIPPKDVRDLRQLVRQRAYLVRDASRFKNRIHAEILRRGVRRPENLKTPFAQRSIRWMRSLDIPTVTSCLNCLENVQAQVEEINIQLRREFDRRPDAQLISTVPGIGFYGALLILAEIDDVRRFHHPEKLCAYAGLVPTVSQSASCVRYGSISKDGSAYLRWILTESVHVHTRYEPGSQLSRFHARVAKRRGKRVATVATARKLLRIVYWMLVRHEPYHSHGFNPVKRLHS

SEQ ID NO: 357126 - protein, 341 aa, unidentified
MQITTIGLDIAKNVFQVHGIDAAENVIVRKQLRRGQIIAFFEALAPCLVGMEACATSHHWARELTKLGHEVRLMPAKDVKAYVKRNKNDAADAEAICEAVRRPTMRFVRIKSAEQQGQLMLHRARDLLMRQRTQLINALRAHLAEVGITAAQGREGIKELLAIIAQDEGSRLPVDAHASLTVLAAQLQAVQTTIGSIEKRIVAQHRSNEASKRLETIPGIGVIGATTITAVVTDPKAFRSGRDFAAWIGIVPRQDSTGGKQKLGPISKQGDQYLRRILIVGAHSVLRRARQQPQKYPWLTQLLARRPFKVVAVALANKMARIAWALLARGGSYRAPQLVAV

SEQ ID NO: 357127 - protein, 345 aa, unidentified
MKHPLYFVGVDISSESFTVSASTKPGVPLHTPEDYNNDIDGFKRLTAWFESFKMKPADIVICMEATGVYGELLCHYLYEHGYRVTVNSPLKVKRAFKIDGHKTDAVDSLQISEYAIRFYDSLNTWEPREAIVEKVKAMLTTRELLVRHRTAEKNAKTALKRKKVIPIPAITALEKGIESLTDNIVTLENNMCDLISSHPQMRQIVDILKTVPGVQELLAANILVLTNGFKQEKTGKQLASYLRLAPLKYESGKSVYRKPKSPKHGPAIPRKLLHLAARSITTHNPRFRKYYLQKEIEGKDKYLIYNNVANKLLKMMCAMIRDQRPYSDEYISINPKYLNYGLQRS

SEQ ID NO: 357128 - protein, 426 aa, unidentified
MGISKPAGLKSPCGEVKIVNPLFVGIDVSSKNNVAYLMKPDGSKHSSFSVQNNLGGAKLLSERIVSALGSMQLERVVIGLEATSIYGDNLVYALREDGGLGRFRRKIHVLNPKQVKKFKEAYPDLPKNDWVDAFVIADHLRFGRINREVYMDDYRYKALQTLTRARFDVIQNLTREKQRFANYLFLKCSGMAQDKDIQNTSATTIALMEHFETVDDLANADLEELTAFITETGRGKFADPDATAKAVRAAAKGSYRLPKTVNDTVNQAMAVSIASMRALKGQVKVLDKAIEQQFEIIPNTLTSIPGIGKVYSAGIIAEIGDIHRFDSQASVAKYAGLVWNRSQSGDFEAEHSRMIKSGNRYLRYYLLEAANSVRRCDSEFRRYYDLKFKEVNKYQHKRALALTARKLVRLVFRLLKDNRLYIPPEG

SEQ ID NO: 357129 - protein, 347 aa, unidentified
MNFIKRKEPYMQNTNNNLYRHYIALDWSQKIVAMATMKDNGGKIEVQMVQPDPGIIRDKLKKYPGSKIMTIEETTTSHWLYVELRDSVDKLVICNPYTNRLMLDGPQTDKIDAKNLCLLLRNGMLKEVYHSMDKDYEIRKLVSGYTDTVNALVRLKNQRSAVYRALGKNHKKKDDTMPRGTESEFVVQKLDEILEHYAKVIKEYEEKFDKIYKTNKTIQRLKKISGIGIKIAIMIYAGVIDASRFENKYKYWSYCGLVKQYKESGGRVYRSKPVRYSRQLKTCYKTAAMAAISGKNDIREYYEYLLQQGTAPEKARHQIARYISKVSYVVMKNKTDYRAYQWRESKS

SEQ ID NO: 357130 - protein, 333 aa, unidentified
MNPISEVGIDIADAAFEAKKLLAGEKVARRFDNTATGHRQAIRWILEGAQGARVCLEATGTYHLQLALALANTPTVELMVLNPKAARRFAEAQMIRAKTDKVDADGLLEYLARMPFRLWLAPAEEMLELQSLTHRLAQLGKEKKREQARLHAAQRAGRHTRLAQRDLRAHLKYLAQREKVIEREAVALMQRHVRLSEDLRLVDTAPGFATRSCVKFLGEIEVLPRHLTAPQWVAQAGIDARPKESGDKNGSRQISKQGNSRIRAALFYPAMAAKKHDPHVAAYYQLLIARGKKPLQALVAVMRKLLHAIWGMLHHRQPWNGSKFYRLDPVKNA

SEQ ID NO: 357131 - protein, 333 aa, unidentified
MCNYSFFIGADISKSVIDVSYRFEGKVIYLGQFPNNQKGFTKVVNKLFKISIIDTAQWFVCFENTGVYSKPLLEFLSSKSIPCKEESALKISRSLGLRRGKDDKVDSMDICQYAYEKKDSLIASKLPSTLILKLRKLLSRRDFLVRQRQSLKVSLKEQKGFIDEELYNELNVGNIILIETYDQQIKGLEESIKVLIKSDSKMATNNELATSVIGIGIITSAYMIAVTENYTTFSDPRKFACYCGVAPFPNRSGTRKGTTRVSHIANKKMKSLFSNCTMSAINFDPEIAKYYKRKKEEGKKAGVVLNAVKNKLIQRVFSVIKRQTPYVKLMTYA

SEQ ID NO: 357132 - protein, 411 aa, unidentified
MPFMIAGVDVHKRVLMVAVADGSLAEGDLEFQCRRFGTGAGELSHLAAWLTERGVREVVMESTAQYWKPVWLAMEGLFAQHLAQAWSNRAPKGRKTDFRDAQRLVRRHIAGELTLSFVPEAAQRQMRTLTRRRVQLSRDRVRLQNQLEALLEEMRIKLSSVVTDLLGASGQRILWALAEGERDPEKLAALGDRRLQCTRQQLQDAVAHPPSAVLRELLGMLLEQVAMLERQIQHVSRLISDAMRDCQDAVARLAEIPGIGMVAAQQILAETGPQAAAFPSAAQLVSWMGACPGREESAEVNHSGRCPKGNRYLRRSLCQAAQAAVRTKNSHFQAVFRRLVPRLGYAKAIWAIVRRMAVVIWKILQTGARYQERGSPSTPQAIKRRIQSLTKQLREAGYTVQIRPPIAQAQA

SEQ ID NO: 357133 - protein, 388 aa, unidentified
MRRSNQDRIVGLDVHPDSFAGAILQGIDPWKARVVSTSTRVALPLLEKWALRHTREEDILVMEASGNAFCVAERLRALKRKVVILESHRAGKVGKTYCATDRVDAIKIARIYLSALSPVVWQPDAKTRERREVFSAYQAVVKEGMRLKQQLKSMLNEHCVRLEKGFRLSHPSAIGRLLQRRKWSEAQKMLLSQLHAGLVGARVRRQRLRHYMAQEILAEKELLRLTRLCGINLITLYGLIAAIGDIQRFANARKLSTYFGLNPTVEQSGNYEGSGALKRHGRGAIRALLVQSAKKLLQVDNPLQKWGLALAARRGRNKAAVAIARKLCVAVWHVMQGHVIGAIERMDTLHTKLHKLATELGVPTIKQLGYETKEAFVQKKLYVLRSYA

SEQ ID NO: 357134 - protein, 316 aa, unidentified
MSETILGIDVAKKKLDACLMMNGKMLVKKFTNDTKGIKLLQGWLRSMKIERVHACLEATGTYSEMVAEFLYEHGHRVSVVNPSRIEAFARSELKRNKTDTADARTIAEFCLEKDPDDWHPLPPEIKQLQALSRRVEVLEKMLLAEHNRLQTAPGTVSSSVRRVITDLEKEIDNVRRLIKDHINNNPDLKQQSDLLQTIPGIGEKTASLLLGEIEFRTFSSARAVAAHAGVTPRRDQSGTTRNRTRLSKIGNARIRKALYFPAIVALRYNQVISNFARRLRENGKQPMQVVGAAMRKLIHIAYGVIKNNRPFDPTTA

SEQ ID NO: 357135 - protein, 479 aa, unidentified
MNVKSRRTKKVNVENQAINLLSKEELDKKIEVVEKELRSYTWRKLEANGKFAKNDKLSFITDDMLIVGCDIGSETHYIRAIDVRGRELSRGAFEFSNTSEGFANAKEWVLALAAKNDKKQIVLGLEPTGHYWFALATWMISNGISVVQVNPYAVKQSKEIEDNSQLKDDRKDPKLIANLVKDGNYGMPYLPEKVYADMRRLSMFRDQLTEDRIRNINRLHRELKIYFPEYMDAFGKIDGAFTLEVLKVSAIPTDITALGAEGMKNIWHNAKLRGRGYNRANEIVSYAEKSVGLTDGTDAGREAVKWYAEQILRLDEQLAEIESALHEKCREIPYAENILAINGVGENILAGILAEMGDISRFDDVKEIQKLSGMGLVACSSGKHKGQTKISHRGRKRLRYWLFQAAKSAVSHADEFKQLHEYYTTRSNNPLKKMQSLVVIACKILRVIYTILKTGTTYDPQKLLKDIKHPAASQAPMAA

SEQ ID NO: 357136 - protein, 426 aa, unidentified
MDSRWPMQFIIPGGTNMYNAVGIDVSKGKSTVAVLQPGGIVVRKPFDVTHSSRELKSLTDYILTLDGETKVMMECTGRYHEPILRTLSDAGIFVSAVNPHLIKNFGNNTIRKVKSDPADSRKIARYTLDNWADLREYSSMDTTRAQLKTLNAQMAFFTKQKVAAKTNLISLLDMTYPGVNDLFDTPTRDDGSEKWVDYAASFWHVDCVRKIGLKAFTERYQAFCKRQGYNFQKGKPEELFNSSKELVAVFPKEQEYKEMIQISIKQLNVISANVARIRQEMNRLASTLPEYSTVMAMRGVGATFGPQLIAEIGDISRFNHREALTAFAGVDPGVNESGKFKSNSNNASKCGPARLRKTLFLIMSSLLQTKPVDDPVYCFLDKKRSEGKPYHVYMTAGANKFLRIYYGKVKECLRTQAQAETETSEN

SEQ ID NO: 357137 - protein, 348 aa, unidentified
MAHFVGLDVSVKETSVCVVDDAGKVVCERKVPTEPDDIAVLLTSVGGDYMRVGIEAGPLSQWLVNGLSEAGLPVICVETRHMKALLQAQQINKSDRNDARGIAQMMRVGLFKPVHVKTLAAQEQRMLLTSRKLVQRKLIDIESDMRGTLRNFGLKVGVVSTIRYEARIRHLVEGFPRLAAIVEPLLTVRRVMRQQLATLHKMLLDTVRHDPVCRRLMTAPGVGPVVALTYRASIDQPQRFVHSRAVGAHVGLTPRRHQSGEIDYDGGISKSGDTMLRTMLYEAAQILMTQSRHWSWLKAWGMKVAQRRGMRRAIVAVARRLAVVLHRMWTDGTDFRWGSEPTTAVAAA

SEQ ID NO: 357138 - protein, 315 aa, unidentified
MEDSQVFVGIDVSQSCLDVAARPTGEVWQVPNDADGISDLAQRLVGMSPFLVVLEATGGLEWALTAELAAAGLPVAVVNPRHVRDFARAVGILAKTDILDAQVLARFGQAMEPEPRPLPDAEAKDLQAMVSRRRQLVEMITAEKNRPRTVIARIRPQVEEHIRWLEKSLTDLDQDLDGFIRSSPMWRTKERVIRSVPGVGPVLSATLLANLPELGELSRGQIAALAGVAPFNRDSGTLKGKRTVWGGRRRVRAALYMAALVASRYNPVIKDFYQRLCSLGKPKKVALTACMRKLLVILNSMVRHGREWQPNLQTP

SEQ ID NO: 357139 - protein, 363 aa, unidentified
MRFYKNQHQFYIGIDLHARTMYICVINNIGETVFHKNMECSRDNLELVTNTFGKDIVVGVECIFTWYWVADFCAEHGIDFALGHAYYMKSIHGGKTKSDKIDSEKIANMLRGGMFPIAYAYPKAKRAVRDLLRRRLFFVRQRAELSVHLQNTNHQYNINEPLTSSRMRSEVYRNTIPQKFTDPATLKMVNADLAMFQAYHDIITKLEFQIEDCMEVQDPVSYSIINSVPGLGFILSLTILYEIDDIHRFSDVGKFISYCRLVKCSHESAGKKEKGGHNKIGNVHLKWAFSEGAVLFLRNNERGQRWHDKLVQRYGKAKAMSIIAQKLGRTVYYMLKRKEAFNPDKFYGDKKIENKDSGGEHLA

SEQ ID NO: 357140 - protein, 416 aa, unidentified
MESKMMSGASSPKPTPAALAYVVGIDIGMESCLMCCLTMEKRQIIKPSQFSNDARGFDWLFGHLKSLRVAPNQILVGLEATSRYGENLYHALLKAGYRVCLLHPGQIHAFAQQRGLRAKTDRVDAMTIARALRSFEARFGYVPSEQVATYRELTRLHQQLSDDVVRYKNEMHARLLALFPEVTQVFADPTRPTALAVLKVYPSAQVMAQADPAALSKLLHEHCPSHYGRQTAEELVRLARGSVSSGLAIAARSSSLRILCDQLQHTQSHLKQLQEEIERLVNQDPKAKGALSITELGPLTVAVVRAELGDLDRTTSMDQVVAYAGLDLRVKESGKWKGQTKLSKRGSGRLRRSLYLAALRSIRLPDSPFGIYYHRLVHRGMKKGMAVVAVMRKLLIVAAHLILTEQVYEPGKVAAK

SEQ ID NO: 357141 - protein, 341 aa, unidentified
MDQYVGLDVSLKETAVSVRQDGKRIWRGKCPSDPKLLAAMICKHAPEAKRVVFETGPLSVWFYHALTAAGVPAICIDARHAKAALDMAANKTDANDADGLAQLAEVSFYREVRVKGFDSMLTRTLVGARMQLVKISTELSNQIRGLMKTFGLIVPRGAGRVFEAHVRRLLADKDGLARIILPLLETWRSVRGRAAELDRQLVAAARTSAPCQLLMSIPGIGAITATSFTAAIEDPEDFRTSRAVGAWLGLAPRRYQSGEVDYDGHISRRGDNRLRGLLFEAATVILTRTAADSRLRTWGLNLRERVGFKRAAVAVSRKLAVIMHTMLKTGERFDRAASAAV

SEQ ID NO: 357142 - protein, 455 aa, unidentified
MYLPDWKWIPIRKELLLMSNKVIFNLDDLFISVGIDVGADFSWMSIALPNQQFVGKPYKILHSSIDSLTTAVSKIKEAEELYSLESRIFLESTGIYHYPLFCYLRDKGFNCSVINPIITKNSTNINIRKVHNDRFDSKKAALVGLKPDLKVSLMPSDLALNCRNLCREYYDLMDNRGAYVNKLQGELLMAFPQYLGIFSKVTINTSLTLLETYTSPSAFLEADKQEIIDIIKSTARFGLTYAQNKYNAIIQAATDANQFGYIIDSNIKRIRLYISFIRKYDEEINNILESLHELVDANEDADFVKQIHLIETFKGAGFLSAVSIMGEIGDFSAFSKPKQLFAYFGLDPAVKQSGKFEGTKVQMSKRGSAIARRVIHTLTLQSISISRNGEAKNPVLREYYLKKCDSKPKLVAMGAVSHKVCNMIFAILRDNKSFEIITPQEHIKQYNASKCDMAA

SEQ ID NO: 357143 - protein, 411 aa, unidentified
MDAFCGIDWAEDHHDVALVDRDGRLLARARISDDAAGLARLLDLLAGHGDSAEDPVPVAIETPRGLLVACLRATGRRVYPINPMAVARYRDRHSVAGRKSDHGDAVVLANILRTDLHAHRPLPADSELAQAIAVLARAQQDAVWDRVTAHNKLRSHLREYYPGFLAAFAAKAGGIMRPEARVILAAAPAPADAARLTLAQLRALLKKAGRSRGIDAEAQRLRDAFRQEQMRQLPLVEQAMGRQSLALLRQLDAACASADDLQAAAIESFNQHPDAGIITSFPGIGALTGARVLAETGDDRSRFHDAKGLKAYAGAAPVTRASGKSRSVTRRHVKNNRLAQAGYIWAFAALTASPGARAHYDRRRDAGDRHAAAQRNLFSRLLGCLHHCLATGQHYNEHIAFPARATTPAAA

SEQ ID NO: 357144 - protein, 391 aa, unidentified
MIYIGIDVAKDKHDCFITNADSEVLFKAFTILNNLDGFNNLYQKIESVMDDVTKVKVGLEATGHYSYNLLGYLIDKGLPTYVINPLHTNLYRKSLSLRQTKTDKVDARTIASMLMSDVNLKSYSDISYHNEELKSLTRYRFDKVKERAKLKTSVSRLVCILFPELEKLVPTLHMASVYALLSEFPSAKHVATAHLTRLTNLLSESSKGRYGKDTAITFRDSARASIGSNMPAKSLELKHTIKLIQELDSEIDEIENEIKIIMDEINSPILSIPGINYRMGAMIIAEIGDFNRFDSPDKILAYAGFSPSTYQSGQLDGAYAHMEKRGSRYLRYALYNATKYVCHWDPTFAAYLAKKRAEGKHYNVAISHAVKKLVRVIYHLEKTKQQYIKAA

SEQ ID NO: 357145 - protein, 407 aa, unidentified
MDLLHPQCAGLDIHQRTVVACARVVAGSSVTHDRRTFGTTTADLEALRDWLTAHGCTHVAMESTGVYWKPIWQILEGRFELVLANARHIRAIPGRKSDVNDATWIADLLAHGLIRGSFVPPAPVQELRDLTRTRKQLVREIAQHTLRIQKTLEHANLKLTGLLSNILGVSGRAILQALVAGEQDPERLADLVHGRLKASRAELVAALHGRVTAHHRFLLQLHLTHVETLERAVHEVEARLGEALAPFRTALDRLITMPGVSETVARVLVAEIGFDMTRFATAGHLVSWAGLCPRLDESAGKRLSTRTRPSNPWLKTTLVQAAWAASRKKDGYLRAQFLRLKSRRGPKKAILAVAASMLTAAYHMLKHDVDYRDLGADHFDRRDKAKLAHRLIQRLQALGFAVEARAA

SEQ ID NO: 357146 - protein, 400 aa, unidentified
MIYLGIDVGKRHHEAGLIDESGNPIGKTIRFANSKKGSDKLLTFLNQHQVTPDDCACGMEATGHYWLSLFSFLHQLGYKVTSFNPMQSDALRNFYIRKTKTDMKDAYLIAQVIRIDSPEATPFVQEDLLQLRHLERLRYALVDQSSDVKRKIIALLDQVFPEYEQVFSDVFGLSSTEILLNYTLPEDLLEIDTDKLADVLYRVSKGRYGVTRARWKAEQLKESAQNTFGISIGTDAFKMQIHLLLEQIALFEKQLAQIEKELKELSDRQHHYLTTITGVNDVTAAVILGEVGSIDRFEHPKQLVAFAGLDASVHQSGEFNGSKTKLSKRGSPYLRRAIWQAAFVASFKDPALSLYYQKLRERGKAHGTAVGAVARKLTHIIFAILRDQKPYVPRPQTNDN

SEQ ID NO: 357147 - protein, 373 aa, unidentified
MGQAARPSVVGDRSVARVVPSLLPKSSNSCLGYPSPHVLQGRATLEQIKIIKEDCLLEVPLIFVGIDVCKAQLDVAIRPTTQILSVPNDKAGIKTLVKHLEKLRPTLVVLESTGGLERQVMLALVGAELSVVMANPRQVRDFAKSTGQLAKTDRIDAAVLAHYAEAIRPQPRPLPDELTLELRALTARRRQIIDMIVAEKNHLATASKAIKKRITAHITYLEQELDDADQDLDRFIGKNPLWKQNQEILCSTPSIGPVSSRTMLAELPELGTLGRKQISALVGVAPFPRDSGTLKGRRTIWGGRASVRGALFMATLSAIRFNSVIRDFYKRLKAKGKPSKVALVACMHKLLTILNAMIKNKTRWSENFFLKTT

SEQ ID NO: 357148 - protein, 406 aa, unidentified
MAAVMIGVDPHKGSHTAVVISPAEEPLGELRVRASAAQAEKLIGWAAAWPERTWAVEGAGGLGHLLAQQLVAAGERVLDVQPKLASRVRLLQAGDTNKNDPNDALSVAVAALRSRVRREVITDDYPAVLKVWSKRHRDLARTRNQVACRLHAALCDLVPGGHPKEISAAQAARILAQASPSGAVALARAELAAEFLADLRHLDVQLRDARKKLAVAVRASGTSLTQVFGVGPVIAGTIAGDIGDVARFPGRDHFASYNGTAPVEVSSGNRKIHRLSLRGNRRINHAIHMAAITQLRHKHSEGRAYYDKKVTDGKTHKEALRSLKRKISNAIFARLQADARQATTARTKGPGGQPGNDSDSSAASSHPERRLFGPATPGPGTTIRPGTTADTPSPQEPTSKKTRPTT

SEQ ID NO: 357149 - protein, 391 aa, unidentified
MTYVGIDVAKDKHDCYIVNSDGEILADVFTILNDQTGFNLLFQTLQSVAPDLSKVKVGLEATGHYSYNILGFLLDKGLATFVINPLHTNLFRKSTSLRRTKTDQVDARTIAAMLASDVVLTSYTATSYHNEELKSLTRYRFDKVQERAKLKTSISRLVNILFPELEKLVPSLHMNSVYAMLSEFPGAKQIASCHLTRLTHLLSESSNGHYKRDKAIEIREAARASIGSVMPAKSLELKHTIRLIEVLTEEIDEIETSIREIMDENPSPILTIPGINYRMGAMILAEIGDFSRFDSPNKILAYAGLSPSTYQSGKLENAYPHMEKRGSRYLRYALFNATKFVCQWDPTFAAYLAKKRAEGKHYNVAISHAAKKLVRVICALQKSGKPYCPVT

SEQ ID NO: 357150 - protein, 410 aa, unidentified
MDVLYPRCAGLDVHKKTVVACVRIQQGQSVEQEVRTFETTTSGLLNLSAWLSEKGCTLVAMEATGVYWKPVWHILADGEFELLLANAAHVKNVPGRKTDVNDATWLSELAAHGLIRGSFVPDRPTQELRSLLRTRKQLVRERSSHTQRLQKTLEDGNIKLDSVISDILGASGRAMLEAMIAGQTDPAVLAGLANRRIRATPEELREALRGRLTAHHRFLLQLHLEQIDALNRAIARIDEEVKTDLDSFREATQIVTTIPGFDDLSAQSVLSEIGVDMSRYPSDAHLLSWACMCPRNDESAGKRRSTRMRKGSRWLKATLFTYAWAAVRTKGSYFQAQFHRIKARRGGKKAIGAVAASLLRTIYHMLKDGTLYQDLGADHFDKRHKTASTRRLVQRLQNLGFAVQLTPAPA

SEQ ID NO: 357151 - protein, 366 aa, unidentified
MKKISTMGINGNMIFKGHKLTIGVDLGDRWSCYCVLDEAGEILLEQKVATTPEAMKQIFEKIPQSLIAMETGTHSPWVSRLLTELGHKVIVAHAQKVQLITKSKRKDDRHDARTLARLARIDPELLGPVRHRSAKAQIHLTVIRARAELVSARTALVNAARGLVKSYGQRLPKCGTQQVNRELAAGLHAELREVLEPLLQEIESLNERIQEYEVRMEKIAKESYPQVELLKQVKGVGTQIALTYILTLEDPHRFPKSREVGCFLGLRPGRRDSGESQPEMHISKEGDPYLRTMLVQGAHYILGPFGADSDLRRWGLKLAARGGKSAKKRAVVAVARKLAILLHKLWVSGEVYEPLRNSQQAMRAVA

SEQ ID NO: 357152 - protein, 320 aa, unidentified
MMAQNDRVVVGIDVAKDKVDACIRTFKLRQTWPSTAQGQRKLVAWLRKLQVNKAVMEASGGYEQAWAKVLRAAGIAVRIVDPKRVRSFAQSAGRLAKNDAIDAEMIAWFAETFSEAPGQAYDAAHEELQTLVKARLRLIDVRMRLVSQSEHAAPGLVQKAHAHILKSLASEIAKLEAAICAKVKSTPDFADRAEIIESVPGLAETSSANIVAGMPELGQVSDKIAAALIGIAPYDDDSGKRRGERHIKSGRRWVRNAIYMPCVGAATQNNPVLKAYYQRLLAKGKAPKVALIACMRKLIIILNTLIARRQKWDPSRYARS

SEQ ID NO: 357153 - protein, 426 aa, unidentified
MKNTQNEKISQIKDSTLVIGIDVAKETHYARAFDFRGIELTKLLKFSNTGEGFDHLSQWMQNICRQHEKAEIIVGFEPTGHYWFNIGDFLKSEGHKLAMVNPFHVKRTKELDDNSPTKNDRKDPKTIAMLVKDGRYREVYIPEDVYQELREAVAERDRLVQRLTAINNQVDRWLDIHFPEFAQVFKDWRRQAAFLTLRHFSTPEKITAAGAMKIVAIWKQHMKRTAGVKRAQELVKVASVSIGRKIGLVAAETSLQNLLDEYELYVKHYEELEQLMMELLLQVPHAGKLLQIKGVGLITAATFVGEIGDVSRFQDPRQIQKLAGLNLVENSSGKHKGKTQISRRGRKRLRHSLFMAMITILAKNTEFRMLHKRNLTRAKNPLSKMQSVIALCGKLIRVFYGILTTGRDYSAEKMLGDIERSNQTAA

SEQ ID NO: 357154 - protein, 358 aa, unidentified
MYTQITAMPKLYIGLDIHKKSWSVHLATDICDHRSFTMPPLPQKLEQYVSENFAEHQVEITYESGCCGFSAARYFVQLGWQVTVVNAADIPRIQKQQFQKTDRIDCRLLCRHLKQQQLKAIYIPTEQQDQLRSLVRHRNSIVKQLRQVKLHIKSMLLYHGVSIPVEYDNANWSKAFIAWLQNLQWQFTPAAYSMQSKLRILIHLHKEYLNCANELRSYCRRQHRKDYYLLKSIPGIGGYLAASILAELGDLRRFTNEDQLSAYIGMIPAIRSSGGTQTTIGITPRSKSLIRSYLIEAAWVAIRRDPQMQAYYRKQYGKNIKNVIVKIAHKLVKRILSVIKNQRPYQVNYQHLSTLKPV

SEQ ID NO: 357155 - protein, 355 aa, unidentified
MSSEKYIGLDVHQATISVAVMDSTGKLIMESILETKASTILEFLGGLRGTLSVTFEEGTWAAWLYDLLKPHVAHVLACNPRKNAALNQGNRNDKIDARELANRLRLNDLKSVYHGENGIRMLRELARSYLTIVKDLTRVMNRLKALYRSWAIPCAGRDVYYTRHRSQWLAKIREAGPRRRAEQLYQQLDMLQHLRQQARRELLRESRKHSIIAKLRQIPALGPIRCALAVALIQTPHRFRSKRQLWKYCGLALETRISGEYVYVQDERRRSKKQLSIRGLNKDHNHDLKGLFKGAATRASVMPGPFQEFYQRSLAKGIKPTMVRLTLARKIAAITLTLWKKGESFDVQKLKSQAA

SEQ ID NO: 357156 - protein, 384 aa, unidentified
MEALLYCCCGLDVHKDVIEACILRGTGQNPEIIRESFSTVKQGLRNLVEWAADNDCYSIAMESTGVYWIPVFEAFEQHAEYTENLWVVNAHNMRNLPGRKTDVKDAEWIATLLRHGLLEKSFVPNEFIRDLRSFTRLRRTFIQEKARYHNRLEKFLQNRGFKFSSVMSDIYCLSGKTLLRTLCEKGSITEDDVQEKCRRLKHTDAEICAAVCGSLRPIEQHLLKQLLNKIDNSQRDIDLLNDDMRLLTAQINDSIAVLTSIPGISEDSAVEIIAEISTVPQEYFETPEKLCSWAGLSPRNDESAGSIKSRKILHGNPYIKAILCQTAWVSVYARNSTFHDWFWTHQKKLGRKKAIIAVARKMLSLCWLLLKNNVMYQYVPLKTG

SEQ ID NO: 357157 - protein, 353 aa, unidentified
MDKYIGIDVHASSCTIAVVDAHGKQVGSHVVTTNGQEIVECLRSIPGQRHVCFEEGTQSGWLYEILEPHAVEVVVAGVEAGRRGPKDDKRDAFGLAEDLRLGAIKTRVFKNGGPYKALRELARTHRMVVRDVVRMKNRIKSMYRSRGVAVAGKSVYSSAGREPWQKQLPEACRGPVRTLYAELDALEEVRNDAEKALVQEARKFSITKLLSTCPGLGPIRAAQLVPIVVSPHRFRTKRQFWSYSGLGIVMRSSSDWVHDKNGQWQRAQVQQTRGLNLTHNHHLKAIFKGAATTVIAQHPDEPLNLAYQRWLAAGTKPNLAKVSLARKIAAIALMMWKTEEEYDSSKHSKTVSP

SEQ ID NO: 357158 - protein, 337 aa, unidentified
MKYCGIDLHSNNSVVIVSDEEDRIVFSKRLPNDLWQMGDALELHRQDLAGVVIESTYNWYWLVDGLMDTGYQVHLAHPSAIKKYEGLKHSGDFADAAYLAQLLRLGWLAEGYIYPREERGVRDLARKRLQLVRYRTAQILAIEGILMRQTGARLKGEAVKRLTAEQVDEFAFASDVALAVQANRAVSQTLSQQIEALEKRLQQRVILRPEYRLLKTVPGIGEVLATTIMLETGTISRFTRVGNFSSYCRCVDSLKESNGKRKGQGNTRNGNKYLAWAFVEAANFALRYCPQAKSFYDRKKSRSNRILALKALAHKLARACYHLLQDQKPFDVHLCFG

SEQ ID NO: 357159 - protein, 337 aa, unidentified
MIAVGVDTHKHEHLARALDGLGQLVGGVTIKADPAGYLELADWLADVGEDVVVGIEGTGTYGAGLCEFLLASGIHVVEVERPRREERRRGKSDEIDALLAAKKVLAGDGLSTPRAGGTRQALSALLVAYRSCMVERTRVLNQLQALHTSAPLALRERIGPGNGRKLVARLHRMRASAGAPEAQQLIFGVLRDLGSRAHHLEVQAGAYKRELTRLINSLDPTLLNEPGIGPISAAKLIICDPARLKSEAAFARCNGTAPKPASSGQTIRHRLSRGGDRQANNALHTIALSRSLHDERTRAYLKRRTTEGKTNREAMRALKRHLSRNLYKRLITVPLTS

SEQ ID NO: 357160 - protein, 422 aa, unidentified
MRVLYERCAAIDVHKDQVTVAVRTPGDGPGGRQTEVRKFRAFYGVLTEMARWLVSLQVTHVAMEATGIYTMPVYHALIEQGRFEQVLVCNAAHVKNVPGRKTDAVDAVWLAELLECGLLRGSFIPEPKVKAVRDITRYRKKIVGARTSELQRLGSVLQDAGIKLDSVASSIATVSGRAMIEALIDGERRPAVLADLALGRMRSKIPDLTRALEGRFGAHHALMCQLHLEHIDHLDEMINRLDTQVEQMMVPFARQHELLVTIPGIGPIAAAAIISEIGASPGEFFLSDAHLASWAGLCPGNHESAGKRKHGTPRKGNQHLKPILVEAAWSAVRTDGRLRARYHRLVLRFGGYRNPAAKKKAIVALAHTLIVIIWNVLASDSPYTDLGADFYDRHHNPERETRRLIAKLEALGHTVTIKPAAA

SEQ ID NO: 357161 - protein, 321 aa, unidentified
MKREKHIPSKETVVGIDVSKDKLDVFIDGSNEQFTCLNQIKHLHKLAKQLKKISPTLVVMEATGGYETAAAIAFGEAELPFAIVFPRRVRQFALGLGMNAKTDEIDARVIAYYGRVAGITPVPIPSKELRALAALTDRRRHLIEMLLAEQNLLDTFEEKTHRGIRKHIRFLERQIEEIETEIQHQIKHCPEWNQADELLRSVPGVGPVLSSTLITDLPELGHLSREKIAALVGVAPFAHDTGKSSGRRFCKGGRNSIRRVLYMATISATRFNPVIKAHYQSLCNRGKQKKVALIACARKLLVILNAMTRNNTSWLSTIQNA

SEQ ID NO: 357162 - protein, 366 aa, unidentified
MQKISTMRRSGNKIFKTRQLTIGVDLGDRSSCYCVLDENGEIIREQKIATTPEGMQQAFGKMARSRIAMETGTHSPWVSRVLTGLGHEVIVAHAQKVRLIVKSRRKDDRLDARTLARLARIDPELLSPVQHRSAQAQLHLAEIRARAGLVSARTALVNAARGLVKSYGERLRKCGTEQVSRETTKGLSTGLREALEPLLREVESLNERIKEYDRRIEKMAKESYPETALLKQVKGVGDLIATTYMLTIEDPHRFRKSRDAGCFVGLQPGRRNSGESEPQMHISKEGDEYLRTLLVQGAHYILGPFGEDSDLRRWGQRLATRGGKNAKKRAVVAVARKLAVLLHRLWVSGEVYEPLRNSRKAMSAAA

SEQ ID NO: 357163 - protein, 307 aa, unidentified
MSVFVGIDVGSDQLDVALTPGKGVRQFPNTSHGWRALIAWLQPLVPQWIVLEATGRYDAGVLSALHEAGLPVTRINPRQARDFAKASGQLAKTDELDAQMLARLASVATALHLRPHQPKAAWQKELAAYQQQRTHLQQMLLSERQRYLTLEPAWLRRQVRGTIVHLERRLRQIDQQLKAQIQAQPQLATLRTLKGVGEVTVATLAAHLPELGHLRGKAIAKLVGVAPLARDSGYQHGKRTVWGGRSVIRQVLYMAALTAVRHEPGLRDFYQGLRQRGKAAKVALVAVMRKMLVILNARMRDALLMAT

SEQ ID NO: 357164 - protein, 402 aa, unidentified
MNAVGIDVSKGKSMVAIMRPFGEIVSAPFEIKHTASGINSLVELINSVEGESRIVMEHTGRYYEVLAHQLSEANLFVSAINPKLIKDFDNDSLRKVKSDKADAVKIARYTLDKWQNLKQYNVMDELRNQLKTMNRQFGFYIKHKTAMKNNLIGILDQTYPGVNTYFDSPARSDGSQKWVDFASTYWHVDCVRKMSLNAFIDHYQNWCKRKKYNFSQSKAEEIYGKAKELVPVLSKDAITKLIIKQAVDQLNSASTTVESLRTLMNETASKLPEYPVVMAMKGVGTSLGPQLIAEIGDVSRFTHKSAITAFAGVDPGVNESGSYEQKSVPTSKRGSSNLRKTLFQVMDVLIKTHPQDDPVYQFLDKKRAQGKPYYVYMTAGANKFLRIYYGRVKEYLSSLPES

SEQ ID NO: 357165 - protein, 425 aa, unidentified
MKSTRIQQTNQRIERITSNHAVVGIDIAKDGHVAQVVDYRNRVLTPRSFAFSNTKAGFEAFWAWIQVVQASHQLTSMLVGMEPTGHYWFNLAAWLQERNVDVVLVNPVLTHRNKENRDNTPSKNDSKDALTIADLVNRGLYTEYVPQAPEFERLKTIMSDREFWMKQNGSLGNRIVRWIDLYFPEFREVFPDWTSVRSLASLRAFPLPCDLDGLTAEEVVGEWRKQGMKRCAGVSGKAKAVALLRCAARSIGNQRATEEARRDLHRLLDAYSNTVSTMEMIQHEIEALLAELPQAKQLQSIHRLGTIAVAAILGLAGDLRHYKHGRQLLRRAGLNLAECTSGKFKGQIKLSKRGDSVLRKHLYFGMLSLVGHHPDFKRWHKRNQERGMKKQASLFKLIGKLARILVGMVQREETYRSISPQPQAA

SEQ ID NO: 357166 - protein, 428 aa, unidentified
MNVDELTRIKEFRQIREEVRGSEKYLLVGIDVGKENHYAFYGTALGKTLKKRLVFGNDFSGIEMLMDIANELKENSNLEKIVYGLEPTANYHKPLAEYLIRSGCNVVLVSGVSVARNRELLDGRWDKHDGKDSANAADLIGQGKCQYYDYPPEEIRDLRALLSLKRMLRKQEHRMKVRIRNNVIAQYFPEFDSQFAKGRSESLAVVKWCIRPKDINLMEYEEFEGLVAPRVKTRAQADRIKSIWLDANESIGCEAGEVLQFGARLMVEDLQNIKDSIKAVDEQIENICREFPEYHYLLTIPGFGPDISSKALGAIGNPLRFDNGKQVLKLVGFDLSAIRSGKTSASAVPRLSKRGNAHLRYALYQAAFVASTSNKYFKRYYTNQLCGRERENGIKTKMKVKLAAKMLIIAWTLMKKKEPFDPSYLNIE

SEQ ID NO: 357167 - protein, 413 aa, unidentified
MDMFCGIDWSEDHHDVALVDATGQVLAQRRIPHSAAGFVELLDLLAAHGDTAQAQVPVAIETPRGLLVSGLRATGRPVYAINPLSVARYRDRRTVSRGKSDPGDALILAHLLRTDRAAHRPLPEDSEQARAVAVLARAQQDAVWDKINTHNRLRSLLLEYYPALVEAFTAKRGGIMRPEARALLAAAPTPAAGGALTRPQLVRILRSAGRRRLLHAHAEDLHTALRSDQLRQPAAVEQAMGRHAVALVALLETACRNAADLAVAAEEAFNAHPDAVVIGSFPGVGTLTGARLLAEIGDDHRRFADPRGLKAYAGSAPITRASGRSRSVTTRRIKNQRLAAAGYAWAFSALTASPGARRHYDRRRAAGDSHTAAQRHLLNRLLGCLHHCLTTGKPYREDIAFPTGEHADQTAAA

SEQ ID NO: 357168 - protein, 336 aa, unidentified
MSPTIAARRPAAVDYERTLILSIEVSNQSWVLAAQVPGLPHTKAKRTVDPEAEALMAAIAGYRSRAAAMGRSIGRVIAVYEAGWSGFWLARWLTRHNVEVYVIQPSSVPVDRRMRRAKSDGIDAELLLRTLLAWLRGEPRVCSMVPVPDEADEDARRCIRERTELISERVGLTNRIGAVLATLGVTDYNPLLRNRHHRLAELRTGLGEPLPPNAHAKIVRLLARLELVLAQIAELERERDAVVETEMPDHASKMIQQLISLRGIGVQSATVLVREAFVRRFANGKALGSYAGLTSSPYSSGGIDREQGIGKGGNRRLRTVMVELAWLWTRYQPAAA

SEQ ID NO: 357169 - protein, 414 aa, unidentified
MGRCVSQNGTTGSDSQHRGLRCELETPTQSHMRKEPVMQKVRFIGLDVHADTIAVAVAEPSGEVRSLGVIPNRPESVRRLIKKLGPPASLRVCYEAGPTGYVIYWQLTALGVSCEVVAPTLVPTKAGDRVKTDRRDAEKLARSYRAGDLTAVWVPDAAHEALRDLVRAREAAKKDQLRARHRLGKFLLRHGRRPPTAMTAWTQRHLTWIRQVQFEQPAQEATRLDYLHEVDHVVGRIERLERAIDEAVKTAPPTMRAVIDALQALRGIALVSAVTIVAEVGELSRFTRAPQLMGYSGMGAREDSSGTRTRRGGITKTGNAHLRRIAIEAAWAYRHQPAVGGTLRKRQATLSEEVKAIGWKAQLRLHARYRKLLGRGKCQQHVVTAVGRELLGFIWAIGVTVERQQRKTTSSIAA

SEQ ID NO: 357170 - protein, 320 aa, unidentified
MNKEQKYVGVDISKDSLDIAVFDSNQRWRFNNNPVGIKRAIGIFETIKPELVVFEATGGLEIPFWAALSEVGINTAPINPRQIRDFAKAKGRLAKTDTIDAQVIAHYGQAMQPRPLSFPDTQELKEVMARRSQLVEMISAEKNRLRAARQEGIKQGIKAHIEWLETGLDSVDKELRKAIEANPIWRKKDQLLRSTPGVGPILSAVLLTHLPELGTLNRHQVAALAGVAPLNRDSGLMRGKRSVWGGRGRVRGALYMAALVATRCNPVIRAFYQRLCSQGKPKKLALTACMRKLLAILNSMVKHHTPWICRPAPTLIGPCQ

SEQ ID NO: 357171 - protein, 370 aa, unidentified
MKNVTTYVGIDAHKKDLFVAMLVGPQATPVTWTVPNEPTAVRRLVRKIEREAPGPVQACYEAGPCGYALQRQITTTRVTCQVIAPALIPRKPGERVKTNARDARKLAELHRAGLLTEVRPPTPAEEAVRDLCRARDDAREDLQRSRHRLGKLLLRRGLHYAGRNWTKVHRRWIESLKWTQLAERVVVDDYVLAIDHLEARLLELDARLAEIAETEPYRERVGWLRCFRGIDTLTAILLLAELHDFRRFQSSRALMAYVGLVPGEDSSGEKHRRGRITRAGNALVRRLLVETAWHYQHRPSVGVALTRRRKRQPGRVIAIADKAQQRLCRRFRRLAEQHKPAPKVAVAIARELAGFVWAALQPAPAPAPAR

SEQ ID NO: 357172 - protein, 347 aa, unidentified
MNNCNTIGVDLAKTVIQVCVVSPKKKALLNKAFTRQKFAEFLAKQKPGLVAFEACATAHYWARVAQAHGHTARIIPAKAVTPFRQGHETDPNDALAVAEAASRPNIKQAPMKSIEQQGLQAIQRSRELLVQDRTALSNHIRGLLMESGIVIARGFAALHQRIPEVLEDGENELPDLYRPTLHLLYGRLITLKNDIDVLNEQLNTLVKQNAACQQLARMEGVGPIGSVLLYATLGSGEAFTNGRQFSAYLGLTPKQYSSGGKTTIIGISRYVANKRLRAVLIQGARAYVHRMKEPRTSKDRWLWSLIQRAGYGRAAVALANKNARTAWALLTQGEVYHRDHEVTLAAA

SEQ ID NO: 357173 - protein, 356 aa, unidentified
MQTQVTKKIDFTGKQLFIGLDVHKKSWSVTILVDGTEHRTFTQPPDPESLNSYLHRMFPGGEYNSAYEAGFCGYAIHRRLNQLGINNIVINAADIPTSQKDKLQKRDPVDSRKIARSLEKGSLRGIHIFDRELEELRSLNRTRFYLMRDLRRSKTRIKSFLQYYGEPIPVEFDNNQWTLKFVSWLKQVKMQTQSGQDALSNLISSYEYHRNLLLTLSRQIRERIREYDRELYTLLKSVSGIGPLTASALITELGDINRFTNIDQLGSYVGLIPRIRESGETTYTGGITFRCNSFLRTLLIESSWQAIRMDPAMMQYYHSHLVNNKGHKVVIKVARKLLNRIRYVMKNRKPYITGVA

SEQ ID NO: 357174 - protein, 596 aa, unidentified
MLPQHTPAPQSPRRFGVGIDTSRYGHYAVFLREDLQPAVDELAFAESAAGYALLQQRLQGIVARYGPLAFAVRLDVAGPYADNLLHFLHQLATPHADATNAAQSLALSISCGDPQRNKNYRVAFFGNQKSDPVEARAAARFALSEKPRSDKPLTLELRILRQVAGRLQAVVRQRTRLINQFHHLLALTFPELALLTKEVAAGWVVELIHRYPSAARLAQATPTTLAAIPYLPDAQVMPLLEQAHRSVASLRGEAIDELVRDQVRQLRDSAARQKRLESLLVSAYRALPQANYLDTIPGIGPVTAAVLTAFIVDIDRFATPGKLVAYFGVLPIEASSGVDRDGQPRSPRRWIMSRRGNDLVRRYLWMAALSALRCNPAVRALYSRVVAKHPQHKAVAVGHAMRKLLQLVFAICKSGRPFARDHYPWQTTAHVEASDNGLSVENQVSDNGMSVKSQAAGHKPDVVPAQPVVTAACADSVAEAATVGESTAVDFAHVKGQLSLAQVLDQLGLSTRLRGNGPQRRGACPLHRGDGRGRTFSVNLEANVFQCFDKQCGNKGDVIDLWAALHGLSLREAALDLVRTFGLEACARPATEKRNG

SEQ ID NO: 357175 - protein, 410 aa, unidentified
MEVLYPHCAGLDVHKDTVVACVRHMANGSVRREVRTFRTTTKELLVLSDWLASEGCTDIAMEATGVYWKPVWHVLSDGDFTLALANAAHVKNVPGRKTDVNDATWLADLLAHGLIRGSFVPDQQTQEMRSLLRTRKQLVRECSSHVQRLQKTLEDANIKLDSVISDVMGLSGRAMVEALIAGESDPDRLAQLAHRRIKAPPEALQEALRGRVTRHHRFLLRLHLQQIDAIDAAIGDIDREVDAQVEPFRTAVQLLTTIPGVSELSARIILAEIGLDMRRFPSAGHLISWAGLCPKSDESAGKRRSTRMRKGAPWLKTTLVQCAWAASRKKASYLQAQFHRLRARRGAKKAIGALAASILTTAYHMLISGEFYRDLGPDHFDRSTKARHTLRLVTRLQNLGYAVQISPLAA

SEQ ID NO: 357176 - protein, 466 aa, unidentified
MKYTQQRKRTGKSEQRVSLFERIQPDAAGVDCGQKSHFVAVPPERGPEPVREFRTFTADLQRLAQWLAQCGVKTVAMESTGVYWIPLYEILEQRGFEVVLVNARDVHNVRGRKSDVSDCEWLQQLHSVGLLRASFRPAAAMVPLRSYLRQRAILVEELTARIQRMQKALTEMNLMLHTVVSDITGVTGLKIIHAILAGARDPERLAVHRDGRCHASHQQLVAALTGNYREEHLFSLRQNFTAYQFHLQQIAECDAAIEALLNTLAAQQPPPSAALPAPRAKTTKKHAPAFDIRTPLHVLTGGVDLSQIHSIGPQAALQLVAEIGTDMSRWPTEHHFASWTTLAPNNKISGGRLLSSRTPPSANRAAAILRRCAMSLGRTSTALGAFYRRLAVRIGKAKAITATARKLALLVYRALSGKLAYRDPGATAYLKLHRARELKSLRKRAKLLGFELVDRSSGEVLLDPVS

SEQ ID NO: 357177 - protein, 339 aa, unidentified
MNSMAVGVDIAKNVFQVHYVAQGSGEIVNKPIKRAKFLEHFANRARCLIGMEACGGAHHWARELTRLGHEVRLMPAEFVKAFNIRNKNDAADARAIWLAVQQPGKPVAMKTEMQQAMLALHRMREQLVKFRTMQGNGLRGLLTEYGEVMSRGRAKLDKAIPAALDRLAERLPAALIDTSREQWSGLARLDGQIAEIERRMREWKKEDEAVAAISEIPGVGLLTATAAVAMMGDPKAFSSGREFAAWAGLVPKQTGSGGKVNLHGISRRGDTYLRTLLIHGARSVLSHAKEPGPWVEQMKKRRPANGVIVALANKMARTIWAVLAHDRPYRKDYVSVKPA

SEQ ID NO: 357178 - protein, 324 aa, unidentified
MSEHASVFVGIDVSKDHLDLAVDGSHEVRRLANDGDGIQALVSELLEHRPTLVVLEATGGFEMPVAVALAAAEIPVVIANPRQTRDFARSTGQLSKTDAIDAQGLALFAARVRPEVRALPTEDAQALDALVARRRQIIGMLTQEKNRLGFALGPVQKGIRKHIAWLERQLSDVDADLDTRIRKSPVWAAKSDLLQSVPGVGPNLSRTLIAELPELGSLSHKQIAALVGVAPRARDSGKFRGKRMIWGGRAPVRSALFMSVLSASRWNPVIRLFYERLRAQGKPGRVAQTACMRKLLTILNAMIRDGRSWDSTIPLGQLKLQHSC

SEQ ID NO: 357179 - protein, 370 aa, unidentified
MKVYIGIDAHSTNYTLCSYNPQNDQSFYQMQIEPDYHKVVDYVKKVKVLYGRNTTVLCGYEAGCLGYTLYKQLTAEHIDCVIMAPSTITTIQTNKKRRRKNDKRDAEAISRALGFGLFQKVYVCDEQDTEVRDYIRIRDDHKLQLKKLKQQINAFCLRNGYLYSEGRKWTIKHVQWLRTVELSFLRRETLDEYLLTFDILCRELSDMTSRIEEFAQEEKYKEPVSKLRCLKGIDTLTALSLVVEISDFNRFSKADGFACYLGLVPGQDDSACTQKNLPITKAGNIHLRTLLIEAAQSYGRGLASNKSKTLQAKQKGNDNKAIAYADKAQYRLTKKYKRMQARGMRYGVITTAIARELSCFVWGMATNHIS

SEQ ID NO: 357180 - protein, 314 aa, unidentified
MADPCGVGIDVSKATLDVAWSTDPTARWQTTNDDVGWTALVAHVRALQPTVVVLEATGGYEIGAATALSMAAVPVAIVNPRQVRDFAKALGLLEKTDALDAAVLATFAARIQPTPRPLPDDLQADLQALVTRRRQLVEMLTAERNRVPLARGAVRKNVVAHIAWLEKQLGKTDRDLRTQIEASPIWRARDALLQSVPGIGPATSARLLASLPELGTLSHRQISKLVGLAPLPDDSGRRSGYRRIQGGRGDVRSALYMATVTAMTHNPTIRAAYRRWRAAGKLPKVALVAAMHKLLIHLNAMLKHQTPWHPPAMA

SEQ ID NO: 357181 - protein, 342 aa, unidentified
MSGMIIGLDLAKSVFQVHAVDAEGKVVITRKVRRSQMLEFFTRLEPCLVGMEACPSAHHWARELSALGHEVRLMVASYVKPYVKRQKNDMVDAEAICEAVTRPTMRFVPIKSESQQAILMVHKTRALLVRQRTMLVNALRGHLTEMGVVAPKGIRRHADLVERVLAHGADEIDLPPLVRDIVFSSARQIGSLNAEIKELERKILEWHRTSDASQRLATIPGVGVITASAMAATVVDPAAFRSGRDLAAWLGLTPRSNSSGGKERLGRITKAGNRYLRTLLVIGATAVVGFSRRTTEGPLMNWVRKLLQAKSARLTTVALANKMARICWAVMAHKTVFGAAAA

SEQ ID NO: 357182 - protein, 408 aa, unidentified
MLFIGVDLSDKFFDSCITNSYGDVLSRNRFDFRHDGFCAFLKLIQEHQTNDQKCIIGLENPRSKLVDFMTQRGYSVVLTNPSAISSYRKSRKPSKAKSDQADAQLIADYVREHHKSLSAIQIPDETMRELSLLLEDRDRLVKQKVRFSNQLTNTLKEYFPQAIDAFGSIDNKSTIKFLKKVDTFAQVKALSEENLKQLLKDCDINRKESKERFHKTLKRPVYHISQAVVKTKVRLKNILVTHLELLINQIDEYEKQIKRIMDDSPHGDIFRSLPGADYILGAKLLVLYSTREFNDANEAQQLFGTAPYTCTSGQSRHVGFRKGANRFGRNTFQQLARCSIRSSNWAKKQYVRRREQGKGSNHAFRCLANTWVRITFAMWRNKKNYDESIILTAVANHIINQPAFVYRD

SEQ ID NO: 357183 - protein, 402 aa, unidentified
MRYFVGLDWAKLTHAVCVIDESGEIIMRLAVDHTAEGLTRLVTALKRFGDPAELGIAIERPSGLLVDTLVEAGFVVYPIHPNVVKASRPRYSAALAKTDPGDAYLLADLLRTDGHRFRALCPVSDETRALRALVRARSDLVGARVGLANQLRALLESFWVGAVAIFGEIDSPIALAFLLEFPTPASAARLGQKQMAAFLRDQGYCGRRSPDELLQRLRAAPAIKLGPAEMEAKGALVGSYATLLDTTVKQIRLLTSAIERAVMAHSDATVFTSFPRIGKVNAAQILAELGPRDRFLSEEQLAGEAGVAPVTRMSGKHRAVVFRWACNHRLRAALTWWADNSRRASPWARAVYLSARQRGCDHPHAIRILTRAWLRVLWRCWVDAKPYDLTQHHAAAALKQPA

SEQ ID NO: 357184 - protein, 391 aa, unidentified
MKGVFMYYVGIDVAKDKNDCIIIDSEGNIVHDVFTFENNKLGFNTFYNSVSSLLPLEIRIGLEATGHYSLNLIDFIDSKQLPLIVLNPLSVNLYRKSCSLRKTKTDKIDCMIIAKMIRSSEYKPYSPVSYHLRELKTLTRHRFRLINEQSRLKISITRLVQILFPELTNHVWSIHQASSYALLKNYPSAAMISDVHLTKLTTLLQKASYNHYSKEKAIEIRDAARNSIGSNSVSFQLELLQNITLITAFQKEVKSVEKEIKKLMIEINSVILTIPGISYTLGSIIIAEIGDISNFDSSAKLLAFAGLEPGVHQSGRFESANQKMVKRGSKYLRWAILQAARLIAMRDPVFKEYMNKKLAEGKHFNVAKSHVARKLIRVIYKLLNSKTPFNR

SEQ ID NO: 357185 - protein, 385 aa, unidentified
MQKLNDLSRSLTPLKPDRTLIAVIEMSLSSWLVAGIVPGIERQPLKKLEVDESTLLKLLIRWREEAKKSGHSIERIAVAFEAGRDGFWLARWLRARDIEAHIIHASSVAVSREHRRAKTDRLDTELLKRAFLGWLRGERDHCKMVAIPTIKDEDAKRPNRERESLVGEQSRIVNRMKAALVRLGIRGFNPKLKKAVERLDGLRTPEGEPIPPNTLAELRRDMARRRLVNDQIRQIEDTRLERLEQAPSDGPHAMVRLLARVIGVGIETADMLVQEVLSRNMRDRRAIARYAGLTGSPDESGRKRREKGLARSGNARVRRGMIQLAWRFLMFQKDSTLAQWFRARTENARSTRKTMIVAVARKLLIGLWRLVREGVVPDGVVLRPA

SEQ ID NO: 357186 - protein, 428 aa, unidentified
MADPANATPACNLVAIDIGRYANAVLIEATSGKRHRFKMANTAADFGRLLNFLRTLPGDCRVGLEPTGDYHRPIAHRLLCAGFEVVSINSVALSRYREAIFNSWDKSDPKDAGVILEMLRCGAVQRYVDPMVVGTHDLQELAKTYYQVSRARTKVQHSLINHGLPLYFPEMHRYWATTRNEWFVRFLLQFPTPAHVRSLSRAQFVEAAWDVVGRKVNKQAKLEEIWEMAGATAALPHAVDSLAVETFRITLRRYQDLNELRADLELRAEQALQTNTDFAHLKTLPGIGSVIAMTILAEGGDLRRFGHHRQFLKYCGLDLAKNQSGTQRGKEQLSKRGNARLRLAFWLAAVAAVHMKENSFRAKYERYIRTAPEDADLRRKALTAVAAKMARVAYGLIKKNQPYRQFFEQSLPSGSIPLSAAVGAHATP

SEQ ID NO: 357187 - protein, 449 aa, unidentified
MHGAHIGGQRAAAFFKLVADLDPRRVLLVGIDVAKATWFVVVSDLTGVVVADGVRLVADRAGLAELERVIAELRWQLAAELVVVGIEAAGHQHQGLTAHLADRDGLHVRLLNPGAVAAIRKQQGNRRRKTDWLDAAAVCELLARGEGTLVHLDASMAASLRPLWSGRKDLVDTRSRLRQQAGALVDCLWPGFSAADKQAGVSPVLCDLFKTKAGRVIAGLLGEGWTPARFTAAPTTQLQAIFAARGCRLTRPLASRLRARAADALPAHPAATAGKAAALAGMLGVLDGIDAEVERLEAQMAPLLAATEGAKLTQIRGVGVVTASGFVAFVGRTDRWAEWSKVWRAAGLDPARSQSGAKDARLGISREGSAWGRRALLDLAAAVCRQPGRWGDGFRARTTQGRKPAKVALAATGNSIGRTCFALMRSGADYDPAWETKRTRSSKVGDQAA

SEQ ID NO: 357188 - protein, 360 aa, unidentified
MVMIAFDSHKHYTLASVQTKEGKIVEETRITHVRGNIRNYLGRWEKGSPVAVESIGNWYWIIGEIEEAQMQPRLVHARKAKLLMGGYNKTDRLDARGLNRLQQVGTLPTVWIPPQELRDQRELPRTRMVFAALRTRLKNRIHSVIDKYGLQDEFTDLSDMFSKQGRGRLNDCIQELPEQTGYTLEKLLQHLRVVEEQIQEVEKRMKETMQTSEELRLVVTLPAVGFILGTVIVQEVGEVHRFPSPDRLAAYSGTVPRVHASGGKVHYGRSRPDTNHYLKWAFCEAGNGVALQQKYYPERHVNQLYQRIRQRRGHGAAVGAVARHLAEATYWMLMKREPYLERGLSMLGPRKSKRVSVMSP

SEQ ID NO: 357189 - protein, 365 aa, unidentified
MKTKATVQSPKRKSIRTMQSLTIGMDLGDKTSRFCVIDKAGNVVTEGGLATTRKAITEKFAGLKHCRIAIEVGTHSPWVSRLLVELGHEVIVANPRQLKLITESSRKSDRVDAQTLARLARIDPALLRPIRHRSERAQMDLMVVRARAALVQARTSLVNTARGLAKAIGERLPKVDAEALDMEDASGLPQSLREVLRPLLETVEHLTAKIKAADKEIERLARTDYPETKLLMQVSGVGPLIALTFVLTVEDKDRFQKSRDVGCFIGLRPRRQDSGERRPQLPITKEGDMYLRALLVQGAHCILSRQGPDTDLKRWGEHMCTGGKNAKKRAIVAVARKLAILLHRLWVTGEVYEPLRNSDALAAAA

SEQ ID NO: 357190 - protein, 340 aa, unidentified
MRVLYAGFDLHGNSNYLGIMDGEGKRVFRKKLLNDLPWIREVLVPFKEELVGIAVESTYNWYWLVDGLMEEGYRVHLANPSAIQQYSGMKHSDDRHDAFWLAEMLRLGILPEGYIYPKEERPVRDLLRKRGHLVRLRTSLVISLQNILSRNLGRKVNVNDVKALREDRVVPLLEGHEDLALAGRVSKEAIDFLTHQIRRVEGVVLRKITLREAYRYLLTLPGVGKILALTIMLETGSIGRFATVGDYVSYCRKVPSQWTSNGKRKGSGNRKNGNKYLSWAYSEASELARRYDLEPRAYYHRKMQKSNAAVAHSALAHKLARAGYYVMRDQVPFDPGKLFK

SEQ ID NO: 357191 - protein, 409 aa, unidentified
MQPILQSCCGLDVHKSMVMACIAHGPLDKPPIFEIRKFSTMTNDLRSLSEWMKEYAVTAVAMESTGIYWKPIFNILEDDFDVVLANAQHIKNVPGRKTDVKDCQWIAHLFRNGLISGSFIPPREIRELRDLTRTRRKLVGVMTSEKNRVQKVLEDANIKISSVVSKVFGVSSLAMICALLEKDELSADEIAKMARGKLKKKVDQLVEALNGNVTDHHRFLLKQHLGHIDFLVEEIKEFDEEIQRRLMPYQKEFKDIQSVTGIKGISAASAIAEIGVDMSRFPDAAHISSWAGVCPGNNESAGKKKSGKTRRGNNYLKATLTEAAWAASRTKDTAFSAMYRNIAGRRGKKRALVAVGHQILIEVYRVLKTGDQYQDAGAAAVTERRLQNREQRMIRELKRCGYGISKVVA

SEQ ID NO: 357192 - protein, 345 aa, unidentified
MPIVGGLGIHRKQITFDYLDTATGEVGRGQIAPADRAHLRAWLARFAGRDDAAFALEGCTGWRYVAEELAAAGVAAHVAEPAGTAFARGRKRHAKTDKTDSRHLRVLLEQGRLPECWIPPAQILECRALLEAYHDLRREHTAWIERIHAVFFHQGAPRLGEGALRTERSLAALREAAAVHLSPAGQLQVATALDMLAAIEARMDTLRQQLLHAARHLAGARALQARLYGVGPLAGLAMTCWPGGAGRFSSSRKAVRFAGLDVTVYSSDGRRSPGHLSRQGPEILRWVAYEAGKTHGRASAPGHDYYAAVKDRTDGKIAALSQARKLIRQACHILAELGDDALTAA

SEQ ID NO: 357193 - protein, 355 aa, unidentified
MKVSTLGIDLAKNVFQLHGVDHEGHTILRKKLTRAKFVQFVIQLEPCLIGMEACSSSHYFARLFTRYGHEVKLIPPRYVKPYVKTNKTDAADAEAICEAVTRPNMRFVQIKTEEQQAVLALHTERGILIRERIACANSLRATLAEFGITIAAGQSHLTRELPAILEDGENGLSPFVRTSIYRQSKHIRELEEQVKQVEEALASWYRTQEACQRMAKIPGVGMLTATYVVAAVGNARQFSTAKQFASWLGLTPKEYSSGGKQQLGGISKRGDGYFRYLLVHGARALTAWVNRNGAVEENSWLQGLLERKHYNVAVVAMAAKTARIMWSMLSHNTEYQPRQLAWHKVSQSDEVLKKS

SEQ ID NO: 357194 - protein, 262 aa, unidentified
MNVAGIDVSAKELVVVVSVKGKAGKAKCFENTAAGHQAIIRLLSKYKGEARVCLEATGIYHFDLAVALSRAEGIEVMVLNPKVAHNFAKVLMKRSKTDAVDADILATYGERMPFVAWQRPADENITLRAIARRIAALTKLKTQTKNQIHALTATTETPDIVIKHINELITVLEKQLKAHRDSALTLIRQHAQLTTAFTLIMGIKGIANASAIHILAELMILPQDMTAKQWVAYAGLDPRQFESGSSVAKKPRISKAGNKFIR

SEQ ID NO: 357195 - protein, 348 aa, unidentified
MIIIGVDFHPEFQQIASVDTETGEFQEKRLAHREEAETFYRALAGQKVRVGMEASGHARWFERLVAELQFELWIGDAAEIRTKRVRKQKTDRQDAQLILRLLLEDRFPQIWVPSWENRDLRQLLWHRHRMVQARTRIMNQLQAVALNEGLRCKKRLWREHGRQQLESFLLAPWASRRRRDLLELMDRLNPTIAELTQAIEQEVEKCPEAQRLRTHPGVGALTALAFVLIIGKAERFGSGKQVASYLGLVPLEDSSGNRRRLGHITKQGSSMLRFLLVEAAQVTVRSVPEWRSQYFHLAMRRGRKIAKVAMARKLAVRLYWMMRQGWDYEQVKKFGSHAGQPGNRHGVQ

SEQ ID NO: 357196 - protein, 347 aa, unidentified
MTIVETRAVTGGVDTHLDVHVAAALDGIGGLLGVESFETTAAGYQKLLDWLAGFGALERVGIEGTGSYGAGLARHLHAAGVTVVEVNRADRADRRRQGKSDPLDAISAARAAQSGRASGASRGRDGQVEAIRTLMVTKRSARRDRTATINQMRALVSTAPDDIRSRFAHHSTLLLVTEAAAMRPRPGDAVDYATRIALRELGRRAVYLADEIDRIDELLTPLIASRAPALMALPGVGPDTAAILLIAAGDHPERLRSEAAWAHLCGTAPIPASSGKIIRRRLNPAGDRQANHALWRIVLSRMSFEVRTRAYVERRLLEGKSKMEIIRCLKRYVAREVYPLLRVAVAD

SEQ ID NO: 357197 - protein, 454 aa, unidentified
MQVVNPYSAGIDVGDKEMVVAVPEGLSEPRVRTFGTMTCDLHEIATHLKACEIDSVGMESTGVYWKPLFRLLIHEGFEVNLVNAAHVRNVSGRKDDENDAMWIQKLHSCGLLKSSYLPDEQQEALRTLVRHRKTLVQDGSRFVNRMQKSLELMNIKFHTVISDIVGETGKAVVEAIIGGERNAANFLPLISKRIKADSSTIEKSLQGNWLEEHLFTLKQNYEMYKIFWEKIAVCDQQIEKQLQQYEAKCNEGVIEEPKTVKEEPAVAPAGKKGKVVKKHGDKNRPRFDVHGYLERIYHVDVMAIHGINSTSALDIFAEIGTDLSKWKNEKHFVSWLNLCPNNKISGGKLISSKLFHKKPNPASLAFRAAANGVQKSDNWLGDYFRRKKAKGGNKYAIIATANKIAAIFYKMVRYKEEFKPVELEQYQQKYKQVKIAYLERKLTQLKQETEKAAA

SEQ ID NO: 357198 - protein, 344 aa, unidentified
MTHYAALDVSLRSVAICVVDGNGDIKLERSVDSEVEDIVHILRSFDGEITSVGLEAGVLTQYLTYGLQAAGYEVVCMEARQVKAALSAMRNKTDKNDARGIAQILRTGWYSRVHVKSMASHHVRALLSSRRAVLKKCVDLENEVRGLLKIFGIKLPGQLGHRVFDSTVRGTIEADAALAHALIPMLEARGFLYQTFVELDRRVKAMARADTLCQLLMTAPGVGPITALTYKAAVDDPRRFKRSRTVAAHFGLTPRRFQSGEVDRLGHISKAGDADVRTALYAAANSLMTRTVGFSTLKAWGMHLMKTKGRRVAVIAVARKLAVILHRMWIDGTEFHWGTEGANP

SEQ ID NO: 357199 - protein, 314 aa, unidentified
MSALCYLGIDVSKASLEWATSIDGSTTRTVTNDEAGWAELVALCQPLQPTLIVLEATGGYEIGIATALTVAGWPVAVVNPRQVRDFAKAAGLLAKTDSLDARVLALFAARMQPAPRPLVDDLQADLIALVTRRRQLVDMLTAERHRLALARSSVRASLNSHIRWLEARLRDTERDITTRIQRSPIWRVRDRVLQSVPGIGPNTSARLLASLPELGRLTRREIAKLVGVAPLNDDSGTRHGYRAIWGGRAHVRQALYMATLVAVRHNPVLSGFYQRLRRAGKAPKVALVAAMHKLLSIINAMVKTETTWAPAIAS

SEQ ID NO: 357200 - protein, 400 aa, unidentified
MRALLPRSPHLPNRFVIGSLPCNLKFSACGIMPEAVADERPSLPRVLEPVGELGSSSAVPSNPNSRLGRLRSPLRQGWDQMDATAQDANTYVGIDVSKDQLDVHIHPAGESFSVSRDAAGLEGLIEKLKPIALKAIALEATGGFESVVVASLAAVGLPVIVVNPLQVRKFAEALGKHAKTDTVDAAVIARFVEATKPEIRPLPGAETLALADLMARRRQIVQMITAERQRAMRITNASLHKSIARVLNALTQELANLDDNIDTTVKGSPIWRENEDLLSSVPGVGKVIARTLLAELPELGTLDRRQIAALVGLAPHTRQSGKWKGKSFISGGRTSCRTVLFMGALTAAKHNPDLKAFRQRLIDAGKPKMVAAIAVARKLLTILNAIIRDKTPWTQKPLDL

SEQ ID NO: 357201 - protein, 354 aa, unidentified
MNDHKYVGLDVHQASISIAVHNHQGKRISQAIIETKIDTIRDFFKGLSGTIHVTFEEGAQANWLYDLLQPLVAELIVCNPIHNRLLAAGNKADAIDADRLAYLLRAGSLKSVYHAALSTRPLKELVHIYDCLVSDCTRVMNRIKAIFRSHSIRSAGRSVYLKADRDQWLAHFEQPARRMRLQLLYEELDSLNQLRHQARLAMLKEARQQPAYKKLIKVPALGPIRVAQIIATMGTPFRFRGKRQLWAYCGLAVVTRTSSDYEFVAGKLLRKQKPAQTRGLNHNYNRRLKQVFKSAALDAIGREPMKGYYAAMIEKKMRPEMARLTVARKIAAVVLVVWKSQEEYDETKLIKQAA

SEQ ID NO: 357202 - protein, 370 aa, unidentified
MSVRRILAKTIDTDLEYEAIGIDLAKNCVSAALLTTDGEVVCIDRLDYSELEKSAQALSPTTFAMEPCTEMNYLVQKLEAWGHRCLVIGGKNVQNYVENHYSGQKTDLNDAQALAFLAQDTQLRTIKAKDIEQQKYASLTTLREQYIKQYRQTIVSLKGICQAWGLNISKGISGKARLKDLIENHAAFPEELKESLVDMVTHAQTAQKALNKITKTLEELAKSDKVCQLIQTIPGLGSICSCRLRATVGDIKRFKSPKDFPAYYGLVPRSIATGHNEKKGKITHRGDRTMRSLMVQAAGSLVNMATKGKLKSKQLTKWILKKQKEKMPWGKLVCAVAAKLLRIVRAVLISNKPYNSKIAGVAKCSLPKGS

SEQ ID NO: 357203 - protein, 410 aa, unidentified
MQTLVERGCGLDVHQATVVACLLIVLQSGKVYKQVRTFGTTTRDLMSLREWLLSEGCTHVAMESTGVYWKPVYAILEGAFEIVVANAQHVKKVPGRKTDVKDAEWIADLLCHGLLRASFVPPKPIRELRDLTRYRRKLVESRSAERNRLLKVLETANIKLASVVSDVFGASGRLMLLALAEGKDTAQEMAQLAKKQLRKKIPELQLALEGRMEEHHRFLLSVQLHRLWAVEKDLAIVEQRIQDKLKPYSVEVTLLNEIPGVDTTLAGAIIAELGVDMSVFENVSQLASWAGVCPGNNESAGKRRSSRIPKGNVYLKTALVEAANAVAKAKGTYLRDKFYRLKARRGYKRAAVAVAHKILVAIYHMLSHRVCYNELGDLYLDKLNKHHLTRNLVHRLQRLGYTVTLEQKAA

SEQ ID NO: 357204 - protein, 312 aa, unidentified
MEARYVGVDVSKDRLDVHVLPEGTAFAVARDGKGLAELVERLSALQPERIAVEATGGFETVVAAALAGASLPVVVVNPAQVRHFAQALGRRAKTDPIDACMIARFVEATRPDLRPLAGEATQLLADLVARRRQIIEMIVAERNREKRVAVMRIRKSIARLIAALEKELAEIDGEIDASVRGSPAWREKEDLLASVPGVGSITARTLIAELPELGTLDGKRIASLAGLAPFTRQSGQWKGKAMIAGGRKSVRSALFLASLVACRHNPLLKAFRQRLIDAGKPKMLVAIAAARKLLTILNAIPRDKQPWRAQTA

SEQ ID NO: 357205 - protein, 401 aa, unidentified
MWYVGLDWADTHHDVEVLDEAGKRVGARRFAHSHEGLNALKQFVLGIAASPEQLACIVETNHGLLITFLLEAGIPVYPVNPKTANQLRKSAGAKTDQIDAHLLAKIGRLDLAELRRLEPDSPIVQELKTLTRDQDALIQTQTRLVNQLTACLKEYYPAALHLFAKVQQRSALVFLQTYSTPQAAQAASIAEITATLRAGKHTNPTQGARKIFEEVHRPQLVANEVIVRAKSRLMLSLVKQLLVVIEEIASYDKAIRPLFLTHDDQELWSSLPRAGKRLAPRLLAEWGDDRSRYADATSVQALAGTAPVPFQSGNYAKAHKRFACLKPLRNALHQFAWQSTLHEAWALAYYQRKRAEGKTHSMAIRALANVWVRIIYAMWVKRESYETAVFETAQRTHGHAA

SEQ ID NO: 357206 - protein, 342 aa, unidentified
MKELKKVVGIDVAQKELVVTIGRLLEDLSVDLFSYKVFKNNEKGFSALVEWVSKLVENHEEVHYVMEATGVYHQKVAYFLDTNQLKVSIVLPNKISNYFRTLEVKTITDKTCSQVIARFGLERKLDLWKRPKTVYKNLQQLTRERDQIVAERVIVKNQLHAEKVEAEPNSMTLKRISERIKLLNKQENEIKNDISKILKNNAELKEEIDRMMTIPGIGELTAVIILAETNGFELIRNKKQLTSYAGLDVKEKQSGTSIKGKPKISKKGNRSIRKAMHFPSLVAVKWDENFKELYARLVSKHGIKMKALVSIQRKLLEMSYVLYKNQTIYDKEYKNGVKTHMA

SEQ ID NO: 357207 - protein, 449 aa, unidentified
MSSRRSGTTGLPVIHAHAAGIDIGSRFHVVAVAADVCAEPVQTFQAFTSDLERMADWLVALGIKTVAMESTGVYWVSAYEILEDRGIEVIVANARDAKAVPGRKTDVNDAQWLQRLHACGLLRASFRPGRDIAALRAYLRLRERHLDYAAAHIQHMQKALTFMNLQLHHVVSDVTGVTGMKIIRAIVNGQRDPKVLAQMRDVRCKASIETVHAALIGNYQPEHVFALQQALELYDFYQTRVADCDAKIQEVLTVLAAGKTAPGAPIPKARHRTAAGNAMNFDVRPVLYQLAGVDLTQIHGLGPYLALRLIGECGTDLSRWKTTKHFTSWLTLSPGSKISGGKVLSAHTRKTTNRVVAHLRLAAVTVGRTNTALGAFYRRLSARIGKAKAVTATARKIAILFYNAMRFGLDYQDPGASHYEQKYRERVIKQLHRRAAEFGFTLQAAECVS

SEQ ID NO: 357208 - protein, 375 aa, unidentified
MDVLYHRCAGLDVHAETIVVCALLGEEEHVQKEVETFPTFTKDLFRLLKWLEDRGVTHIAMESTGVYWKPVFNILEDYFDITLANAQRIKNVPGRKTDVSDAEWIAKLLRYGLIEKSFVPPENIRELRDLTRLRKKWIGQLTAEKNRIQKVLECSNIKLSSVISDVFGVSGRKLLERLMKQGYIEETEVDACIHRSMKRKKQQIQDSLFGTLTNHQLFMIRQSWKHIESLESLLRDIEERIDQLLQVYKQEMELLVTIPGVKKETAAVIIAEIGVDMGQFPTSQHLASWAGVAPGNHESAGKRKSTRTTKGNPHIKSALCEAAWALSRCRNQRLAAKYWSLAARRGKKKALVAIAHRMLTIIYCIISRKEPFREQ

SEQ ID NO: 357209 - protein, 408 aa, unidentified
MEVFYPRCAGLDVHKDTVVACARVVDDHNRVHLEVRSFEATVQGLVALSDFLRTHMCTHVAMEATGVYWKPVWHVLEGSFELVLANAAHIRNVPGRKTDVNDATWIAELLAHGLIRSSLVPPQHIQELRDLTRTRKQLVRQVARTTLRLQKTLEDANIKLSSVVSDTVGASGRAIIQALIDGETDPQRLIARTTGRLKASDERLAEALRGRVTEHHRFMLRLHLDQLDAIKKGIAQLEARMGDALQPFREQAAALTTIPGVSDLVAQTIIAEVGLDMSRFPSHRHLISWAGLCPQMNESAGKRRNSRVRKGAPWLKTVLVQAAWACTRTKDTYLRAQYLRLKGRRGPKKAVVAVAASILTAAYYVLRDGVKYRDLGGDYFAKRDKDRTVRRLTHRLQSLGYEVQLKAA

SEQ ID NO: 357210 - protein, 392 aa, unidentified
MRYVGIDVGSDSHVVAAVTADGTVAVKPTKITEDAAGYAKLFAVLGQAPVFLVTMEATGHYWRNLFAALVARGYAVALLNPLRTRRFAGEDLERTKTDSIDALGIARFGAQKCPAVTRLPDAATDELRELVRHRDRLVADFGDRVRQLHRLVDLGFPEFRRHVKSLDSMLACTLLAEYPNAQAFAGAAPGRLAKLVYDGVHTVGPELAAALIAAAKVSVGHHHGPAYRIQVRHTCQDLDLLRRRIRELDGDITRQLDDYEVGSLLTSIDGIGTNTAARLIAELGDLGRFRNAAALAAYIGVVPGLKQSGKRRGQRAGLCPIGHARLRAALWMPLLGAVRRNPWLKAFYDRLISRGKLPKVALVAALRKLLGAVFAVVRDRKPFVPRLAAAAA

SEQ ID NO: 357211 - protein, 312 aa, unidentified
MPERAITYIGVDIAKTNFVADLSGTSASFAQTEQGHASFIKRVPADACVVCEATGGYEASLVEALWAAKIPVAIVMPKRVRFYAKSLGLLAKTDPIDARLLSGYARACADTLRLYQPLSQAADQLRELLRARDELIEQIKIEANHAEHPSKHPLLAKQAAKRHHLFDQQLEQIQAAIKTLVAADPSLHQRSERVQQIQSIGPVSAWTILAEMPELGSLKKGQPSCLLGVAPFCQDSGSTSAQRHISGGRPRARRVLYMAAVSAAQHNPILKPFYQRLRSKGKSPKIALVAVMRKLVELINLTLKYPNFLLAQ

SEQ ID NO: 357212 - protein, 461 aa, unidentified
MQSEGDQKGSGSRQQIAGLPVVRRNVAGIDLGSKRHWVCAATVDGSGREVTDFGATTPELVRLAQWLKARQVESVAMESTGVYWIAPHEVLEAEGFQVLLVNTRQLARVPGRSKKTDPCDCEWIQRLHSCGLLTGSFRPPEDVCVVRTLVRDKANLVAECGDWLRRMQKSLDQMNVRVHRAVSELDGTTGMAILRAIAGGQRDARELAKLRDRRCRQSEQEIAEQLSGHWREDHVFSLQQGLKVYDALQERIADYEREIIRQLAHMEREECRGQEPPELNNTKKARTIRKRGEDPLRQALYRISGADLTAIDALGVETVQVVLSEYGPDLSRFPTEKQFVSHVTLAPHRPSSGGKPLKKKKRGSASSRVAAALRMAALSLRHSETALGAYYRQIARRIGADVAVFAAARKLAVLIYRWLRWGQSYVDQGAQAFEQQYQQRRITTLAAKAKELGYQLTPTTV

SEQ ID NO: 357213 - protein, 343 aa, unidentified
MQTITTIGLDIAKSVFQVHGVDANGLVVVRRQLKRRYVLAFFEKLAPCLVGIEACASSHYWSRQLQALGHNVRLMPPAYVKPYVKRQKNDMADAEAICEAVTRANMRFVPTKTPEQQSGLVLHRTRHLFIRQQTSLINAIRGHLAEFGVTAPVGRKGIEELLRVIADPSDKRVPDVVRACLAALGSQLLSLKKQILDFDRMIMAWHRSNQTSQRLNCIPGVGPLLATALVASVADPKVFRSGRNFSAWIGLVPKQHSSGGRARLGSISKQGDRYLRGLFVAGALAVIRYAKLHGTKYRPWVAALLARRPTKVAAIALANKLARMAWAMMARGERYNYPAALRV

SEQ ID NO: 357214 - protein, 313 aa, unidentified
MIIALRYVGIDVSKKHLDIFDEADGVPRRIANATQAITQQVARWQCDALVVFEATGIYDLALREALRQAGIQFARINPARARDFARASGLLAKTDPIDARMLAAFARAMQPAPEQVADPARGALARLAKRRDQLVLMRAQEKNRRSEADDRAMAERIGRLIEVLDSEIAEIEADISALIKAEAEIADDAKLMRSLPGVGPVACMQLIAQMPELGRVGPKQLAALAGLAPFNVDSGAFRGKRKIAGGRKRVRDALYMAALNAVRRADPFKAFYARLRQAGKPAKLALIAVARKLLTVLNAMMRDRKPYLQTKPT

SEQ ID NO: 357215 - protein, 350 aa, unidentified
MDRYIGMDVHAPTCTLAVMGPTGRRLHERVVETNGRLLVEAIQGIAGARHLCMEEGTQSQWLYELLERHVEQLVVVQPMKRAGNKNDSIDAWALAEQLRIGAAQKKSIFKGRRFPALRAAVRGQRAAMRDMVRAKNRLRAVYRARGLTPDADVYSPERREAWEKKLPSADRKLAEQLAQHLDVMMETYATANAWLEAEASKVPEVKRLCSVPGLGPITASQIVATVIAPERFRTKRQFWSYCGLGIVTRSSSDYVRDRSGRKWERRDVQQTRGLNRNCRPMLKSVFKSAAIAVLRLKKHPLREAYDKTVEAGTKPNLATLTLARRIAAATLAVWKKKEVYDPTKHRNQTA

SEQ ID NO: 357216 - protein, 347 aa, unidentified
MKTTSYEGKPVFIGLDVHREFFVASCICDGIVVKRCRMPGTAEAVISLVSKEFGGASVRAAYEAGYSGFWLYRKLVVAGIDCIVVHPASIEVSSRDTVKTDKRDSLKIAQQLAAGRLRGVRVPTEEQEQQRLLTRTRDQLMNKKRRVMVQIRMRLHYFGLFPASIQRRIKLQDVDEILGSLDGDLQRTIGMMRDEWVELAKRIKEIDRLLVEQAKGDPLDAVYRSVPGVGPLISRILSAELGDMSQFRSERALFSFTGLTPSEYSSGGHICRGHISRQGNTRLRHMLVEAAWKAVRKDPVIKEYYIKLSERIGKRKAIVAVARKLAGRIRSALRKHEHYRLNYRAAA

SEQ ID NO: 357217 - protein, 444 aa, unidentified
MLRFVGCDVHKRTAVFTILLEDGKLFATYTVPVTREALRAFAEQQLTAEDHLVMEATTNTWAVAGVLRPFVGEIVIGNPLRVRAIAEAKIKTDKVDSRVLAELLRCDYLPRVWQPDAETQRLRRLTHRRAALVSDRTRLKNRLHSILHHCLIPLPEFDLFSKRGIAWLKEIPLAAEEQMARDSDLRLLEQTELEIVELDQLLVREAWQDEKVRLVMSIPGIDYTVAQTCLAAIGDISRFANAKKLAAYLGLNPSTRQSGPHCYHGPITKQGNAHARWLLVQAAQHLGQYRGPMGQTMRKIIQRKNRSVAVVACARKLAVLLWHVLTTGEPFRYALPKTLEAKYSRLRVRATKQRRRGGVAKGTPRSARYGTGRTRALPSLPQVLAGNGLPQIAPLATGERNMLERKKLHDFYHELQTPSRIEANTRKAQTEEKEADARTQLTQS

SEQ ID NO: 357218 - protein, 407 aa, unidentified
MEILYPRCAGLDVHKDMVMARVRCVSEPRVDETRSFETTTHALMQLQEWLTSHGVTHAAMEATGVYWKPVWHMLEEHLELVLANAQHIRNVPGRKTDVNDAAWIADLLAHGLIRSSFVPPAPIQELRDLTRTRKQLVREISQHTLRIQKTLEDANLKLGSVLSSVLGSSGRAILDALIGGESNPERLADLAQGTARRKRAALIEALHGRITPHHRRLLKLHLELIAALERALEEVDADVGKLLAPILKCARLLTSMPGVSDLTAQVVLAEIGADMARFPTAAHLLSWATMCPRNDESAGKRRSTRTRKGSPWLKTALVTSAWAAVRVKNSYLQAQFLRLRSRRGAKKAILAVAASMLTAIWHMLKNGVEYHDLGADHFTRRDRSKAILRLVRRLNDLGCDVQLSQPA

SEQ ID NO: 357219 - protein, 362 aa, unidentified
MIGQRTSVGLDVHARSVVGRGLDVQTGDVLRARLTPAHEQIIGWLRSLPGPVKATYEAGPTGFGLARALQAAGIECVVAAPSRLLRPSGDRVKTDATDALHLAQLLAVGQVTAVAVPDEETEAARDLVRAREDARGDLMSARHRVTHLLLRQGIVYAGGAAWTGVHQNWLRSQRFPRPALQWSYDAALAALVAAEDRRDRLDAAIAELAAASRFTPITDRLACLRGICTLTGFGLAVEIGDWSRLSPATIGAYLGLVPSEDSTGESRSQGGVTKTGNGHARRLLIEAAWHHRPPYRPSAQLRRRWQRVPGAVAAHAAKGNQRLHARWRSFDARYKRPVVANTAIARELAGWCWALAVMHPDQ

SEQ ID NO: 357220 - protein, 337 aa, unidentified
MCIVTVGIDLAKNVFAVHGVNAAGQVQLLKPEVKRDKLLALMASLPPCLIGMEACSGAHYWAREFQKFGHTVRLIAAQFVTPYRKSSRIKNDAADAAAICEAVARPNMRFVPIKSVEQQSQLFIHRARQGYVEHRTALINRIRGLLSELGIVLPLAHAQFCKGVHAVLEDLPGYSNRVIGDLMSELDQTEQRMAQYDQLIVQIARQDAQAKRLMQIQGVGATTATAIVASIGNGLDFKNGRQFCAWLGLVPKQHSSGGKAKLGRITKAGDRYLRTLLVLGARALLRYAKDKDDPISRWALALQQRRGYGRALVAIAAKNARMCWAALRLGDNFKLPA

SEQ ID NO: 357221 - protein, 344 aa, unidentified
MEITTIGLDLAKSVFQVHAVDAAGKPVVRKALRRAQVLPFFAKLPRCLIGLEACGTSHHWARELIKLGHDVRLMPPAYVKPYVKRGKTDANDAEAICEAVTRPTMRFVPVKSPEQQAALSMHRTRDLLVKQRTQLVNMMRRLLAEFGIGVPCGLERALIMAREITEGLPPDVPAEAGKILAALSQQALDLHLRVRDIDRDLLVWQRGNDVAKRLMTIPGIGPVGAAALAASVTDPHQFRSGREFAAWLGLTPRQNSSGGKERLGRITKMGDKYLRKLLVIGMTALVKQVRYKPDAADRRLVDLLARKPTRVATVAMANKTARIVWAIMVREETYRAGHVPALTA

SEQ ID NO: 357222 - protein, 319 aa, unidentified
MKIFVGIDIAKLNHFAAAISSDGEILIEPFKFTNDADGFQLLVSKLESFDKNSIIIGLESTAHYGDNLVRYLVAEFYQVCVLNPIKTCQMRKNNVRKTKTDKVDTFVIAKTLMMQDDLRFITFFDLDMMDLKALGRFRQKTIKQRTRLKIQLTTYVDQVFPEIQYFFKSGLHQHAVYALLKEAPSPKEIASMHMTHLANLLKVNSHGHFTKELAKELRVLAQKSVGANDSAISIQITQTIQQIELLDSQLEKIEAEMTDIMKFNDSVIMTIPGIGYINGGMILGEIGDIHRFSNPNKLLAFAGLDPSVYQSGKVYRCCV

SEQ ID NO: 357223 - protein, 417 aa, unidentified
MAEEVEWFVGIDWASQSHQVCLIGARGECLGERSVAHGGPGIEELCDWLIARTGATPEVIGVAIEMTQGPVVEALLERGFCVYGINPKQLDRFRDRFTVAGAKDDRRDAHVLGDSLRTDRHAFRRLSNDEPVIVKLREWSRMTDDLQQERIRLASRMREQLWRYYPQMLELADDLAADWFLDLWNQAPTPAKAARLRQTTIERFIKAHRLRRWQAPEVLRILKQKPLSVAPGVVEAASDHIRTLTVRIRLVNQQLKAAHRKLDELCAQLIPSEENEPGQQCEQRDVVILRSMPGLGRIILAVLLAEVWQPLRRRDYHALRSLSGVAPVTRRSGKTSVVVRRYACNKRLANALYHWARLATQHDALSRRRYAALRQRGHSHGRALRTVADRLLSVACTLLEQQTLFDPAYEVREAAGA

SEQ ID NO: 357224 - protein, 345 aa, unidentified
MELHTIGIDLGKTVFHLVGLNQRGEVVVRKKFSRKQLLHFTANLQVELIGMEACGGAHFLGRALQEQGHAVRLMPAQYVKPYVKTNKSDYIDAEAIAEAVTRPRMRFVPIKSDDQLDLQSLHRVRERWVMRRTAVVNQIRGLLLERGITIRKGRCHVDAALPGILEDASAKLSGALRVLLAQLRLELDHLQTRIDEADAVIQQTAGENEACRRLVAIPGVGPVTATAIIAAIGNGAAFRKGREFSAWLGMVPGEYTTGGKQKLLGISKRGNTYLRRLFVQGARAVLQQSAKQSSGLSAWLTQLTARTHPNVAAVALANKLARMAWAVLAKNEPYRPPVLADAATD

SEQ ID NO: 357225 - protein, 397 aa, unidentified
MWTLGIDVAKRRHVATLLDEAGKRVFKNFSFAQSREGFKSLQHRIEVVDISTDNILIGMEATGHYWMIIYHCLADAGYQVRVINPMMTAARRNVGIRGSKSDSADSELIARILREADLKFSAVPDDKTRQLRDLMRLRFECAQTLVAEKQRLTALLDLVFPEYATNFSDIFGSASMEVLSQFPTAKDLAKVDIRRLTRILKEKSKGHMGREHAKKLKMSAKGSFAMNKSVDSFALEIRFIVQRMNLLSTQIEELAKQAKNHLKQEQKLLQSIPGIGPVWAPTILAEVLPVFHPEEKNGARKFVATAGLDVKLNQSGESKGRGKMSKRGSKYLRTAAMQAAEVAALVSRDPMFKGVYDKQRNRGKKHKVALSHAANKLLHVVFSVLKNRKPYELRLAH

SEQ ID NO: 357226 - protein, 332 aa, unidentified
MTHPLIPVGIDVSKATLHVAILLPERSKPQYQTFDNTEAGHAALQGWLVERGVTSAHICLEATSIYGHGVATALHQQGHRVSIVNPVRIHGYAKSQLKRTKADRPDATLIAQFCRDLKPSAWQPSAEDIETLQAYTRRLDALTHMLTQEKNRLAISPEALKPNIEAHITFLENQVKALKKQFRSHIKSHESLQAQADLLVSIVGIGPDTAARLLAEIGDIKAFGSARQLAAYAGLTPQEHTSGTSVQGKTRLCKIGNARLRKALYFPAIAFLRCAPELQPWCERLAAAGKTKMAIVGAAMHKLIRIVYGVLASNQPYDPSKLLPPKSAAATP

SEQ ID NO: 357227 - protein, 345 aa, unidentified
MTTTSTIPDPGLKACLGIDVSKATLDACLLQDSADRQRCRRRFANSLSGLQELLQWLEKLHPQPTEAVMESTGSYGELAAHLLHEAGHRVSVVSPLRIQRYAQSRCRHNKTDQVDAEVIARFGFTQEQNKKLPQWLPTPEPQAMLRELLRRREDVACQLQAERNRLEAAAAKSAVLQSLRRSLCWIEEEMTRLEEEIAQLLASQPDLAEDCKRLEAIPGIGPKSARWLVAELPRTLQSSRAAAAWAGVAPGLFESGTIRKPSRISPAGNRYLRKTLFLGAVAARHHDPRFKTFADRLAARGLSKMAVVCAVLHKLLRTAFAILKNKSTYEPSHCSVLPKTTQNPA

SEQ ID NO: 357228 - protein, 342 aa, unidentified
MSGDYDGRQYVGIDLHRRRSVIVRTTEQGEQLGWVRIDNDPVALGLELAKAGPDPEVVLEATYGWYWAVDALQTAGAHVHLAHPLGVKGFAYRRVKNDVRDAADLADLLRMHRLPEAYIATPHERELRELVRHRAKLVALRSGLKAQVHATLAKQGQLPAASDVFGRAGTAWLRSAPLELVYRQRIDSLLELIDAYDGEIETFRTMIANRFTGHRGYRAIQQISGIGPTFAAVFVAEIGDINRFSRPEKLCCWAGLTPRHRESDTTVHRGPITKQGSKLVRWAAIEACQHTRAGTKLSADRSRIIAARGRNVGIVAAARRLLTLVFYGLRDGEIRALAARAG

SEQ ID NO: 357229 - protein, 372 aa, unidentified
MMARNKKCRGENSAEVLKEVVLGVDTHLDAHVAVALDSLGRRLGELTVPTTKKGYEILVSWAEGFGPVGCAGVEGTSSYGAGLARHLRSAGIRVFEVERPKRRHLRRKGKSDSKDAESAARAVLAGETAGESKSGDGCVEMIRVLRAARRSAVKARTQAVNQLRGLVVTAPEALKQRLRGLSTKELVAVAARFRPGGDPGDIETATKFALRSVARRYQALSVEVSELDAQLDHLVTEAAPQLVSLPAIGTDHAATLLIVAGDNPERLGSEASFASLCGVSPVEASSGKVVRHRLNRGGNRDANRALHLICVVRMRVDERTRHYVARRTAEGKSKKEVIRCLKRYVAREVYRVLISAASPPPMGPCTSPASSP

SEQ ID NO: 357230 - protein, 422 aa, unidentified
MNEQEAVVYSVYVGIDWADLKHDVCICPRDSDTREFDVIRHCPEVIDAWVKDLHQQYGGRIAIAVELSKGPIVSALQKYDFIDIFPINPATLAKYREAFQPSRAKDDPTDAELAVDLLLRHPEHFKALKPQSTEMRTLTTMVEQRRCLVNERGRITNRLRSALKQYYPQVLEWFEHIDAPLFCAFLRRWPTLIQAKRARANTLKRFFHEHHMYRDGVGERRRQAINAASPLTLDEAVIAPYRMQVLVLVEQLELMFKAIDQFDDEIAKLASQHPDYALFQPLPGAGPSLTPRLMVAFGEQRERFSSAADVQKLSGIAPVTERSGQKHWVHWRLQCPTFMRQTFVEWAAQTINKSYWAGAYYRQQREKGSTYQAAVRSLAFKWIRILYRCWQSGVAYDESRYLKALERRGSPLVKRQEMPDSA

SEQ ID NO: 357231 - protein, 343 aa, unidentified
MEHYVGLDVSLKQTSICVVDRSGSVVREGVVDSDPEAISVYVRSKAPGAVRIGLETGPTSTWLWTELKRLGLPVICIDARHAKAVLKMQINKSDRNDAIGIARIMQTGWFKEVHVKDIDSHSVRALLASRALLVKIKRDLENHVRGLLKNLGLVIGRAKFNVFAVRAEELIEGRPELIATIRPLLEARNAVEQQVSELDRKVMKLARHDAQVRRFMTVPGVGPITALAFKATIDDPARFTRSRSVGAYVGLTSRRHASGEVDWTGRISKCGDAMLRSYLFEAAGVLLTRVPKWSAVKAWGVRLAKRNGLRKAKVAVARKLAVILHRMWIDGTEFNWSNKEVAA

SEQ ID NO: 357232 - protein, 425 aa, unidentified
MHSKVNNKINQVTENTLVVGIDIAKRVHYACFVDERGRVIEKAFAVHQSKEGFESLYEKIRQTMLETQKTEVIVGIEPTGHYWMNLAYFLDQYGIPLVMVNPMHVKRSKELDDNLPTKNDKKDALVIARLMKDGRFSYPRLLNEIEAELRIGSTLRSKLTEDLASIKNRIRRWLDRYFPEFTKVFPTFGKMALVALEKTPMPQELQGKTAEELVFLYRQVGGMKAPQLPKAKLLIEAATNSIGLTEGAQMAKHEIATLLRQYRLLETEIEEVNNQLAEMAKTTNEYDVLASVPGLGDATIVDLLSEVGSFSLYENPRQLIKLAGLTLRENSSGQHKGQKHISKRGRKKLRYILFKVIVPLIRHNQAFKHLHEYYTTRKQNPLRGKQSMVVLCGKLLKVLHGICKKKVYFNEQAMMKDLYCLGEAA

SEQ ID NO: 357233 - protein, 343 aa, unidentified
MKLHVLGIDLGKAVFHLVGLDSTGRVVIRKKCSRKQLLAFTANLEVQLIGMESCSGAHFLGRALREQGHQVRLMPAQYVKPYVQTNKSDFLDAEAIAEAVQRPRMRFVPIKSEEQLDLQALHRVRERWVMRRTAVVNQIRSLLLERGLTLPKGRSHVDALLPRILEDGELRLSGCFRVLLAQLKIELEQSTARIEQMDGVIQKTAKENEDCQRLTEIPGVGPVTATALVAAVGNANTFGKGRNLAAWMGIVPGEYSTGGKQKLLGISKRGNRYLRTLFIQGARSVMQQRHKQAPGLSSWLAQLLSRAHQNVVIVALANKLVRMAWAVLCKKESYRTPILAAAP

SEQ ID NO: 357234 - protein, 418 aa, unidentified
MADRITYVGLDVHKDSIVVAVAAGGLRGEVREYGRIANTPTALDRLLRKLGGDGMTLRFCYEAGPCGYGIQRRLSTGGHECVVVAPSLIPKRAGDRVKTDRRDAASLAKLHRAGELTAVWVPDARHEAMRDLVRARLDAVRSLRRARQQLSGFLLRHGCHYGRPAWTRLHRRWLAGLKFAQAVHHIVLEDYIAAVEAAEARRNRLTAQIEAMLSDWTLAPVVAALQTMRGMALVNAASLIAELGDLSRFANPRQLMAYLGLVPSEHSAGGSVKRGGITKAGNAAARRLLIEAAWSYRFPARLSRQLLLRQERQPRLIRDIAWKGQLRLCARYRKLARTGKPANIVTTAIARELSGFVWAIARQVAVTTDGSHKTNDPSQRRRQRTTQHRTSGQGRGRGRGQENPREHYLPNDHSDAGF

SEQ ID NO: 357235 - protein, 336 aa, unidentified
MNDATWFLGIDVAKRKLDIALLVTDKIKSKVFDNNTSGHAALTRWLIERGAIQSHTHICLEATGPYSEALAIALVDAGWHLSVVNPARIKGFAQGELARNKTDRADASMLARFCAAMRPGFWTPPSSEWRELRGWVDRLQALKDMHQQESNRLEAHLASGQAALVEAVQTHLDWLTKHIEQLERDIDDHIDRHPELKRDAELLHSIPGIGNTTIAKVLAYAGDVRRFASAKALAAFVGVTPRQRLSGTSVKGRSMMSRTGHADLRRALYMPGLVARRHNPLLKVFGDRLSAAGLAPKAVVGAVMRKLAHLIYGVIKSGQPFDPKFSTARLDFQDGI

SEQ ID NO: 357236 - protein, 344 aa, unidentified
MKITTLGIDLAKNVFQIHGVDELGKVIVKKQLKRDQLAAYLVNLPPCLIGMEACGGAHHWARKLMSFGHTVRLMAPQFVKPYVKTNKNDAADAEAICEAVARPNMRFVPIKDVGQQSVLSLHRVRQGFVSARTAQANQIRGLLAEFGVIVPQGIAHLYTRVPELIEDASNEMTGAFRLLIQRLLDHLKELNKQVDEMEAQIVQWHKHSQASLKLAAVPGIGPITASALVASLGDAKNFENGRQVSAWLGLVPKQHSSGGKEKLLKISKRGDTYLRTLLIHGARSVLYREQSKADSCSWVKGVATRRNHNIAAVALANKNARIAWALLTREKGFDAKHVCLKVAA

SEQ ID NO: 357237 - protein, 406 aa, unidentified
MKPTYFLGIDAAKHKMRATLSNRSEHVLFEKDLSVEATGLRQLLAAIKRQVKDPEQLLVLIEATGLLHLNWSAALTKAGYAVAVINPLIARRLYTLQNSIRDNKSDPIDARGLCTIGALHGEKLLVHYRFSLRPEQFTLQRAQSVRKALRSALSNLKKTYQSLMDLSFPELGGLLQLDGVGIRQLLIQAPTPAAIAGKRLSTLEKNWMVRPKAAALKALAADSMADPDLAAASGPALVALLEAVAAMEARLHALDLQIAELARTSVDPQTKALIETIPGFGPVNAAKTLAWLPTEILHSGSNRKVAARLQAFMGNDPRLRQSGQWKGHTKMSKRGVEMLRTAFFQSAFSAAHNDPELRTYYQCKRAQGKTHQVALSHLMRILTRRLVAVLRSGKPYQSHYNLKNAA

SEQ ID NO: 357238 - protein, 409 aa, unidentified
MFFVGIDIAKKTHQAAITSDDGKLIGKAFKFSNTIDGFNLFLEKLGAVSTELSQFEIGMEATGHYWLNLYTWLADKNFKLHVINPLQSDALRNLYIRKTKTDSVDSKIIADVIRIGQYSETQLADDKILSLRDLSRQRFYLVDMASDLKRKIIAMMDRVFPEYQDFFSNMFGKTSVQVMKECTSPEQILEIPTEKLTEMLKKASRGRFKESKAKELKELASNSFAAMLSSDMISLLIRQMLEQIDLLEKQISDIEQIIAVQFAEFNTKLATIPGVGTTLGATILSEIGDINRFEKPKQLIAFAGMDPSVKQSGNFVGTESHMSKRGSPFLRRAIWLASVVAVSHDPLFKYLFQQKMASGKNYSQAMGYICHKLLNTIFAILKTGEEYKPIYPPEIDVSKLANEAINSQK

SEQ ID NO: 357239 - protein, 318 aa, unidentified
MALSLLFVGIDVSKDWLDAWIERDRQPQRFGNDEPGWAALLAWLGAHGELSGLVVAFEATGGYERGLRHALLEAGVTVHKVNPLRVRLYARSLGRHAKNDRIDARMIARYAQAAETRPESLDSARERLAELVMHRRRLVTERVGVSNQIGTMRAAELIAHHRARLALLERQIAQTERLIEEALASEPGHGDTLRRLSTLKGVKRVTAATLIALLPELGTLNRRAIAALVGLAPFDHDSGRLQGKRAIAGGRSAVRSVLYMAARAAANSKGALAAFYKRLIAQGKSAKVATVALMRKMIVILNAMMRDQQEWRGAQPAR

SEQ ID NO: 357240 - protein, 356 aa, unidentified
MIYVGIDVHKHKCHSALMTEEGIILDEITFENNHEGLSTLIQRIQPLGEAKAVLESTGNFWIKTYEALEAATIQTTLSNPLKTRAIAEARIKTDKIDARTLAHLLRTNLVAASYVPDKETRARRSLLRHRATLVKTRTEIKNRIHNLLDKYDLKSDFSDIFGKQGMEWLRGLQLPTIDRTILNSNLTLLDSLETQIQNMNIEIAKLACNQEDVKLLMTMPGVDYYSAMIISSEIGDIKRFSTSEKLASWAGLAPSIRQSGSQTKRGHITKQGSRMLRWILIQSAQISHRSDPRFQSLHQRIATRRGNNKAIVAVAREMLTVAYYMLTRREEYRGMNMERYKEKLKRLERIANRGLQ

SEQ ID NO: 357241 - protein, 280 aa, unidentified
MKKDYKHFLGVDVSKKTLDLALILNHDKNSIVYTKINNTAVSIRGLSNWLTENGVDFDDVLLCMEFTGVYNRPLLNFIMKKNCAVWLVMPVAIKRSIGLQRGKNDKVDAKRIAIYACMFQQDYKPWKPASENITLLKDLISLRQRLIKSEKILRAPIKELKAMKEIRSVKVIEQNCKGAINQLQKDLKAVQNRIQEIITSDTNLITNYKLLLSIPGIGPFTALDLICYTNNFEYYNEGKQLACYAGTAPFEHTSGTSIRGKTRVSNMANHNLKTNFLMKE

SEQ ID NO: 357242 - protein, 441 aa, unidentified
MAMRKREEDDVFPNAAGIDVGASSHWVAVPRTAADEPVREFGTMTDDLHAMADWLLACGVDMVALESTGVYWIPVYEILEQRGLTVWLVDARQMKYVPGRKSDVMDCQWLQKLMSLGLLRAAFRPGDEVCVVRAVARQREVLLTEQGSWVQRMQKALVQMNLQLTEVLTDVMGLTGQAIVRAIVAGERDPKVLASHRHGRVKASAAQIERALTGNWREEHLFVLAQALAMFDSLAQRILECDTKIEALLVPLGRHDIALDGPGKRRTKNTPQFDARAALSRWAGVDLTRINGLSVTTVMTILSEIGPDLSRFASVKHFCSWLGLCPGTKISGGKVLSARTRRSANRVRQALKLAAMSLSRNDSALGAFYRRLSARMDKPRANTAVAHKLARMVYFMLTRGEAFVDQGQQRYEEQQRQRNIAALRRRASALGFQITPDTKEA

SEQ ID NO: 357243 - protein, 334 aa, unidentified
MQNITLIGIDLGKHSFHIHCQDKSGKVLLRKKFTRTKLIEFLAGCASSTVMMEACAGAHFMARRIADLGHEAKLISPQFVRPFVKSNKNDFVDAEAICEAASRPSMRFVQPRTEAQQAMRALHRVRESLVSDKVKTTNQMHAFLLEFGISMPTGVAVVKRLSTVLAENELPPYLAQLLMRLHAHYIYLVGQITELEIALEQELSRDETGQRLQTIPGIGPITASVLSSQLGDGKQYSCSRDFAASTGLVPRQYSTGGKNTLLGISKRGDKNLRRLLVQCARSSIQRIENQSGRLADWVRALLARKHSSVVCCALANKLARIAWAITTQQTVFER

SEQ ID NO: 357244 - protein, 382 aa, unidentified
MENPRPHEPAFTRSAREVAQGRGAEASLIQIVRADMAKTATEVQVFAGVDVSARELSVAMRSATMDREEVQSFSNNAAGHQALPGHLLRGKGRARVCLEASGNYSLDLALTLHANRRAEVSVVNPRRARRFAESLGERNKTDPVDAHVLCQYAVRMPWEPWVPPSALALRLRGLTRAIEALGVTQTQEKNRQHSLRASRALPTFVIRELQRHLEYLQLRITRLRREALRLIARDPELDRRFRLMLTTPGIAETSALQILGELAALPATLDARQWVAFAGLDPVRFSSGTTVDKKPRISRGGSRHLRRALYMPALVAIRHEPHLRAFFQRLVAHGKAPLQAIVAVMRKLLHAFFAMFRSDHSYDGSRLCLVEVASNPVAMCAA

SEQ ID NO: 357245 - protein, 394 aa, unidentified
MKLVGIDVGKNSHHFCVMDKETGEFNVTPSSFPNNKEGFDFLINSLKPYSKKSILLGMEDTGHYHVALLKFLLSNGYTVALINPKTTDLTRKMEGGITKNDKLDTITICDVLDTPERKKQYRITKVDRFDLYEQRQLTRHHHNLKEELNVYCNRLQKSIDLVFPEFNTLFSSKYGIVYMNLLKTFGSAEAIASTDIRTIRKCFEIKGRGGRISLTPEKLKECAKNSIGISSEVETIQIKHLVSQITLIKEQIAEIDKKIEEFSITNNSPILSIPGISHFSGTSILAELGDIGNYSKPSQIIKFAGVAPYHYESSQYNAQHTGITKKGSKYLRKTLYQIILPVINNNPVFKKYYLLKISQGKGHRCAQGHCIRKLLRIIYHLLETGQSFDPALLR

SEQ ID NO: 357246 - protein, 408 aa, unidentified
MRIIGLDIHRAFAEAVAWENGKLSRLGRIIMRREPLEEFAKQLSKSDIVVIEATGNAASVAALIGPHVSRVVIANPKQVRLIAHAKIKTDKIDAGVLAQLYASGFLPEVWIADETTQALRRQVTRRNQIVRQRSRLKNIIQSILHAHLIPSCPHQDLCGPKGRAWLSEQILPGDERLAVERHLREFDRLTDDLKVIERDLAQSALSDERARRLMTIPGIDMVVALALIAAIGDVERFAKPEQLVGYLGLNPSVRQSGPGPAYHGRITKQGRGHARGMLVEAGWAAARSPGPLRSFFLRVQSRRGQHVAAVATARKLAILIWHLLTKNENYLWARPALHARKLRDLELKAGHKPARGQKGTAHAYNLQSQRDQERRWVEQAEVAYARFVAGWNARGPKVRTGAAQEERQ

SEQ ID NO: 357247 - protein, 430 aa, unidentified
MSFKTRASLISYFLESGDFMNDLLQYLFVGIDVSKENNQVYAMNFSQEKLASFSTPNHQSGASFLEEKLLDILDRHHLSKIIIAMESTGIYSAHIATYLSASKFLFPFDVKVYVLNPKISRNYRHSFSDMDKTDPKDAYILSDLARVGRCNQLTPFKGPQKIALQRLTRHRHHIAELLAKEKVYALNNVFLKFSEFKGILSNDFSKTAVELLLNYKSVDEIIDVPLEDLVDFVMTSSKNRFADSNQIALTLKAAARNSYRLDKMAYEPINLSLAASFNCISTYQTELKSIDAAILKQVKGLNQNHYLSLISIPGIGPVYASGILAEIGQIDQFDSDDALAKYAGITWRKSQSGNFDAEDTRMTKTGNVYLRYFITEAANMARIHNPVFNEYYQKKFDEVKTHQHKRALALTARKLIRLIFGLLSTDRLYK

SEQ ID NO: 357248 - protein, 384 aa, unidentified
MVNNSITFIGLDTHKEFFEVAYIEDNREAKPISLGRINGTKPALQKLVRQFESKHPSSTLHFVYEAGPCGYWIYRFLTSLGHCCYVVAPSLIPKKAGERVKTDKRDAVKLALLLRSGDMAPIYVPEPEDEAMRDLSRARETAMKDLKDAKYQLKAMLLRNNIRCEIQDNWSAKHLRWLTELILPHPSQQIVLQEAIQTITERIRRLEPLDNELSYHVKNWRYYPVVKAIQAMRGVRLLVAVGVIAELGDLSRFDHPRKLMSYLGLVPSEHSSGGKRRQGGITRTGNTRARRLLVEGAHTYRYAANVSTELQKRQESLSKEIVDIAWQAQLRLCRRYQRLMKRGKHYNLVVTAIAREMIAYIWAISREVVLTPVNPAKRLSRVPA

SEQ ID NO: 357249 - protein, 355 aa, unidentified
MDSAKYIGLDVHKESISIAVLNAAGKLVMECVIETKASTILQFVRGMHGELHVTFEEGTWAAWLYDLIQPHVTEVVVCDPSQNALLNAGNKSDRIDARKLAELLRGNQLKPVYHGEHGVRTLKELVRSYLTISKDVARVMTRVKALYRSWAIPCTGKQVYAPSHRAEWLAKITVPGVHRRAEFYYQQLDALRSLRQQVRRELLSESQKHPAWKQLCQIPSMGPIRAAVLIGIIQTPHRFRTKRQLWAFSGFGIETHSSGDYRLVEGQLRRTNRPVSIRGLNANHNHDLKNLFKAAAIVAAHKPGPFQEFYTALLAKGIRPEMARLTLARKISAITLHLWKKGARFDAQYLKSQAA

SEQ ID NO: 357250 - protein, 346 aa, unidentified
MEQFAGLDVSLKSTSICVVDADGAVTARGEVPTDPDAIRNFFVARKIEPTRIVHESGQLSIWLTRGLDALGLPIICIDARLAHKALSAKLNKSDRADAEGLAQLARTGWFTPVHVRSETSDRLRTLIGARDRLIRLRKDLEGHVRGVLKTFGLRIVGVNQSRGRARFREQLAAAGETDPVLALVAETFIPAHKTLTDATEALEGELKAIAKESTLAQRLMTVPGVGVMVALGFIATIDDAARFRKSADVGAFLGLTPRRYQSGETDYSGRISKCGDSRMRALLFDAAASLIQQVKRFSPLKSWAVRLTARKGFKKAAVATARKLAVILHRIWRDGTEFHWTKEGTA

SEQ ID NO: 357251 - protein, 337 aa, unidentified
MEYFAGLDVSMDETHICVVDRDGGLVLETKAKTSPEAIAAGLAKAPECKRIVFETGRMAPTLYHGLDALRLPVICIESRQAYQALKSLGTHKTDRNDARGLAHLARTGFFKPVHVKSLPAHAVRALIIARKKLVGQRVTLENQIRGLAVVFGVRLPRGLSPAFAEQAIRGSQGIAGLSGAMRGLLAARNAVLKAIVAINGDLKRLVRSSEVCQRLMTIPGVGQLTALAFVAAIDEPERFRRSRDVGAYFGLVPRRYQSGEIDYTGSISKCGDRRLRTLLYEAANVMLTRYKPPLKLKEWALAIAKRSTMRKARIALARRLAIIMHAMLRHGTEFKAA

SEQ ID NO: 357252 - protein, 390 aa, unidentified
MGYDTGSLDGPKFYVVVKKHHNNLYYRRLIMDKYIGFDIDSKKTIACVVQKGKKDRFTTLKTDINRMKDFLNGQRRDGEKLHLTFEISGEAGYRHDALINLVDSITVSNPTKMTWIYRTAKKNDRIDSRKQAVLLSIGEVPKVYIPNREVRQWRVTIQHRRKMVSSITQVKNRIRMLLKANGFVKAAHRGSWWKVANRVWMRGLCEQAEINSEELWRMNLIDMLEGLWLLEGQLKRTTKYLDGYLDKQPGSRLLMSIPGVGPRTTEAVLAYTDDIRRFGRSKQYCAYFGLTPRLDESGSVRRLGHISKQGPSVVRWLIVESAWRAIRKSPGLRAFYERVMCGQAGRKKIAIVAVARKLLSIMRAMMMTGELFNEQLVCRECGMTGIRRTA

SEQ ID NO: 357253 - protein, 371 aa, unidentified
MKNTRFVGLDIHKERISIAVAESGRSGAVNYLGEIANDPGAIRKLCDRLRRPGKPLAFCYEAGPCGYGVHRQLTSLGHRCDVVAPSLIPTKAGDRVKTNRRDATMLSRLHRAGELTPVWVPDADHEAMRDLIRLRSVVRHIVTRARQHLQGFLLRHGRKHGRGTAWRMAYRRWLSTLAFEHPAQQIAFQDYVDAVMDAERRLKRVEEQIFSLLPEWTLRQVVDGLQAMRGIALINAVVLVAEVGDFTRFSNPRQLMAYFGLVPGERSSGETVRRGAITKTGNTHARRALVEGAWAYRMKARIGRHKVDRIEALPKIVRDIGWKAQVRLCARYRRLSARGKTANVVNVAIAREMVGFIWSIACTIQSAPKTA

SEQ ID NO: 357254 - protein, 373 aa, unidentified
MLNQINHTERKTAMSKYITIGMDLGNKKHTVCALDQAGKVLWRKDVANTPEALKPFFEENAGATVAMETGLCCRWISALAKSCGCDALVGNARKLAAIWQNKRKNDENDALMIAKLARADRELFHPVELRDDERHEIVQIIELREVAVSQRTQAVNSVRGLCKAHGVFIPKCDSSCFHKVAKEAIPADMAWKFKPMLRNLKEVAATIKLYDAMLEKYAKAHFKEEVELLQTIPSVGLITSCAFVALIADPRRFGSARDAGPYFGLTPGQDQSSEGDAPKGITKTGSTLMRHLLVTAANYVLRTSSPDTALKRHGERICARGGKVARRKAKTAVARKLAVVMLAMLKSGRPYDDGLAAGKAAEGKSPAAPELVA

SEQ ID NO: 357255 - protein, 397 aa, unidentified
MYIVGIDIAKRKHEAAVIDGDGAVIIKPFSFTNNCSGYNRLLAMLTKAKLPLDEVSFAMEATGHYWLALFTRLQKEGFRVQVINPVQTNSIRSFYIRQAKTDPRDALLIAEVIRFGHFSESTLHPENIYELRELCRGRHAIVSMQADVKRKVVALLDQVFPEYETAFTNMFSDTSMAILQTCPTPKELSEMPLEELCHLIEVSSHKRFRMAKARELQELARNSFGFAMAGDVFSTMIRLYAKHLDFLKQQVQEMDRKIAEIMDTLDTPITTITGIGPTLGAYILSEIGDISRFSSAAKLAAYAGIDPTMRQSGEYNGVRNRMSKRGSPYLRHAIWLAASSAVLHDPALKLYFQKKRDEGKPYMASVGHACRKMVSIIYAVMRDNKAYTPYIPNEISV

SEQ ID NO: 357256 - protein, 353 aa, unidentified
MTSAKYIGMDVHKESISIAVRSAAGKIVMECVIETKANVILDFIHGLRGELQITFEEGTWATWLYDLLKPHVAKLVVCDPRKNSRQGNKNDRIDARELSDRLYMNKLSSVYHGGAGVRTLRELARSYLTISKDLARVMSRVKAIYRSWGIPCAGKQVYAPRHRAEWLAKISEVGVLRRAEFYYQQLDALRPLRQEVRRELLAESKKHPATKLLRQIPSIGPIRAALLIALIQTPHRFRSKRPLWKYSGFGIEMHSSADYRKVEGQLQRSRKQVSVRGLNRDCNHDLKNLFKSAATIASVKPGPFQEFYAALVAKGMRPEMARLTLARKMATIVWIVWKRGVSFDAKYLKPQTA

SEQ ID NO: 357257 - protein, 316 aa, unidentified
MTIYIGADIGKDFFDVATTEQLKAKRFKSTPEGYQDFLKWLPTEQSIHIAMEATGKYSLGLALKLYEQGIPVSVVNPARIKRYGQSQLQRVKTDSEDAKLIAHFCMTQTPKLWQPERPVVAQLQEWYKFQELLIQQHVQIENQLQSSLSDEVQLFQRQQLAHLSKQLTEVENKIKKCLSCDALLTQQVKLLSSIKGFGETTAIRLVTLIKDINRFEKAKQLACFAGVTPRIRQSGTSVNSSVISKTGNADLRKVLYMPSLAAIRFNPVIRAFSERLKANGVRGKKMIVAVMRKLIHMVFAILKSGKPFDPEYRNCV

SEQ ID NO: 357258 - protein, 424 aa, unidentified
MVAVMIGIDPHKASHTAVAIDPAEVPLGQLRVRACAAQAERLLGWAQAWPQRTWAVEGAGGLGHLLAQQLVAAGERVLDVPPKLAARVRLLATGDINKNDPNDARSVAVAALRSAGVREVCRDDHAAVLKVWSKRYRDLGRARTQVACRLHQVLCELIPGGVPGEITAGQAERILASITPAEAVEAARWELAAELTEDLRAVDARIRETRKKTAAAVRAAATCLTGLFGVGPVIAAAVIGDVRHVTRFPGRDHFASCNGTAPIEVSSGGRKIWRLSRRGNRRLNHAIHMAAVTQIRYRHSPGRAYYDKKLAEGKTGKEALRCLKRQISDAIFACLQADAKRAAAAAAKSPGGQPGNHSAARAAGSHPDHRLFGQATPGPATHPTTPTADPDPASFPAPLPSRASGRPGPGPGKARPRSGASRRP

SEQ ID NO: 357259 - protein, 403 aa, unidentified
MTNRSMVWIGIDVGKFAHHACVVDDAGKVCWSQKIANDQRAIDGLVERALGTGDRVQWAIDLTSPLASMLITVLLTAAQSVVYVPGRVVNTMTHTFRGEGKTDAKDARVIAETARLRNDLAEVTMPHELAVELTQLTAYRTDLMAERVRGINRLRALLGSIFPGLEAAFDYSTRTALILVTGMCTPNEIRSAGIDGVTDHLVKNKAWPAGIAKTAAATVEAARGQDIALPGEAGTATLIKRLARKMLDLDREIKDTDKLIAEHFRRHPHARIIESLPGMGPGLGAEFVVATGGDMASFATAGRLASYAGLVPVPRDSGRVSGNMHRPKRYNRRLRRVFYMAALSSLKMAGPSRAFYDRKRGERMIHTQALLALARRLVDVLWALLRDRREFTSEVPARLTAAA

SEQ ID NO: 357260 - protein, 357 aa, unidentified
MDGSSEQPRMTAGVDLGDKYSYLCLIDQHSAEVMEEGRLRTTPEALRRRFASERPMRVAIETGTHSPWVSRLLEECGHEVLVANARKLRLIYANKQKTDEVDAENLARLARLDPKLLYPLKHRGEDSQAHLALIRSRQALVGCRTQLVNHVRGAVKSFGARLPKCSARSFHKRASEHIPEALWPALGPILEQIGSLTERIRDYERQLETISKEHYPETELLRQVEGVGPLTALTFVLTLEDPYRFEKSRSVGAYLGLVPASDRSGDRDPQKRISKEGDEMLRKHLVGSAHYILGPFGSDSDLRRHGEKIASRGGKNAKKRAAVAVARKLSVLLHRLWVSGEVYEPLYNAHRCEGVAA

SEQ ID NO: 357261 - protein, 315 aa, unidentified
MAPPLLFVGIDVAKAECVVALRPPGTTWSVPQTEAGWAALATRLQALAPTLVLCEATGGLELPLASVLAAAGLPLAVVNPRQVRDFAKAKGLLAKTDALDAAVLAHFAEAIRPLPRPVPDATTQTLAALVTRRRQLVEMCTAEENRLGSAPPSLRAGLRAHIRWLQRQLASLHTDLNQTIRTHPGWRVQDDLLRSTPGVGPILSSTLLGGLPELGTLSRRAIAALVGVAPWARDSGRHRGARRCWGGRADVRAVLYMATLAAVRCNPVLRAFYQRLLAAGKLKKVALVACMRKLLTILNAMVKTQTPWTPQVREA

SEQ ID NO: 357262 - protein, 314 aa, unidentified
MAMPASCLEIGIDVAKDDLVIHLLNWNQTLTIDNTPQAIRQWLATLPKGCDIALEATGTYHMDLTERAHAKGHRVYMVDGYRLSNYRKGVGTRAKTDRADAQLLARYLHKEKDELRPWSPPPKVYRMLQSLLRRRAALVKARTALRQSLSGEPELKASLQALITEMDRVDTVIQKRLKSAVSTAGLQAQVQRCDAINGVGEITATALVMAFLRGDFKNSDAFVAFLGLDVRVRDSGTLRGKRKLTKQGDTEVRRLLHCAAMSASRHPVWRAFYQRYRDRGMHTTQALVILARKIARTAFALMKQQQEYCPAKLF

SEQ ID NO: 357263 - protein, 432 aa, unidentified
MKNQTNQKLEAITTNTLIVGVDVAKSLQWARFVDYRGMEIYKTISFQNDKNGFENIVASINEVCNSKVLKNTFNKVIIGMEPTGHYWKALANYLGEKGFTVVGVNPYHTKKAKELDDNSPTKCDKKDAITIARLVKDGRYFEPYMPQDIYAELRNLSNSRISLMKRHNALKNTIIAILDEYFPEIYKVFKKPLEGKASMQILKVCPFPKYIIELGESGILAEIKKAVKKTVGAKKVRQLIDTAKNSIGVEYGLSSAKLKLSLMVEELELLQKQLEQIERAMGEAMNETGYAKQILGIRGIGVVTGATFLAEIGDPMRFNNERQISKMAGYNLVEDSSGNSKSGTIISKRGRKQLRCVLYQMAFTMIGNNPEINKLYKYLINRKENPLKKKQAFVVISKKIISIIYCLIKKQTTYNPALVLGKERIRIMEKAA

SEQ ID NO: 357264 - protein, 349 aa, unidentified
MDRTTYGLDIAKNVMQLHWVEAETGEIGRKKLARAKLAAYFAQLQPVRIVMEACGSAHHWARVLGGQGHQVELLPAAQVRPFVRSNKDDAADARAIWLAAQQSDIRRVPQKSVQQQAVLALHRTRSHWVSVRTATLNSLRGLLYEFGVVLRGGRQAGLKALAEQRAAIDEQLPAMMRTLLDGQLCTLEQIGQRIDQLEREIAALNEQLKGAPELDRVPGIGVLGCSALSATLGDGKAWRSGREFSASLGLVPAHAGTGGKVRVGHLSKRGDPYLRTLLIHGARAVIEHAKDKPKWLQDLLARRPLNVAVVALANKMARTAWAIVAHGRAYQRDWRSSKPGSGAAQAAAA

SEQ ID NO: 357265 - protein, 368 aa, unidentified
MSHYVTAIGLDVHARSIKAFALNPMTGEAERASFGYDPAAVAEWALGFESPRAVYESGVTGFHLCRALRALGLDCVVGAVSKMQRPAADRGRKTDRRDAEFLARLLATRNVVEVWVPDERTEAARDLSRALADARDDLQRAKQRMSKFLLRHGHVFDESTPTGRRRGNWTRAYWKWADAIEFDEPDDAAAYEHYRDCVRRCQEARDELAGKVAESAGRPEWRPVVDALRCVKGCDVATAFLLACEAGDFSRFPTAPAFASWCGLTPSEHSSGETSSKGGITRAGNAHVRSALVEAAWHVPMSSRDPKPLAPGQEVAPAVRRHATKCNRRLIDRREAMAGAGKRPVVANCATAREMACWAWAIARMAAE

SEQ ID NO: 357266 - protein, 350 aa, unidentified
MMIRVDLVLTQHGTMYVCVMDNSGSIVYHKNMPSTPEYLQHVISLYGTDNVIGVECIFTWYWIADFCSDRSIPFALGHALYMKAIHGGKSKSDRIDSEKIAAMLRGGMFPVAYVYPKEMRATRDLLRRREYFVRHQAELYTHIENTNAQYNFDSVLETRKMKSSAYRSTLPEQFTDDFAQKTIKADMFLADSFHTLIYSIEKEIKAQATVHDPHSLELLLTVPGIGDTLSLVILYEIQDINRFSGVGNFISYCRLVKCAHESAGKKTGGGHNKIGNAHLKWAFSEAAVFFLRKNERAQKMHQKLVSKHGKGKALSLIAQKIGRTVYYMLKHNTAFDPDKFFQDGISEPVV

SEQ ID NO: 357267 - protein, 365 aa, unidentified
MPSVPHLGPTHLGLDVHKDTISVAILVPDHESPAVDRIPHDEPSVRRLVGRLGDPRWLRACYEAGPTGYDLARLLHSMHVRCEVIAPSLIPKAPGDKVKTDRRDCRRLARLHRAGELVAIRIPTVQEEAVRDLCRARADLVVDRTRARHRLGMFLLRHGRVWRGGNAWTLTHERWLLAQRFEEPALAATYAHYRAVLDARDAQLEAIQADLAGWYDAAPFADAVHRLAAYRGITRLGALTLASEVCDWRRFPHAAAFTGFCGLVPSEYSSGTSTRRGHITKTGNAHLRAQLVESAWAYQHRPAVGLELRERHKGLDPAVLARAWAAQLRLCGRFRRLAARKDSKNVVVTAIARELAGFVWAEMAA

SEQ ID NO: 357268 - protein, 344 aa, unidentified
MSKVTTVGLDIAKHVFHAHGVDDRGRPIFSKRISRGKLLDFFAAQPSCMVALEACGGAHHWARQLIQLGHQVRLIPPAYVKPFVKRQKNDAIDAEAICEAALRPNMRFVAVKSEQQQAAGLVFRTRDLLVRQRTQLINAIRGHLTEYGWIAPKGPSHVAMLADLIEREAIASSLPEAARAMFRCMLDQLAGLNGKIADLDKEIARRAREDEVSRRLMTIPGIGPISATAIAALAPPAETFAKGRDFAAWLGLTPLQRSTGGKQKLGATSKMGERTLRRLLIIGSSAVVQQASRRGAPKGSWLEQMLARKPRMLVTVALANKTARIIWALLVKKENYRAPVAAKA

SEQ ID NO: 357269 - protein, 276 aa, unidentified
MDHFAGLDVSVKETSVCIVDDTGRIVREVKVASEPEALLAVLTNPACHFKRIGLEAGPLSQWLFSALAEAGLPVICVETRHMRAVLKAQINKTDRNDARGIAQMMRVGLYRPVHVKTLRSQKQRMLLTHRKLMQSKAIAIENDLRATLRNFGLKVGVVGTVKFEARVKELVDNTPDLVVLVEPLLIVRRVLREQIGILHRRLLAIVRKDAVCRRLMTVPGVGPVVALTYRATVDVPSRFRNSKAVGAVFGLTPSKHQSGESGRMSGVSTSETDFAD

SEQ ID NO: 357270 - protein, 361 aa, unidentified
MKTVRSNELNFDGQNIYVGIDVHLKSWSVAILSEYTNLKKFSQAPDPEALHKYLASHYPGANYFSVYEAGFCGFWIHEKLTDLGFNNIVVNPADVPTMSKEKLRKTDAVDCNKLARELRSGSLEGIYVPGTETLEMRSLIRLRNLIVKDSTRAKNRIKSLLRFHGVEIPEEFTRCSIGCWSKRFLNWLHTLELSTEYGKKTLELHLEQFVRLRKMLLQETRGIREISRKAPFEKPISLLTSVPGIGITTAATLMVELDDIVRFKNADHLASFIGLVPMCHSSGESNGMGDITIRRHFMLRCLLVEAAWIAIRKDPAMTMAYTEYRKRMNPQKSIIKIARRLVNRIYFVLKHEKEYVPCVVE

SEQ ID NO: 357271 - protein, 400 aa, unidentified
MRVVFGIDVSKVSSEVAILVNGEKVHNYTMSNDAIGFSRLLGDLKTVHKPEIIFEATGVYSRRLQSFLDEHGYAYTRLNPLEAKKQLDSLRVRKTDQIDAEKLAQSQFVLNRKTTYVQEEIYQNLRDLSRFYQNLTEDIVRAKNRLHKALQVTFPELENILSTPSGEQYWNLVIAFPCKDFVLDLSKDELSESIRQSTSKRISDKRVAYLAEKLIALANQSYCAVKKTSPMLEEVRYYAKELFRLSEQKQTILDEMVELAQPLPEYDILLSIPGIAETTATSIIGELGDIRRFQSANQINAFIGIDLRHYESGNFLAKEHITKRGNPYARKILFKCIHNIASASNTNPCHIADFYEKRKRQSQTTSTKPHTIASIHRLIRTMYYLIMHNKLYDYASTQNR

SEQ ID NO: 357272 - protein, 343 aa, unidentified
MDIKAVGLDIGKSWFHFVGCNRAGKPIARHKFNRAQLAQFIVNLPPCLIGMEACPGSQHLARLFQRHGHDVRLIAPKFIKAYLKSQKNDFNDAEAIAEAVTRPTMRFVTVKSNEQLDLQALHRIRERLVRQRTAIINQIRAFLIEYGLPVKEGRAALRRDLPSILENAENGLSDRMRQLVARLQEHWKYLDASINEYTREIELIAKRHDSCRRLVTVPGIGPLGATALVAAIGNGAAFKRGRELAAWLGLVPRQQSTGGKPTLLGISKRGNPYVRKLLIHGARSLLKHLHRENHELGLWMTQLEQRAHKNVVAVAVANKIARIAWAVLAKGEVYRASSAVAAV

SEQ ID NO: 357273 - protein, 420 aa, unidentified
MPIHPSDFAAVIGLDWADRKHDICLLEAGQQTPEFSILEHDPVAIDAWAAKLKQRFGGRAIAVCLELARGPIVSALLEYDFFVIFPINPAMLAKYRRAFSPSRAKDDPKDAFLALDIFRHHFDRLAPLRRERPAMRALQCLVQGRRALVDDRCRLVNRLTCTLKEYFPQVVRWFRDKHTDVFVDFVTRWPTLDAAKRAHRDTLVDFFHAHNVRHSKACERRLDAIQDARPLTSDLAVIEPNRLMAQALLAQISALSKAISQFDAEIDARAAELPDFEIFKALPGAGAALAPRLLAAFGENRDRFPDAASVQKYTGIAPVVERSGNKSWTHWRFIGPTFLRQSFIEWVGETVPRSFWAKAFYESRRAKGTPHQVILRALAFKWIRIIWRCWHDRQPYDEARYLLALQKHHSPILAHAAQSP

SEQ ID NO: 357274 - protein, 407 aa, unidentified
MIFVGIDWAEEHHDVHVMNPDGQPLGRTRVPEGIDGIARLHALVADHADDPAEVVVGIETDRGLLVTSLVAAGYQVYAVNPRAVDRYRDRHAMSGAKSDGGDAKVLADLVRTDRHNHRQVAGDSDLAEAVKVTARAHQNLIWTRQRQLNQLRSALREYYPGALAIFGNDLAHRDAVAVLAKAPTPELGRRLSTAQIASALRRAGRLRNVEVRAAAIREGLRAPQLTAPDIVADAYGTSAKALISVIATLTAQIADLESALADRFEQHPDADILRSLPGLAIILGARVLGEFGDDPDRYADAKARKNYAGSSPITKQSGSRKLALARYVRNRRLADAITLWAFCSLQSSPGARTFYDRHRAAGDTHHKALRALSNRWVGILHGCLRHRATYDEATAWGHLIKDLEAAA

SEQ ID NO: 357275 - protein, 408 aa, unidentified
MEVLYPRCAGLDVHKDSVVARIRCITQPPHDEVRTFGTTTSALLELNQWLSTHGVTHVAMEATGVYWKPVWHLLEGDFELVLANAQHIRNVPGRKTDVNDAAWIADLLAHGLIRSSFVPPAPIQELRDLTRTRKQLMREISQHASRIQKVLEDANLKLGSVLSDVMGKSGRAILQAIIDGQSDPQKLADLAQGNARKKRAELVEALHGRIRTHHRGLLKVHLELITALQHAVAELDATVGKALASIHESARLLSTMPGISEVTAHVIVAEIGVDMTRFPSDAHLRSWAGLCPRNDESAGKRRSTRVRKGAPWLKTTLVSAAWAAVRTKDSYLQAQFHRLRARRGAKKAILAIAASMLTAAYHMLKNAVEYKDLGSGHFARRDRHKIIQRLVRRINELGCEVQLIPRAA

SEQ ID NO: 357276 - protein, 433 aa, unidentified
MPTNHPYDLVIGLDRSDRTADLHLIDTRTGNVQKQTVATSPEALHDWLAQLRQDHPQARVALCLEQPAANLIVFLETYSWIHLYPINPISLQKFRETFVTSRAKDDGKDAQYLAELLLSHHHKLKPWQPDDSQTRQLQQLVLHRRAVVDQRTGLTNRLKALLKQYFPQALDLCGEDLWRPLATAFLLKWPTLQSLKKARKESLKHFYYLQRSRSQTLIDQRLERIDKAVPLTEEIALLQSYTLRVQLLCKELQLLLKTLEQFDQQIANVFQQHTDRPIFEAFPGAGPVLAPRLLASMGSERERFPRPGNLQCLSGVAPVTKQSGNKCYIHRRYLCPKFLKQSFHEYAKESILHSRWAAAYYGQQRNKGCGHHTAVRALAYKWQRIIWKCWQTRTVYKEAIYEAALKKNKSPLVSLLDQIELGKSPVKTRVKKS

SEQ ID NO: 357277 - protein, 297 aa, unidentified
MSVYVGIDVHRKRSQVAVVTEDGTVQLNKNVVNGSEPFLRLIGDLPSGTPVAFEAAFGWSWLAELLEDYGFEAHLVHPLRCKAIASARLKNDKVDAAILAQLLRADLLPEAWLAPPRVRQLRALLRHRASLVRLGTQLRNRIHAVAADHGYDRSASYWTGPGRGWLAELDLPAASREIVGDCLAVIDGLAPLTGRIDGELHARARADPRVKVLRTLPGVGEFTALVMLAEIGDITRFGSARKLASWAGLTPTVRGSDLKVRHGHISKMVCAGGMVPLHRPGGVRWRWLEDWICIGVS

SEQ ID NO: 357278 - protein, 351 aa, unidentified
MERYLGADVHAASVTFCVLDASGKQLRRDVVETNGKALIGYLQQIPGNLHLCIEESEWSQWLYEILSPYVVELVVYRGKWTPGMKSDAIDAHGLAEKLRTGQIDRPVYKDARLFTALRDHARTYTMITRDLARVKSRLKSFFRSRGLPCTGEAVFKPEERAKRARALPPATREAVDLLGRELEQLKVLKAEAEVAMLRESHRHRIARVLETAPGLGPVRVAQMLPIVVTPHRFRTKRQFWSYCGFAIVTRTSSDWVRENGRWVRAPVVQTRGLNFNHNPTLKMLFKGAATTVIAHAASNPLREGYDRQLENGTKPNLAKLTVARNIAAIVLAMWKTEEPYDPRKIHELSRS

SEQ ID NO: 357279 - protein, 411 aa, unidentified
MEVLYPRCGGIDVHKTSLVVCLRQQDGRRKHTQVQSFGTTTAEILRLHAWLSEAECTHVAMESTGVYWQPVFNLLEGSFVVVLANARHIKAVPGRKTDVRDCEWIAELLAHGLIRASFIPPAEIRHLRDLTRHRKSLIRDRVKAANRVHKLLEAANIKLGNVVTDVLGVSGRAMLDALVTGQTDHHRLAALARGSLIPKVTQLAEALQGRFTAHHAFLLQQILAQLDQLASLIAACDARILDVARPMDAEIQRLQTIVGVGRRSAEVIVSEIGLDMSRFVSSGHLASWARICPGTHESAGKRRSAGTGTGNNWLRTTLLESAWAASHSRKSYLGAQYRRICKRRGPKRAAIAVAHSILVVAYHVLRQGVVFQDLGADYFDRVDTGKLKRYHLRRLEALGCDVSKVTSASAA

SEQ ID NO: 357280 - protein, 355 aa, unidentified
MTSTKYIGMDVHKESISIAVMNVAGKIVMECVIETKASMILQFFDGLRGDLQVTFEEGTSAAWLYDLLKPHVTKLVVCDPRKNASMREGNQSDKIDARRLAELLRLNHLSPVHHGEHGLRSLKELVRSYLTITKDLGRVMTRVKAIYRSWAIPCTGKQVYAPRHRAEWLGKIGEPGVRRRAEFYYQQLDALRTVRQQVRRELLAEGKKHSAWKRLCQIPSIGPIRSAVLLGILQTPHRFRTNRQLWSYSGFGIETHSSADHRRVNGQLQRAKKQSGIRGLNRNCNHDLKNLFKGAAIVASSKPGPFQEFYSALLTTGLRPEMARLTLARKIATIVLIVWKRGVCFDAQHLKPQTV

SEQ ID NO: 357281 - protein, 286 aa, unidentified
MNQELLVVGIDISKNFLDVFVSGSATLQRYANDASGRAQLATDMLALAPNLIVAEATGGLERLLIAELAAQQLPLVLANPRQVRDFAKASGQLAKTDALDARVLATFGIAIRPTVRPLPEEQALELADLVGRRRQLVDMMVAEKLRLQQAAGKALRRDIKLHIQWLEKRLRASDAGLNDAIQKSEIWRAKDDLLAEVKGIGPVCRITLLALLPELGHLNRKQIAALVGVAPFNRDSGYYRGTRRVWGGRSEVRKVLYMATLSAIRSRNEVVHSFYRRLKEQGNPAK

SEQ ID NO: 357282 - protein, 369 aa, unidentified
MGEYSEAFVAFDVAKTKHAVAIAEVGRGGEVRFFGEVSSSPAAVERLVGKLAGRYGKLHFCYEAGPTGYGLYRQIEALGHSCVVVAPALIPKKPGERVKTNRRDAVTLARLHRAGELTGVWVPDATHEAVRDLVRARTAAADDLRRKRQQLLSFLLRHGRVYSGSGHWTLAHRRWLAKQSFEHAAQQIVFQEAIDAIEDAAQRLRRLEQQLVQIVASWSMAPVVDAYQAMRGASFLVAVTFAAEIGDVRRFDNPRQLMSFLGLVPAESSTGERVRRQGLTLAGNRRARRVLVEAAWTYRYPARVGETLRARLDGLPKAVRDIAWKAQIRLCARYRRLSLTGKKLPVVVAAIAREMAAFLWAIGRQVAPA

SEQ ID NO: 357283 - protein, 339 aa, unidentified
MHVLIGVDPHKRSHHAVAIDGDERRLAELNVRAATDQTERLLAWAARFPERRWAIESAAGLGYLLSQQLVDAGEEVLDVPATLAARVRVLGSGRSQKNDPNDALSTAIAALRHRGLRQVRADDHSAILRMLATRHHDLGSLRTQTACRLHAALAALIPGGFSGRLSAKRAATMLRSVRPTDGVVAERKAQALELVSDLRRLDAAIAALRRRIVVAVDASKTSVVEVYGVGPVVAAIIVGHTGDVTRFWTRNHYASYNGTAPIEASSGPKKRHRLNPRGNRQLNHAIHMAAVTQIRNETPGRAYYERKIAEGKTKKEALRALKRRVSDAIYRQLLVDADR

SEQ ID NO: 357284 - protein, 385 aa, unidentified
MRSEATREGETIVGGQVLYMALELSERTWKVLFASPAGRRRERSVAARDVAALLEEIAAAKRRLGLPAQARVVSCYEAGRDGFWLDRALRAHGIDNLVVDSSSIEVARRARRAKTDRVDLVKLMGLLLRWVRGEAKVWSVVRVPSTEAEDIRQLSRSIERLKGEHGRHVTRIKALLATQGLKLARIGGRDWGKRVGELRGWDGSALGTWLQRDLVLEGERLAVVAEQLAALKAERDRLVAEGREAAAVKARELARLGAIASESSFVFATELFGWRTFSNRRQLAGSVGLTGTPYSSGQSAREQGISKAGNKRMRTMLVEIAWCWLRYQPTSALSRWWQERFANTGGRARRIAIVALARKLLVALWRYLEHGIVPQGARLKRRAAA

SEQ ID NO: 357285 - protein, 396 aa, unidentified
MMTIGIDIGGKQHAVARCQEGRAKADREILRVSQDRAGFDHLDAWLARQPEAVSLVTMESSGHYWMGLAAHLRDQGLPVAVVNPLGAKYFAKSRMRRTKSDPADARSLALMAQYDPAPVRDPLAGVELRQAARFAMTLVTEQARVCQRLIRLVELGFPELGELFDDPACRTAREVLRVAPTAAVARRKRTSTLAAANASPGHRRLGMPKAERLKAAAADSIAVPELEGEMAFEVGMLLDQYDLLERQISEAEAHVASLLDSELARRLQTIPGVGPATCAALIAEIGDIDRFEDVDQLLAYAGVHPAERSSGRKGASPETSWHMSKAGNAHLRAAAYRMAVVGVIHNPVIKSHYERKRAAGKSKMNSLGHCMAKALSLVWGVWRNGVDWDPAWGSRT

SEQ ID NO: 357286 - protein, 339 aa, unidentified
MQEVAVVGLDLAKNVFQVHGVAADGGVAFRRQLRRIQVLSFFEELNRCLVGIEACASAHHWARELSLQGHEVRLMPPAYVKAYVKRGKTDAADAEAIAEAVTRPTMRFVAVKTTAQQAVLMLHKSRDLLVRQRTMLINALRGHLGEFGVITPQGSAGVQAALRSIILERDRLPELAQAALRGLAGQLEALGGEIEALERRILNWHRTDETSRRLATIPGIGPITASAMAASAPDPGLFHSGRQFAAWLGLTPRAHSSGGKERQSGISKMGDGYLRRLLVVGATAVLRMARQRSTGSDWVRGLLDRKKPKAAAVALANKTARIAWALMARKEIYTPPAAA

SEQ ID NO: 357287 - protein, 348 aa, unidentified
MDKITAVGLDLAKQIIQVHGIDAAGHVVLRKAVRRERLLALLAQFPLCVVGMEACSGAHHWARQFKQLGHEPRLMAAEFVRPFRKSLAAKNDANDAEAICTAVVQPNMRFVSIKSVEQQALLSLHRIRQGLIEERTATINRLRGVLAEFGVVLPQSVPALQRALPTVLADAERLPAVVQRSLQLLLEHLRELELRLAAFDRQIAQHAKSSAPAQRLAALPGIGPLTASAVVATVGNAQDYRNGRQFAAWLGLVPRQYSSGGKCKLGPITRRGDAYLRALLVQGARSTLQAALRRAPARHDRLSAWIVQLAQRVGYHKTLVAIANKHARIIWALLAREQTLDLARTTTH

SEQ ID NO: 357288 - protein, 323 aa, unidentified
MSSFVGVDVAKNTFDIATHLPNGKHKTKAKLPNDAKGFKEFEVWLTKQVEPSALIVMEATSVYHLELAEFVYNKGYRVCVVNPATTHAYAGSELRRIKTDKSDAKLIADFAREKNEKLKLWAPEPLKYRQLKAMVRRLDDLQEMEQMERNRLEVSDEKVKASINSVLRHIEKEIAETHKAIKKHIDDDPDMRQMRDLIVTIDGIGQKTIERLLAELGDLRKYDDPRKLVAAAGLNPKLHDSGQLKGRSTISKIGSVRVRAGLYMPGLVALQHNEAIKAMKDRLKANGKAPKQIICAAMRKLLHFVYGVLKSGQPYGPKLALAR

SEQ ID NO: 357289 - protein, 369 aa, unidentified
MKKNSKNNKEKARQRALQAKSRKMKLTVGIDLGDEWSHCCFLGEEGEIVEECRVKTTREAVKSRFGELKLAVIALEVGTHSRWVSQMLSEFGHEVIVANARELRAITGSDRKSDRVDAEKLARYARVDRRILRPIKHRGEEAQVDLVVIRARAVLVKTRTQLVNSVRGVVKSFGYRMPNCSTERFVKLNNEVPEKLREHLAGLMEVLEHVQKQIEEYDQRVEKLAKEKYPETTVLRQIWGVGEITSVSYVLTIEDKGRFEKSRDVGPYLGLRPRRSQSSESDPELRITKAGDCFLRSLLVECAQRILSKKGPDTALKQFGLRIEARGKKKAKKRAIVAVARKLAVLLHKLWVTGEVYEPFPETTVRKAA

SEQ ID NO: 357290 - protein, 350 aa, unidentified
MDATTISVDVAKNVFEVAMANRSWRIVARHRFTRSQFERFLREQPAGHVVMEACGTAHFWGRVAQALGHRVTLLPARYVRPYVRRCKTDRTDAEALLEAVRSGQIPAVAVKTVSQQELQALHRIREQWKATRTARINVLRGLLREHGVVLPSGAARAVAAVPVLLEDHDAPIPDRLRHMAALLYEEVREIEARMKHVEHALGRVADTDAVIQRLLTIPGIGVITATALVAAVGHIHAFRRARYFASWLGLTPREDSTGGRRHLGAITKQGDVYLRCLLTHGARAVLHAARCAAHANKPLTRVQQWALAVEQRRGHNPATIALANKLARIVWAVWTRDAEFVAKPALVNAA

SEQ ID NO: 357291 - protein, 409 aa, unidentified
MELLITRCAGLDVHQATVVATVRVPDEQGGRTSVTETFGTMTADLLALREWLQAYGVTHVALESTGVYWKPVYYVLEDGVTLLLINMQELKRVPGRKTDVKDSEWLAQLLECGLLKASFVPPPPIRELRDLTRYRVQQVRDRAREVNRLCKVLEDAGLKLTTVVTDVMGASGRAMLRALVDGTTDPTVLADLARGKLRQKLPLLQRALLGRFRPHHAFLIEQIFAKIDFLDETLGRLMAEIERRIAPFEPMLVGLDTIPGVDRIGAISIVAETGGDMSRFPSAGHLCSWGAMCPGQNESAGKRRSGKTRKGNRYLRGALIQAALGAAHKKDSALQARYHRVKRHRGHKKAVVAVGHQILEIAYYVMRDGVTYQEFGADYFDRRHAERAVRRHVRQLEALGFHVTIEKAA

SEQ ID NO: 357292 - protein, 387 aa, unidentified
MKIYVGIDMAKDKFDYCAMDDSLNILCRGSNRENRNERFKELSDLIGTLKSTSTMMKIGMESTGIYHIPLYNHLRTYGFPIRILNGLEVRGMKKSRVRKTTNDTIDAESIARYLMIREEKDTFVVPENFMNLRETITAYSVITDKIRTTKNNLIRAMDMIFPGLSNIIEISADTVDMLSTYMTPEDFISADRKEIEKYVSRRRYDRIMKIASDSPANHHLERSLRMEISSLIRILKVMMEEKEKLEKAMRSDPVIENHVIMSIPGIGPVTGSVILGKICDINRFENAEKLVAFVGMDPVIKESGKQRSQRSISKRGDSSLRSAIYQSTLAAVRGNPVISEFYRRKVDGGMPKKKALVAASRKQCHIIWSVWHNNRPFEIPERFRKQE

SEQ ID NO: 357293 - protein, 343 aa, unidentified
MTQYVGLDVGLEWTSICVIDQDGAVVWRGRSPTEVESIAAAVRARAPAAAVVGLETGPLATWLWHGLRQQGLPVVCLDARDAKAVLARRLNKTDANDAFGLAQLVRSGWYRAVAVKSLAAHRLQSLLRTRAHLIAMRRDLANHLRGTLKIFGLKLGRGRGQALARRVRELVAGDPTLVPLAESLLAVWDATGQQIAELDRRVLALARRSAACRRLMTVPGVGAITALAFAAVIDQPQRFARSASVGAYLGLTPKRHQSGEVDYAGHISRWGDGALRGYLYEAAVALLSRHRGGSALKTWAQGLIKRIGYKKACVALARKLAVIMHAMWRAGTDFQPERATLAR

SEQ ID NO: 357294 - protein, 362 aa, unidentified
MAKMIWLGMDVHAASITVAQYEDQAPTATVQTIANDPAQVRRLVRRLPAGSDVRACYEAGSCGYGLHRQLTALGVHCDVIAPALIPRRPGERIKTDRRDAEKLGRFYRSGELTTITVPTPSQEGVRDLVRAREDVRRDRTAARQRLAKFLLRHGHRYPGSHWTKRHWEWVCGHTFDGPARTVFVHYCDHVLALNERLAHLEREIRTLAESAAYQPVVTRLSCLRGLATLSALVLIAELYDLRRFRTPRELMAYLGLVPSEHSSGARERRGRITKTGNALARRLLIEAAWAYRHPARQTRRVHQALTTQPPEVHAISDRALHRLTARYRRLLSRGKTPHHAVTAIARELCGFVWAIALVPDLA

SEQ ID NO: 357295 - protein, 391 aa, unidentified
MLICGIDIGKFRHEACIIDETGKQLAKTLSFTNTTDGGEKLLEYFNQNNPDNQPIVIELECTGHYYLSLYCFLFDKGYQVNAINPIQSDAIRNLFLRKTKNDAKDSFLIAETIRIGRFSSTPLADEDILSMRQLCRHRMDLVDYIADQKRKIIGVMDRVFPEYQHIFSDMFGKTSTELLNKAVTPEELLSIDTNELCELLRKNSRGRFGEAKAEELRSAAKRSFGITIGLTAFSMQLRQLLEMIALLEKQLIELEEEITQYLRKMDTYITTCPGVGDVLGAVILGEIGDVTRFPEPKKLVAFVGIDPSVMQSGEFTGTQNKMSKRGSPHLRRAIFLAANVAAFRDPVLSAYYQKKREQGKHHYTAVGAVAWKLICIIYAVLRDNKPYVPNC

SEQ ID NO: 357296 - protein, 373 aa, unidentified
MPRYSTAFGMDVHLRSTTVCALDAETGEAVTRRFRGNPWGEVAEWMSGFPGPSLAAYESGYLGFAPQRELAGLGVECVVAAVSKIPRSAADSASKNDRNDAARMAKAILSHDVTPVWVPSPEIEGLRDLAGAHDAATARLAAAKQRLLAFLARRGYAYGGTTPAGNPRRYWTYDFLRLLDKVRPADDGGIRALAALRSEVEAAAETRDDLLAEYRAAVAAGPLSAEVEALQSIKGCGFALAAAFASEVGDFSRFRSGRQVTSYFGLAPKQRSSADSVRLGGISGAGNALVRRLAVEGSWSYVQASHQPKLMPKGSGVPLEVRMHGRKGSERLLRRREEMLARGMPQAKANAATAAELVRWLWALGAMCREATE

SEQ ID NO: 357297 - protein, 363 aa, unidentified
MREYIALDAHRHYSLAEREDASTGQAIQTRIEHRRGAIRGYLSDAEVGTPVAVEALGSWYWIVEEIEGAGCEPLLVHARKAKLMMGMINKTDKLDVHGLNRLQRSGTLPTVWIPPGVLRDLRELTRTRMVLVQQRTRLKNRITSNLAKYGVSVTEASDAFGVKGRRQLEGLLEALPSETSWATRSLLRMLDGVQGEIAAHESRLASRLAETAGMRLQQTLPGFGPILSSVVVLEMGDVARFADAERFASYSGTTPRVHSSGGKTRYGRLRPDVNRYLKWAFVEAANVTARHWRRNRERHVSRLYDRLRPAKGHAKAVGAVARHLAEATYWVQKRGQAYRDPALRRVKGRAKREHGMSPSRLVG

SEQ ID NO: 357298 - protein, 369 aa, unidentified
MAELTSGVVEVIWVGLDVHKERISVAAAQGWAEPRLVATVANDGHQLPKLLRRLTEQGELRCAYEAGPCGYEIYRMCERLHINCVVIAPSLVPKKAGERVKTDRRDALKLCRCLRSQDLTAIWVPDPEHEALRDLVRAREVAVEERMRARHRIKKMLLRQGVRPPQKMRVWGQRYRHWLGEVEFAYPAQQLVWREYLAVLDESVARIARYNQALAEQAAESPKAYLIAALQILKGVSLTNAVTLVAELGDITRFRRPPQLFDYAGMVSSEYSSGDQRRQGRDHQDRQSTRAESHYRGRLGLPLPTRIQRSPRPAEAGRSAMAGRHLLASPGPLAPSLPGHGQGAQAHPGRCYSRGSGAFGLRLGDRPGG

SEQ ID NO: 357299 - protein, 338 aa, unidentified
MRWYSGIDLHSNNSVVVVIDDGDRIVYRRRLPNELAKVLEALEPFRGELGGVAVESTFNWYWLVDGLQAAGHRVHLANPAKMKRYEGLKHAGDESDAFELAHLLRLGILPTGYIYPRAQRALRDLGRRRMQLVRSRTVQILAVENVQARETGARMTGQEVKRLNARMVEELGLLPEVALGVQANVAVIATLNAEISRIEKHLAQCLRGRGDYEVLSTAPGIGNTLTPVILLETGSIERFAAVGDYASYARCVDSVRISNDRKKGEGNRRNGNKYLAWAFIEAANMARRWCPEARRFHDRKRARTNAIVATKALAHKLARACYHMLKNGEPFSVRRCFG

SEQ ID NO: 357300 - protein, 352 aa, unidentified
MKVYAGIDLHSSNNYVGIIDEQDRRLYQKRLPNQIDHILCALEPFKETLEGVVVESTYNWYWIVDGLQEHGYRVHLANPSAIKQYEGLKHTDDKWDSFWLAHMKRLNILPEGYIYPKEERSVRDALRRRLFFVRHRTSHILSIQSTITRNLGYKVSARDVKRLDESDVDKLFDDPYLRLVVRNGISAIRFLKESIKEIEGAVTSHVQVKPEFEYLQTMPGIGKILGLTIMLEVGDINRFPSAGNYSSYCRCVKSEKLSNNKKKGEGNRKNGNKYLGWAYVEAANFAVRFYPEFQRFYQRKKAKKNGVVAIKALSNKLARASYHVMRDRVPYDIDRHFYNHSACGRESEKGLV

SEQ ID NO: 357301 - protein, 368 aa, unidentified
MLYVAIDQHAKQITVAVRNDQGEDVLRRQVSTRPEKIKEFFDQVIEMDAEFMAILESCGFNDWLLEELRRRNCREVVLIHPEKPSKKKTDRRDAQKLCDLLWLNRERLAEGKPVHGLRRVYIATKQEQDDRQITALRQGLGRRRTRVLNKIQRILHRYNLMWDYPTKSFQTQAGRKWLDNLALPEMDRFEMDLLLAEWSSIEEQIQQVDAKIVERASRKEPGKIFTPTQILMTAPGVSFYSGLGLASRIGPIERFPRPRSLANYFGLTPGSRNSGNVKDRLGSITKEGSKFARFLLGQLVLHFLKQDPKMRDWYRRIKLRRGSKIARVAVMRRITTTFWHMLKYQEGYTIGGPPARLREQLAAGTPAK

SEQ ID NO: 357302 - protein, 343 aa, unidentified
MQAITTIGFDIAKSVFQVHGVDAAGQVIVRRQLKRRQVIAFFQKLAPCLVGIEACASSHYWSRELQALGHRVRLMPPAYVKPYVKRQKNDMADAEAICEAVTRANMRFVPTKTPEQQSGLVLHRTRHLFIRQQTSVINAIRAHLAEFGVIAPVGRKGVEELLRVVADPNDKRVPEVVRACVAALGSQLLSLKKQILDFDRMIMAWHRSNQTSKRLNCIPGVGPLLATALVASVADPKTFRSGRNFSAWIGLVPKQHSSGGRDRLGSISKQGDRYLRSLFVAGALAVIRYAKIHGTRHRPWLTALLTRRPTKVAAIALANKLARMAWAMVAKGERYRQPVALAA

SEQ ID NO: 357303 - protein, 377 aa, unidentified
MKRVKFVGLDVHAETIAVAIAEQNGEVRSLGVVPNREDSVRKLVRKLGPVEELRFCYEAGPTGYVLYWQLARMGAKCEVVAPTLVPVKSGDRVKTDRRDALKLARNYRAGELTAVWVPDAAHEALRDVVRAREAAKKDQLRARHRLNKFLLRHGRRPPMGVKPWTMKYLEWVKREVHFEPMAQEATLLDYLNEVEHAAARIARLDGAIEEAVKCAPPKMRAVIEALQALRGIAHVAAVTVVAELGELSRFGRATQLMSYGGIVASENSSGERTRRGNITKTGNAHLRRVVVEAAWAYRHRPGVGATLRKRQEHVSEEVKEIAWKAQQRLHERYRKLLAKGKNKGVVVTAVGRELLGFMWAIGTKVETAQKESLQQVA

SEQ ID NO: 357304 - protein, 387 aa, unidentified
MPQVDDLSRSLVAFDQDATLIVVVEMSEASWLVAGMAPGVDRQPLKKLGPDPDALLRLVERWRDEAVKAGKMIERIALAFEAGRDGFWLARWLQARGIEVHVIHSTSVAVSREHRRAKTDRLDTAMLRRVFVGWLRSERGHCGMVAIPTLEDEDARRPSRERESLVGERTRIINRMKAILAWLGVRGFNPKLRKAPQRLDDLRTPEDLPLPPNTVDELRRDMARLAMVCEQIKALEQARLANLEQAPGTGSHAMVRLIANVIGVGIETADMLVQEVLSRNLRDRRAVARFAGLTGAPNESGSRRRERGLAKSGNARVRRGLIQLAWRFLRFQKDSALAQWYRARTEGPAAARRTKMIVALARKLLIAFWRMVTVGEIPAGFALRRPA

SEQ ID NO: 357305 - protein, 344 aa, unidentified
MTHGRLCRIGCFFESDACLCSADRWWNCGAGCVETTPAAIAAWLEAHDLKAAVIVLETGGLSSWLCAGLRAHGLPAVIVDARLAHKALSGRANKTDANDAEGLAWLALTGWYRRVAGKSETARLRRSLLVARSQLCGQRRALENLVRALFRGFGLKVGSVGKAAFEARAWELLAERPDLGPAVSALLATRRTLLDQISELEQQIKRVAQESATCRRLMTVPGVGPMTALAFVAAIDDPGRFKDSYAVGAYLCLTPRRHQSGEVDYQGRISKWGDALARHMLYEAANAMLVRTKAWSAPKAWAARLARRIGPKKARVALARKLAVILHRIWIDGGEFQWTRPAAA

SEQ ID NO: 357306 - protein, 384 aa, unidentified
MSKDTLLFIGLDTHKESISVAYVEEERSSECQHYGKIPTTKTALAKLARHFTSRFPQATLHFVYEAGPCGYWVYRYLTSLGHCCYVIAPSLVPKKPGDRVKTDRRDAQMLAQRLKQNDLSPIYVPEPEDEAIRDLSRARETAMRDLNSARYQLKACLLRNHIQYDGAANWSQKHIRWLTSLILPHPCQHIVLQEHLHTVGERQSRLERLDNELAHHVQSWRFYPVVKAIQAMRGVKIRVATGVITELGDLTRFDHPSKLMAYLGLVPTEHSSGMSRRTGGITKCGNGRARRLLVEGAHSYRFPAKVSLELQKRQEDLPKEIVDIAWEAQLRLCRRYARLMHRGKHRNVVVAAIAREMVAYMWAIAQEVVLPPVDPKQRLSRIEG

SEQ ID NO: 357307 - protein, 425 aa, unidentified
MKVTYKTCCGVDVHKSFLVATIIATTGGIEPSYQKKRYSTFNNSILEFKQWLLDNDCHDLCMESTGKYWIPVFNLLEDEINVTIANPKWVKAVKGNKDDTKDSKWIGDLFRLGLVKGSYIPCKKIRILREFTRYRYKLVSCRSSEKNRYQNALTVCNVALDSVVSDIFGKSSTSIIDYLLEQSGNSINHEEIASKLLKSLKSKEDAVIESIEGYQMTDSQKYRMHLVRAHMDYITAEINDVDREIEKLISSDPDFENAIQFLMTIPGVKRDSAITVISEIGIDMTQFSSSKRLCCWAGLTPGSNESGGKKKSVRVTRAGVYLKPALVQCAHAAVKSEKSPYYKKKYESLMKRRGKKRAIVAIARMILTAIYQMLSTGESRNPSDLYKIDIPEALLEKQRAKAIKQAMKLLQREGLYPLPQESKAS

SEQ ID NO: 357308 - protein, 433 aa, unidentified
MLVCHGKGEGVVLQEDPQGEEIVARVAALDIGKAELVCCVRVPHEAKPGRRLQEVATYSTMTRSLLAMSDHLRCLGVSRVVMEATSDYWKPVFYLLEPQGLDPWLVNARDVKHLPGRPKTDKLDAVWLCKVAERQMIRPSFVPPPEIRRLRDVTRYRIDLVGVRTAEKQRAEKLLEDAQIKLSVVASDIFGVSGRQMMAALIGGQTNPKALAQLARGRMRAKLDALEEAFTGHFTDHHALLLTKMLARVDALDTDIAELDAAIEEMIAPFAPTVERLDEIPGVGTTAARVIIAEVGMDMSRFPTAAHLASWARFAPGVKESAGRKKGSHTTGHGNRYLARALGEAAVAAGKTGTFLGERYRRIARRRGKKRAIVAIGRSILVIIWHLLSDPQARFHDLGPDFYDNRIGPERKKRNHIHQLEALGYKVTLEPAA

SEQ ID NO: 357309 - protein, 326 aa, unidentified
MDHFAGLDVSVNETSVCVVDDTGRVVREVKVASEPDALLQVLKNGAYHFKRIGLEAGPLSQWLFSALADASLPVICVETRHMRAVLQAQINKTDRNDARGIAQMMRAGLYRPVHVKTLRSQKLRMLLTHRKLLQSKAIAVENDLRGTLRNFGLKVGIVGKLKFEARIKELVENLPDLVVLVEPLLMVRRVLREQIGILHRRLLAIVRDDEVCRRLMTIPGVGPVVALTYRATVDVPSKYQSGEINRTGAISHCGDEMMRVMLYEAAQSMLTRTVKWSWLKAWAMKIARHRGMKKAIVALARRLAVIMHRIWVDGTEFQWTREAAAA

SEQ ID NO: 357310 - protein, 410 aa, unidentified
MEVVHAHCAGLDVHKDTVVACVRHMADGKVATTIRTFSTATQELLALSDWLSAENATHIAMEATGVYWKPVWNILSDGEFELVLGNAAHIKNVPGRKTDVKDAAWLADLMAHGLVSGSFVPDQATQEMRDLLRTRKQLVRERTSHTQRIQKTLECANIKLDSVVSNVVGVSGRRMLEALISGQTDPRELAAMAHGRLQATPAELEAALRGRVTTHHRFMLRLHLDQIDSFDQAIARIDKEVKDNDKNFRAAVELLKSVPGVGSLAAEVIVSEIGIEMNRFATAGNLVSWAGLCPKNDESAGKRRSNRLKAGAPWLKTTLVQCAWAAARSKDTYLHAQYVRIRARRGDKKAICAVAASILTAAYHMLKDGTFYEDPGPDYFDRRNKDQQANKLVNRLQNLGFNVILQRASA

SEQ ID NO: 357311 - protein, 315 aa, unidentified
MTETRTDCFAGIDIAKHTLDLHIEGITGVTHLTYDEAGLAAACQHLLAAQPALIVLEATGGLETRLACELAAKGLPIAVVNPRQVRDFAKATGQLAKTDRIDAQVLSAFARAVRPQARPPKDVDVRELDELVTRRRQLIDMRVQETLRLGTATVLQAKSLKKHLAWLDRQIAALDVDLTGRLRRSEAWRAKEDLLRGIPGVGSVTCMTLLAKCPELGQLDRREIAALVGLAPLANDSGKHRGKRFVWGGRAEVRAVLYMATVAAIRCNPVIKAFALRLKAAGKPAKVVITACMRKLLTIMNAMLKSNVPWNTHAA

SEQ ID NO: 357312 - protein, 413 aa, unidentified
MNVLHPRCAGIDVHKETVVVCVRRVDDRGRATEEVRTFATMTSSLLALGDWLATEGVTHAAMESTGVYWKPVWHLLEGRVELLLVNAQHIKQVPGRKTDVKDCVWIAQLLQHGLLKASLVPPRPQQELRELTRQRSQLVGEQGRATQRIQKVLEDANIKLASVATDVMGVSGRLMLRSLIDGETDPAKLADLARQKLRSKIPALREALRGRVTEHHRFLLNLHLGHYDHLEQAIEQLNARIEAKLAPFVEARDLVTTIPGIAQRTAEAILAEIGTDVKPFPTSGHLASWAGLCPGNNESAGKRRNGTMRKGSKWLRTALIQAAWAASRTKDTYLASHSKRVAARRGRKHAVASLAHTLLVIVYLVLSRRQEYQELGADYLDRLDPRRVSHRLVKRLERLGYKVTLETQTPVAV

SEQ ID NO: 357313 - protein, 338 aa, unidentified
MAIVTIGIDLAKNVFAVHGVNEAGKPVLVKPTVARGKLLELIASLPPCTIGMEACSGAHHWARLFMAHGHTVRLMAPKFVAPYRLSGKQGKNDAADAAAICEAVQRPHMRFVPIKTVEQQGQLCIHRVRQGFIEQRTATINRIRGLLSEFGIVLPLKAATIRREAMAHLEDLPGWANTVIGDLLNEVSHLDKHVEQYDQHIEQIAKEDTRTQQLMRLPGVGPTTATAILAMIGNGHEFKCGRQFAAWLGLVPGQYSSGGKARLGHITKAGDSYMRSLLVLGARAVLNSAKNKSDSTSRWAVALAERRGYWRAIVAIAAKNARMAWASLALGERFAMPA

SEQ ID NO: 357314 - protein, 388 aa, unidentified
MQIITDRPQPPTAIRTDLGAIFVSLELSRSTWLITSLSPGGGEKMSKHTVLSGDVAGLWARFCQLKGKVQVRTGHVVPIIVIQEAGLDGFWIHRLLQDERVESHVVDPASIATSRRRRRAKTDKIDGEALVRALLAYKRGEPRVCAMVRAPTPQEEDRRRICRERKTLTAERVEHVNRIKGLLFAQGISDYEPLLRKRRERLEELRTGDGRPLPEHLKAQIGRELDRLELTLQQIKSVEAERDAMLSPSDEGTPAPGAMLKNLKGIGPEFAGVLWSEGLFRNFSNRRQVAAYAGLAPTPWRSGSVAHEQGVSKAGNPRLRTTMIQLAWLWIRHQPRSILTLWFHQRVQLNGGRVRKVLIVALARKLLIAFWKYVTAGVVLEGAEITAA

SEQ ID NO: 357315 - protein, 399 aa, unidentified
MLAVGVDVSKGKSMVAALTEYGELVMKPREYAHNESELIGLITQLQSYGAEIRIVLEATSHYHFSIVKRFQSAGLFVSVVNPFLMKKYLDGSIRKGKTDKKDAIKIATYCLEKWHKLTPHSPLDEQYEELRFLSRQYNQTISMRVKGKVWLSQLLDQIMPGIKTIFKGEHRNPDKNVLYDFIEKYGHYENVLTLGMEKFMSEFIAWAKEKGYRYATSKAEQIYLLAQNAIPSRAADSSGCLALMQCVFMLKQSEHACNAILAQMQEIAMTLPEYGVVRAMSGVGDKLAPRLIAEIGDVRRFTSAKALNAYAGNDAPPYQSGQYEGTRRHISKRGSKSLRKAGYEAMKALKTVKPIHDDAVYRFILQKEAEGKPKNVAKMAGLNKFLRIYYARVSEVYGA

SEQ ID NO: 357316 - protein, 423 aa, unidentified
MDIVHSRCAGLDVHKETVVACVRLASGDKVSREVRTFGTTTSGLLALLAWLTEMECTHVALEATGIYWRPVWNILSDGAFELVLANAAHIKNVPGRKTDVNDATWIADLLAYGLIRSSFVPEPEIQELRSLLRTRKQLVREQTSHIQRVQKTLEDANIKLDCVITDILGVSGRAMIEALVAGETDPGTLAELADRRLKASREQLREALRGRVTDHHRFLLRLHLGQIDALTAAAERVDRQVDAVISRMDAAVEAGQAPVQAMIGLLITIPGIGPLAARMILAEIGRDMSRFPSAAHLLSWAGLCPRNDESAGKRRSARLRKGAPWLKTVLVQCAWAATRKKGSYLQAQFYRLRSRRGPKKALCAVAASMLTAIYHMLTDGTEYQDLGADHFDHRSTEARARRLVSQLAKLGFDVEIKPLAAVA

SEQ ID NO: 357317 - protein, 355 aa, unidentified
MKFYTEQHKYYCGVDLHARSIYVCIIDQKGVIVKHKNIDATPEDFLGIISKYRKDIVVAVECMFTWYWVADLCGKENIPFVLGHALYMKAIHGGKAKNDRIDAHKIAALLRGGMIPMAYVYPSEMRATRDLLRRRNHLMRKRAELLAHIQSTNHQYNLPRFKKVISYKRNREGIAEQFSDECVQKSMEVNLSLIDHYDKILKKLEYYIDKKAKVHDPEALFRLRSVPGIGHTLALIILYEVHDIMRFPRVQDFVSYSRLVKPAKESAGKRYGHSGGKIGNAHLKWAFSEAAVLMLRESSDVKKYKARLQKKHGKAKALTILAHKIGRAVYYMLRRKEVFDMERFVNKQLIQAGRA

SEQ ID NO: 357318 - protein, 339 aa, unidentified
MGLYTGFDLHSTNTFVGIIDEDGGRLWKKKLRNDPNLISETLRPFKKDIEGIVVESTYNWYWLVDFMMEEGYQVHLANPSRVQQYSGLKHGDDEDDAFWLAEMLRLKILPEGFIYPKEQRPLRDLLRKRGHLVRLRTSLIVSLQNILARNIGAKMKTNAIKVLKEDRVTPLLAGNDDLSLAGKVSKDAIDSLTRQITAIEVVVEKKMNLRRPYDLLLTMPGVGRVLALTIRMETGPIDRFADVGNYVSYCRKVPAARFSNDKKKGTNNRKNGNTYLSWAFAEAGELARRFDPEARAYYDRKRRKTNAPIAHSALSHKMARAAFYIMRDGVPFMPEKMFA

SEQ ID NO: 357319 - protein, 349 aa, unidentified
MTVYCGVDFHARVQTLSWLDTRDGEIHQKELNHRTDDVRGFYLQFAGEVIVGIESSGYSSWFEDMLEGIGHQVWVGDAGEIRRLARRRQKNDKRDADHILDLMVKGEFPCVHRLCRESREVLGQLRYRHRLVKMRTMAANCLKAIAIGAGLSEKTRLATRKGRSKLDAAGLSAVLNEQSKKWLELIDDLTKKIEAVERWLEERAKADQRVERLRTHPGIGLLTGLALVHTLEPVERFASTRKVAAYVGLDPMEDSSAERKRYGGVSKAGSTLVRFLLVEAGQTAAKRDPQLRSFYQRLRDKRKTAKAKVAVARKLAVRGFIMLRDQIDYSEFLRRGVEARSSRRAAAND

SEQ ID NO: 357320 - protein, 343 aa, unidentified
MQTITTIGLDIAKSVFQVHGVDAGGQVIIRRQLKRRQVLTFFEKLPPCLVGIEACASSHHWSRELQALGHTVRLMPPAYVKPYVKRQKNDMADAEAICEAVARANMRFVPTKTPEQQSCLMLHRTRHLFIRQQTAVINSIRAHLAEFGIVAPVGRKGVTELLHVVADPSDKRVSEVARACLVALGGQLLSLKQRIVEFDRMILAWHRSNQTSKRLHYIPGGGPMLATALVAGVADPSTFRSARNFSAWIGLVPKQYSSGGKERLGSISKQGDRYLRSLFVAGALAVIRYAKIHGTGHRPWLTALLARKPTKVAAIALANKIARMAWAMMAKGERYREPIALAR

SEQ ID NO: 357321 - protein, 373 aa, unidentified
MPKYSTAFGMDVHLRSTTVCALDADTGEAVTRRFPGNPWGEIAGWMGGFPGPSLAAYESGYPGFAPQRELAGLGVECVVAAVSKIPRSAADSASKNDRNDAARMAKAILAHDISPVWVPSPEVEGIRDLAGAYDGATARLATAKQRLLAFLARRGFAYGGTTPAGNPRKYWTYDFLRWLDKVRPEDDGGVRTLAALRSEVEAAAEARADLLSEYRAAVDASPIAAEVAALQSIKGCAFALAAAFSAEVGDFTRFRSGRQVTAYFGLAPSQRSSGDSVRLGGISGAGNALVRKLAVEGSWRYAAARHQPKLMPRDTGVPLEIRMHGRKGSERLLRRREEMLARGMPQAKANAATAAELVRWLWALGMMCREGAE

SEQ ID NO: 357322 - protein, 348 aa, unidentified
MRFYTQAHQHYCGIDLHARSMYLCILDGNGAILLHRNLNCSPEALLGAIAPYRDGLVVGVECMFAWYWLADLCAREGVAFVLGHALYMRAIHGGKAKNDRIDAYKIAALLKGGMFPTAYVYPAAMRATRDLMRRRNHLMRQRAELLAHIQNTNSQYNLPEFGGRISRSRKQREGIAERFADAEVAKTIEIDCILTDHYDTLLAELEKHILACAKDHDPQTLMLLHSIPGVGSVLALILLYEIHDIDRFARVQDFLSYCRLVKCKSESAGKTYGSQGAKIGNAHLKWAFSEAAATFLRNNPPAQKLHQRLVKQHGKGKALSIIAARLGRAVYFMLKRHKVFDKDKFFNH

SEQ ID NO: 357323 - protein, 336 aa, unidentified
MNEATWFLGIDVAKRKLDIALLVTDKIKSKVFDNNTSGHAALTRWLIERGAIQSHTHICLEATGPYSEALAIALVDAGWCVSVVNPARIKGFAQGELARNKTDRADASMLARFCAAMRPGFWTPPSSEWRELRGWVDRLQALKDMHQQESNRLEAHLASGQAALVEAVQTHLDWLTKHIAQLERNIDDHIDRHPELKRDAELLHSIPGIGNTTIAKVLAYAGDVRRFASAKALAAFVGVTPRQRLSGTSVKGRSMMSRTGHADLRRALYMPGLVARRHNPLLKVFGDRLSAAGLAPKAVVGAVMRKLAHLIYGVIKSGQPFDPKFSTARLDFQDGI

SEQ ID NO: 357324 - protein, 361 aa, unidentified
MPTVADVIDDVIGVDTHTDTHTLVCCSPAGAVRGELTVDNSTDGFAEALTWATMLASGPSLIFGIEGTRSYGQALSEFLSRAGLVVVEVERPARRSARTRRGKSDPIDAKAAAHQVLAMDPDALPTPRADGDREALRILLVTRRALADECKKANARLRALLLTGTDTDRALLRGPKLSKTTLTGLTRRRGSKGEDRATTTRRREITRLANQQLRLLEELRANNRDLATITDEIAPGLTSEHGVGPVSAAQLIVSYSHRGRVRSEAAFAALAGVSPVQASSGRRTRHRLNRGGDRQLNRALHDIARTRMRDCPNTRAYVTRRTSETPNFTTRDARRCLERYLARHLYRRLETIMTPGPGPTT

SEQ ID NO: 357325 - protein, 333 aa, unidentified
MNKITLIGIDTAKQVFHGVGVDAYGHYVWRKQLSRGRLLSRLAQLAPCEVVLEACGASHHWARSIQALGHTVRLIAPQHVKPFRRGQKNDYRDAEAIISAALSPGMHFVGIKRVEQQAEQALHRVRSRLMRDRNAAANELRGLLGEYGVVFGSGFKRLREGARCFAETEEAHTLGLVELVNDVLEEIRVLQQRMDHYEHLIEQRVQADDISRRLREELSGVGKLSASALRVKVADVRDYPSGRHFAAYLGLAPGHSGTGGKVRIGHIKRGHDRYLRQLLIHGARSALCHLGDKQDVQSRWLRGLLERRGFNIASVALAHKNARQAWAIMAREQ

SEQ ID NO: 357326 - protein, 419 aa, unidentified
MSFKILKFNCCGLDVHKTWIYACIGITDSNNRTEYKQARFSSFTKGLNELCDWLAKYNCTDVCMESTGKYWIPVFNILEQHNLWVTLSHPKYTKPMKGNKTDRKDAKWICDLYMCGMVKPSFIPPADIRELRDLVRYRYKLTCMITGEKNRAQNCLTVSNLKLDDVFSDVFGKSSRSITEQILQHPGEKFDVAPFVHGRCKTPIEEIQAAVDGAISKEQAIKLRQCLDHIDELNKHISEVEQEILCLSDKYEAALNLIRTVPGFNKNPMTAIQVLSEIGCDMSVFPTDKHLVSWAGCCPRNDKSDRKIKSTRISRAGSYFKPVLVQVANALIKSKKHPEFITRYKRIKVRRGHKKAIIAICRMILTAIWHILSDLKPYTPEGFLESRPVKEEKILSTSQALNLLKQRVYIIKDEPLAVS

SEQ ID NO: 357327 - protein, 335 aa, unidentified
MKKIYVGIDISKEKCNLCFRSGLEIVREEECSNDVKTLRKAFKSAMKALGASLEEVLACAEYTGRYIYPLTVACQELEIFLWMDDPTRIKNSMGLTRGKNDVIDAARIAEYAYRYSDKAVRYCIPDAALVSMKNLLADREFLIIDRKRYQSQLTDQKKYMAPGDFKQKNSRWKKVIKSIDEQIAAIDAEIEALIAADPVLTRQKELLVSIDGIGDRIAINMIAITGGFTRFQNARQFCSFAGLTPYKYDSGTSVRSKAKISKRANQTMKALLHMSAVNVATRMKSGEYKDYYERKLKEGKHVMCILNVLRAKLVHRMFSVIKRDTEYTKEYKPAC

SEQ ID NO: 357328 - protein, 366 aa, unidentified
MKKISTVQTFKSEIFKEQKLTIGVDLGDRWSFYCVLDEAGKIILEQKVPTAPEAMKQTFSRMPRSRIALETGTHSPWASRLFTELEHEVIVAHAQKVQLITKSNRKDDRHDARTLARLARIDPELLGPVRHRSVQAQIHLTVIRARAELVSARTALVNAARGLVKSYGERLPKCGTQQVSRELAAALSTELRDVLEPMLKEIESLNERIKEYDERMEKIAKEVYPEVSLLKQVKGVGTQIALTYVLTIEDPYRFQKSREVGCFLGLKPGRRDSGESKPQKAISKAGDRYLRTMMVQGAHYILGPFGEDSDLRRWGRKLAERGGKNAKKRAVVAVARKLAVLLHRLWVSGEVYQPLRNSQKAMRAVA

SEQ ID NO: 357329 - protein, 351 aa, unidentified
METQITARPKLFIGIDIHKRSWKIHCSTDLFGGKSFTMPPVAEKLYDYVQKHFPNYEVSTAYEAGCCGYSAHRSFEAYGWKSLVVNPADIHRKGKEKYTKTDRIDAQLISRELKDGRLESIIVPDREREELRSLFRRRNELVKDLRRIKSKIKMQLLYFGIEVPKEFDNDHWSHSFRHWVDEQLFNYSTGGLTMSSRMRSFRFIDKELRDVSSQLRAYCRKHYTRDYYLLRSIPGIGGIVAVGILSELGDLRRFGSLKDLAGYVGLAPGLYESGGHSKSLGMNPRCHRLMRSYFVEASWQAIRTDPVMQGYYRKHLGKDTKKIIVKVAHKLLSRTLAVIKTGIPYEIGVVS

SEQ ID NO: 357330 - protein, 367 aa, unidentified
MKKISTVAATANRNISQQRLTIGLDLGDRSSCYCVLEESGRIVLEQRVSTTAKALRESFGKMPRSRIALETGMHSPWVSRLLNELGHEVIVAHARNVRLIGESRKKDDRLDAQTLARLARIDPQLLSPVKHRSAKAQADLTVIRARAGLVRARTALTNTARGLAKSYGEPLRGCNVRNMNPEKAERLSPELQKALEPLLAASAALSEQIAEYNERIEQMAKESYPQTMLLKQVKGVGTLIALTFLLTLEDAHRFQKSRDVGCYLGLQPGRRNSGQSEPQMHISKEGDPYLRTLLVQGAQHILGPFGVDCDLRRWGLKLAERGGRSGKKRAIIAVARKLAVLLHHLWVSGEVYEPLHNSKANAMTIAA

SEQ ID NO: 357331 - protein, 338 aa, unidentified
MRTYAGIDLHSSNCYLAVIDEQQRRLFSKRLPNSLDHILSALQPFKDELAGVVVESTYNWYWLVDGLQEQGYRMHLANPSAIRQYEGLKHTDDKWDAFWLAQLLRLGILPEGYIYPKAERPARDLLRRRLLFVGHRTAHILSLQSMVQRCCGHGISANEIKKLTPQEASALFSDPQLGLTARFQVETIGFLTQQIRSIEKAVLPQVKLRPEFEILLTIDGIGKILGLTIMLEVGDIRRFAKAGNYASYCRCVKSQKISDTKKKGEGNRKNGNRYLSWAYVEAANFAIRHSPRAKSFYQRKCAKTKKVVAIKALANKLARASFYILRDQCAFDEKRLYG

SEQ ID NO: 357332 - protein, 420 aa, unidentified
MKTIRTKKMKFVNEKTLIVAVDIGKVSNQGYGRCPNGEEVKPFEFFNNGEGFKKFWGRIWQVKETYHLEAVVVGFESTGPYGEPLVHFLSKRPVRLVQVNPMHTKRLKELEGNSPEKTDRKDPKVIADIMGLGHALTVIIPEGAAAELRRLTQARERAVQRKTALWNQLQSLIALLFPEFLQVMKDLKTHSARYLLEHYPTPQEICRLGLEGLTALLKRVSRGKLKLERARAVYEAASESVGIQEGERSLCLEIRELLGAIAATEGFVAVVVQEMAQGLGQIPYSPFLLSVRGVGKVTVAGLIGEVGDFRKFHTLAEIMKLAGLNLFEISSGQHKGRRHLSKRGRPLLRKLLFFAALNMVRQNGLMRPFYQRLVGRGMRRIKALVAVARKLLGILFALVRDQRFYIPDYGKKGAVELEAA

SEQ ID NO: 357333 - protein, 355 aa, unidentified
MCGLKHQKEKRSMTYFAGLDVSVKETSVCIVDDAGKIVQEARVASEPEALLQVLTNTIYRFKRVGLEAGPLSQWLYSVLAEAGLPVICVETRHMRAMLKAQINKTDRNDARGIAQMMRVGLYRAVHVKTLRSQKLRMLLTHRKLLQSKAIAIENDLRATLRNFGLKVGMVGTVKFEARIKELVENLPDLAVLVQPLLIVRQVVREQLGILHRRLLAIVQDDDVCRRLMTIPGVGPVVALTYRVTVDVPARFRNSKAVGAVFGLTPSKYQSGQNERSGGISRCGDEMMRMMLYEAAQSMLLRSAKWSWLKAWAMKIARHRGIKKAIVALARRLAVIMHRMWVDGTAFRWTREVAVA

SEQ ID NO: 357334 - protein, 496 aa, unidentified
MTKCKQHIAYSKGERFTKEIRNLDKNKILIIPIEVAKDTHKALVANYYGDILLQPFSFSNNKLGVDLFNTSVMQVAKEIQAQKILVGLEPTGSYYENLYFSLLAMGYNVLQVNPYSVSLERKKDLTWCKTDERDLCAIGQVLINNCATETRLHSGLWYNFKQLARLYRAEVRRKATLKNQIRSCMDRIFPGLQNKDIFSDFFCPASLLLMENYPLPTQIISLGEKRLKNFFLKHNIRPSLLTLESLFSAARNAIMLSEEDLQIHLLNLRIRLQDFKKVNENIRLFAVKMAEFLVRTPGILLLSIKYINVPSASEYTAEMGPITDFRHARQVIKKAGTNPGRYQTGKFDATNLSITKQGMGSFRNIVMLISNNLTQNNYFKNWYDNFTAKGKDKDLARVALGNKFIRISFSMMCSGSLFNPPGWQGESDDPIEKLEEFLIENNAQHLKDKLSAIAETQIKVKKRTTLHGKPAVEDKQNFDDKQQGKTGGDSVCTPWG

SEQ ID NO: 357335 - protein, 344 aa, unidentified
MSKHSVRGGDFAGLMERFTQLQEKARLRTGQSFRIIVVHEAGLDGFWIHRALQNEGIESHVVDAASIATSRRRRRAKTDKIDGETLVRVLLAYKRGEPRVCAMVKVPTPGEEDRRQLCRERKALTAERVRHVNRIKGFLCSQGVSGYQPLRRDRRQRLEELQTGDGRALPQHLKAVINRELDRLELLLKQIKTVEAARDALLAVEQTAKPAPAAMLLAIRGIGPEFAAILWSEGLFRHFENRRQIAAYAGLAPTPWQSGAVDREQGVSKAGNPRLRTTLIQLAWLWLRNQPRSALSVWFHERVNRNGGRLRKTTIVALARKLLVALWKYVTAGVVIEGVTMKVA

SEQ ID NO: 357336 - protein, 406 aa, unidentified
MVKFNPKTVNNESVSALATISGAKQYVDAYAAYIGMDVHKDTITYAVALPGRANGQYRGEVAHNKKTVNKLIQRLSDEFSGELLLFCYEAGPTGYHLYRQIVASGHVCEVVAPSKIPQKAGERVKTDRRDALKLAQYLRAGELTAVWVPGHEQEAMRDLTRARSDMKSQELKARQQLNAFVLRQGHNWPSNKTRWTKTHYNWLESLEFPHTWQHVVLQEYINAVKAASRRVADLMDQILLALPSWSLAPVVDSLVALRGIDKLAAITLLSELGDISRFDNPKQLMAFLGLVPSEHSTGKRRRQGAITLTGNGYARRILVESAWSYRFQARQTMHLKRKAVNASDEAREIAWRAQRRLCGRYRRLIESGKNQKLVCVAIARELVGFIWDIVRIEMSRLPERQVTRAA

SEQ ID NO: 357337 - protein, 479 aa, unidentified
MTKQTAQRSDLKAVPLLLNESLYIGVDIGKGTHVAGFLSKTLLERHDRFEACPALVFENSREGFRMLMERARSLAPLEQVFVLMERTGHYHRALQEYLQELDITVYVMHVQSRPSGMLKTDKRDALTLANHLYSQLELGVQVANKLHLVRRVVPPTEAAAQLKGLIRHRYELIRESTQRKNKLTAICDEVFPELTRIVKDPNSLVALALREQFPTPQALAIASFPTLQLIRGGARSLSDAKLLELQRLAAQSIGVKDMARLRGLLLEQRQLIKELRLLREHVDQLESEIGSIVEQAREGQILLSFPGIGPVMAATMIAAIGSIHNFPSAATLKSYFGWAPIREQTGTSYDRSRLTRGGTRTMKQMLFLVVFQAIRLRDNEWAKLYERLVKAKCPYDERTQSHVGKKRVIGRVAGQMTEAIYALLKRDAELLSTVLPGQDPPPPQLYDPEVHRQHRQGQYRPLKSTPPPNTITLVHPSSS

SEQ ID NO: 357338 - protein, 333 aa, unidentified
MKIFVGIDIAKLNHFSAAISSDGEIIIESFKFTNKADGFQLLVSKLELFDKNSIIIGLESTAHYDYNLVRYLVAEFYKVCVLNPIKICQVRKKNIGKTKTDKVDTYVIAKTLMMQDDLRFVSFYDLDMMDLKALGRFRQKIIKQRTRLKIQLTTYVDQVFPEIQYFFKSGLHQNAVYALLKEAPSPKEIASMHMTHLANLLKVNSHGHFTKEQAKELRVLAQKSVGANDSAISIQITQTIQQIELLDSQLEKIEAEMTDIMKFNDSVIMTIPGIGYINGGMILGEIGDIHRFSNPNKLLAFACLDPSVYQSGNFQAKTTRMSKRGSRVYDMPL

SEQ ID NO: 357339 - protein, 361 aa, unidentified
MKRTLQDNQEAFAGQEFFIGIDVHNKQWTVSVQSNHLALDKPVVVDPSAEKVSGFLRKRYPGGKYYAVYEAGYSGFWPARTLEESGIVTIVVNPADIPTMQKERSTKTDRVDSRKLARSLENKELKGIYIPDRLTEEYRQLARYRSRLVSEQTRLKNRIKAVLAQFNYRCPVELEGNRWSGVYLNWLRSIRFATSYAQMAYDEQLDQLQESRERLSRVLRELKRMTKEHESIGRLVTLLQTVPGIGFVTAVLLVTELVEMERFKRLEDLASFVGLAPSVHQSDEKSYSRGLTKRQHKELRSRLIESAWVAVRKDPVLTMKFGELSQRMNKKKAIIRIAKKLLSRIRSVWHTQKPYVYGVIE

SEQ ID NO: 357340 - protein, 436 aa, unidentified
MRLKDYGRKPKLRKEFVNNPKLLIVGVDIGRSSHSACFGTNSTVSSKKFDFKNSRNGFKKFEFNIRKMRNTAKCNQILVGMEPSGLYWYGLYERLKKCGFSVCLANCMAVKNNRKTMHDGSSKTDPKDAYSIYDLLTQGKFFLPVERDPELAAAYRLMRKHMFLKKRISRLRNQIRGALHLSFPELNDVIKDLTLPTSLRFLQSNPTPESMMRNGKKRFMKKWQPRRRCGQWRPDKFNLIYEQAKLSIGLKDPQRIDEFEIKTMAKDLEDAVTKAQMWLDKAIELVCQRDDFELLMSMPRIGKPTATALLTAIGNIDEFEYGKQLVKLAGLDIRLYESGTSIKKRPRVTHIGSGYLRHWLYHYAMRLVAFEPDFQCLFERRKKNSPGKGAGQRALVAICDKILRIIYRILKDQVKYSSEKDKIVAAYYQQQSKLAA

SEQ ID NO: 357341 - protein, 411 aa, unidentified
MRIIGLDIHRAFAEAVAWQDGKLKRLGRIDMRRDRLEAFAATLHQDDSVVVEATGNAASVAAVFSPHVKRVVIANPMQVRMIAHAKIKTDTIDAGVLAQLYASGFLPEVWIPDESTQALRRQVTRRNQIVRQRSRLKNIIQSILHAYLIPACPHQDLCGPKGRAWLSEQVLPDDERYAVERHLREFDRLGNDLQVIERDLARSALADESVARLMTIPGVDMVVALALAAAIGDIQRFEAPQKLVSYLGLNPSVRQSGPGPAYHGRITKQGRGHARGMLVEAAWAAARAPGPLRAFFLRVRSRRGQHVAAVATARKLAVLIWHLLRKGESYLWARPALHARKMRELELKAGHPAVRGQKGAAHAYNLKHHREQERRWVEQAEVAYTRFVAGWTPRGPRSGKVRTGALKEERQ

SEQ ID NO: 357342 - protein, 427 aa, unidentified
MNKVQKLLLVHSSDIIFVGVDVAKKTHYARIINHIGLEVIKPFKFNNSIDGYERLVSKILEAKEKSKATKILIGFEPSGHYWKPLAWFLKEKGYTVVIVNPYHVKQRKEEEDNSPSKNDRKDALIIARLIKEGKFVNCLLPQNTYADLRNLSVARKQLIKKLNSVKNKIIAILDEYFPEFEEVFKNLWGKAALWILRNCPFPSIILKLSKEEIAEQLKKATNNRVGMKRAEKLIEAAKKSIGVKEGIKGAQIRLNIYLDELEFLKTQLETIEKAMEELLKKIDIAEYLLSIPGIGVITVAGFLAEVGDIGKYTHYKQIQKLGGLNITDNQSGKHRGKTKISKRGRPELRNLLYKASLTLVAKNKEFKALYNYFLRRRENPLEKKQALIAISIKLIRVMFTLAKKKEKYDSQKVLGEYRMKQIKELVA

SEQ ID NO: 357343 - protein, 412 aa, unidentified
MDVMYPRCCGLDVHKKTVVACCILSTEGPEPVKEIRTFRTMTTDLLALADWLQEKGCTHVAMESTGVYWRPVYNVLEGQCELLVVNAQHIKAVPGRKTDVKDAAWIAELLRHGLLRGSFIPSKPQRQLRELTRYRSTLVQEHARTLNRLQAVLEDANLKLASVVSDISGVSARAMLEAILAGERDVEALADLARGRLRAKRDQLKDALEGRVTAHHSFLLTEHLSALEYLDEAVARVSAEIDQRLTADQEAIALLDTIPGVGLRAAEILIAEIGTDMSRFPSAKHLASWAGMCPGNHESGGKRLSGKTRKGSRWLRQILVEIAHVASKTKNTYLAAQYRRIAARRGKKRALIAVGHTVLTIVYTMLTRKQPYQDLGAAYFDQREQHRVERRLVQRLERLGYEVALHPRALAS

SEQ ID NO: 357344 - protein, 343 aa, unidentified
MEHYAGIDVSLELSSVCVVDATGRIVREAKVPSEPEALVGFLGQLGLPLTRVGLEAGPLSQWLHAGLTGAGLEAVLLETRQVKAALSAMIVKTDRKDARGIAQLLRMGWYRPVHRKSPPAQEVRALLVGRKLLQGKLVDVELSIRGLLRGFGLKLGEVSKGRFAARVRELVAGQPMLERVVEPMLRARDVLRAEYQVLHRAVLAIVREDAVCRRLMTVPGVGALVAVTFASAVDDPARFRRSRSLGAYFGLTPKRYQSGETDVTGGISKAGDTMVRTALYEAANVMLTRAGKFSTLKRWALEVAKRRGPRRAKVALARKLATVLHRLWVDGREFRFGKEVAAT

SEQ ID NO: 357345 - protein, 366 aa, unidentified
MKKTSTVRVNGNMIFKGHKLTIGLDLGDRWSFYCVMDEAGQVILEQKLPTTPEAMKQTFGKIPRSLIALETGTHSPWVSRLLSELGHEVIVAHAQKVQLITKSNRKDDRHDARTLARLARIDPALLGPVRHRSVQAQLHLTVIRARAELVRARTALVNAARGLVKSYGQRLPKCGTYQVSEKLAQGLSAELREVLVPLFKEIESLNERIKEYDERMENIAKQVYPEVSLLKQVKGVGTQIALTYILTIEDPYRFPKSRQVGCFLGLRPGRRNSGESEPQKGISKEGDRYLRTMMVQGAHYILGPFGEDSDLRRWGRKLAERGGKNAKKRAVVAVARKLAVLLHRLWIGGDVYEPLRNSQKAMREVA

SEQ ID NO: 357346 - protein, 349 aa, unidentified
MIVLGVDLHKWSHTAVAVDEHGRKLAERTVEATDAGHLELRRWAGQWPERRWALEDGRHLSRRLEADLLRAGEDVVRVPPKLMAGARRSAREPGKSDPIDALAVARAALREPDLPAARLEGEAREIRLLVDRREDLVAERTREAQRLRWHLLDLGLPEPPPASLDRAAVRVRLDRALAARPELVARLAREILTRIGELCAAIRSLEAEIEGRIGPLAPTLLRLAGCGPLTAAKIVGETGGIARFRSRAAFARHTGTAPIPVWSGNQVRHRLSRGGNRQLNCALHRIAVTQVRLGGPGRAYLERRLRAGDTKTEAYRALRRRLSDEVFRCLLADEMAHSVAPLPLTASAA

SEQ ID NO: 357347 - protein, 360 aa, unidentified
MKKDIKTESGLTVGVDLGDRWSKYCVLDEHGQILEEDTVATTGRAFRKLFSDRTAARVVIEVGTHSPWVQRLLRELGHETITANPRYVRLIYSSRNKNDKLDAERLARLARVDTKLLHPIQHRGGTAQADRALLRSRNALVECRTKLVNHARGIVKSVGGRLPSCSTTCFHKRVRQDLPDELKPALTPVLDTLAALTKKIQCLEARIARLAAKRYPETGHLRQVSGVGPLTSFSFVLTLEDPERFKHSRAVGPYLGLRPRQSQSGESDPELRITKAGDTDLRRLLVGSAHYILGPFGPDTDLRRWGLALAARGRKNAKKRAVVAVARKLAVLLHRLWVTAEVYEPLRNNKSLIVPEAVSA

SEQ ID NO: 357348 - protein, 473 aa, unidentified
MQEKKYTKKRTNNKLKATASADCTPGLNPNAAGIDIHPTAIFIAVPPGRDTHAVRKFETFTADLSAAVDWLKNCRVDTVAMESTGVYWIPLYQMLSDHGFLVYLVNARHVKSVPGRKTDISDSQWLQYLHSVGLLRGSFRPPQAICALRSISRHRESLLKMGAVHIQHMQKALDQMNLHLHHVIDDIVGVTGLAIIEAILAGKRDLEQLADLRRPGIKSSKSTIMKALEGDYRREHLFVLRQALNSWRQIQQQISECDSEMESLTRQLQAESNPEPVPLAPCKRKKVSKNQPKGEWQNLMAQEFGVDLTGIPGIQTATVQTLFTELGSNWGSFPSAGHFSSWLNLSPDHGLSNGKVVHRHTKRAHKRLRVALRMAALSLHHNKSSLGDEYRRRVSQLGPTGAITALAHKLARILWHLVTYKTPYDSSVFDEAAEKHKKRRKKNLIKLIQSMGYSVIDNQSPMPNMPSLSAQVP

SEQ ID NO: 357349 - protein, 365 aa, unidentified
MDAIYIGVDFHARQQTLCYLKTETGELVISELKHQDKEQVRAFYQQLQAPVIVGLEASGYSPWFETMLEQLGCEVWIGHATEIRRRARWRQKNDRRDAELIWDLMVHAEFPRLHRPAVASREVLRMLRYRQKLIKLRTMAKNSLQALALQAGLAKGEQLFTRAGQEHFNSVAMSPVLQWQREHWFQLLQPLNAQVLETMVWLKAHSKDDVCVSRLRTHPGLGLLTAVCLVHTLQPVSRFRNTRKVAAYAGFDPIERSSAERKCFLGISKAGSRLLRYLLVEAAQTAVRYDEDLQRFYKRLAQRRGRPKAKVAAARKLLIRAYIMLRDEIDYAEFRRRAVAARLARTGQRPNVPEVLIGQPASLAK

SEQ ID NO: 357350 - protein, 325 aa, unidentified
MQGKEASEQETLKCTAGIDVSKNWLDAHVLPASESLRVANNGEGIRRLKRWLMRHKVQLVAIEPTGKWHRELYRSLLASGLAVAVVNPYRVRSFAKAQGILAKTDRLDAKVLAMFAAMMAPVCRAAAPQALETMQELVVARANAVAERTALKNQLAAAGGRFLKRQLTRRIAQLAAHIEALETECLQQIKGNEDLARRFAVLTSIPGFGAVVATTLIACLAELGSLSSKQIGALGGLAPVADESGERRGARVVWGGRPIVRRFVYLAALSAKTCNSDMKNFYSRLLATGKAKKAALVAVARKLLVLANTLIAQDRLWQPTAPQNT

SEQ ID NO: 357351 - protein, 343 aa, unidentified
MQTITTIGLDIAKSVFQVHGVDAEGKVIIRRQLKRRYVLAFFRKQAPCLVGIEACASSHHWSRELKALGHTVRLMPPAYVKPYVKRQKNDAADAEAICEAVNRANMRFVATKTPEQQSCLMLHRTRHLFIRQQTAVINAIRAHLAEFGIVAPVGRNGVEELLDVVADPSDKRVPEIARACLLALGAQLRKLKEQILEFDRMIRAWHRSSEMSMRLDEAPGIGPVLATALVATVTDPKAFRSGRNFSAWIGLVPKQHSSGGKDRLGSISKQGDRYLRSLFVAGALAVIRYAKIHGTKRRPWLTALLARRPTKVAAIALANKIARMVWAMMVRGERYKQPVALAA

SEQ ID NO: 357352 - protein, 364 aa, unidentified
MDHVTHLGLDVHKDTIAVATLRPDQDLPDERVIPNTPEALRKLVGRRRGSLVACYEAGPTGYETHRLLSSLGVPCDVIAPTLIPRRAGRRVKTDRLDARNLARLHRAGELTGIRVPTSEEEALRDLIRVREDLKDDRRKTMHRVKSFLLRQGRRYPGRASGWTDKFDLWVRGQRFTEPAAEAAFRHYLAALDTRRAQLRTVDAEIEAAASQPPLASQVAKLRCFRGIDTLSAVTIAAEVCDFHRFGSATSFMGFTGLVPSEYSSGASERRGSITKAGNAHLRRVLVEAAWSYRHRPAIGVELRRRSEGQPPEVLAYAWAAQCRPSSRFHQLAARREHNVAVVAVARELAGFIWGLMTDRIAVVA

SEQ ID NO: 357353 - protein, 370 aa, unidentified
MHQRTTLFVGLDVHKDSISVAYAIGGSSAPPQFIGPIGTRQRDIGKLVRRLQSRASRLMFAYEAGPCGYRLHRDLTAQGYECQVVAPSLIPKRPGDRVKTDRRDAVELARLLRGGDLTPVYVPRVEDEAIRDLCRAREAARVTLRAAKLRLKSFLLRHGLNYTGRANWSDAHRRYLAKVVCPTPVQQIVFQEYVRAVDEQVDRLGRLEEELAELAPRWRLYPVVQALQVMRGVQWVVALTVVSELGDLTRFANPRQLAAFVGLTPSEHSSGPKRRQGGIAKTGNGRARRVLVEGAWAYRYPAKVSEAIQKRQEGLPKTVQDIGWKAQVRLCRRFRRLTARGKHANVVVTAIAREMLAFMWSIAREVSIEA

SEQ ID NO: 357354 - protein, 398 aa, unidentified
MSRIWAGIDSGKGHHHGIALDADGKTLLSRRIANDEPELLKLIGDVLDLADGREVTWAIDMTGGEPALLLALLVNHGQEILYIPGRLVNRAADGYRGEGKTDARDAYVIADQARMRRDLRPIRPGDEAAVELKLLTGRRADLVEDRTRVVNRLRSSLLSMFPALERALDVTNTGPLRLLTGYQTPAAIRRVGVSRLTTWLANRKVRNARSLAEAVVEAAERQHTAVPGEKTTAKLVHTLAEEVMALNEQVSEMDKLIEGRFREHELADIVLSVPGIGTVLGAEFLAAVGGSLDEFASPDALAAFAGVAPAPRDSGKVSGNLHRPVTYHRRLQRVFYTSALVSVRYDPNSRKFYDRKRAEGKKHVQAVLALARRRVNVLWALIRDRRCYQITPPAPAAG

SEQ ID NO: 357355 - protein, 309 aa, unidentified
MKKLLSVGIDVSKDTLDVCLLSKNDSRNLQVTNNRKGMNSLKQKLQEIDSIPIVIEATGGYHYDITFFLQEKGFQVFVINPLITKRYLQSSIRKVKTDKADALILARIGVNEALSLYTETKLEVLRKKKVRLLHFYQKKSQEISTKISNSKNVGLFDSIELESLQRIKKSYQQEILHVKKELVKSLELIPQKIRGVSEVNHKAIAIELGNLKRFSNKRQIVAFAGLDPSIKESGTSVKGRSRLSKRGSKTLRHFLYQSAWGVMMHNPKYKKFYDKKRTEGKHYFTCLSAVARKLLCQIYFELKEDYIKG

SEQ ID NO: 357356 - protein, 333 aa, unidentified
MNKFKHFLGIDVSKEYFDAVVILNGDKQNTVHNQFVNDYKGIQALRKWLKEQNATFENTLVCLEHTGMYGKLIIKYLMVFKFDLWVEMSLKIIRSIGVQRGKNDKIDAERIAYYAMKNVDEAVLYEAPRKEIDKIRNLLSLREKLVVTKALLLRNVKELHSFDLEVAKLLEKSQKNTIKGIEMDLKNIEKQLDKIIDEDENLSRIFKISTSITGVGKVTALFLICFTNEFTMYTTPRQLACYAGVVPFEYTSGKSIRSKPKVHYMANKKLKKQLHMCALSAITSDPELKKYYNRKVEEGKSKMLVINNVRNKLVHRVCACIRENKMYEKRQVA

SEQ ID NO: 357357 - protein, 352 aa, unidentified
MNRIVRVGVDLAKNVMQLHGVDIAEHVVIRKAVTREKFLEWFANLAPCVVAMEACTASHFWARRLREYGHDVRLIPPQFVVPYRKGGSSVKNDAVDAEAICEAASRPHMRYVPVKTPAQQGALVLHRMRQGLIEERTALVNRLRGLVAEFGIFLPQGIHRFRERFAESVEDGGNELPGLTRVALLRGWTRIVELDAEIDWFDKQVAQHAKNDPDARRVTEMFGVGSITASAASATVGDARQFRNGRQFASWLGLVPKQNSSGGKERLGRITKQGDAYLRTLLFQCARVTLTAARRRQDRLARWVTQLVERVGYGKALIAIANKHARVLWAILAKGQRFDPSYDGQPHGVAAQ

SEQ ID NO: 357358 - protein, 415 aa, unidentified
MALKIVYKICCGIDVHKTFVVACIASTNDKGVTSYESHRFSTYTSGLKTLLQWLLDRNCKDVCMESTGKYWIPVYNILEKDCSIVLAHPKYVKAIRGKKTDKKDAKWIADLFKHDLVAGSFMPPADIRQLRDLMRYRFKLTCFKSSEKNRLQNCLTVSNIQLGNVVSDTFGKSAQAILDKLLENPADTSFDLEPLVYKSLKKKLPELRDAIDGYITPEQAGKLKVIKAHYENLESRKAELEELILALAAPYQQELTILQTAPGISSDFTAIGIISEIGTNMEAFPSAKHLCSWAGLTPTNNESAGKKKSVRVSKAGCYIKPLLVQCANAVVTSKKHPEIRNRYLRLKKRRGHKKAIIAIARMLLTALYHMLKNGENYNAELYRKSDLPPVNREITVEQALMIARNQGYKIKSATA

SEQ ID NO: 357359 - protein, 311 aa, unidentified
MNNTIGIDISKDTLDAHRLADGQHKQFLNGKTGHAQLVKWIGKQSDPLIIFEATGAYHRQLERVLCTHIIPFVKVNPKQARRFAQASGKLAKTDRVDCEMLAKMGAALQLMPKPFTAENLYDLRELLSARRALIKDRTAAKARKATVINALIKQQLEKRLRQIKNDIAKIDALMLDVAREDQYMSERLDILFSIPGIGVITALMILVDMPEIGALNNKQVASLAGLAPMSQSSGKWMGKARIQGGRPNLRNAIFMPALVAIRHNADLKTKYDQLVTAGKEKKVAITAVMRKLLVLANALLRDNRKWAEKAA

SEQ ID NO: 357360 - protein, 349 aa, unidentified
MRTFIPPAGTRFYAGADLHARAVFLVILDGDGRVVFAKNLPANPDAFLKAVAPFRAGLLVACECMHCWYWLADTCRDHDIAFVLGHALSMKAVHGCKTKCDRKDAEAIARLLRGGNFPPAYAYPRERRGLRDLLRARLRLVRQRAHLYGHVHTARRQANLPPVSSAVKYQCKRDGCTAGLADPFVRRRVETHLTLLEPLDTAIRRLEKEIEDAADRLFPAELAVLQSTPGVGKVLSLTILLEIDTIDRFDTRQQFCSYARLCGAVQTSDNKRTGEGNKKAGNAWLKWAFSEAAVLSAQKDERVGALYNRLASKLGKAKAYSALAHKLGRAFYHMLHTKEVFDVNRFVRH

SEQ ID NO: 357361 - protein, 342 aa, unidentified
MYYIGLDVHKKTISYCVKDASGRVHREGKLGATRCELDDWMRTLPQPWTVAMEATIFTGWIYDQLHPHAAQVKVAHPLMLRAIAAAKKKNDRVDASKIADCLRCDFLPECHMASTEIRDRRRTLRYRCLLVRQMVQTKNRISGLLMETGVTYNKQRLHKVGYFRELLASNEEVSESIRPLLRLSRDTIARLQKTERALVSSLQRDPLLSERIKRLRTVPGVGPITALTWALEMGEISRFRSIRQAISYCGLCGDERSSAEKSIRTPISKQRNKNIQFVLIEAAKLAPRQDQDLALLYEKEKQKGNANRATLAVARKMVAYLLAVDRGQRDFVPADDCRCDAA

SEQ ID NO: 357362 - protein, 360 aa, unidentified
MKRSHFIGIDVHCQFCEIAVVDVVGNVMFRDRCTTTIPTLLAVLEKVPRPRSLVVEEGSLAGWLWRGLAGAVERMVVSEPRRNRLIAKEGDKDDDLDAEKLAQLLRGGYVKEVHQVQSLERAVFKQQVAVYHFRVRQRLRESLRLTWLFRQHGVMIRERDYANAKNRPALLARLPENAALRHMVTTLWSSYDALVEQEETWRKCLLQVASQEKVVQRFVAMPGLGWIRAATLYAYLDTPWRFRSKSALWKYLGIGLERHRSGNGPEHLGVPKLAHRLLKSTILGAALSAVAQGDNPFAELYRRWLAKGLSSKLARRNVARALATTLWGLWKNGSAYHPKWVGVPAAASAAARSRLGAAGC

SEQ ID NO: 357363 - protein, 432 aa, unidentified
MMTMRKDPRTQGQPSEPAEAFAALIGVDWGDQSHALALLDVARGQVETSTLEHRPEAIQAWLQQLEERFGGRPVALALEAGQGPLVQALVSVAWLTLYPIHTATSARYRTAFRPSGAKDDQPDALVLLDLLCHHRDKLTPLRPQDEATRALDGLCQARRAAVELRTQLSNQLTSTLKGYFPQALDWTGESLAAPLALDFLEKWPDLLTLKAARPATIRKFFYAHNVRRPQTITQRLSAIAAARALTTDPAVVEVRVRVVRMLVGQLRVLARHIQDFDQAIRQAFAAHPEADLFRDLPGAGPALAPRLLTVFGTDRTRYPHADNLLKYSGLAPVKEQSGGRQWIHWRWNAPRFARQTLIEWAGQTVIFCDWARAYYQRQRRKGVGHWAALRSLAFRWVRVLWRCWQDRTPYQEARYVAALRDRGVNVTPEIAA

SEQ ID NO: 357364 - protein, 365 aa, unidentified
MIVIGTDPHKSQHTAAATEAATGELLDDLTVAAKPKGHAELLRWGRALGADRLWAIEDCRHLTGNLERYLVAHGERVVRVAPKHMAGARRSVRERGKSDAIDALAVARAALREGPERLPSAFLDEQAMQIKLLLDHREDLEQESTRIVGRLRWHLVDLWPELELPARAFERNVWLDRIGRRLARAEQSTRVRICREQIRALQALLRRSRELERELTVLVKAKNPALLELPGCGPLTAAKLIAQTAGAERFPSEAHFARLAGVAPIPVSSGRTDRHRLDKGGDRQLNCALHRIAVTQKRVHAPAQHYLARKQAEGKTNREALRCLKRQLVRTVLRLLRPVSSDRTDPLAMNKSTNIRKPLQVAALT

SEQ ID NO: 357365 - protein, 321 aa, unidentified
MSKKNETCFVGVDISKNKLDVYRPDTKAFSQLNNTEEDTHEFSKTLQRKRQRTIVVMEATGGYEKMLLHQLEQSGIEAAVVNPRRVRDFAKGIGIDAKTDPIDSAVISRYGQVVQPNPVACKSDHEKKHRALVDRRNQLLGLINQKKNRLKQTWDEDAKESIRVVLECLKKQLKQIDSDLAKMLKVDEENKRMIEILGSIKCVGPVLISTLITSLPELGKLNREQIAKLVGVAPINRDSGSKSGKRFIGGGRGNVRRVLYMAAVVGIRHNTVLKAYYTHLKSKGKESKVAIVACMRKLLSIINTMVRTDSLWKDVKQGGAA

SEQ ID NO: 357366 - protein, 366 aa, unidentified
MGEYYVGLDVHSRQSVFVIEQADGTVTARGEFPTTPAGLRQLRTQHGVPAGTAVALETGTLAFYVARELMRLDLRPVVIDAHEVRLKAHRPTQKSDRRDAFELCEGLRRGIYRTIVYVPSLAISQLRETLSRRRHFVRVQTAEVNAAKRLLRAVGMGALGKSLRTAAGWEKLLAAVAADPELRTFLTHHRAVWQSAAAQVAELERALARQTPAVAADVVRLQTLPGVGPIVALTLVAALADVSRFPSAKHVASYAGLIPSTQQSGDRDWHGRITKRGAPELRAMLCEAAQHARRPTHPLNPYFALLCARRGYQAAVIAIAHRLCRMAFALLRDRVDFDARRLGVEEGPFTRTIVRRYRLKVMSLPA

SEQ ID NO: 357367 - protein, 353 aa, unidentified
MSQQNARIAVVGIDIGKNSFHIVGQDGRGEIVLRQKWSRSQVEARFANMSPCLIGMEACVGAHHLSRRLRALGHDARLMPAKYVRPYSKGQKNDFRDAEAIAEAVQRPTMKFVATKTADQLGLQALHRVWERLVSQRTGIINQIRAFLLERSIAVRQGIRFLRAELPRILAMPPDVLSPRMVRIVEDLACDWRRLDERVEGLSNEIETIARQDAGCERLMSVPGIGPIISSAMVAAIGAGDVFTKGRDFSAWLGLVPKQISTGDRTILGKVSRRGNRYLRVLFVQAAWVVLIKPKIWERHGLKPWLEAARKRLHHNVLAIALANKLARIAWSVLARGRAFEVRKINQAAPQPT

SEQ ID NO: 357368 - protein, 406 aa, unidentified
MVFVGIDWSEQQHEVELQAGSGKVLKRLRVSADIAGLSRLQEAITDAAEEPSQVVIGIESNHGLLVNALVASGYRVYPINPLTSARAREGEAPSRSKSDPGDAHVLANLVRTKRQDLRPLAGDSEQAQALQVRARSHLRAIRVQQRLRSQLRSTLAKFFVGALPLLGDESEDLRDALAVLSLAVSPEQGRGLSQNKLRSSLARHGRQRNLEVKASEIQAQLRAPQLELNTPKVVSAYADEVSHLVRSLLLARSEVAQLEAQLAADFREHPDAEILLSQPGLGLVLSARVLGESGDDPTRYVNAKARKNYAGNAPVTKRSGKWKMVSRRLARNRLLADAGFLWANSALSASPGARRYYDQLRARGKTHNQASRALANRLVGILHGCLRRRCLYDEAVAWLQPLKEAA

SEQ ID NO: 357369 - protein, 344 aa, unidentified
MDNHTQYSGFAGVDLAKKIMQIHFVTEDGEITDRQVKRAEFLDFFRNRSKCLIGMEACGASQDWARKLEAMGHEVHLMSPKAVKPFVSGQKNDHNDAIGIYKAMFNGVRRVPVKSTEIRDLQTLRRIRSQVTKDKVKEINHVRGLLAEYGIVMGRSVAAFNKGISSALVNLKERGGVSPLVAEELRTTVESIKTKTERQKRLDREIEQLARGCKNYENFLKTPGVGPFTAAMLCVLLCDPDIFANGRQFAAYIGLAPRSRGSGGKNVVIGIPSKFNCDSESRAVFVECAQALTRYKNKSPWIEGILRRKPKKVAVIAIANKLARQVWAMANKGESFKQMTILTA

SEQ ID NO: 357370 - protein, 373 aa, unidentified
MPRYSTAFGMDVHLRSTTVCALDAETGEAVTRRFRGNPWGEVAEWMSGFPGPSLAAYESGYLGFAPQRELAGLGVECVVAAVSKIPRSAADSASKNDRNDAARMAKAILAHDISPVWVPSPEVEGIRDLAGAYDGATARLATAKQRLLAFLARRGFVYGGTTPAGNPRKYWTYDFLRWLDKVRPEDDGGVRTLAALRNEVEAAAEARADLLSEYGAAVDASPIAAEVAALQSIKGCAFALAAAFSAEVGDFTRFRSGRQVTAYFGLAPSQRSSGDSVRLGGISGAGNALVRKLAVEGSWCYAAARHQPKLMPRDTGVPLEIRMHGRKGSERLLRRREEMLARGVPAAKANAATAAELVRWLWALGMMCREGAE

SEQ ID NO: 357371 - protein, 396 aa, unidentified
MKCPQRLHDRGSVTHSAVGRVRERHIHHEGGTDMNSVHYVGMDVDKEKIVVARLTSAARLSNDCLIANTPQAVKKYFAALTREGEVVAAYEAGCFGFGLYRQLSDLGVAAVVAAPGLIPRNPSDRLKTDRRDARTLAFALRAGQLTAVHVPTKQDESVRDYLRMCEDMRDDLRKCKQRILHLLLRRGIRYEQGGPWTVKHKNWLATLDLGSELDRQTLDSYLARLQELESTCSQLAAEVESIAQGDRYRQPVSTLSAFKGIRTLIALSFITEIGDFRRFSSAAQFMAFLGLVPSEHSSGAKHRQGGITKAGNSHLRRLLVEASWHYRSYHPTSRVLVERRRGVDPRIISYVNRAGRRLNRKYLHLLLRGKRSQLAVTAVSRELAGFIWGAMVGQVA

SEQ ID NO: 357372 - protein, 352 aa, unidentified
MKSKSPEEIAVIGVDIGKETFHLVGFDHAGERVLRKNIKRLAIKPTFEKLPRCVVGMEACISAHFVSRMLRELGFEPRIIPAIYVKPFNKGQKNDSNDAEAIAEAAMRPNPRTVTEKSQDQLDLQAMHRVRSRLVARRTATINQIRAFLIEQGITVRAGRHRLQSSFAAILENRRDEISSRMRAILMGLYGDWLWVDERIKAISSEIEEISRSEENSANIMTIPGIGPLISTAIVSAIGKGEVFDRGRDFAAWVGLVPRQFSTGGRTILGRISKRGNSYLRMLLVQAANVILMRPHRWDALGLGPWLRGVVGRMPHNKAAVALANKLARTAWSVLRYGSKYQVERDEALAAI

SEQ ID NO: 357373 - protein, 371 aa, unidentified
MSKQAPLDAESGNTFGADPHKRTVTASVLDERGGVLGTQTFRVSGDGHRTMETWALQFGPINRWGIEGASGIGRHTAMFLCHRGHDVRDVNPNRTAEQARHRRNGKTDALDSVRVARATQADPAMPVAFKRAGGDIGPDETHELMSLWHKGRRSILTSRQHLVNEAENLLGDLPEEIRDGFPNTPDVRCRLRALARRIERRWDPVTMLRLQLLERHAAAIAELDAQDREAANQLRELASQAGSTLHGLCGIAERIEAELLVEVGDPRRFTEGGFARFNGTAPLPASSAEGDGEPVRHRLNRGGNRRVNACLHRMAITQLRCEPRARKIYDEARAGGHTKKEAMRILKRHLSNLVHRRMISHVHANDDAPLT

SEQ ID NO: 357374 - protein, 456 aa, unidentified
MAAKIRKKRQRSLPRHLKRVNFHASGIDIGSRQHSVAVPRGSCKPGDEVKFFDTYTPNLEEMADWLEECGVDTVAMESTGVYWIPVYEILEVRGFEVILVDTSQIKYAPGRKTDYLDCQWIQELHTFGLLRGAFRPDDFICQVRGYVRQRSTLVREGSKPVQHMQKALEQMNVKLNSVLREVTGKTGMSIIEAILDGDRTPEKLASLRHKQCKHDEAEFVKAMQGNWRDEHLFALRQSVDLWRYYKTKITECDVEIAKLLGEQPNISGDKSLASGRAKRPNRRNELNFDGRTMLFQLTGVDLTSIEGIEESSALTIISEIGTDMSPWDNAKRFASWLKVCPGNNKSGGYNKSGKNRRSANRAAQALRIAAQTIGRSKTALGAFYRRKAATRGAAIAIKATAHKLAVLVYSMLKYGTEYVTRSQEDYEQKYRDRQVRFLKRQAKRLGFHLSESAEPS

SEQ ID NO: 357375 - protein, 440 aa, unidentified
MDKATTSGRPGACTATAPTLERLEVDTMLDPKVTSVVGIDVAKASHVVCALEAPSGKIRQRPKSIAATAAGYAKLLQWLARWGGPEAVLVGLEATGSLWEPLHDALTHAGYQVLVLNPRQTSSWSQSLGLRAKTDGIDAQTIARGLLAGYARASALPTETVQALRELTRARRDLVQARTAARQRLLDELVVVFPELPGHLPAHTDLATPAVLHLLGAYGSARALAEAPLADVAGLLAQHRGGRWTQEQAQQLQALAKHSTASTRAVRARGTVVSTFARHLLERQRHIDDLEKAIAAALHDDEVGKRLQEVPGVGPIHAATIRAELGDVTRFTRLDQVVAYAGLDPRVRQSGAFVGQRKLSKRGPGALRHALYLAVLVATRYRPEWRERYHKLLARGQAKKEALTILSRALLKVIYHLLVSGDSYDADKIKPRAVVAAVGA

SEQ ID NO: 357376 - protein, 335 aa, unidentified
MSHCGIDLHSNNHVVVVIDERDKRVFDKRLNNDLGSTLNVLAPYRETLKGIAVESTFNWYWLVDGLQDNGFGVQLVNTAAVKQYDGLKYSGDHQDAFHLAHLMRLGILPTGYIYPKEQRAIRDLLRRRMSLVRSASTQLISVQSQIWRSTGIRIKSGELRKPDFSPPHLDKYTLQAIGAGLAVYQAIQQEINVLEQSAYQAVKLTDAFKILQTVTGIGKILGLTIMLETGDIHRFAGAGNFASYCRCVDATRTSNGKNKGTGNAKAGNKYLSWAYSEAAHFAVRFEPLAQRFYERKKAKTNGIIAIRAVARKLARATWMMLKHQVPYDARLMFPN

SEQ ID NO: 357377 - protein, 393 aa, unidentified
MLHTGAREGACYYPFAAQTHVVSSDESEGMINVGIDVHKRRYQACLKDEEGHLIGEVSFPRDEEGIRSSRRLLQNHGEAKIVLESTGNLSVPIYDNLTKDSANRVILANPRKTRIIAEAKIKNDRIDARVLAEVVRADLVAESYVPNKEVREQRALLRERRSLVEDTVAIKNRIHSLLDRYNLKHEYSDLFGKQGREWLRGLQLPSTEKTILDVELRQLESLEAGIRTLTEKIAIEAAEEPRVRLLMGFTGIDYYSAMLLLAEIGDIKRFSSPKKLVAYAGLAPGMRSSAGMTVRGHITKEGNKYLRWILIEAAQHASRFDPKLQGFYQRVSTKHGRQRAIVGVARKLLVSIYHVLNRNETYHGQRPELLERKIGNLQRIADSSLQEGRDNQQ

SEQ ID NO: 357378 - protein, 361 aa, unidentified
MSSVTTTVADFYRYVVGVDTHAASHSYAIVAGPNGALIDQATFPTTTAGLRRARAWIGRRTGGDLDGVLVAAEGTGSYGAVLGDVLEEAGYRVVEAPTPRRERGRGKTDTLDAALAARSTLVMPLVLLRDRRVGEAQTALQVLTVARDQLNADRLRCINALTALIRRHDLGLDARRALTDSQITMIAGWRRREEPLGAATARAEAVRLAKRILVLHNELADNRNQITTIVAAQTTELLDLPGVGAITAAVILAVWSHPGRIRSEAAFAQIAGTCPIPASSGNTVRHRLNRGGDRRLNRALNTIVLTRMRTDTNTRAYVERRLAEGKTSKEIRRCLKRYTSRQIFRTLAATHRPPEMVPSAA

SEQ ID NO: 357379 - protein, 421 aa, unidentified
MSQQKVSRNLAQVKRGALHIGVDLGLENNVAIVISDNAERLDRFRFSNDRDGYEYFQQRINKLQRENKAPEIMIAMEPTNYLWKLLASDLEQKGISYRLVNAYTVKKHREGDQLDRSKDDPRDAFTIADLSRTGKCTETQLQHGAYAELRQYISLYYRLKRQVRREKQHIWHAVGQLFPELPGVFRDITGETAKAILITQAAAFEIQKMSEEEFIANVRCRFDGKRLYVSRLRSAYRLAVNSVGVNHGVQALQLALKFHVESLNRLLIQEKQLVNALQACFLSLPEANSLLSVNGIGILSGATILAEIGDPTRFRHAGQLVKLAGIQPTPNRSGRKQRSATPMSHQGRPRLRSALYFTCLRLIQVDQRFSILYQRLQHRKKNPLTKMQAVGVLMNKLLHILWALIKKQALYQPLYIRTLET

SEQ ID NO: 357380 - protein, 387 aa, unidentified
MYYIGIDISKFKHDCAVIDDVGDVITPSWSFTNDHEGFSQFKELLDSLGTETRIGLESTGHYGMNLKLFLESIGFSFMEFNPLLINRFVKSKSLRKTKSDSIDCMMIARYLMTVEYRPYPSLLYHTEKLKSLTRFRDSLIRQRSRQLVELTNILDKVFPEFKPFFSGRFSVTALHILSNYSSPEKISNMNSKSYEALRKLSRGRFSTVDFAKLKQLAKNTVGSTEDYLLQEMQIVLELYSKLDSMIDETERSIKECISDMNPPMLTVPGIGIESAAVMLAEFGDFSKFDNASQMLSFAGIEPGYFQSGTSETTGKMVKHGSSYLRYTLMNCAQTVVNYEPTFAMFYSKKRAEGKPHRVALSHVVKKLLRVVYTLQTKNIAYDAELVR

SEQ ID NO: 357381 - protein, 404 aa, unidentified
MENGSWERASVRRIATSGAGFRELTAWLEASATTPALVRIGCEPTGGGYSRTVAGWLERHGYEVQWLQNWAIHDRRQLMIGKQAKTDALDARLIARLVYERDRLGLVGGFLHRPPRNTDGLRTLVRGRLRLMDQHIRFRQQLTAVEDVLFPELKDFYRSSVTSPSARALLESFPTPESVAAADPADVYRVIVNVGRNRRMASRLFDFQLAAADSAGLTDDREPLVCAQHWLLYQLRLLDRQLEDAEAAIGETPAEWPEQDRCVLDSFPGMSQHRQAVLLSCIGDLSTFNSDRQLRKLLGWYPEAHQSGTAVHKHHLGKSGNRIGRHEVWLWSLQMLSPLSPPNPFRIYYQRLRGRGMSGSVAIGHLAGKLISVPFFCLRSGQSYDPVRHARDLGLGDACAELEA

SEQ ID NO: 357382 - protein, 309 aa, unidentified
MEIVVGIDVSKERLDVAILPQEEVFAVGNDHAGIDELAERLKGIGVDAIALEATGGFEMLAVAGLPAAGLTVLVVNPAQVRAYAHAIGRRAKTDPIDAAVIAAFVLATKPEIRPLRDAETQALSELVARRRQIVQMVVAEENRLRMALAKQAQESIKRLLKALRRELESLDADLDSHIRKSPVWRVREALLTSVPGIGATTARTLLAELPELGSLDRRQIASLAGLAPWTRQSGKWKGKSFIGGGRGKVRAVLFMAALVASRYNPDLKAFRDRLVAAGKPKIVATVATMRKLLTILNAIIRDGRPWQNA

SEQ ID NO: 357383 - protein, 457 aa, unidentified
MSQTKRSRKSRGLFPVHPAAAAIDVGAALHVAAVGPDRDKEPVRTFRTFTDELRRLADWFAQCGIRTIVMESTGVYWIPVFEILEQRGFEVMVVNARDAKHVPGRKTDVSDAQWLQRLHEYGLLRASFRPEAEIAGLRTYLRQRERLLDYAAAHIQHMQKALMQMNLQLHHVVSDITGVTGMTIIRAIVAGERDPNVLASHRDRRCHASVEMVCQALVGNYREEHVFALTQALELYEVYQTKVTACDEQIEAILKRLKKNAPPPASKLLPVRQRTHQPNAPAFDARGALHAILGVDLTQINGLGPYLALKLVGECGTNLAAWPTAKHFTSWLGLAPHNKISGGKVLSSKTRRTSNRAASLLRLAAGTVGRTDTALGAFYRRLSARVGKAKAITATARKIAVLFYNTLRHGMAYADPGATYYEDRYRQRVLNNLQRRAKSLGFVLREAGLDTARADVS

SEQ ID NO: 357384 - protein, 343 aa, unidentified
MEAITTIGLDIAKSVFQVHGVDAEGNVIVRRQLKRRYVLTFFQRLPPCLVGIEACASSHHWSRELQALGHEVRLMPPAYVKPYVKRHKNDATDAEAICEAVTRPNMRFVATKMPEQQSCLMLHRTRHLFIRQQTSVINAIRAHLAEFGIVAPVGRNGVEQLLGVAADLNDKRLPEVARACVAALGAQLRTLKAQILEFDRMITAWHRSSDASRRLDDIPGVGPVLATALVASIADPKAFRSGRDFSAWIGLVPKQNSSGGKDRFGSISKRGDRYLRSLFTTGALAVIRYAKIHGTKHRPWLTALLARRPTKVAAIALANKIARMAWAIMAKGERYKEPAALAA

SEQ ID NO: 357385 - protein, 408 aa, unidentified
MNPLYVGIDVSSKSNVVYFMLPDGSKHSNFSVANSHTGSSQLVKRILSAMTSCSLDTVLIGLEATSVYGDNLVYFLREDAALARFNSKIHVLNLKQVSKFKEAYNDLPKNDFIDSFVIADCLRFGRINKEVYIGDYRYKALQNLTRARYFAVSNLIKEKQRFMNILFKKYSTMTQEKVFSDTFSTTALAVYDEFESAEALADMDLHELTAFIMEKGKNRFPNPNAVAKAIQKAARSSYRLPKTVNDSVNQVLSISITSIKALEAQIKEFDKAIATQMELLPNVLISIPGIGPVFSAGIMAEIGDINRFHNQAQLAKYAGLAWKQHQSGDFEAQTTRLINSGNRFLKYYLCEAAFSLVRCDKEYSDFYHLKYKEVNRYQHKRVFALTARKFVRLVFRLLKDNRLYTSAE

SEQ ID NO: 357386 - protein, 366 aa, unidentified
MSEGTRATVHVGLDVHAASVRLAAVRGDELLDERTLPYDHDVVERAVSRWARVRCCYEAGPTGYGLARHLRSRGIACDVVAPGLVPVRPGDRIKTDPRDARKLARLHAGGLLEPIAVPSAQLEALRDLVRAREDARLDRMRDRHRMSKFLLRHDLRPAGKSWGVTRRRWLGSLSFQRAHQQAAFQTYLHAIDLIDRRVEQLEAELQRAAAEGPWAGLVARLRCLRGVDTLTALGLVAEIGSDWERFRTAEQFMSYVGLVPSERSSGQQRSRGSITKAGNGHVRRLLVEAAWHQRQRPRVGEALAARQRGQDPLVIEHAWRAQQRLHRRWQRMAARGKPHQKIVVATARELAGFVWAIATDQPLRRT

SEQ ID NO: 357387 - protein, 317 aa, unidentified
MKTKNNNIFIGIDVSKATLDVSVGGKHFKLKNTAKAISDFIKSEIVDKKIAPSLVCLESTGGYEKTAMQAFFAASIPVHRAHPNKVHAFAKAAGHFAKTDKLDAKLLEKYAAFVADEQKGDAPISEATLELQALKSLEINLANDLHAYQCRLQHAGSKAVRKYLETQINFIKTQIAQVQAEMAAVIKSDEDLKTKQKLLKSYKGVADKVSNTLLAELPELGTLNKKQIASLVGVAPKLFHSGTKTPNGHIFGGRFYARKSLYMAALVAARSNVEMKAFYARLLLAGKAKKVALVAIMRKIIITLNSMIKNKKPYVIS

SEQ ID NO: 357388 - protein, 453 aa, unidentified
MSKLLSDKIQIRNKTMLKVIGDTDKTRILGISIDTSKDVHEILLFDFNGKLLGKSFKINTLLPGYEKLKKKISYAIKKIKAKKVVIGIEAVHICYENISRHLKEDYGNVFFINPFATASNRKQKLLLGLKTDAIDAASIGDLLIRGECYPYSLKEGTYLELQELAYWRDKKMHLVAKLKNQIIHHMIIAYPGLNTTFENERQLFVYYFKTEISLLLIKTLLTPQEIAKMSPREFSQFSKKQGYYFKIEKSKTIVNYFKKILLPPENTFYVYRDMIRKDYQLLEHLEKDVKEVEKKLIALARKTPIKILFKQIKGLSDLQIALYIACLGDPSRFKSAKHVYSYAGLSPKIEQSGLLPSRKKGIKRSGNKLLRTTLFLGSVFVVRHNPFFRKYFLKIRERKSGKESYVAVANKLNRIIFTMMKRQTQFSPPATEDLAVWPRQKPVRVTKDSQTSE

SEQ ID NO: 357389 - protein, 428 aa, unidentified
MGEGNARLLVGIDWGTEEHQVCVEDASGTVIEERRVLHTAEGLAGMCDWLLELAGGDPSTVYVAIEVPHGPVVETLLERGFVVFSINPKQLDRFRDRFSMAGAKDDRLDAYVLSDSLRTDEHCFRKVKLDEPEIIELRELSRISGELTTQRSRLANKIREQLRRYYPQALELPADMDSAWFLDLLMLASTPEKAMRIRESSVAKILRKRRIRKVDAKKVLRTLRKPGYMVAPGTPEAASSHVRLLVQQIRLVTEQLKDCRNQLAVMLDAFHASAEDTVTEESDEVEKCEQRSDVEILRSLPGIGVIVLATLLAEASQPLGARAYHTLRALCGVGPVTRRTGKRKPVVMMRRACNPRLRDALYHWARVSVQRDPVSREHYARLRAKGHSHGRALRGIGDRLLNVACAMLRNGTLYDHSMRHRTAQEAAA

SEQ ID NO: 357390 - protein, 379 aa, unidentified
MTLDKYFRQCVGIDISKDKFTACLYMYDVGSDTGCCTESIDFPNNRTGFNQMVKWSRKESQKGFPLVYLMEPTGSYYEPLAYHLHKIGQTLYVVLPNKARKFCEYEGIKTKTDAMDARCLALMGCKNRKLRPWEPPLPIYRELRQLTRLRADLVKMQTQMLNHIESIDHMEDVAPEVRKSYEKLLDTIEKQLEKNEKDIAAKLAQDKELEAKVKRIATAKGIRVGTVTCIVAETQGFHLISNRKQLTSFAGLDVKARQSGKDDPRHHITKKGNAHIRAALYMPALSAAHCNRQMAQAYGRICAKHPDVKMIGVTAIMRKMLLLVYSLWKSGEEYDETRDKTHTPKKEEPQPANSPEDCLQPNVEPIDWNVTDKEGNPPF

SEQ ID NO: 357391 - protein, 423 aa, unidentified
MWRLAIDYTCDLQYNYIMQNQIKIKIGGFKMKDIYGIEEISGIKDLWAGIDLHSNNHVIAIQDSRHNRVFRKKLSNDIEKTRTCLERFKKRLCAITVESTYNWYWLVDGLKESGYDVRLAHPAKISQYNGLKHTDDKDDAYFLAHLLCLGLLPEGYIYPKEERSVRDLNRKYRKFIEERTTHILSLKSSFNRSFSEHLSAYNIKKITDEQVEKMVADKNTLAMTMADVNTIRYLTNTIEKLEGLLLGQVKLKPEFEKLMTLPGIGKVLAISISLETGPISRFPTPGDYASYCRCVESLRKSNKKIKGKNNRKNGNPYLSWAFHEAAEKAKRYCPYAKKFFERKVKQGNIFIARNALAHKYAKACYHVLKEQADYDVTRVFESAKKKVKPIYKRKIKGRVSKPERGLGSEPLAPIGRAGATPLS

SEQ ID NO: 357392 - protein, 358 aa, unidentified
MQRNKISFIGQKIFIGIDVHKKTWDVAVAPEIGIVKRHPQKASAKELFDFLKKHYPDGDYLAVYESGFSGFSTYYALKDVGINSIVIHAADVPTTQYEEVMKTDKIDSIKLAKSLKAGLLKGIYVRERENIDDRSVVRLRKTILKDLTSYKSRVKHMLHSNGVSLPERFEKPGSHWSRAFIKWLKEDVTLLSSSRNSLDLLIRQVETIRNTLLDATRMIRDLSQTERYRHNFSLLMTIPGIGVAVSMCILTELYDVKRFHNEKEFAAYLGLIPTCHSSGDKVVHGEKTFRGNKKLGPMIVEAAWVAIYKDPGIGSLYLRYKERMKPQEAIIRIARKLSNIIFAVLKNQKEYVPYHLGL

SEQ ID NO: 357393 - protein, 406 aa, unidentified
MKTLNTNVACAGMDVHYKFSNVTFRDTNGDVVSRQRLDHPDRRKLRQRLAQWPPGLPVIMEASFGWGWLSDLMDEYGMKVALSNCFKVEQMRRARGGVKTNKKDADLLSLLGFEQTDWWKVWRAPSEVRNRREQMRFRADLVAMQTAVKSRIHAIFHRHGIFHDFSDLFGAKGRVFLNELCMKNTAHLSVEALAALRGQVKLLDHLRRQLADVTRVLHRQMARTPLTVRLKTVPGIGLVLAHVLAAEIGHIERFRTHKSLAAYSLLAPRSSDTGEADPRHSPQGRHLGVQGNRTLKWAWIEAAHGAVRSRGRWRDLFERVTDGGRKDRGRGYIKVARELVKVTYAVWSKGADYRDVRPTRGGSDTSTSKSKNMSKSMSKCKCKTRRKPSRSETGQLYHPMVHALTA

SEQ ID NO: 357394 - protein, 320 aa, unidentified
MMAQVDLVVVGIDVAKDKVDACIRSLPLRQTCPSTAQGQRKLVAWLRKHKVNKAVMEASGGYEREWVRVLHQAGIEVRIVDPKRVRSFALSAGRLAKNDAIDAEMIAWFAETFSEAPSPTHDAAHEELQALVKARKGLLDLKIRLQNQNEHAAPGPVQRAYARILKSLAAEIAKLEAAIAVKIKATPDFAERAEIIESVPGLAETTSATIIAGMPELGQVSNKISPALLGAAPYEDDSGHRRGERHIKGGRRWLRNAIYMPCLGAATQNNPVLKAFYRRLIAKGKEPKVALIACMRKLIVILNTMIARRQKWDPSRYALN

SEQ ID NO: 357395 - protein, 360 aa, unidentified
MKNEKTFIGIDLHKDSLTWCVRNSDGEEIGIGRIPTKCRDKILQFVKQWPKPVSVAFEAVGFYRWLWLLLEPEVDFLYLADATRLHAMADRNVKTDFKDARLISKVLWRGEIPVSFVLGEPFYSLRQQLRHRHDLARRAARTKSSMKRICLRANLPGPRSLTGARAVAYFDAYGNRLHTMDTQRWLDLTDQLLLLERQLAQTDRNLSLKIESLPEIQRDIDRLCTAPGVGILTAATILMETGGLSRFSNPKQLACYSGLTTRTFQSADCVRHGHISKAGPPNLRWVLQQASWCAIRTNPYVRSVFNRISRRAGSKKAATAISRKLLIWTWTMHTKQDVWTKPIAEGLAPSYLKEHSLAES

SEQ ID NO: 357396 - protein, 402 aa, unidentified
MPMLSIGIDVSKGKSTVCGMKPGGEIVYTPFEVQHTREGMSELVSLLRSSGEEVRAVLESTGSYHCPVVAALLENGIFVSVVNSLRMKRFCSQSIRKVKTDRIDAMQIALYGLAYWQELQPTKLPEDTYRELQLLARQYYQMTSLLIKAKVDFNAICDQVLPGMQELMNDHAGRHKLSDFVLRYHHTTHILEMGETRFRKDYCKWAEKKGYRNCERMAALIFATAQNGIPVLPNAPSTQIVITEAIRVLHTVEASRDTILAQMQALAKTLPEYSLVREMPCIGDTLAPRLIAEIGDVRRFHSKRALIAYAGIDAPPYQSGKFCANNRHISKRGNRYLRKTGYEVMQSYVMHKPANDPIFTFIEKKRGEGKSGKLAMVAGLNKFLRVYYGKVTELYRSLPAIE

SEQ ID NO: 357397 - protein, 416 aa, unidentified
MIAVERMFSMDIVIERACGMDVHKDNITACILTPEGKEIQTFSTKTVFLLQLVDWIKQHNCTHVAMESTSVYWKPIVNLLEAEDIKFLVVNAQHMKAVPGRKTDVKDAEWIAKLLRHGLLKASYIPDRNQRELRELVRYRRSIIEERARQHNRIQKVLEGANIKLGSVVSDVLGVSARDMLDAIADGEEDPEKLANFARRSMKKKKEELELALKGYINSHQRLMLKTILGHIDFLTEQIEMLDKEVADRVSSYQEDISRLDSIPGIATRMAEQILSEIGTDVKKQFPTAAHMCSWAGLVPGQNESAGKRKSAKTKKGNKYLRSALTEAAHSVRGSKNYLGALYRRTASRKGKKRAGIVVAHAILRISYYLLTRKEMYVDLGEDYFDKQRQQSIVRHSLRRLESLGYTVTLEEPKAS

SEQ ID NO: 357398 - protein, 336 aa, unidentified
MHVNTIGVDLAKNVFQVHGVDSAGKVVITRQLRRKQVLDFFSKLPGCLVGMEACGTGHHWAREISKLGHTVRLMPPSYVKGYVKRSKNDAADAAAICEAVTRPSMRFVPIKSTDQQALLMLHRTRDLLIRQRTQLINALRAHLAEFGLVAATGREGLAQLGAIITDESNHESLPSAMKQALQAIVDQLAALELQVGALDRAIHAHHRTNDMSCRLETVPGIGVIGATAIASTVTDPSDFKSGRDFAAWIGLVPRQHSTGGKERLGGISKQGDRYLRRLLVIGATAVVRQARLHPQKHPWIMRLLAKKPAKLVAVAVANKMARIAWAIMAPELAAAA

SEQ ID NO: 357399 - protein, 351 aa, unidentified
MIIIGADFHPEFEQLAFVNTETGELQEKRLQHREEAEKFYRELAAIGAQVRVGMEASGHAGWLERLLAELRFELWIGNAAEIRRQQVRKQKTDRQDAQLLLKLLLQDRFPRIWVPSWENRDLRQLLWHRHRMVQARTRIMNQLQAVALNEGLRCKKRLWRKHGREQLESIRLAPWACRRRRDLLELLDRLTPTIAELTQAIEREAEKHPAVQRLMTHPGVGALTALAFVLIIGTPERFGCGKQVTSYLGLVPLEKSSGSRRRLGHITKQGSSMLRFLLVEAAQVTVRSDPRWRSKYFHLMMRRGRKTAKVAMARTLAVRLYWMWRKQRDYEQLHEFGSHLQRLRGMTVENL

SEQ ID NO: 357400 - protein, 388 aa, unidentified
MNVGADKSEPLTAIHIDLGAIFVSLELSRSSWLITSLSPGGGEKMSKHSVPGGDFAGLMERFAQLQEKARRRTGQSFRIIVVQEAGLDGFWLHRALQNEGIESHVVDAASIATSRRRRRAKTDKIDGETLVRALLAYKRGEPRVCAMVKAPTPGEEDRRHLCRERKALTAERVRHVNRIKGFLFSQGVSGYQPLRRDRRQRLEELQTGDGRAFPQHLKALVNRELDRLELLLKQIKTVEAARDALLAVEQTAKPAPAAMLLDIRGIGPEFAAILWSEGLFRHFENRRQIAAYAGLAPTPWQSGAVDREQGVSKAGNPRLRTTLIQLAWLWLRNQPRSALSVWFHERVSRNGGRLRKTTIVALARKLLVALWKYVTAGVVIEGVTMKVA

SEQ ID NO: 357401 - protein, 320 aa, unidentified
MAITGEYVGIDVSKERLDVAVLPSDQEWSIPNEERGINKLQRRLQTLKPALVVLEATGGLELAVTGALGAAQLPIAVVNPRQVRDFARATGQLAKTDRLDARVIARFGEAVKPSPRALPGPEAQALAAMLTRRRQVVAMITAEKNRLHSARPSVRKEISRHIDWLERSQAKLDSDLGDTLRDSPLWRERDNLLRSVPGVGPVLSLTLLVELPELGALNRRQIASLVGVAPLNRDSGTLRGHRTVWGGRARVRAALYMATLTATRFNPIIKSFYQRLCAAGKTKKVALTACMRKLLVILNSMLKHRTRWGPPHMQTTALLV

SEQ ID NO: 357402 - protein, 377 aa, unidentified
MQLSGLQSPSSILDPRICFDETETLRPGGVLSAVLEASFYKPNTMKPLSIPAIFLGIDVGKKDLFCHVILQSSTESERFDNTPEGVRALILWLGIIAPPCSILACLEQTGHYGKAVADALHALGIRSLHLVNPRQIKAFGNQKLRRNKSDTADARLIAQFLRSEYDELRPWTPLPANHEKVKELSRYAESLTQDTARLKTKLEAVSLIDVKRSINRRIKAQQKELEAIRSKIAKIVDNDSQLKVHNSLLHSIPGLGEVTCQILLAELPEIGLFGDARQLAAWVGVTPRHFTSGTSGRTATPITKVGSANLRRALYLPAMTAMTYNPLLREFAQRLKENGKTGKQIVVAVMRKLLHQIYGILKSGLPYNPNKRGLKTA

SEQ ID NO: 357403 - protein, 402 aa, unidentified
MHYLGIDVSKASHQCVILDAEGEALGKSFTIQSSKDDFANLVKKLSDLNIPQTDITAGLEATGNLWENIYVYLKERGFNIILLNPFQTNKFHQAMLKKAKTDSIDALVIAGLLRSGCAASSYIPDEEIQSLRDLIRLKDGYLKDTKNYKRKAYSLLNLVFPEFLNLIKDPFNISCTEILSKYQTASDFKSIRPKDLLKIARGHQGNNYDEAWAGKVIQAAKDSIYSGKASRARGIVVKSLVLNIKNLKEQMSELDNEIQNILKTDDGSSNNDIDNLLTIPGVGPKTIAVFIAEVGDITRFASCKDFIGFVGLYPKIEQSGSSLNRAKLTTKGSRLLKHALYMASVASLIHNPYLKSVYNDKLSQGKCAKQALIVVSRKIACIMYSMLKNNAAYNPGRVAIAI

SEQ ID NO: 357404 - protein, 317 aa, unidentified
MTDTYVGVDVSRAWIDTFCPLTNQHQRLTMDPAILDTFAAGLSSKGVVVVLEATGGCERALLHALTIHKVGYARVNPRQAREFARATGRLAKTDAVDARMLADMGAKFALKADDPIDPQRARLADLVARREALIGYITKEKQRLGTTVDLFIKDDIATTLTFLKTRLAALTKEIAVHIKSATQLAKLDAALQSAPGIGPVVAATLVAGLPEIGTTNRRALASLAGLAPHACDSGIRRGSRHIWGGRAQIRRALYLAAFIASSRDPVLKEFRTKLSNQQRPFKAIIIAVARKLLTHLNAMIRSGQPWSNQINTELTAS

SEQ ID NO: 357405 - protein, 417 aa, unidentified
MKNWNEITHYLGFDWAKDHHQVVIVDRQARIVAEFQFEHSLEGWNTWRQRVRDYPALAVAIETNQGAAVEQLLQSGVTIYPVNPRSAKAYRQRKVPTSNKTDQLDAWSLAEALRMEGQNWRPLQPLDPLIQELRLLCRDELKLIAQRTSLINQLQQALMEYYPSALEAFDDWTVPATWKFLERFPTPDALSGAGLKKWNAFLHCHKLYRQNTHERRMAVFSKAGQWQVSEAIQRAKSFLVLSLVKCLIILEKQLQQYRKRIEQLFATHPDHHLFGSLPGAGPKMAPRLLSEVGDDRTLFPDADSLRCYAGTAPVSYQSGQVHKVYLRRQCNKPLRCAIHLWADLSRRWCQWAQIYYQQLRKRGQSHAQAVRCLGHRWLKIIWKMWQTRTTYDEALHTRNQHAHGSWVLQLMNHKTGE

SEQ ID NO: 357406 - protein, 371 aa, unidentified
MADIDGVAGIDAHKHVFTVAVLDARGGRCAIESFPTSPDGLADALTLLDSFGFAIGRIGVEGSAGLGRHVAGFLVAAGYDVREVQANRTAERRRRRRRHKTDREDAEAIARETLADPDLPPAGKQRRPDPCWDELVAVRNRRKSLIGQRVRLLNEAEAVLTGLPLALRAALPQTSRVRPRLRALDRGAASSIQVTAADRVNLAWLVEAAGDIARLDGRVTELDKKIPALLGRLGCTLAEEYGIAAVGAMELLVEVGDPTRFTTEAQFARWCGAAPVAVSSGEGDQAPLHHRLDLAGNRQVNSTLHVMHVTQVRSYPPARDYIAKKRAEHKTKREARRAHKRHLANIVIRRMWADHAQRFETPANLATPAAA

SEQ ID NO: 357407 - protein, 347 aa, unidentified
MRFYTTQHPFYCGIDLHARTMDVCILDQAGATLVHRNMTATPEALLKAIAPYREQIVVAAECMFTWYWLADLCAEHGIPFVLGHALSMKAIHGGKAKNDKIDAQKIAVLLRGGMLPQAYVYPAEMRATRDLLRRRMPLARTRGELLAHVHNTNSQYNLPAIGKKIAYKANRDGVAERFADPAVRKSIEVDLALITYYDALLRDVELTIVKTAKHHDAQTLYLLQTVPGIGKILSLVLLYEIHQLDRFPRGQDFASDCRLVQCARESAGTRSGTSGAKIGNAHLKWAFSEAAVLFLRDNPAAQKLLTRLEKKHSKGKALTILAHKLARAVYSMLKRQTAFDLDPFLQG

SEQ ID NO: 357408 - protein, 367 aa, unidentified
MEKSSKVYVGMDVHKESIDVTLAEEGGEVRRLGQIGGDRGSLLKMVRRQQSKGGERVFVYEAGPCGFWIYREIAALGERCMVVSPALVPRRAGDHVKTDRRDSERLASLARAGELEAIHVPDIRDEAIRDLVRGRDDAVIAQRRVRQQLKALLLRNDIRYVGKSSWTGAHRRWLSELKLPERAQQIVFEEYVDAIAVATGRIERLTRAIETEVLTWRFAPVVAALQAMRGIQFVHAVTLVAELGDLTRFGSARQLMGYLGLVPREDSSGEHRRQGSITKAGNSYARRALIEAAWAYRHPARVTRIIATRQTGLPKAACDIAWRAQLRLSAKYRRLNARHLNHNKIVVALARELSGFVWAIGQCVRPL

SEQ ID NO: 357409 - protein, 424 aa, unidentified
MSSDLEIAAFVGLDWADQQHVIRLRVAGSTAIEAQLLDQKPETLRSWIGQLRQRFGGRPVAIALEQSRGSLLYALMNVDFLLLYPVNPQNLAQFRKAFYPSSAKDDPQDALLLLEMLEKHRDRLRVWVPDDADTRCLRLLAENRRKLVNRRTALTNQLTSLLKESFPQALDWAGPLDSLRACDFLQHWPSLQILQTTPTSRLRKFYRDHTRLDSDAIHQRLNEIRQAQPLTSDSAVLASAELMIPALVRQLRCLIESIQQFDQQLKDRFQQHDDYTLFHSFPGAGPALGPRLLSAFGSNRNRFECASEVQRLSGIAPVTERSGKSHWVHWRLACPKFLRQSFHEFAAQSILFSTWARAFYDQLRSRGTSHHAAVRTLAFKWIRILFRCWKNRTPYQEPIYLASLRRHGSPLCAALSPPTTGANL

SEQ ID NO: 357410 - protein, 352 aa, unidentified
MIPQDVYAGLDVSLETTTICVVDSKGATVWRGSCPTDPDSIAGALRRHAPKAQLVGLETGQLSNWLMRGLCEQELPVVCLDARHAKAALKLQVNKTDANDAWGLAQIVRTGWFREIAVKSMDAQMLRMLLVARTHLISQRQATANVIRGLMKTFGLVIARGASGLFALRVREAAAGNGALLAIVEPLLAAWQALREQIALFDKQILSRAKNDAVVRRLMSIPGVGTIVALSYTAVIDDPARFRRSSSVGVYVGLTPRRYQSGEIDVSGHISRCGDSLLRSHLFEAANVILARYSKASALKSWGLALAKRIGKRRAKAAVARSTGCGLMEPALSLRERQHPDLRSGGHCAKRA

SEQ ID NO: 357411 - protein, 340 aa, unidentified
MTITTVGIDLAKNVFAVHCVDQHGKTVLVKPKVSRAALPELIASLPPCVIGMEACSGAHYWARLFRQYGHEPRLMAAKFVSPYRMAGKSGKNDAADAQAICEAVRRQHMRFVPVKDESQQAMQCLHRIRQGFIEEKTATYNRLRGLISEFGVIAPQSTDALRHMVSEQKSSLPLQVQQCVNDLLEHIDRIEDNITEYDRILSRMAKTDHRSQRLMELKGIGPTTACALVASIGNAHDFKNGRQLAAWLGLTPSQYSSGGKSKLGRITKAGDSYLRTLLVQGARSVLIGAEKRTDLFSRWVCSLVDRRGYWRAVVAIAAKNARLCWASLHYGDDFRLYSAS

SEQ ID NO: 357412 - protein, 377 aa, unidentified
MTTTDAAAEARETVYVAIELSKKTWVLGIAHPDRDRPSIHRVSGGNIAELVSRLRVAARNNRRILVCYEAGYDGFWLARALAKMGIECRVLDPASIQVNRRARRVKTDRIDVLALLRALIATDRGERHVCAIVRVPSVEEEDARRSHRERQRLVRERTGHINRIKGLLFAQGIRDIKPKLRRSRIDFAALETAEGHPLPDRLRRELEREYARLSLIATQLREVEKERDTADAQDPVVEQKRQLLVALHGVGATSAAILAREVFARSFASRRQLGSYLGLTPSAYDSGSTTRCQGISKAGNSWARRILIEVAWLWQKYQPASPLSHWYIQRTAGQSSRIRRIMLIALARKLAISLWRYVETGLVPEGVAIAKAKLRPA

SEQ ID NO: 357413 - protein, 347 aa, unidentified
MNFYTNTHPYYCGIDLHARLLYVCIIDEHGEVLVHKKIKDSPEQLLSLLQPYLGNIVVGVECMHCWYWVSDFCQLHNIDFVLGHALYMKAIHGGKTKNDKIDSFKIAKLLRGGNFPLAYNYPNELRATRDLLRRRTKLVRFGADLKAHVTNTVSQYNYRPHTLNLRYQPAREQMREVFSEPSVQRNVDIDLTMVGHIETELRKVEWFIEKQAKQHNARDYYLLKSIAGVGQILALTILYEIGDIQRFDSVQKFASYSRLVKCKTESAGKTYGTQGNKIGNAHLKWAFSEMAVLYLRGNDKAKAYLNKLQKRMSKAKALSALAHKLGRCVYFMLKRQKAFDESRFLAG

SEQ ID NO: 357414 - protein, 359 aa, unidentified
MDKIARIGMDTSKQIFQLHGVNEAEQPILRKQVRRKGLLAYFAGLEPTDVALEACGASHHWARELALLGHRVKLIAPQLVKPYVKRGKNDAADAEALCEAMSRPTMRFVPVKTTEQQAALMLAGERERLVRQRTQLANTIRGYAAEFGLTAAKGQSHIEPLLEELRASDAVPALARELFAGHAEEYGALQQRIDAVDARLMAWHKASEMARQLTRIPGIGPVIASLLVMKTPEPKAFASGRHFAAWMGLTPKDHSTAGKVRLGGITRAGDETLRSLLVVGATAVIWQTRRGKVKQPMPWLVKLLARKEPKLAAVALANKIARTAWAIMVTGEVYDPKRVCAGRSQADRQTAAAAVTAAA

SEQ ID NO: 357415 - protein, 417 aa, unidentified
MTEYAAYLGIDWADKKHDLCLIDAATGKQTRQVLAHTPQAIAEYFTSLRSRYPGQLIAVGLEQSRGPLLFALLQYDFLVLYPLNPTTLAKYREAFTPSRAKDDPTDADYAAELLMKHNDRLKAWQPDDEQTRTLRYLVEHRRRLIGDRTRLTNRMTSLLKCYFPQVLSWFPDLATVLVCDFLLRWPALEQLRGVKRTTLLNFFRAHHSVRTDTLEKRLTAIKASLPLTTDRAIIDSSVLMISALAAQLKTTLAAVKHFDEAITKLCVAHPDFSLFQSLPGAGEVYASRLLAMMGTQRDRWTTADELACLSGIAPVMERSGQSVWIRWRYFCPKFMRQSFHEYAGESVKHSFWARAYYEQQIAKGKSRQAAVRALAYKWIRIIWKCWLTSTPYNEVKYLEALRKKGSPLLSYAAKTAA

SEQ ID NO: 357416 - protein, 385 aa, unidentified
MPYLGIDCAQLTHAFCLVDEDKRVLVEGTFPETRAGLAELRAQLAPYGELEAVTMEASGNCWQNLQAALQGFGWPVAAVDPVRARRFAELRHPRHKTDKADARSLAEMGLAPERASFPASEAEAQARALSRLLATRVRALGQLHALVVLANPALVACEWELGAPRSLAVLQRYPTTLQLRRARSLAQVRYGPRQKVGKEEAKTLQEAAREALSGAVLVAHGEEIRFLAAHVASCNREIARLEAELAQRLPEAARLDAIPGIGLRTALVVCACVPWSSLQSPKQAAAYAGLHPHRFESNGRVWTRLSKRGDKVVRTALCRAAFPLSQHNPLFRAFYLRLREHGLTHRQALAGVAHKLLRICYALMRDQSDFSADYTRGPRAAAQVS

SEQ ID NO: 357417 - protein, 455 aa, unidentified
MTGAKSRGADALAMVNPGAAAIDIGTTMHMAAVNPNRDDNPVRAFGTFTGDLHDMARWFKACGVTSVAMESTGVYWIPAYEVLEEHGFHVILVNARYAKNVPGRKTDVSDAAWLQRLHSYGLLRASFRPEAGVATLRAYLRQRERLIEFTASHIQHMQKALMEMNVQLHHVVSDITGVTGMRIIRAIAAGERMPNTLAEMRDIRCHASVEKISAAFSGNWPDEHVFALCQSLALYDFYQTKILECDRKLEIALKALEIGKGHDIRRLPKARTKTRQVNTPDFEVRSALYRVLGVDLTQIHGIGPSLALKFVGECGTDLAAWPSSKHFTSWLCLAPGNKISGGKLLSSKTRRTSSRAAALLRLAATTIGRSDTALGAFYRRLSARAGKAKAVTATARKIAVLFYNSLRYGMKYDDPGATLYEERYRNRVIGNLQRRAKAFGFSLHELPAEPEVAVS

SEQ ID NO: 357418 - protein, 367 aa, unidentified
MSTIKFIGLDVHKETIAVAVADDGRSGEIRFHGTILNTPEAIRRLVSRLATPDATLHFCYEAGGCGYGIHRQLLGMGMDCGVIAPSVIPRKPADRVKTDRRDAEMLARLLRSGELTAIWIPDPAHEAMRDLVRSRRQVRQDLVASRQMLLGFLLRHGRKFTGRTNWTKAHWRWLGSQAFEIPHQQFILGESIRRIEEAQQRCDRLDTMLMEALPRWSLAPVVKALQALRGVGPIVAITLAAEIGDLSRFETPKQLMGWLGLVPSEASSGTRTRRGAITKTGNRETRAMLVEAAWSYRLPAREERRYRARVEDLPEEIRAIAWKAQVRLCQRYRTLAASGKALPKVITAIARELVGFIWDIGRRVQPT

SEQ ID NO: 357419 - protein, 424 aa, unidentified
MNCNQNFKISQVTEGTLVLGIDVGSNTHYARAFDWSGLELSKVFKFKNSFEGFQSFVLWVNDLCCKYNKSKVIAGLEPTGHYWFSLGELLKENNITIAIVNPYHVKQSKELDDNLQTKNDSKDPKVIAKLVIDGRYSFPYIPEGIYGELRVADKLKNDITQQIISIKNKIHRWLSIYFSEYEKIYSSIDSKSGFLLLKETPLPKDIVELGSEGIVERWKQTKLRAVGLDKAKKLEEAAKKSIGCKNITSSARFEIKLLIEDYEYKQNQLNSITEELNKLCEKIPMIKEIAEIKGIGIATAISFVAEVGDIRRFKSAKQVQKYAGLALKENSSGKHKGLTRISKRGRKKLRTILFRATIPLIGFNKEFSSIYNYYIERKDNPLKKKQALTAICCKMIRIFFTILSKGIKYDETKMLHDIKRPVAA

SEQ ID NO: 357420 - protein, 354 aa, unidentified
MGMLEGQVEFVIGVDTHRDTHTAAVCDPTGAVLAQATMATTTAGHRQLLGWAQRQASSPRVWAVEGTGSFGAGLTSLLVDHGELVVEVDRPKRPARRNGAKSDVLDAARAAREVLAREHLAQPRARGDREAMRVLLATRRCVVDSRTKAINQLKALIVSAPPGLRERLRHGCTAAQVRCCARLRVHASHSIEHRVTVQAMRATARRILFLEAEAAQHQAELDRLVANLAPCLLDELGIGALTAAQLLVSWSHPGRVRSEAAFAMLAGVAPLEASSGRVTRHRLNRAGDRQLNRALHVIALTRLRQDPATRLYVVRRRAQGRSDKEIRRCLKRILARKLFRLMQRELMPSLTRAA

SEQ ID NO: 357421 - protein, 387 aa, unidentified
MYFVGIDISKFKHDCAIVDELGDVITPSWSFQNDREGFSLLKELLDALDGEKKIGLEATGHYGQNLKLFLENNDFSFMEFNPLLINRFVRSKSLRKTKTDSIDALMIVQYLMTVEYKPYPPSFYTLEKLKSLTRFRDSLIRQRSKQLVELTNILDKVFPEFKPFFKGRFSATALYILSHYASPEKISNMNSKSYEPLRRLSRGRFSMVDFVELKTLARNTVGSTRDYLLQEMEITIDIYNQLQSKVEEIELQIHDCVLGLAPPMLTIPGIGVASAAVILSEFGDLSKFNSPSKLLSFAGMEPGYFQSGTSESTGKMVKHGSSHLRYAMMNCAQTVINNEPTFAAYYAKKRTEGKEHRVALTYVAKKLLRVIYTLQTKELSYNPDLVR

SEQ ID NO: 357422 - protein, 389 aa, unidentified
MQASTVSTPITDRISTIFGAIELSQKTWLVTIHSPDKDKISRHKVPGGDHVSLLALIDRVRDRAARTLGVAPAVVSCYEAGYDGFWLHRLLQAAGITNYVFDPSSIAVDQRARRVKTDRIDGEKMLRTLMAYLRGEPRVVRIVRVPAPEQEDARRDTRERDRLTKEQTAHTNRIKALLRLHGFAVGNPRRRDWLIWLAAQRDWQGQAVPPRILTEIEHEHARLMLVRKQLEALAPAPAAADLTPAAAEMARRSELLLRLKSLGPAFATTLTQEVFYKDFHNRREVASYFGLAPSPWQSGGTDRDQGISKAGNPRARCSAVELSWLWLRHQPDSELSQWFRQRTLNASKRTKRIAIVALARKLMVALWRYLTTGLVPAGAMLKVSGGAMI

SEQ ID NO: 357423 - protein, 346 aa, unidentified
MRQSNTIGVDLAKNVIQVAVVTPANKELSNKALTRSKFAEFLARQKPGLVAFEACASAHHWARVAAKCGHQVKIIPAIAVAPFRQGHKTDKNDALAVAEAANRPNIKVAPMKSIEQQAMQSIQRSREVIIQERTALSNHIRGLLLEFGIAIPKGLAHLRKHLPLLLEDAENGLPMSYRPTLHRMSMRFRALDEDLTFMDEQINQVVRANDSCRRLLALEGIGPIGAVLLVATLGSGEAFKNGREFSAYLGLTPKQFSSGGKTNVIGISRRVANRRLRSVLIQGARSYVHARKQAKSDKDEWMLALVARGGTGKAAVALANKNVRTAWAILTQGTEYNCKPRLANAA

SEQ ID NO: 357424 - protein, 430 aa, unidentified
MEQIPEQPIVKADLEPEFAAFVAIDWADQKHYWSLKVAGQQALQRGNLDSTPEAVEVWIMELHLRFAGRPLAVALEQRRGALAVILSKYAHVHLYPVHPTTLAKFREAWYPSRSKSDPVDADLLLEILTAHRSRLRRLDPDTVEMRLVQTLVENRRKLVDERTALSNRLTDLLKLYFPQILGWFDEVTSAVVGDLLEQWPSLQELQQAKPAKLEKFLRTHHCLEIPERLNQIRQAIPATFDRALMDSAPFLVAAWVRQIAVLRDSIRQLEKHIAELAAKQEDWHIFQSFPGAGAALAPRLMAALGTQRYRYASANELHCFSGIAPVKEASGNTEWVHFRRACPKFLRQTFHEWAGCSIAQCEWAKAYYQQQKARGKKHHAAVRSLAFKWMRILYRCWKDRQPYREEIYLTSLAKRRSALVAALAKAVQMA

SEQ ID NO: 357425 - protein, 391 aa, unidentified
MSQSFDASRSLTAFEQDSTLVAVIEMSQSKWLVAAVVPGIARQPLKKLDADAGALLKLLQRWREEARKAGREVKRIVCAYEAGRDGFWLARWLQAQAIETYVIHAASIAVSREHRRAKSDRIDTELLMRSFLGWLRGEKRHCCMVAIPTMAEEDARRPSRERESLMGEQTRIINRVKAILALFGIGGFNPRLRKAAQKLETLCTAEEGTPLLENAHAELRRDLERLRLVRDQIRAIEDERLRRLALAPAAASGPHAMVRLIARVFGVGIETADMLVNEALARNLRDRRAVARYAGLTGAPDESGQRRREKGLARAGNGRVRRGMIQLAWRFLIFQKDSRLVQWFRKRTADGRSTTRKTMIVALARKLLIALWRLVTTGEMTEGIKLRPAGT

SEQ ID NO: 357426 - protein, 379 aa, unidentified
MEISFVTRTSAAEDQTALIFVALELSKSRWLVAVHSPVADKISCHGVAGGDTSALLALIARYRRQAEEHLKRPVRVVSCYEAGYDGFWLHRLLRASGIENHVMDPASLLVDRRARRIKTDRLDLGTLLRALMAWRRGESQVCRMVRVPSAEEEDRRRQTRERERLIRERTQHVNRIKGLLMTQGIRDFKPARRNWHERLTVLRTGDGREIPRALKAEIERECERLQLVMDMIRKVEAERDAAHDNAGQVGMLTRLSGIAAISAHVLVNEVFHRAFANRREVAAYCGLSSSPYNSGTLVREQGISRAGNPRARYTAVELAWLWLRYQPESRLSRWFHERVGEARGRFRRIMIVALARKLMVVLWRYLSTGIVPEGAAVKV

SEQ ID NO: 357427 - protein, 415 aa, unidentified
MNKVQNTRGYERYMAMDIHREYILVGAWNEEKEWILTPRRVSIERFSEWVKKNIGEGDIVVLETTTNVWATYDIVAPLAGRVLVANAAEVEEIAKARVKTDKEDIKKLLKLLVGGIVPEVWVPPMHVRELRAFISYRGRLVKTGAMIRNRLQSLLHKHNLKMSETGLLDQAWWERQKDISPLEKMQIRQELALLQEVEKLKLAVDEELQRQSTGVLWGKPALQLMQLPGVGYIVAMTVLSAIGDISRFESAKKLVGYAGMGAGVHDSGKTHKDKKITKKGRRELRWGMVEAAWRAVGMSPFWKAEYEKYLSRLRKKNQAIVVIARKLLVAIWHVLSKEETDIHASEEDLAYKMLLLSWSLKEDTRQGLTYKQFAKYALMQLGVEKDITRFVRKNVPRRLAPRDEVLARMKELGLA

SEQ ID NO: 357428 - protein, 353 aa, unidentified
MKILAIDLGKFNSVACLFDTATNQSEFETATQRWAMEQLLSQRRPDQIVMETSSITGWVNDFCQSLGYKVLVANPSAEAWRWKNVKRKTDKDDALKLAKLTALEQVSPVHVPVAEHRQYRLLVKYRKTLVNRITRIQNTIRSLFDQQGISIPGGHRAWTVAGIETLSQYCKPLAECGLDQLWQGELDLELQSLDGLWQQLQKVDEQVEKMAGQDEQVQLLQTIPGVGRRTAEVIVAALDDPHRFQNARQVSAYAGLVPDQRQSGQTNRLGSITRRGSRILRSALVEIAWVMLRYNPWAESIYQRIYGGQKTRKKIAIVAVARKLLVRCWAMLRHKQPWQDGTSPLSASTSPSS

SEQ ID NO: 357429 - protein, 351 aa, unidentified
MMLIGVDYHPSFQTIAFFMEETGECGEQELNHSDGQAEKFYRDLKQRGICVRVGMEASGHSRWFERLLAELGFELWIGDPAEIKAKRVKKQKFDREDARLLLRLLRENNFPQIWVPDAENRDLRQLLWHRHRLVQMRTRIMNQLQALAMNEGYRWKKKLFSERGRAQLEKLALAPWASRRRQELLELLDRMNPTIEELTTAVEREARKRPEAKRLMTHPGVGSLTALAYVLIIGTPTRFQRGKQIGTYAGMIPCEESSARKQRLGHISKQGNSLLRFLLVEAAQAAARVHPDWRRRYMHLAMRRHKSIAKVAMGRRLAVRLYWMWRNGCEYSPSLEFGSYAGQLETGNGVK

SEQ ID NO: 357430 - protein, 349 aa, unidentified
MVIIGVDSHKRTHTVVAVDETGRKLGEKTAPATPDGHLELRAWAGRFPERTWALEDCRHLSRRLESDLLRAGERVLRVPPKLMAGARRSGREPGKSDPIDALAVARAALREPDLPVAVLDGPERDVRLLVDHRDDLVAERTRDMARLRWHLHELDPGSEPSPRSLDRAKVLAALETRLADLPGTVARLARALVARIRTLTAEIDALEREISGLVASLAPALLALRGCGPLSAAKLVGEAGGIARFRSRAAFARHNGSAPVPVWSGNDVRHRLSRGGNRQLNAALHRIAITQVRIGAEGRRYYDQRIAAGDTTTEAYRALRRRLSDEVYRRMRDDGGLQAVGRAPLDLAA

SEQ ID NO: 357431 - protein, 354 aa, unidentified
MMIIGCDYHPGFQQIAFVDTDTGELQERRLQHREEAEKFYRDLAVQGVKGRVGMEASGHARWFERLLAELNFELWIGDAAEIGTKRVRKQKTDRQDAQLILRLMVEDRFPRIWVPSWENRDLRQLLWHRHRMVQARTRIMNQLQAVALNEGLRSKKKLWREAGREQLEAFPLAPWASRRRRDLLELLDRLSPTIAELSQVIEQEAEKCPAAQRLRTHPGVGSLTALAFVLIIGSAERFQCGKQIASYLGLVPLEESSVNRRRLGHITKQGNALLRFLLVEAAQVTVRSIPEWRNKYFHLAMRRGRKIAKVAMARRLAVQMFWMLRKGWDYEQAKKFGSHAGQPGNRDGVQQNTE

SEQ ID NO: 357432 - protein, 371 aa, unidentified
MKEFSKFVGLDVHKETIAVSVAEANGGEVRYLGEIANTPEAIDKLVKQLRKGGADLSFCYEAGPCGYGIHRQLTDLGWDCQVVAPSLIPKKAGDRVKTDRRDSLMLARLHRAGELTAVWVPDGAQEALRDLTRAREDMKHLQRQAKQRLLAFLLRHGKRYDGKSNWTQAHYRWLEAVKFDHPVQQIVFQEYVDTVKAMTKRVEALDKQIVSAVTESVFWPVIEGLMALRGVNLLTAATIVAEIGDLKRFASAPQLMAYLGVVPSEHSSGGTKSRGGITKTGNGHVRRVLVEAAWTYRHPARKTTVLQKRAERTSEAVQEIAWKAQTRLCGRYRLFEAKGKLKVQACTAIARELAGFIWAIGQALPQPAAKA

SEQ ID NO: 357433 - protein, 355 aa, unidentified
MTTTTCEVYGGVDTHGKTHHAAALDAVGQLLGDREFPATKAGYQQLIVWLASFGTIVKVGIEGTGSYGAGLAAALLKQQVPVVEVDRPDRRARRRQGKSDPLDALAAARATLSGEATGVPKARSGPVEAIRVLRVARRGAVKARTAAFNQLHGLLVAAPENLREELSKLTSTELVERCAGFRVDQARLEDPTMATKAALRVLARRIGTLSEEVAVADRQLRPLTERTAPRTIQLLGIGTEIAGQLLVTAGDNPERLRSEAAFAHLCAAAPIPASSGRRDRHRLNRGGDRAANCALHMALVTRLRCHEPTRAYLARRTAEGLSKKDIMRCLKRFLAREVHAAVLADFAAAHALDGT

SEQ ID NO: 357434 - protein, 403 aa, unidentified
MNAVGIDVSKGKSMIAVMRPFGEVVASPYEISHTERELKELTRFLKSLSGETKVIMEYTGKYYQPVARYLREAGIFVSVVNAILVHDYGGNSLRRVKTDRKDAIKIANYGIDRWVDLTEYTPEEDIRQMLKTLNRQYNQYVKVKVMFKNNLIALLDQTFPDVNRFFNSPARKDGHEKWVDFAATFWHCKCVSDASENAFKERYAKWCKKHRYICSPEKAEAIYEKSCNQVSTLPKNDTAKLLVTQAIAQLNTIAETLAAVMTEMRRLTTLLPECNVVMGMYGVGPTLGPQLMAEIGDVRRFYAKKALIAFAGLDSPPNQSGAFESKSRSISKRGSASLRKTLFQVMSVILQNSPSDEPVFQFLDKKRAEGKHYGVYMMAAANKFLRIYYARTKEYLTNLDEVV

SEQ ID NO: 357435 - protein, 422 aa, unidentified
MHSENIAAYVGLDVHKETLAVAIAAPERLGEVRYYGTINNEAQAVRRLFQKLQGLYGNILSCYEAGPCGFGLYHQLTAMNIKCQVIAPSRIPKSPTDRIKNDHRDAISLARLLRAGELTPVWIPDLTHEAMRDLIRARAAAKRDSRVARQRILSMLLRTDKHYAGKHWTGKHRTWLANQSFSQPSQQIAFQHYCQSLEQIEDRILQLDQEISRLLPEWSLCNLVCQLQALKGVGQLIAITLVAELGDFSRFSNPKQLMAFLGLVPGEYSSGNSIRPRGITKVGNSELRRLLYEAAWSYRTPAKVGAWLIYYRPDSVTQYSKDIAWKAQQRLCSRYRSLTAKGKKSQVAITAGARGLAGFLWVRYICCPIIIQSAEAKLNPEAVRHGMSDPRKRIQGSQNALIPARRKRPAHCVNRHGAKIPE

SEQ ID NO: 357436 - protein, 347 aa, unidentified
MLVVGVDAHKRTHTAVVVDGLGRQVGQRTVKALTADHLELLRWAERLGAERLWAVEDCRHVSRRLERDLLVAGERIVRVPPQLMAGARRQVRAAGKSDPIDALAVARAALREPDLPVAGLDGAAREVRLLVDHRDDLVGERTRIINRLRWHLHELDPSWDPPAGSLDRYCTLDRIAVRLNQHDGTVARIAGDLTVRARALTVDINRLEREITALITPLAPTLLAVCGVGALTAAKIVGEVADVHRFRSKDAFARHTGTAPQPAWSGQSDRHRLSRGGNRQLNAALHRVTITQGRYHPDAVAYLARRRTGGNTKAEARRALKRRLCDVIYRCLVADTALVDQTLATAA

SEQ ID NO: 357437 - protein, 479 aa, unidentified
MRDGALEVETSLELFEADKLFDLERQGAEVSVRQSLRLVAPARESAFQKSEAFCAQPLNKESRMEPKLIVAGIDVHKKMLAVVVIDDDQPQQAREQRRFGTSRNELRNLETWLDSHGVSQVVMESTALYWRPVWLALEGKYVLHLAQAQSNAAPRGRKSDYADALRLARRFLAAELRLSFVPDAEQRTWRCLSRNKHQKRQRRIKIQNQIEALLEECQIKLSSVITDLLGATGYRILKALAKGETDPKKLVELAASNLKASKEQLAEAVGTPMGPRYRSILSLQLDELELLDKHIAELSRQLGEALQSQQAAVLRLCEIPGVREDAAWQMIAELGSAAAAFETAGQMASWIGVCPGREESAGKSTSNRSPKGNRSMRRVLNQIAWSAVRTKDSFFRELYHRLIPRLGIHKAIWAIAHRIAKVVWKVLHEQVRYIERGALALDPAAMKRRVNKLARQMRKLGYIVEVKPIAATTVEAQLS

SEQ ID NO: 357438 - protein, 413 aa, unidentified
MQVYIGIDWSEQKHDVIMMNAAGAALAQFEIPHSPEGFLRLDETRWRMKLATEDCVVGLETAHNLLIDFLWSRGYSKVYVVPPTTVKSNRKRFSSSGARSDPSDALVIADSLRTDHGRLQSWSPDSLLTRQIRAKVSLINHLTSSTVRLSNRLRAVLLRYYPAVLNMFSSWPTKVAIEFIRAFPTPKHAENLTFDQFQRFARQHRYPNPKRLPTCFARLQAPQPEAAQETVEVYQDEAVLLATMLLTAMRAKKGALLELKTLFREHPDHAIFDSLPGAGDFLAPALLAKFGDDRKRFPTPASVQALAGTCPVTDQSGKRRIIKFRRACDREFRAIAQQWAMASLQQSAWANAYWQRARSRSRYSSLAYRRLANRWLAILWKLWQTGQVYDEAYHLQRCALRSKRHRWSLNFFV

SEQ ID NO: 357439 - protein, 354 aa, unidentified
MNKDNMKYAGIDIGDKTSLVQIIDSEGEFLKEVRIPTTRKALAREFDEISPMHIALEVGGHSRWMSQALKRYGHSVTVANPSKVRLVYKNPRKSDRIDAQYLVKLLRFEPTLLEPIEHRSNASQKDLALLRSRDSLVRARTSLINQTRGIVKSFGERLPSSKTDAFAQKVREYIPFDLKPALDPILDTIQTLSEQIKAFDKEIERLCQEAYPETEKMRQIKGVGPITALAYVLTIEDPHRFHKSREVGAYLGMVPKRSQSGDVDPEKRITKTGDKYLRRLLIGSAQYILGPFGPETKLRNWGLRLAERGGKRAKHKATVAVARKLAVLLHKLWVSGEDYHPFYPERKGSEANTD

SEQ ID NO: 357440 - protein, 343 aa, unidentified
MQAVTTIGFDIAKSVFQVHGVDAAGRVIVRRQLKRRHVLAFFQKLPPCLVGIEACASSHHWSRELQAIGHTVRLMPPAYVKPYVKRQKNDMADAEAICEAVTRANMRFVPTKTPEQQSCLMLHRTRHLFIRQQIAVINSIRAHLAEFGIVAPVGRKGVTELLHIVADTSDKRVSEVARACLAALGNQLLSLKQQILEFDRMIMAWHRSNQTSKRLHYIPGVGPMLATALVASVADPRTFRSGRNFSAWVGLVPKQHSSGGKDRLGSISKQGDRYLRSLFVAGALAVIRYAKIHGTKHRPWLTALLGRRPTKVAAIALANKIARMAWAMMAKGERYKQPVALAA

SEQ ID NO: 357441 - protein, 430 aa, unidentified
MVVAPALQFYSRYRSNFKKGVGSFMDLVYSHVCGLDVHKKNVVACIITPEGKEIRTFSTMTDDLIALKEFIKAKGCSVVAMESTGSYWKPIYNLLELESIKILLVNAKHIKNVPGRKTDVKDAEWIASLLQHGLLQGSFVPDREQRELRELVRYRKSLIEEKSRELNRIQKVLEGANIKLSSVVSDINGASSRSILEAIINGEENPETLAELSQGKLKNKMDELKRALKGLINHHQRMLLEIQLRHIDYLDEEIAKLDEEIKNRMLPFEKDLALLDTIPGVGRRTAEQIIAEIGTNMEQFPSAAHLCSWAGLCPGHNESAGKQKSARTRKGNQKLRSSLIEAARAASRAKDTYLSSQYHRIAARRGANRAAVAVAHSILIIVYHILKQKQPYIELGPTYYEEKKRNMIIRQSLKKLESLGLKVTVESVAS

SEQ ID NO: 357442 - protein, 409 aa, unidentified
MRIIGLDIHRAFAEAVAWDDGKLKRLGRVDMRRPLLEAFAKKLSKDDIVVVEATGNASSVAVVIAAHVKKVVIANPKQVRIIAHAKIKTDTIDASVLAQLYASGFLPEVWIPDEPTQALRRQVTRRNQIVRQRSRLKNIIQSILHSHLIPSCPHADLCGASGRAWLFHQVLPEDERLAVERHLREFDRLGEDLKVIERDLARSALGNEGVKRLMTIPGVDMVVALAIVAAIGDVGRFEQPQKLVSYLGLNPSVRQSGPGPAYHGRITKQGRGHARGMLVEAAWAAARAPGPLRAFFLRVRARRGQHVAAVATARKLAVIIWHLLRKGESYAWARPALHAKKLRDLELKAGYKAERGQRGAAHTYNVKSHRDQERRWVEQAETAYARFVAGWNPRGPKRARTGAANEGRQ

SEQ ID NO: 357443 - protein, 353 aa, unidentified
MITIGVDAHKRMHVALALDDAGQELGHWRGLNSAAGWRSLAQWAGELGCQRRWAIEGAWNYGRGLAQQLVAAGETVYEVNARWTALGRRSARKPGKTDRLDARAVALLARQEAPTLPQVLPEDDSAILALLTTEREAALGEATRLGNQIHALLMQLDPEYHRHLPTLRSRAGLNALESYQSPRGCLLQEQRAAAVRRLAERLRLTLSQSEELARQIATYAEAGFSPLTRLCGVNLLTAGMLAGILGPGRRFSTDAELAAYAGAAPLEASSAGLTRHRLNRGGNRRLNAILYRIALTQAHYSPEARAYLDRRASEGKSRREAIRALKRFIVRAIWRLWQDCEASSIESPVESVA

SEQ ID NO: 357444 - protein, 358 aa, unidentified
MYKFMKKFFIGVDVSKDTVDVSFFDDDRMKSPEYLAQYSNSPKGFREMVKDLRMCCHGVSSGQWLFCCETTGRYDHPLCHWLVDHGMVVWRESALQIKWSSGIQRGKNDRVDSLRIAEYAWRHQDKMQKFVKPSESLSNLKAAFTHRRRLVEKRTATRCQLKSMSSEKGLSASVARMIVRDLSREIERLSASIATMDESIQKIIRSDSELDRNYRHIISVKGVGPITAVALIVCSGNFKAITSAKKMACYCGVASFRSQSGTSINRKASVSNLSNRQIKSLLSMAARSASRSNPVFAEYFNRTLSRGKPVALVYNNLRNKIITVIYKLIERDCDFDVDYMRMHSTGQRANEPAIREAV

SEQ ID NO: 357445 - protein, 428 aa, unidentified
MSNQEIIRREKFCQIVKEIRGSNEYLIVGIDVAKDKHHAFMGTAAGKSLLRRLVFENNIEGFTRLLTTADEIKSQNGLSKIVYGIEPTGNYHKPLAMHLIRCDSNVVLVTGQAVKNNRGLLDGRWDKNDIKDATNIADLVSRGRCVYYDCPSPSIIEIRSLLSLRRRLKREEHGLRMRIRNNLLAQYFPELDQFYSACESESLSIIRYFPDPDTISAMEFGEFFHLVTRTRRGTAQTLRLRKIHGLAIESVGCPMGPAGEYEADLLVEKLNQVREQIKKTADLIKDFCLEFDEYSYLLTIPGFGPYISARVLASIGDPFRFENRKQLIKMAGYDLCANRSGKTSDKAIPIISKKGNGELRYALYQAAKVASSRVDLFRTYFTRLLRGRERERGIKTKMCVKLAAKMLVIAWTLMKKREPFDPAYLNIE

SEQ ID NO: 357446 - protein, 379 aa, unidentified
MTSTDAAAEAQETVYAAIELSKKTWVLGIAPPDRDRPSIYRVSGGNIAELVSRLRVASRNNRRIVVCYEAGYDGFWLARALAKIDIECRVLDPASIQVNRRARRVKTDRIDVLALLRALIATDRGERHVCAIVRVPSVEEEDARRSHRERQRLVRERTGHINRIKGLLFAQGIRGIKPKLRRTRIDFAALETPEGHPLPDRLRRELEREYARLAMIETQLREVEKERDMADAQDPVVERKRQMLVALQGVGGTSAAILAREVFARPFASRRQLGSYLGLTPSAYDSGSMTRCQGISKAGNSWARRILIEVAWLWQKHQPASPLSHWYFQKTTGQSSRIRRIMLIALARKLAISLWRYVETGIVPEGVVIARAESRCALA

SEQ ID NO: 357447 - protein, 348 aa, unidentified
MNRTAKIVGLDIAKNVFAAAGIDDHGKSVFKRMLSRDQVRDAFANMPPTSVAIEACAGSHYWARELTKLGHNVKLIAAQHTRAYVSGNKNDMNDALAIAEARSRAKTKYVPINTEAQQDLQMLHRAREALMRERTAMINRMRAFAGEYGQVFPVGVTKFRAQFDEWLKEENNPLSGSALETFRELRDQLLDKEGRIERYEQRLTQAAKDDPRAVRLMEVPGVGKLTATAVLAAVSDPRHYADARDFATNLGLAPLEHSSGGTQRLFSITKRGDTYLRTLLIHGARSALRCAGDKPDKILRWASKLAERRGYNLAAVALAHKMARTIWALLAHERGYVPMWSKNSTTPA

SEQ ID NO: 357448 - protein, 341 aa, unidentified
MSKFTNKKWFCGIDISKDTIDVNVIEKDNPEIKREIRFANDFKGFDKMQFWFSKNKIELKNCLFCMEHTGTYGLLLFSWLTQKEIDYCVEPALQIKRSIGMTRGKNDKIDAHRIATYAMTHCHNLKPFELPAKNILQIKQLLTYRDQLVRIRTSFKNSIKSHQQYQKLSELISIARDIKKQIDQYTKKIAEIEKQIKEIIAEDEKLKKNFTYATSVKGVGLIISAFMLVTTSNFTSFENGRKYACYTGIAPFENSSGTSIKGKTKTSHLANKKMRSLLSNGANSAYKWDPEIRAYYKRKIKEGKDHKVVINAICCKLVNRVFAVVKRQSNYVSIYQQNFLQ

SEQ ID NO: 357449 - protein, 339 aa, unidentified
MPLYAGFDLHAKSNHLAILDQKGKRVFSKKLPNETKTIFEALKPFKRRIEGLVVESTYNWYWLVDFLMEKGYRVHLANPSAIQQYRGLKHSDDVHDAFWLADQLRLGILPEGYIYPKEERPSRDLLRKRGHLVRLRTSLIISLQNIIDRNLGFKVDVKDIKRLKENRISPLLAHNEDLALVGQTSKKTIDFLTRQILDIEKVVESKIQIKPPYEFLLTLPGVGKILGLTIMLETGPINRFYKVGNYVSYCRKVTTKWTSNGKSKGKGNKKNGNKYLAWAFSEAAELSKRYDPYAKRYYTKKVLKTNRMVAHNALAHKLARAAYWVMKAQVPFSHEKLFA

SEQ ID NO: 357450 - protein, 330 aa, unidentified
MVIGIDISKKKTLDVVIYVPTKKHADETNYERFLNKEEGYKSLLCWLKKKNMAKKRLVISMENTGIYSFDLCLFLEAASIDYCSFNPLHLKRSLGLVRGKNDRVDAERIAYFAYLHRDELSYSKLSGSSIIRLRDFAAERKRFVKQQAEYKGFLTDRKDCEMTSTIERAAHMVKILDEEIASVEEEMLQIINSDPSILRNYELLNSIKGIGTINAMNTIIHTNNFQAFETARQYACYLGIAPFEHSSGTSIKGKTRVYPTGAKLLKADLSQAANSAIVWDKEMKEYYERKRKEGKAYGVVLNAVKFKLVGRMFAVVKRGTPFVELMTYKK

SEQ ID NO: 357451 - protein, 428 aa, unidentified
MKNELPQADRPRPALFIGIDWADREHEAYVIDGQGTGTRETIEQTPEAIDVWVAEKLQQAGGEPIAILLEQKRGALIHALMFREKVILYPINPKQLAHYRQSYSNAACKADVTDARLLARLLSERHTFLKPWQPDDESTRSLARLCETRRRLVNELRRLTQQLTDQLKAYFPLVLQLRTGRSLDPLMLEVLRRWPDPRQLRRADRRILHKVLHSHGCRNEEKRKAIIERIRSAKLLSQDRAVIEPAAVLVQLLVKQIPLLQEAIGELEAKINAEMKTHPDASLFTVLPGAGQVLAPRLLAAFGSQRNRYASSDEIAVLSGIAPVTKQSGKKRLVHRRYACCKFMRQTFHEFADQARRWCPWSKAYYRLQRSTGMKHHAAVRKLASRWIRILFRVWKDRTAYDPDAYLATIKRKNPAIIPFLTNDKKAA

SEQ ID NO: 357452 - protein, 331 aa, unidentified
MHNAGIDLHRMNLVVAVENEHGSIAKPRTFSCAQAAEVRQYFETLVPFRAVIEASTSYRWLYDLLSPLGEVILAHPKRLRAIVEGRAKTDKLDAALLAKLLRADLIPRAYVPPRNYAELREITRARARLVRCRTEAQNELHAMLARLNYHVPFKTPFCKRWKQHVSGIELTVVDSLVRDELFRRIAHYDAELELIDTALIDIAESFPQVSALIDIHGIGLYTALLIVAEIGEPWRFREGRQVGCYAGLTSRVNQSGQHCYYGSITRQGSPWLRGALVQVAMKVIKQDRALGNLHERIRKRSSAKIARVAVARKLAGICWLRLMRYHAAQAA

SEQ ID NO: 357453 - protein, 410 aa, unidentified
MVHVGIDWSDESHSFCILDDAGAKLDAFEISHGLDGFETAHKRISKRASSPEDVRVAIETKDSLIVDFFLEMGYSLHFLNPKQTDRFRDRHRMSSSRSDGFDAYVLADAVRTDPHLFNALSPLDEKSLALRVLTRTREGLVQRKVAISNELSSALKRYFPLALELFSGLDSPEAVSFLSQYPTYHEARTVSESRIQSILRKQGFSDKTAARRASIIRAKLNSPQPTPAASVACAYPIAVKSLLRQMHSILGELDAIEGEIRDNYKDHPNKQLLESLPGIASTLGPVLAAELGSDITRFSDVKTLKAFAGSSPVTERSGKYCEIRYRRACNWRVRQALHLASRTAIVCCPWARELYDRLRSEGKSYGRALRAVANQLVEMLYVILLSRTPYCEAYHLQMKSIHSRKTPVLT

SEQ ID NO: 357454 - protein, 387 aa, unidentified
MSCNIDHLDRNETAAQDHRATILVSLELSRRSWLVTALVPGSEKLSQHGLAGGDGGALLELLARLKGKAEQRLGGPVGVMVIQEAGLDGFWIHRLLEKHGLASHVVEPASIAVPRRPRRAKTDRIDGEALIRALAAWRRGEPRVCSMVRPPSPEEEDRRRLTRERSALVKERVQHANRIKGLLFGQGITGYEPLHRDPRPRLEALTTGDGRPLPARLKAEIRRELDRLELVNAQIKAVEQERDALLGAASADPAQPVGVLLGLNGIGPEIGARIWLEALFRRFANRRQVAAYAGLAPSPWQSGGTEREQGIAKSGNPRLRTTMVELAWLWLRHQPDSALSAWFRRRVGQGRGRGRRIAIVAMARKLLVALWRYTNHGIVPEGAVLKA

SEQ ID NO: 357455 - protein, 407 aa, unidentified
MRVIGLDVSRTFGEIAYLEEGQVRSGGRVMLQHEPLQRFAQGLQPSDAVVLEATGNTAAIVTALKPHVAKVVIANPVQVRLIAEARVKTDKIDAAILAQLYASGFLPQVWMPDDRTQALRRQVARRSQIVRHRTRLKNEIHSVLAAHLIPQCPAADLFGRKGRVWLSEQPLPMDERLAVEQRLRELDRLEEDLEAIDRLLCEAVLLDDQLKRLLTITGVNCIVAIGLLAAIGDISRFAAPEKLVSYFGLNPRVRQSGLQPAQHGHISKVGRAHARAMLVEAAWSAANAPGPLRAFFLRIRGRRGQQIAAVATARKLAVIAWHVLAGQEDFAWSRPALTAKKRRELELRAGMPAKKGHRGPAAEYSLKEVRATEHAAAQVAEQAYVRFVANWRPKKPSPSRSEEASRK

SEQ ID NO: 357456 - protein, 385 aa, unidentified
MAPPARPRVVIGLDVGKSAHWACVVTREGELLASRPIPNRENAIDGLYAQYPGALVVVDQVRNIGSLALSRAKLAGMPRAYLPGLAAHGASRLFAGDAKTDERDAMVIAKTALGIPDALLAVADRPPEVEAARSLAAQRDFLTCENTRSKNRLRSILLESCPEFEAQADLSDPATLKLMAAVGGPWSISEASPQSVGALTRGCRRAKVAALAGSVESSSRPHPAAVACEDRAVRLLARRISENDAEIGSLTSEISALLSADETYRCLLTVPGIGPRTASELVISIDIADFPSHDRLASYCGLAPRNRRSGTSISSVSASRQGNKRLKNLLIFSCNCLARSRNRWGDYYARCRDRGMPHGKALKAVARKRLKVIYAVMRDKVPYAA

SEQ ID NO: 357457 - protein, 445 aa, unidentified
MKTNIHQLDTILPGFAALDLGATSIHAATAGTPVAVFGTTTAELRRLCAWLSTHGARRVAFEATGVYWIPVHDQLQAAGFAVMLFHGAHARNLPGKKSDFSDCQWHAVLLSHGLLRACFVPTEQVRALRAYARLREDHLEQAAMGVAHMQRALDCMNVRLHTVISQLHGVSGLRVIEAILAGERDPRALAAHCDAQILKAKRAQVEASLEGHWQEHHLFALGQALEAWRFHHGQIAACDVRIEEQLRVLGAPLPEVAPVEAKKIKKVRHNAPAIEGLHGHLHRLCGGRDASVLPGITPLGWMKLAAELGPDLSAWKTPKAFTSWLGLSPGRHQSGRRRRRVPRRHTRAGQIFREGALSIARSKHLALGGCYRRIRGRRGEAVAMVAIARKLAELYYLAMTRGLDYVEKGLQAYEAHCRAQEQHRLRRFAARLGFELIKKQEENHG

SEQ ID NO: 357458 - protein, 426 aa, unidentified
MPYRIAGIDVHKRMLAVVVADVSVETEYVFERRLVGTTPDQLRTLAAWLSERDVEEVVMESTAQYWRPVWEVLERQWRPSRRARAEAGPMSGALHLAQAQSNQGPRGRKKDFPDAERLVKRVVAHELILSFVPEVTQRLWRTVTRRKYQLTGNRVQLQNRLESLLEEAHIKVSSLVSDLLGASARRMLRAVASGAIDPATVAALGSPRLHATAAQLGDALGACTDLDAVYRRLLRMMLDDLDVIEAHIRELDEELARLLRPHQEAVQRLAAVPGLGVDSAQQMIAEVGPTAATFATAKRLASWVGSCPGDEESAGVNHSHRSPKGNRQMRRLLNQAANAAVKTKGSIFELVYRRLVVRLGHAQAIGAIAHRLCRLVWKILHDGVTYEERGPAVTKARAHRRAAKMIRELRSLGYHVELPSPAKSPA

SEQ ID NO: 357459 - protein, 357 aa, unidentified
MRCIPTDAAGITLGVDTHKDFHVAVALDGLGRRLGTLSIPTTRSGYEKLAEWANGFGPLESVGIEGTGSFGAGLTRFLRAEGTRVFEVDRPRRRDQYRSGKSDPMDAELAARAVLAGTATAQPKDTDGEVEMIRTLRVTRRCAVKARAQAVNQLKNLLITAPEGLRSELRGLSTAKLVAKVSGFRPGANPSDVQAATKFALRSVARRHQRLSEEISELDEQLDRLVAEAAPELVAMEGVGTDTAASLLIAAGDNPERLKSEAAFAHLCGVAPIPASSGKSVRHRLNRHGNRDANRALYVIALCRMSREERTRAYVAKRTTEGKTKKEIIRCLKRYIAREVYRILASLSLNKPPILAP

SEQ ID NO: 357460 - protein, 370 aa, unidentified
MTTSKILFIGMDVHKDSIEIAIAEGNSQEVRRYGRIGGTHDAMRKTLRKLVSQGQSLHFCYEAGPCGYELYRYLVSEDHDCWVVAPSLIPKRPGDKVKTDKRDAVQLARLLRAGELTPVYVPNREDEAIRDLSRAREDTMLVQKSARQRLKSFLLRHDIRYQGKTSWTEAHLRWLADEVRCPSPAQQIVFQEYVNAVTESQQRLQRLDEQIKHFAQAWRLYPAVEALMSMRGVKMIVAITVVSELGDLSRFDNPKQLMSFLGLIPSEHSSGPRQKRGGITKTGNGHVRRILIEAAWCYRYPAKVSREMQLRQEKLPSVIRDIAWRAQLRLTQRYKHMQSKGKPHNVTVVALARELAGFMWAIVNEVKYPQ

SEQ ID NO: 357461 - protein, 498 aa, unidentified
MGTKSRKQVKRLMSGSSYSSEELSSLTMDDGTTVVYSVNGDIKRSICGSVDVHKKILMAAICITDPDSLKSTFFVRKFTTMNADIRTMAGWFKEHDVRDVCMESTGKYWIPVFNILEQNDIKPILTHPKYVKQAKGHKTDFRDAIHMASLFRMDLVVASFIPPAEIRDLRELCRYRLKLTYIRTSEKNRFQNSMTISKVRLDSVFTDPFGKSASAIMEYLISTDPEQVNDDDILALISRRGNVKASNEEILDSIHGYEFIGVQRDKLQIIRMHITQIDECIDMIDSKLEYYRQKYANIINHLTTMVGITSMSALYILGEIGTDMSVWRDDHSLACWAGLSPANNASAGKKKSTKVGNGGHYLKPLLVQCALAAVKSTKKDPYFHHKYETLKKRRGHKKAIIAIARKMLVAIYHMIRDDTNFHPIDQEEVTQKTKKTQGLNLKNVLIFLKEHGADRNMIRMVEEQCSENTEIKDAKEKQSNLAITDASQPIQESVNGMS

SEQ ID NO: 357462 - protein, 352 aa, unidentified
MKTKNKKETTIGIDLGDKKHDAYALSNEGELISRHEVTNTKLGLKELSDRYPGAVMVMEAGTHSPWVSRYLSELGHEVIVANPRKLRAIYESDNKTDERDAEMLARLGRFDRKLLYSVSHVSERHQRGLSLLRSRDVLVESRTKLINHARGTLKSLGVRLPKTIRAEAFATKVSAFLEATDRTLMEPILKGIQSMTDQIKALEKRLGELAESEFPVAKRLEQELPGVGPLTSLAFVLIIERPERFKKVRDIGPFLGLVPKRDKSGSIDKPMRISKAGNQLMRRLLVNCAQYNLGPFGPDTALRRAGERICKDRGKVAKRKAVIAVARKLSVVMLKLWQNPEAHFEAFPEKVA

SEQ ID NO: 357463 - protein, 355 aa, unidentified
MTITKYIGMDVHKESISIAVMNATGKFVMECVIKTKASMLLQFIDGLRGDVRVTFEEGTWAAWLYDLLKPHVSEVVVCNPRKNALLKDGSKSDRIDARKLAELLRGNHLKPVYHGEQGLRTLKELARSYLIISKDVTRVMNRLKALYRSWGIACAGTQVYAPRHRSEWLGRISEAGVRRRAEHCYQQLDALRLLRQQVRRDLLLESKKHQAWRLLGLIPGIGPIRAALLIALIQTPHRFRTKRQLWTYCGLGLETHDSAQYRVVEGQLQRSKKPVTLRGLNQDHNHDLKDIFKGAATRVSSSSGPLYDFYEHLLAQGRKPTMAHLTLARKIAAITLIVWKKEVHFDASYLKSQAA

SEQ ID NO: 357464 - protein, 444 aa, unidentified
MVRKSKKQRLKIIHSNCAGIDIGSREHWVAVDPDKTEEPVRCFSSFTDSLNEMAGWLESLNVKIIAMEATGVYWIPLFEVLDKRGFEVQLVNSRSTRQVTGRKSDVLDCQWIWQLMSYGLLKGAFRPADEVCSLRSVVRQRATKVQEHSRCIEHMQKALTQMNIQLDNVVSNLMGKTGTAILRAIVDGERNPDQLATLRDCRLRADEKTVARSLHGNWREEHLFALTQALEHYDFIGQQIHRCDQLIAQQLTALPCLADNPPKPIKALRNPQRTVAQQAALHQALFGVMGVDLTAIPTIGIETVLVLSCEVGADLSRFPNEANFCSWLNLAPPTRISGGRQLPGRTPRIFNRAGQALRQAAVNARHSNSFIGASHRARLSRMDGASAVKATAHQLARLIYSMLTKGQPYVEKGIEAFEARTQDRQLRALQRKAHRFGLELVEAA

SEQ ID NO: 357465 - protein, 355 aa, unidentified
MNQEKYIGMDVHAATISAAVINAQGKVLTQCVMETKASTILEFIQAQRGTLAVTFEEGTMAAWLHDLLKPHVSRLVVCDPRKNALMRDGNQNDRADARNLAELLRTNQVHAVYHGKHGIRALRELGRSYSTLTQDSTRVMNRIKSVYRSWAIPCAGTSVYSRRHRAEWLAKLVEPGVRIRAEHLYQQLDSLEPVRQAARRELLRESRKHAAVKLLRQIPTIGPIRSALLVAILQTPHRFRTKRQLWAYSGFAVQTYDSGEFRFERGKLKRNRERITVRGLNRNHNHDLKNLLKGAAISAIERPGPLQDFYAALVGKGMRPSMARLTLARKIAAITLIIWKKGVSFDPKQLQRQAA

SEQ ID NO: 357466 - protein, 343 aa, unidentified
MDHFAGLDVSVKETSLCIVDDAGRIVREVKVASEPEALLQALQKPYYHLKRIGLEAGPLSQWLFNALADAGLPVICVETRHMRAALKAQINKTDRNDARGIAQMMRAGLYRPVHVKTLRSQKLRMLLTHRKLLQSKAIAIENDLRATLRNFGLKVGVVGTVKFEERVKELVDNTPDLVVLVEPLLIVRRVLREQIGILHRRLLAIVRNDAVCRRLMTVPGVGPVVALTYRATVDVPSRFRNSKAVGAVFGLTPSKHQSGESNRTGGISRCGDEMMRMMLYEAAHIMLVRSAKWSWLKAWAMKIARHRGLKKAIVALARRLAVIMHRIWVDGTEFRWTREVTAA

SEQ ID NO: 357467 - protein, 374 aa, unidentified
MSSTDAAAEARETVFAAIELSKKTWVLGIAFPDRDRPSIHRIPGGNVAELVSRLRVAARNNRRILVCYEAGYDGFWLARALAKMGIECRVLDPASIQVNRRARRVKTDRIDVLALLRALIATDRGERHVCAIVRVPSVEEEDARRSHRERQRLIRERTGHINRIKGLLFAQGIRDIKPKLRRTRIDFAALETGEGHPLPDRLRRELEREYARLALIETQLREVEKERDLADAQDPVVERKRQMLVALQGVGGTSAAILAREVFARPFANRRQLGSYLGLTPSAYDSGSVTRCQGISKAGNSWARRILIEVAWLWQKHQPASPLSHWYIQKTSGQSSRIRRIMLIALARKLALSLWRYVETGLVPEGVVIAGAEA

SEQ ID NO: 357468 - protein, 466 aa, unidentified
MENNYILYVGMDSSKGKADAAILKVSDRRSVKPKFLRKKLSFKFVKSEVTSFLETVRSYSDDNCTSICFALEVTGIYSTNVYNFIKDSLNDNESIRFLNTDFVNQWRNAHNIAKSDPLDAQTISTIIGTDSDVQYVNDNVFENKNGYQDLKALVHRHYQIKKIYSQEINRLIAQCDCLFPELQYVFEPKSAAFIAVLSSYPTTHDIINASRLEVFNIVYKATKHLCSMDKIDKLFELCHDTLVPDNISSYGRSIILDLVENIKTIKGQLKMIERYIRDVASLNPAYKLLLSITGCGPLTAATVIAETGDIKRFKNADCFVSYSGTSPRNKRSGTSVETLGKISKKGSRYLRHAIYMIAEFARRHNPVLKHQFERIKNGNKKRHKLANIAIANKIARYIYSIMKNKSSFVILHEHIMRLPEETRYAFFNSISLDFPKNTRKQIYQYSDINGEVHKFVYTKLEETMII

SEQ ID NO: 357469 - protein, 450 aa, unidentified
MPQLFVGLDISQKSVAACFLLEDGTEPSKRFSFAHTPTGVETLVSAIEATAARLDLTQLLIGMETTGLLWWHLAEALRGCESLQRLQPAICAINAKLVANFKKAYVEADKTDPGDAFVIADRLRFGRLPRLADPDERYLALQKLTRHRFHLVHSLSREKNRFLSHLFLKFSGFCQTEPLSDPFGAAAGALLTEFLSVDEIAQTSLEQLAQFLAEKGRNRFPDPAAVAQAVKQAARNSYRLNKALADPVNVVLAMTLENIRFFERQIGQIDKAIARELAAFPGAQVLLSVPGLGPVFVAGIIAEVQDVHRFDTDAQLARFAAIVWKHARSGAFSADDTPMMHSGNQYLRYYLIEAANSLRMHNEEYAAYYQTKYREATTHHHKRAGGLTARKLVRLIHILLRTGQLYQSPNQRKEARAAHPLPAGITPGELARHIVRRRQAKGRGQVYRTQ

SEQ ID NO: 357470 - protein, 386 aa, unidentified
MGKSSTSSVYVGLDVHKDSIDIALAEAGRDGEVRHIGSIGGDLAALDKALRKLISRGHRLHIVYEAGPCGFVIWRHLSVQGLACEVVAPSSIPRRSGDRVKTDRRDAILLARLARAGELTAVRVPDAADEAVRDLVRAREDAVRECRNARHRLKALLLRNGITYAGKSAWTAAHLRWLARLKMAHATQQIGFQEYLHAITEATARIGRLEQALRDALPEWTLRPLVQALHALRGVQLIAAMTLVAELQDFTRFANPRQLMSYVGLVPGEYSSGPKRRQGAITKAGNSAARRMLVEVAWHYQHSARVSPIIAKRQDQLPKAVTDIAWAAQLRLNAKFRRLLARRVMKTKAVVAVARELAGFVWAIGREVQTSGWPGITTEAAKAAVH

SEQ ID NO: 357471 - protein, 392 aa, unidentified
MIYVGIDIAKDKHDCFITNSDGEVLFKSFTISNNREGFETLFQRIKSISDDLTKVKVGLEATGHYSYNLLGFLLDKGLTTFVINPLHTNLYRKSLSLRKTKTDKVDSHTIAAMLMSDLNLKSYSDISYHNEELKSLTRYRFDKVKERAKLKSSISRLVNILFPELEKLVPTLHMASIYAMLSEFPGASHVASAHLTKLANLFSQSSKGHYGKDTAILFREAARNSIGSVMPAKSLELKHTIKLIQELTTEIDEIETAIKQIMDEEIKSPILTIPGISYRMGAMILAEIGDFSRFDSADKILAYAGMSPSTYQSGQLDNCYSHMEKRGSRYLRYALYNATKYVCHWDESFGAYLEKKRSEGKHYNVALSHATKKLVRTIFAMEKSGQAYRVTV

SEQ ID NO: 357472 - protein, 416 aa, unidentified
MLAVVVSDVEIDSEYQFERKRFSSNPEQLRSLAAWLLEQAVEEVVMESTAQYWKPVWEALERYWKPTCEKREGARRKSGTLHLAQALSNRGRRGRKRDFPDAERLVKRLVAQELTLSFVPDTEQRLWRTVTRKKYQLRCDRIRLQNQLESLLEEAHIKLSSFVSDLLGLSAQRMLKAISEGETDPAVLAALADKHLRATPEQLCDALGACTQLNPVYRRLLKLGLEELRLIDDQIGRLDREMASLLGEHQDAVQRLAEVPGLGVDSAQQIIAEVGPTAATFPSAKCLSSWVGACPGDDETAGVNYSHRSPKGNRQMRRILNQSANAAARTKGSIFEIVYRRSVPRLGHNQAIGAIAHRHCRLIWLILHRGVRYEERGPAVTRRSKQLRTWRMIRQLRSLGYHIAPPNPQPSQEQAQ

SEQ ID NO: 357473 - protein, 359 aa, unidentified
MEAQRKALCFKGQNIYIGIDVHLKSWSVTLMSEATQLKRFSQSPDPDALYAHLVRNYPEAEYHSVYEAGFCGFWIHYRLVGLGIHNIVVNPADVPTTTSEKLRKTDAVDSAKLARSLRAGELKGIYVPGSESLETRSLIRLRDSITKDQTRLKNRIKSHLRYLGIEIPEEFSGPGRCWNRRFVVWLKGAETGTAYGRQTLDFLVRQYEALRGQRLEMLRAVMALSRTERFEKPLENLMTVPGIGQLTGMSLLSEIDDIRRFKSADQLAAFIGMIPMCHSSGEREGVGDITVRRSARLRSVLVEASWVAVRQDPALSMAYGNYCKRMAPGKAIIKIARKLVNRIYFVMKRNQPYVKCVVA

SEQ ID NO: 357474 - protein, 373 aa, unidentified
MPRYSTAFGMDVHLRSTTVCALDAETGETVTRRFRGNPWGEVAEWMSGFPGPSLAAYESGYLGFAPQRELSGLGVDCVVAAVSKVPRSAADFSSKNDRNDAARMAKAILSHDISPVWVPSPEIEGLRDLAGAHDAATARLAAAKQRLLAFLARRGYAYGGTTPAGNPRRYWTYDFLRWLDKVRPADDGGIQALAALRSEVEAASETRDDLLAEYRAAVAAGPLSAEVEALQSIKGCGFALAAAFASEVGDFSRFRSGRQVTSYFGLAPKQRSSADSVRLGGISGAGNALVRRLAVEGSWSYVQASHQPKLMPKGSGVPLEVRMHGRKGSERLLRRREEMLARGMPQAKANAATAAELVRWLWALGAMCREATE

SEQ ID NO: 357475 - protein, 337 aa, unidentified
MKSDIAGDVHIGVDVSKAKLDVHVPATEEGARPTAVEVDNDIGGFRKLRDMARKAKAVVCVEPTGGYELGLIAFMHKFGVRVAYADALRVRQFARAEGNLAKNDSIDAALISRFADRIGVRILDERDVDSAELRRKAKFRQTMIDSRTAIVCRLGTETDAEMRKMLRERISHLDRLIRKAEDLCIETVRRNEDLNGKLARFTAVGGVGDVTAISILAGLPEIGKLPDSKLNRLVGLAPEEGQSGTREWRRRIWGGRRDVRNALYMASVAAIMWNSKLGAYYRRKRAEGHPHKWAIVPTMRKLLSLLNRIAGDPNFVPTPEPESTKGNAPAGRKGKSA

SEQ ID NO: 357476 - protein, 351 aa, unidentified
MIIIGCDFHTRYQQIAMADDETGELLLERRLDHESGEAHAFYRNFSVTVRVGIEATGPIHWFERLLAELGHELWIGDSAKIRASEVRKQKTDERDARLILDLMLAKRFPKIWVPTPAERDLRQLLWHRHKLVCLRTMLGNQLHFLAMSQGLCRKKKLFTKKGRVELSGLALGPWTRRRREELLQLLDRVDAPIADLDRAVLEEAKRRDDAVLLMTHPGIGPVTSLAFVLAIGPVTRFCCSRKLVSYLGLNPSEDSSGQRRRLGAISKQGNTMVRWLLIEAVYPAVRKDLALRQDYQRLKFRRGHAVAKVAIARKLAVRMYWMLRSGADYAQLVRRQGSPGATLVDANPSLG

SEQ ID NO: 357477 - protein, 426 aa, unidentified
MNTPNSDTLRSPEFAAYVGLDWGDKNHALAWTAGASKTAPQTGTLVNSPEVLHAWLQELGQRLEGRPVALAVETSRGPLIHLFGAYPWLTVYPIHPMTSARYRSAFKPSGAKDDLPDALLLLELVRDLRHKLRPLQMPEAATRQLAALVELRRDLVDRRTQVLLQLMALLKSYFPQALELVGQDLTTGLALAFLRRWPDPLALKAARPATLKSFYYQHSVRSEALVTQRLALVQQLRPLTTDEAVLMPAHFHLAALLEELRTLAKHIDLVEQKSHTLFKAHSEAYLFRELPGAGKALQPRLLVAFGEDRSLYPDPGSLQKYGGLAPVVERSGRQAWVHWRWHAPRFLRQTFIEWAGQTVVYSAWAKEYYQHMKAKGKSHHVILRALAFKWVRILWKCWQTRTPYDEARYLKQLLARSSPHAVKLNP

SEQ ID NO: 357478 - protein, 410 aa, unidentified
MEPILISCAGMDVHEKKVDVCIAHGPFDKPPKFEIRTFSTMTSDLEELMTWLKKYEVTTIGMESTGIYWKPIFNVMEGLFEIVLANAQRLKAIPRKKTDIMDCKRIANLLRYGLLPNSFIPPRAIRELRDLNRTRRKFVGMMTSEKNRLVKLLEAANIKLSSVVTRIYGVSSLAMIRSLLEKDKLSREDISKMAKGKLKKKVDLLEKALNGKLTDHHRFLLKMHLQNIDYLARQIKKLDEEIEKKMVPFQKESKLIQTIPGISEVNASAILAEIGADMSQFPDEAHLSSWAGVCPGNNESAGKKKNGKTQKGNSFLKGALTEAAWAASKTKNSSYNAFYHNLVGRKGKKKALVALAHRMLIDIYFVLKAGEPYQDMGAEAVHERTSKRRERSMIRSLEKAGYSVTKATTA

SEQ ID NO: 357479 - protein, 466 aa, unidentified
MILPQTRLSAIIIQLRAMGKSKASSSMPVVHPNAAGIDIGSQFHVVAVSADRDAEPVRTFKSFTGELHAMAKWLTACGIDTIAMESTGVYWIPAFEILESYGFEVFLVNAREAKNVPGRKTDINDSQWLQKLHQFGLLRASFRPTNDIVELRAYIRQRERLLDCKAEHIQHMQQAMMEMNVQLHHVVADITGKTGMEIIRAIVAGQHDPEELVKFRDCRCKNPLEMIIAALTGNYRPEHLFTLKQSLALVDFYASQLIECDEAIELKMKQLQQQTEPPEKPLPKRSQRHGGNAMNFDVRTELYNILGVDLTEIHGIGPTLALKLIAECGTDMARWPTSKHFTSWLCLAPANKISGGKVLSSRTRKSSNHVSALLRLAVPVLGKTDSALGAFYRRLAARSGKSVAITATARKIATIFYNILRYGIKYIDPGDGYYDEKYKARALEGLRRRADAFGFTLQEKPVTVMA

SEQ ID NO: 357480 - protein, 341 aa, unidentified
MYHTGFDVHDTSITIQQMDSDGALGRFEIIPSQAESIQKFLDSLDTLTTVTLEASGSHWWISQLLKQHPKVARVNVVDPRRSRGLAEELSVQNGYGRAKNDRIDGEMMAHETRQNIAPIIHLPTVAPMEVKTLNRYRQYLVESQSDTKRYIQSFLKMHGVKIKTPELIHNSVSQTNVLKSLSSVGELIVSNELKHLTQFRERLQIAEAKLKEILPATAPTMSLLLSQPGIGIVLARTIQTEICNIKNFVLPKYLNSYAGLAPVENDSNGKKGVIKLNCHCNYYLKYAFVQAAHCARKHPKYKVKYDRDVKKHGKMIAKLNLARRIVKSVYWMLIRQQPFRG

SEQ ID NO: 357481 - protein, 403 aa, unidentified
MSMNAVGIDVSKGKSMVAILRPYGEIVSAPFEIKHTSGNIQSLIEQIKSIEGESRIVMEHTGRYYEPLARELSLANLFVTAVNPKLIKDFGDNSLRKVKSDKADAVKIARYTLDSWTELKQYSLMDEIRNQLKTMNRQFGFYMKHKTAMKNNLIGILDQTYPGVNTYFDSPARDDGSQKWVNFAATYWHVDCVRKMSSNAFVDHYKNWCKRKKYNFSKDKAEAIYGIAKELVPVLPKDDLTKLIVKQAIEQLNTASKTVEQLRTLMNETAAKLPEYPVVMKMKGVGPSLGPQLMAEIGDVTRFTHKGAITAFAGVDPGVNESGTYEQKSVPTSKRGSSSLRKTLFQVMDCLVKLKPVDDPVYAFIDKKRAQGKPYYVYMTAGANKFLRIYYGRVKEYLMSLPE

SEQ ID NO: 357482 - protein, 391 aa, unidentified
MDDDNRVVIGMDPHKRSVTIEVMTGDEQVLGGGRFATDVEGFTAMLGYVAAWPNRVWAIEGCEGIGRHVAQRLLAQGESVVDVPAKLSARVRVFATGQGRKTDDTDAHSIALVGVRMNGLRAVVDDEQLELLRLLVDRRRRLGEEHTRMVCQLHQLLLELIPGGAKRDLSAAQARKLLASVRPRDVVGKTRKQHAMELVVDLERIYQRKKAANKELIELIKSTGTGLLDLHGIGPSGAARLLVEVGDITRFPDRGHFASWTGTAPIDASSGDRVRHRLSRGGNRQINVVLHIMATVQLRNPTEGRAYYDRKIAAGKSSNEAMRCLKRRLSDIVYRTMLNDLVANKATGPGGHRGASLQSSAAGSHPHTGSSDKSLPGPVKAKPKTRLPRAS

SEQ ID NO: 357483 - protein, 311 aa, unidentified
MASPNVFVGIDVSKDRLDEPVRPLEAGFAVSHEAAGYAGLIARLRPLRAKRIVLEATGGYERALWLALSEAGLVAAVVNPRQVREFARAAGRLAKSDRLDAAVIAHFAETFAPRPGKPDPVADRLGEHVLYRRSLQEEIVALEHQRRRLETPALRERAGRRHAALRAEVKEIEREMRAIVDGDPGKKALFACLTALKGVGLVLACTLIANMRELGSLTRHQAAALIGVAPLNHDSGVRRGYRAIAGGRRRVRNVLYVATLSAVRSNPVIREFYRRLSAGGKPAKVALVACMRKMLVMLNGRVRDHLATATA

SEQ ID NO: 357484 - protein, 343 aa, unidentified
MEHFAGLDVSVKDTSVCIVDDTGKIIREVKAASEPAALLAVLTNPTYHFKRIGLEAGPLSQWLFSALAEAELPVICVETRHMRAVLKAQINKTDRNDARGIAQMMRVGLYRPVHVKTLRSQKLRMLLTHRKLLQSKAIAIENDLRATLRNFGLKVGIAGKVKFEARIKELVENQPDLAVLVEPLLIVRRVLREQIGILHRRLLAVVRDDEVCRRLMTVPGVGPVVALTYRATVDVPARFRKSKAVGAVFGLTCSKYQSGEIDRSGRISRCGDEMMRVMLYEAAQSMLFHSTKWSWLKAWAMKIARHRGMKKAIVALARRLAVIMHRIWVDGTEFRWTKEVVTA

SEQ ID NO: 357485 - protein, 484 aa, unidentified
MVLPPNHPKSVAVRARAEAEAHRKVAKAKAKAQNKGKAQKVVKLDSLKQLNLNAAGLDIGAAEIWACVPEDRDESPVRIFRSFTVDLHALADWLEACEVDTVAMESTGVYWIPVYEILEERDFELYLVNAQHIKNVKGRKTDLLDCQWVQQLHTYGLLQASFRPKDEIVALRAYIRHRDNLIRYRSAHIQHMQKALQLMNVQLMNVLSDITGQTGMHIIRAIVVGQHDPVILARYRDPRCASSQAEIAKALTGHYRAEHLFALEQALELYDIYNEKIKGCDEQIEQMYSRFKPQIDVELHPLPPSKKKKRKKANRPDFDLRLYLYQISGVDLTQIDGIDVLIAQTIISEVGLDMSKWPTSKHFCSWLGLAPHNDTSAGKVLRRGTKKTKNRANTALRLAASSVNQSESALGAFFRRKRAQIGSPKAIVATAHKIARIVYHMLKYGTEYKDPGAEYYEQQYRERAIKSLHRKAKKLGLDLVPLAA

SEQ ID NO: 357486 - protein, 423 aa, unidentified
MAKKEVEAGMQVIFERVCGLDVHKKVVVACLRVLGAGGRVRSEVRRFGTMTQDLVTLLEWLQQEQVTHVAMESTGVFWKPIYNILEGHHMEVWVVNAQHLKKVPGRKTDVTDAQWIAQLLQCGLLRPSFVPDRTQRELRDLTRQRMRLVQHTATIANRLQKTLEDANIKLGAVASDVLGVSGRRMIEAIIAGQEDSTVLAELAVRRLRGKIPQLRLALQGQVTDHHRFLLRELLEQYDYTARKIAAFNQRIEQMAPPLFKQCATLLDSVPGIALEAAQAILAEIGTNMAQFPSHKHLCSWAGRCPGNRESAGKRQSGKTPKANKWLDAVLTEVAWAASRTKGTYLKAQYHRLAPRRGKKRALGALKHSILTAVYFMVRDQVPYKDLGADHFTRLNPEQQTRYHVRKLQQLGHNVEISPIEEAA

SEQ ID NO: 357487 - protein, 338 aa, unidentified
MYYTGIDLHKRTSFITTIDVHGKIVTRANLQNLKEDILAYFANLAEETKIVIESMSSWYWLYDLLTGNGLAVVISNPVKTKAIASAKIKNDKVDSHMLAQLLRADLISTVHVSSLQTRKLKELLRHRSRLVRDASRMKNRIHMLLMKNNFQNPFSDLFGTQGLRYLEEIDLPAYHRHQVETYLLLYEKLQEQIKPLTKRVRALVKENHTAQLLMTIPGIGPITAMFIVAEVDDISRFRSYRNLASYAGLVPSLDASAGKEKRGRITKQGSPYLRTALVEAAQAAARMQNSRLRVFFRRRIVKAGYQKAVVATAHKILQYAFYIWKNQTPYKETYPVCA

SEQ ID NO: 357488 - protein, 315 aa, unidentified
MTTTPVFVGIDVSKRQLDIALRPGGIRSVPNTEAGFAQILDHLNAVSPTLVVVEATGGLEIPLTGALAAAGVPVVVVNPRQVRDFAKATGKLAKTDALDAQVLAQFAEGIRPEPRPLPDDQTQMLAALVTRRRQLVEMLTAEKNRLGSARTPIRKNLRAHITWLERAFHQADSDLAEAIRQSPVWREKDELLRSVPGVGPVLTTTLLATLPELGTLTHKQIAALVGVAPLNRDSGTLRGTRTVWGGRAQARTALYMATIVAARFNPVIRSFYRRLCAAGKAKKVALVACMRKLLPILNAMLKHHTPWHTDVIHHA

SEQ ID NO: 357489 - protein, 391 aa, unidentified
MVCVGIDVAKDKHDCFIISSEGEVLADVFTIPNSMEGFDRLMRRIQDCSAPQDKIKVGIEATGHYSYNILGFLMDSGLPTYVLNPLHTNLYRKSLTLRKTKTDRVDARTIAAMLMSDVGLKPYTDTAYHNEELKSLTRYRFDKVRERAKLKQSVARLVCILFPELEKLVPTLHMSSVYALLVEFPGAKQIADAHLTRLKALLLDASKGHYKRDKSIEIRDAAKASIGSAMPAKSLELRHTIRLIRELDTAIEEIETAIQAIMDELRSPITTIPGLGTRMGAMIIAEVGDFSRFDSPDKVLAYAGLSPSTYQSGQLTNCYAHMEKRGSKYLRFAIFNATKYVCHWDPTFASYLAKKRAEGKHYNVAISHAAKKLVRLIFALEKSGEPYRLAA

SEQ ID NO: 357490 - protein, 345 aa, unidentified
MKIIGCDFHPSFQQIAMCDTETGEFVERKLSHADGQAERFYQELGEPALIGIEATGNSQWFLDLAQRLGYEVRVGDAAKIRACYVRKQITDKRDARHLLTLLIEKRFPQLWTPSAAMRDQRQLLRHRDKLVEIRTKVKTSLQHLAMNRGMQKKSRLWTRLGMEQFQQLAMPGWAGVRREDLLHLLKQLNHQIEPLDEAVEQAACQHPQARLLMTQPGVGPVTALAFVLTIGDVARFAGSKQLTSYLGLVPSEHSSGSKRRLGAITQQGNRFLRKLLVEAAQTTVRKDEGFRKEYLHRCHHRPKGVAKVAAARKLAVRLYWMLRSNVGYPEIVRVESNPRVPLGEV

SEQ ID NO: 357491 - protein, 312 aa, unidentified
MTEHCYCGIDVAKDRLDVQVLPHRQRFSVDNNGTGWAELVERLHALPIAAVGIEPSGGYERGIIRTLLAAGLSVRRINPSKLRQFARARGILAKNDRLDAQLIAEYVSIMPTRVVQRAATAERLAEVVTMRRQLCDEHVTIENQAAHVEDAILRRLNKRRLARLKADIHLLDKRMGEIVAADAILAQRYELLTSMRGVGPTLAFTLIALLPELGQMSRKQIAALVGVAPYDFDSGKLKGHRCIYGGRMPVRNILYMAALSAARYNPALKVFHNRLAAANKKPKVIIVAVMRKMITTLNAMVRDNAAWQPRVA

SEQ ID NO: 357492 - protein, 387 aa, unidentified
MLEETADREEIIQRVAALDIGKAEVMCCVRVPYESRPGRRLQEVQAYSAMTRSLLGMADHLRSLGVTRVVMEATSDYWKPAFWVLEAAGFETWLVNARDVKHLPGRPKTDKLDCIWLCKVAERQMIRPSFVPPPQIRRLRDVTRYRIDLVGARTAEKNRAEKLLEDAGIKLSVVASDIFGVSGRAMMAALIAGERSPAALAQLARTRMRGKIPALQEAFTGHFTDHHAFLLGKMLGRVDGIDADIAELDARIEETIAPFGQAAERLNEIPGIGRVAAAVIIAEIGTDMTRFPTAGHLASWAKFAPGVKESAGKKKGKGSTGHGNRYLARVLGEAAVGAARTDTFLGERYRRIARRRGKKKAIVAVGRSILVITSLAYLAVSDLAVTA

SEQ ID NO: 357493 - protein, 357 aa, unidentified
MGGSRRSRQRVSGGRAQPDDGEVSTHRIAGRPDGVLDWLATVAQPFRAVYEAGPTGYGLVRRAEERGLDVVVCAPGHILKNATDHIKVDKRDAVRLARLLSAGELRLVRVPQPDEEQLRDLVRSREDVRVDLTRIRNRIGKFLLRRELYPPKHADSWGVLHRKWLQQLRFEDRASELVFQDALHAHEILVARREQLEQALAEIAANSPWSRTVARLRCLRGIDTLSALGLVAEVGDFRRFVHPRFLSSYLGLVPSEHSSGEKRRQGGITKAGSKHARRLLVEAAWQYRHVPRTSHHISQRQQGQDPRVIDIAWRAQRRLYKRWQRLHEERRKRSTVVAVAVGRELATYCWEIATLTG

SEQ ID NO: 357494 - protein, 352 aa, unidentified
MIIIGVDFHPEFQQMASVDTDTGEFQEKRLTHREEAEKFYRALMGEKVRVGMEASGHARWFERLLSELRFELNIGDAAEIRTKRVRKQKTDRQDARLILQLLIEDRFPRIWVPSWENRDLRQLLWHRHRMVQARTRIMNQLQAVALNEGLRCKKRLWRDAGREQLESFALAPWASRRRRDLLQLLDRLTPTIAELTQAIEGEVEKCPEARRLQTHPGVGALTALAFVLIIGRAERFQCGKQIASYLGLVPLEESSGNRRRLGHITKQGNSLLRFLLVEAAQVTVRSDQEWRNKYFHLALRRGRKIAKVAMARRLAVRMYWMWRKGWNYEQLKNFGSHAGEPGNRDGVMLNTE

SEQ ID NO: 357495 - protein, 350 aa, unidentified
MIIIGCDYHPGFQQVAFVDTETGELQERRLQHREEAEKLYRELAAQGKKVRVGMEASGHARWFERLLSELKCELWIGDAAEIRTKRVRKQKTDRQDAQLILKLMLEDRFPQIWVPSWENRDLRQLLWHRHRMVQARTRIMNQLQAVALNEGLRYKKRLWREAGREQLEAFRLAPWASQRRRDLLELLDRLNPTIAKLTQAIEQEVENCPEAQRLRTHPGVGALTALTFVLIIGRADRFQCGKQIACYLGLVPEEESSGERRRLGPITKQGNSLLRFLLVEAAQVTVRSDQEWRNKYYHLMMRRGRKIAKVAMARRLAVRMYWMMRKGWDYEQLKKFGSHAGQPGPGDGVK

SEQ ID NO: 357496 - protein, 414 aa, unidentified
MSNPLLVGVDPHRKTNTVCTMDREGREVDERFTVQNNRPGTAAFVREIAQRAVDGDFDALHIATEATAWYWWHFFQTLDQDPLLHQWPVTLYPFNPRLTANYKKTFVDLDHDDFIDAFGVADRLRVGRDLPAPFHYEDRYLPLRMLTRYRYHLVHQLAREKAYCLAILYFKYSEYSRKDKRPFSNLFGATSRAVVQEFASIEEIATLPFDELVEFIDRKGKRRFPDPTDNARKLQRVVRDSYRLPQAMRQPINLILSLTLRLISSLEGLEKRLNTAIANGMQPIHQTLDTIPGLGPVFCGGIVTEIGGIERFHYDQAKVAKYAGLKWRKTKSADFTAEETRLTRTGNRYLRYYLCEAANAVRRCAPEYAAYYHKKFHEVRKHQHKRAIVLTARKLVRLVVRLLTTNEQYRHRRS

SEQ ID NO: 357497 - protein, 338 aa, unidentified
MKLYGGIDLHSNNSVIALLDEEDKVVYRRRLANDLAIVLAELAPFEDAIEGLVVESTYNWYWLADGLMAAGYRVHLANTAAIVQYEGLKYADDDTDARWLAKLLRLGLLPEGYIYPKEERPVRDLLRKRSQLVHQHTSHVLSVQNLLARNRGCSPGANQIKRLTYEEADRLLPDTDLALAVKSSLAVMRTLEDVIGLLEKTARARTKLRPEFKPLLTVSGIGQILGLTIMLETGAISRFAKVGNYASYCRCVGSERISNGKRKGRGNKKNGNKYLAWAYIEAANFAVRYNPTIKRYYQRKRARTNRIVAIKTVAHKLARACYYILRDQVPFDVNRAFA

SEQ ID NO: 357498 - protein, 322 aa, unidentified
MTSVAEAPLSHLGIDVSKDKLHLAVDGQADLFTLANDAAGITQLIERMRQLHPKLIVVEATGGYERALLNAALEAALPIARVQPGRVRHFAKALGLLAKTDEIDAPLLALYARCLQPAVSEKRSKNQVELDALLVLRRQLIDTRTAHGNQLQMADSPFVRATLAKLLRQIQDRIKQVEKRIARLIDSDEDLAGRRDLLLSVPGVGKTTAATLAAQLPELGKIDRCQISALVGVAPYNRDSGKWAGKRAIFAGRAAVRSVLYMATLTAIRCNPVIRAFAQRLQKAGKLPKVVITACMRKLLTMLNAMARDGLTWSPKCQLQTS

SEQ ID NO: 357499 - protein, 464 aa, unidentified
MEQSRDDKSESDRGIEEPGFPVLRRNVAGIDLGSTSHWVCAPTVDGQGREVKVFGATTPELEKMAQWLEQRRVESVALESTGVYWIPPHEVLERQGFQVVLVNTRDLARVPGRKKTDRVDCQWIQRLHSCGLLRGSFRPPEQICMLRTLIRDKGNLVAERADWIQRMQKSLDQMNVRVHRAVSDIDGTTGMAIIRAIVAGERDAAELAKLRDPGCRNSREQIAEQVSGHWREDHLFSLEQGLKMHDAITGRIQVYEKEILRRLGEMERAEYREKQAPTLQNKNKAKMIRQRGEEPMRQALYRMSGVDLTAIDAVGVGAVQAVLTEYGPDLSCFPTEKHFVSHVTLAPKNAVSGGKPVKKRKKRGSASSRVAAALRMAALSLRHSQSALGAYYRQIARRIGADVAVFATARKLATWIYRLLRWGHPYVDEGAAAYEKRYQEARIRRLIATAADLGYELAPKATQP

SEQ ID NO: 357500 - protein, 353 aa, unidentified
MVVVGADVHKRTHTFVAVDQAGRELGHRTFDAITPGHQAAVRWARERFGEDLVWAIEDCRHLSARLERDLLSAGQSVVRVPPKMMAEQRRIARTRGKSDPIDAAAVARAALREPTLPVASHDETSREMKLLVDRRDDLVKHRTATTNRLLWRVHELDPAWAPKARSLDLIKHQQILADRLADVPGILAELARDELADIVALTARINSLERRIAALVAHAAPTLLAMPGVGALTAAKLVGEAAGITRFKSEAAFARHSGIAPIPVWSGNTKGRVRLTRSGNRQLNAAIHRIAVTQIRLDGPGKTYYEKKKAEGMSTPEALRCLKRRLARIVFNHLTADHNTAHAGLGTPIPTAA

SEQ ID NO: 357501 - protein, 346 aa, unidentified
MSHYVGLDVSVKSVSICVVDAAGSVLARGETTSDPDEIAMFIQQHASGPERIVHESGILAIWLTRELEKRGLPIICIDARLAHKALSGRINKSDQGDAEGLAHLARTGWFSAVHIRSAASERVRVLIGTRERLIRMRKDLEAHVRGVLKVFGICMGTVGRVDMRRRFRDQLAEAGQTDLAISVMADMFIPIHKALCAATETMDDELKAIARGSDLARRLMTVPGVGPVVALSFAATLDDAGRFRRAKDVGAFLGLTPKRHQSGDMDWSGRISKCGDRDLRRLLYSAATTLITQVRKPSPLRTWAMRLQERKGFKKAAVAASRKLAVVMMCIWRDGTVFNPTQEAIA

SEQ ID NO: 357502 - protein, 379 aa, unidentified
MRHVCGLDVHKDSVSVCILNEKGVVFQEKFGVLTPELERMVGVIMEHGVTEVGMESTSVYWMPVWRVIDPYVEQKLVNPYFIRQLTGKKSDVKDAEWIATCILKGLVRGSYVPEERIQRLRQYDRSIFDLNDDIVYRLARLDAALQRCNIRLSNYVSTTDCKSYGDVVDAIARGETSPDALLRCVHGRIVNRNGADVIRSALTGVVTPVDVDVIRQLREEIELARRHRDECQRRMDGLCSEWFPEQYANLQTIPGVKARSATATIAELGTDMSSFEDAAHLVSWAGLRPRNDESAGRIKARGITHGNKYLRKTLIECAWGASRTRGCFYSRFSHHQTVVRRKSGMKVQVAIARNMLSAIWFILHDGVAYRDFEGDANAA

SEQ ID NO: 357503 - protein, 374 aa, unidentified
MDVHKSFLVACIASTNECGVTTYKSRRFSTFTKDLRLCADWLSANNYKDVCMESTGKYWVPIYNILEASCKIVLAHPKYVKAIRGKKTDKKDAKWIADIFKHDLVSGSFIPPADIRQLRDLVRYRWKLNNFIVGEKNRAQNCLTVSNYKLDDVFSDVFGKAATQITSYLLEHLNEPLSDVSNFRTKGMKATDAEIRDAADGNICAEQAEKYTSQLSLVMSVPGIQTFSAISVIAEIGVDMSVFPSSKHLCSWAGLTPQNNESAGKKKTTRISRAGAYIKPLLVQCALCAIRAKRNPEIRNRYLSIKKRRGHKKAIIAIARMLLTAIYNILKKNEPYNAELSHKVDVPPAHRSVTIEEAVFILQRQGYLITPCTS

SEQ ID NO: 357504 - protein, 425 aa, unidentified
MNSISNKKINQVTDQTLVVGMDIAKKKHYACFVDERGRVLKKSFPVPQSREGLEWLYQCIVKAMEEFEKTEVIVGIEPTGHYWLNLAYFLDEKGIPLVMTNPMHVKRSKELDDNLPTKHDAKDALVIARLVKDGRFSYPRILKGMEAELRVGATFRSKLVEEQGAIRNQMIRWLDRYFPEFSQVFPSFGKMALAVLEYTPFPSDLAGKELEEVLALYRQSEGLQSPQKPKAKKLMELAQHSIGVTEGQQMARIEIATLVRRYRQLEEEIEALTELLIELVQTSVEYEWLKTVPGLGDATIVELLSEIGSFSHYQDPRQLIKLAGLTLREHSSGQHKGQKRISKRGRRRLRALLFRVMMPMIRHNEAFRQLHDYYTTRPDNPLRKKQSIVVLCGKLLKVLHAVCTKHQAFDAKRMMQDIFGLETAA

SEQ ID NO: 357505 - protein, 400 aa, unidentified
MDALLVGINVGCRKHRVAIGMPDGELLEQFDLAHKPDGFDDFFRRVEKQALQTKLPVSIGMEGYGGWARPLDEMILGKGWTLLNVNNLKLARYKEIFPSPAKTDAIDARKILELMRLRPLLPQAKAILNEVIPAPQVNHDMKLLTRRRRQLVNERSMITDRMYGNVQSIAPGLIELTGSISNKWFLNFLTSKPSFDQLMRMHSRSVQKIKGVGKVYFELIRHWQKSAILSTDVMMMGDMVIEDAQRILALTTHIKRLEKQLDDLLPQSQLATTIASITGFGLVCSTELAAEIGTMQRFATEASLARYIGIAPLDNSSGVFTGTKGYKQVNRRAKAAMMVAAARHYYHTPQSKAYYDKKRAEGKKHNQAVRSLARHLSRVIWSLVKNNRLYEKDLNWDKST

SEQ ID NO: 357506 - protein, 363 aa, unidentified
MHSITNTELSSHEETRCQFNGGRCTIKMGIDVHQDFYVVAEQVGGTNPKPPQRFHKQAFLHWAAKLKHTGAEVHAVYEACGFGFGLQRNLSALGIKCHVVCPQKLDEQNRRVKTDGLDAKALCLKLDRFVQGNRDAMALVRVPTEEEERSRAIHRQREQLVVARKRLEAQGRSLMVNHGLEPVQNWWKPRTFAALPVAQWMRELLLNSQPILLALQEKIAVLTLQLQSAAASNQPRGLGKMTSVIIDREIGDWNRFNNRRQIASYTGLCPGEYSSGNTRLQSCVTKHGNPRLRAALVELAWRLVRFQPSYKPVVKWRQILAKGALATGAARKKAIVAVARQLAVDLWRIKTGRLRAEQLGLTI

SEQ ID NO: 357507 - protein, 423 aa, unidentified
MSYRIAGIDVHKKMHALVMTDVSEGGEYTFERCKFGGSPSDLRTMAQWLIDKGVQEVVMESTAQYWRPVWQALEQHWQPECRKLGGAGLLHLAQAESNRARCGRKRDFEDAERLVKRLVAQELILSYVPDAEQRLWRTVSRRKYQLTQDKVRMRNQLEGLLEEAHIKLTSLVSDLFGASGRRMLHGLAEGESDPAVLAGLADSRLRATKEQLCDALGACAHLHQAYRDLVKMSLEELNLMEEHIAKLDKQTAELLKAYQGAVERLAEVPGLGADSAQQIIAQVGPAAAAFESAKNLASWVGICPGREESAEESKSNRSPKGNRTLRRILNQAAHAAVRCQGSIFELTFRRLVPHLGYQQTVWAIGHRICRLIWLILHQGVRYEERGPAVRETVRKRRVARMLRELRSLGYQIDPVQLADGSAR

SEQ ID NO: 357508 - protein, 339 aa, unidentified
MWYSGIDQHKRDSVLTTYGPDGPRVKQARVANTPLAIAQYFAEFPGPHTAVVESTGGWYWLADVLAPLGVELVLAHATRLKAISAAKVKTDQVDSDVLALLLRADLIPVAHMIRPDQRGPRDLMRARLRLVEKCVSAQNSVGRLLEKFNVPEVGALAELYQLPAACHAAQIQLLTEQIATLERALYPHLIPNPDVQRLLWIPGLGKVNAFTIYTEIDGITRFPSESQFFSYSRLVPGADNSGGRTRHRSGSKAGNRYLKLAFSHAGIRAVQYYPEIRAFFKAKARRKPIRIARPLVALELARIVYHVLTKQEDFNGQFKHRPLSRQKHAQWPRRASPPA

SEQ ID NO: 357509 - protein, 352 aa, unidentified
MLIIGCDYHPSMQQIAFVDTDTGERGERRLMHRDGEAERFYRELKQKEVEVRVGMEATGYARWFERLLAELGFELWIGDPARIRARRVRKQKTDRQDAQLLLRLLLEEGGFPRIWVPSPGNRDLRQLLWHRHRLVQMRTRIMNQLQAVAMNEGLRRKRALWSETGRKQLESFLLAPWGSRRRQDLLELMDRLNPTIQELTAAVEKEAENKPEVQLLMSHPGVGPLTALAFVLIIGTPQRFQCGKQMGSYLGLIPCEDSSADQQRFGHISKQGSSLLRFLLVEAAQVAVRVNPEWRRRFVHLAMRRGRKIAKVAMARRVAVGLYWMWRKEWDYQQVVKFGSHVGQLEFRHGVQ

SEQ ID NO: 357510 - protein, 339 aa, unidentified
MKHTKYFIGLDVHKEKTSYCVRDKLGNILIENETATLYSELQPRLKTYLNTAKIGLDASTSYYTLYRMFLTNGCDISVANTIQLRQLIAKNDKLDARRLSEMLRLGAFPCSYIPDEKIQHVRSLVQVRHSLMEEKVRCNTRIQAFLDKNGVVMPPQAAFSKHWRQTLMEYLGAGTVSGELQYEYDHFLFLEKKQRQVEQEMKHYTRMNWKKEYTLIQSVTGFGPVLACYVIAHVCPIERFPSNRKLRRYAGVIPVTKQSGETISKGHIPKGSSRKQLRWALVQAANTAGKTDTPLGRYYRKKKKQKKISAIAKIAVASSMIDILYKVLTTKQPYKMLST

SEQ ID NO: 357511 - protein, 396 aa, unidentified
MRNDVTIYVGIDFSKEKFNACLLMEQGVMGESEFPNSKTGYLKLTKWVKNTSELGRSFDSSLVLFCGEHTGTCSIGLCEYLYAKGMKIWLESALKIKYGSGLKRIKDDKADAEMIAYYAKRFYEPGSCALFEPDSADLKTLRTLYQFRNRVVCDRVAIGNRISSGAFDCSTLVRNRMVKHHKEAQKDEKDIEKEMVRLMETSEELASNYQILISFKGIGPITAAALIIYTSNFKKFDNPRKFACYCGIAPFGKQSGTSINTKPHVSLFAHIGIKAAMVQACKSAIQHNAVIKAYAQRLYAKGKHEGIVMNNVKNKVMHIIFKMIQTQTLWEQEYQQKHMKECKAIPGKNGIGATEAAPIINTTLKTSSSVVECTFLEEHSFQKNCKKTSSFSCVET

SEQ ID NO: 357512 - protein, 411 aa, unidentified
MKYVGVDLHKKTISICVVTLEGRKRKVLARKRLACRDMDGIYRFFQELGTFQVVVEATASYEWFVQLVEPLADRVVLAHPKKLRIIAQSKYKTDKIDAWTLGEFLALDMIPEAYRPTPRQRQYRALVRYRYYAQKRTVSVRNKIRHVLANYNADFEALFTAKGLHDLRQQRVSAADQFVLKRLLEEWHEHRRRLREADQQLAAFGKEAPVAEREARQVLATFPLAGPVTIDVVLSELGDVQRIGSLKRAGSFVGLAPGFRESAGRRKEQGITKEGPRLLRWAMIQLAWRVVGRTAYWRGVFAKLELRVGKKKAIVAVARRVFCVIMSMLRSGQAYRIPEVQAKAGFRRDGKSVRGRQTDATPTPRPSTSRIESTEPSHPADREAERRERTRQKTPRASRRRPRHEALSAHS

SEQ ID NO: 357513 - protein, 344 aa, unidentified
MEITTVGLDLAKRVFQVHGVDATGGVVVRKALRRAQVLPFFAKLPPCLVGIEACGTSHHWARELIGLGHEVRLMPPAYVKPYVKRGKTDAADAEAICEAVTRPTMRFVAVKSRQQQAALSMHRARNLLVKQRTQLVNMMRGLLAEFGIDIPEGLERALLMARQVIDGVVPDVPIEAAKIIGMLSQQALDTHVRLREIDRALVALQRTDDVARRLATIPGIGPIGATALAASVTDPAQFRSGRQFAAWLGLTPLQSSSGGKERLGRITKMGDKYLRKLLVIGATSLVRRAKYNPRMVNPRLADLLARKPVRVATVAMANKTAQIVWAVMTRGDVYRPVHLPALAA

SEQ ID NO: 357514 - protein, 520 aa, unidentified
MAITRSRGRSSSRRTPTSVGKPRGVLHPRVQLIGPEHFGIVCFDCAKARSKFLLADFYGRLLIPPTVDAHTRPALDAAVAQIRHAFEQHQLRDGLVAIERTGRYHRVVQRTFAAAGFETRILHPFVTKQYRQPVDPGNKTDDTDLAAIHRATITGCALLEATRDEAWTTLQLLIRHRRDLVCKGAALNCQIRDHLEATLPGYAACFDKLWESPIPWHLLRHYPTAKQLHEAGVTALCHTLRQASIRFQRRTIETVVAWAEQAAPGDIAASQHLRIALALYDDRQRKSQEIQALERDIASRLVQTPYMLLLSFPGINVVSAADFAGEAGPIEHYATAKSITGRAGLRPSRYQSDTVDKANGPLVRHCNRALRAAILGIADNLIVCNHHFQVLATQWRAQGKDARHTRVKVGLRFCRIGFQMVAGRQVFRHPCLQGRHYILDKLTAFHREHDTGMVEVLRDLQAAIGQLPAREYAAEAKPLADEFEKIQGGRRRGPQVLGDILPIVLARLGVGVVQSPESGE

SEQ ID NO: 357515 - protein, 343 aa, unidentified
MEHYVGLDVSLKQTSICVVNQVGSVVREGVVDSEPEAIAAFVRSKAPGAVRIGLETGPTVTWLWTELKQLGLPVICIDARHARAVLKMQINKSDRNDAAGIARIMQTGWFKEVRVKDLDSHSVRALLASRALLVKIKRDLENQIRGLLKNVGLVIGRAKFNVFAVRAEELIADRSELIAVVRPLLEARKAIEQQVDDLDRKVLKLARYDAQVRRFMTVPGVGPITALCFKATIDDPTRFKRSRSVGAYVGLTTRRHASGETDWTGRISKCGDAMLRSYLFEAAGVLLTRVPKWSALKAWGMRLAKRNGLRKATVAVARKLAVILHRMWIDRTEFNWSKKEVAA

SEQ ID NO: 357516 - protein, 376 aa, unidentified
MQVETDEVEIIERVAALDVGKAEVVCCARVPGPGGRRMQEVRTTSTMTAALLALGDWLAGLGVTRVVMEATSDYWRAPFYLLEDRFETWLVNAKDVKHLPGRPKTDRLDAVWLCKVAERQMLHPSFVPPPAIRALRDLTRYRVDLLAARTAEKQRVEKLLEDALIKLSVVVSDPFGASGRAIMAALIAGERDPAVLADLARGSLRSKTARLTEALTGRFTEHHAFLLTQMLHRVDGITADIATVQARIEGQLGELAPAVARLDAIPGVGPVAAQMILAEIGTDMTRFPTPGHLVSWARFAPGVSESAGRPKGHAGSGHGNPYLARILGESAVSAARTDTLPRRALPAHRPTPRQEPRDRRDRPIDPRHRLGPALRR

SEQ ID NO: 357517 - protein, 345 aa, unidentified
MIRYVGLDVHKHFVEVCILDQKGKALYRGRVDCCRAALQHFAQHRLKRSDHVALEATTNTWPVVEILRPFVARVVVSNPLKTKAIAEAKIKTDKVDAEVLAQLLRCNYLPDVWQPDEKTQTQRSLITHRMGLTRRRTRHKNRIQCLLGRLLLSPPCRLLWTEAGRAWLKSLDLSAPDRLILESELRQLQQVELELELLDRELVEIARQEPRVKLLMTLPGVNYVVALGLIAALGDIHRFHDGDHAASYLGLVPSTRQSGNKCYHGHMTKAGNSQVRWLLTQSAQHVARHPGPLGAFFRRLAKRKNRQVAIIAVARKLVLVAYLMLKNNEPYRYARPDLMPKSSLS

SEQ ID NO: 357518 - protein, 411 aa, unidentified
MRVMIERCAGLDVHQASVVACLLTCASGRVSKQVRSFGTMSRDLEELRAWLSAAGVTQVGMESTGIYWRPVYAVLEEEFEVIVGNAWHMRNVPGRKTDLKDAEWIAELVSHGLIRPSFVPSKPLRELRELLRYRRKLVESQAAERNRLLKLLETANIKLASVATDVFGVSGRAILRALIEGATSAEAMADLARRRLRRKRDQLILALEARTEQHQRFLLAMQLRRLESTEQDIDALDQYLTEKLLPYAEELALLKTIPGVDWLTAANLIAEIGIDMSVFLSAQHLAAWAGVCPGSHQTGGKQKAVRARKGNMHLRTTLFAAASSAARTKGTYLKDKYYRLKARRGAMRAMLAIAHKMLIAAYHMLATRVPYQELGAAYLDRIDQSRTVANLKRRIERLGYSVTIQPITAAA

SEQ ID NO: 357519 - protein, 343 aa, unidentified
MEEYIGLDVSMKETVVSIRRKGKRIWRGRCASDPNVIADLVRKRAPAAKRVVFETGPLSVWFYHVLCAEGLPAICIDARHAKAALDMAANKTDANDADGLAELAEVGFFREVRVKGFDSMLTRTLVMARTRLVRVTTELSNQIRGVMKTFGLVVPAGKGSTFEKNVRALLVDQNGLAPIVLPLLEAWRNLRIRAAELGRQLIAGARQSQACRVLMSIPGVGAITAMSFATAVEDPANFKKSRSVGAWLGLTTRRYQSGQVDYDGHISRRGDHHLRGLLYEAATVILTRSSADSTLRTWGVKLRERVGFKRAAVAVARKLAVMMHAMLKTGELFDRSTGAAAAN

SEQ ID NO: 357520 - protein, 418 aa, unidentified
MKPWNELTHFAALDWADDHHDLVVVDAKGQIVLELTFSHTAEGWQQAQQAMTPWADLPVAIETSGGPAVDQLLQRGLVVYPVMPKAAARYRERKRPSGSKDDRHDAWSLAEALRTDGQGWRALSPLDPLTVQLRALCRDEIALIEQRTALVNQLLAALKEYYPAVLQAFEDWTAPYTWAFVLAFPTPEALAQAGKRKWEKFLHTHKLWRPQTASERLKIFAQAQSFKGTPAISAAKSLLVQSLARLLQTLEQQLGLYRARIQKLFDQHPDHDLFGSLPGAGPKLAPRLLAELAGSDWQQIKQVQARAGTAPVTYESGKIKRVKIRRACTLPLRATLHLWADLSRRYSTWAAAYYQAHRDKGQTHACALRCLAHRWLEIVGAMCRTHTAYNAEHHLRQIQNHGSWVLALVTKTAPKPGE

SEQ ID NO: 357521 - protein, 352 aa, unidentified
MELEEVPMTIVGGLDIHRKQITFDYVDTVTGRVRRGRIAPADREHLAGWLAQRFPGRTDVEFALEGCTGWRYVAEELAAAGVGAHVAEPADTAALRGGRRHAKTDRTDSRHLRELLADERLPQCWIPPAQVLECRALLELYRDLRVEHTAWVQRIHAVLFHQGAGALTVPALRSQAGLVELSEQAADLSSAGKMQVVTALEMLAVLDAQLTQVRRQLLDAARHLRGARVLTARLYGVGPITALALCCWLAGAGRFSSARKAVRFAGLDVTVHSSDGKRSPGHLSRQGPSVLRWCLYEAGKTHARGSAPDHAYYAQVKDRIDGKRAALSEGRKIVRQACHLLSELGDDALTQV

SEQ ID NO: 357522 - protein, 419 aa, unidentified
MTQETQVLRRVIGLDAHPDTFTAARLCGPTPAAAVTEKIFNQVPLGQLSRWAQKQTTAQDVIVLEASGNSFQIVRLLAKQERKALVLESCQMGKLKEAHANNDKISAVRIGKAYLAGTAKEVWVPDPLTQERRDWFHAHRKAVKRTTQMRNRLRSYLSDQGVRLPKDLRLATDPATTEKIHKAYSWTSRQWQVVEVMLLELRQAEEQRAHWRSLIAQEVLADEKLLSLVRLCGVRDLVAFALGALIGDVKRFADPRKLVKYIGLNPAFDDSGQGTWKGGIGGHGRKDLRALLIEAAQALMRSTHPLAQWGRKLLGRKGSLNLAVAAVARKLTVAIWYLMNGRWTALEQIDGRLSLKVGKIISQVGAAKLKALGQTRKSLRDATFQTLKNTKIYVLDPHKKMAASQAPRGGAGPPNPPAL

SEQ ID NO: 357523 - protein, 353 aa, unidentified
MEQFIGCDAHKKFSLFVTMNEHGEYGRAIRIGHDREVFRAFLKDLPPGSQIALETSGSYYWLVDEMERAGHKPQLAHALTAKRRMEGRHKTDERDARGLAMLLRNGTLPRVWIPPAELRDQREMLRLRMCLVRMKTQLKNRIHGVLLRYNLTVKATDLYGDWGRVELISRLEELPTHSRQSVLEQLDLIDSVESQVHGCEQHLEDLLYPSAERDLLKTLPCVGKILSAVIALEIGDVRRFGHATHLVSYAGLVPSARESAERKRQGRCPRDCNVYLKWAFVEAANLIACKQKQWPEHHAVRLYQRVKQNTKMHGKAAMAVARHLAEASYWILKKQEVYREPKQKRQVLSSTQG

SEQ ID NO: 357524 - protein, 311 aa, unidentified
MAMQSKLEALGVDVAKEWLDIFNGETVVRVDNNTKAIRAFLKSLPSAIPIAVEATNVYHELFVRLALAASHRVYLVDAYRVSRYREAVGERVKTDTVDARLLYRYLNAEITHLRPYQPPPKAVKRLMVLLRARAKLAHSRTTLKQSLAGINELARTTTALLARIDRAIKLIDDKLINCISQSGYLKDYKRCQTIKGIGPINAAALVALYHRGKWRKADAFVSFMGLDVRVRESGRFRGQRKLTKKGNPEIRRLLFNAARAGARTEQWKPYYDSLRERGLTTTGAAVAIARKMAKLAFALMRDQTEYQAKMA

SEQ ID NO: 357525 - protein, 343 aa, unidentified
MQSISTIGLDIAKSVFQVHGVDAAGQVVIRRQLKRRFVLSFFEKLPPCLVGIEACASSHYWSRELRALGHTVQLMPPAYVKPYVKRQKNDSTDAEAICEAVTRPNMRFVPIKTIEQQSCLMLHRVRHLFIRQQTAVINSIRAYLAEFGIVAPVGRRGVEQLLEVVADPAERRLPEVARACLAALGSQLRALKAQILDFDRRIIAWHRSNATSKRLDAIPGVGPALATALVASVADANAFRSGRDFSAWVGLVPKQNSSGGKDRLGSISKQGDRYLRSLFTAGALAVIRYAKIHGARHRPWLTALLARRPTKVAAIALANKLARMAWAMMARNERYREPAALTA

SEQ ID NO: 357526 - protein, 359 aa, unidentified
MQTQSNKIDFNGQNIYVGFDVHLKSWTVTIMTEKLTHKTFSQPPKPEALYHYLRKTFPGGIFHSAYEAGFCGYWIHNKLTKFGINSMVVNPADIPTTGKEIVMKDDTRDSIKIARSLRNGDLKPIYVPSLPTLEDRGLVRTRATLVKDLTRYKNRIKSFLYFHGIELPEAFNKPNTYWSNRFNKWLEDVEMTESSGKASLNVLLEQSRHFRASILQVTRQIRELAKADRYKTQQDLLRSIPGIGLITAMIILTEIETIDRFDSIDQLCGFIGLVPSTKSTGDHKVIGDITPRGHSVLRTAIIESAWMAVRLDPALNKCYHDYCKRMEPNKAIIRIAKKLISRIRFVLKNNQPYVCSVVN

SEQ ID NO: 357527 - protein, 340 aa, unidentified
MKLFVGIDVSLEESSICVVDDDGVILCEGTVFSEPEAIVGFIKTHAVDAERIGLETGPTATWLWHELRALGLAIDARHAKAALSMQINKSDRNDAVGLARIMQCGWFKEVQVKSVSCHKNRAVLNSRAQLVKMKRDLENQIRGLLKNLGLLIGKAGGNVFRRRVEELLSGHGLLWEAVGPLLEVREKVMKQIAILHRRLLDLARNDVDSRRSMTVPGIGTITAMAFHSAIDAPARFRRSRSVGAYVGLTPRRYASGEVDWSGRISKCGDRMLRTYLFEAAGVLLTRTAQWCKLKAWGHRLWKRIGFKKAKVAVARKLAVILHRMWRNGTDFIWSSKEVAA

SEQ ID NO: 357528 - protein, 388 aa, unidentified
MSNGIRWVGLDVHASQTACAVFDSDTGELITRRVMGRPHEAMGLLEQLAQPVRAVYEAGPTGYGLARRGRAAGIDVAVCAPGMIARAGSERIKTDKRDAIKLARLHAAGQLVLVYVPTLEQEQLRDLARCREDARQDLMRAKHRVGKFLLRREIYYPGRGRAWTREHRAWLASLRFADAASEATFADYLHAHDTLTARRDQLDRAIDERARDCCWAPLIARLRCLHGIDTLGAFGLCAEVCDFQRFPRATSLSAYLGLVPCENTSGDKRRLGSITKAGSTLARRLLVEASYHYRRPPRIGGGLLRRQDGADAWVVDLSWRAQRRLHGRWQRLRSSVTSTTGSPPSPLPASSRTSAGSWRSPTDRAHTTQHSSAVRAPRPMAVAQVVRD

SEQ ID NO: 357529 - protein, 411 aa, unidentified
MDVFCGIDWAEDHHDIALVDRSGQLLARRRISDDAAGLTALLSLLAEHGDSPDDPVPVAIETPRGLLTACLRVTGRKVYPVNPMAVARYRDRHSVAGRKSDHGDAVVLANILRTDMHAHRPLSADSELAQAIAVLARAQQDAVWDRTAAHNKLRSHLREYFPGFLAAFTDARGGITRPEARAILAAAPTPAAAAKLTAAQLRALLKKAGRSRGIDTEAQRLRDAFRAGQMRQLPLVEQAMGRQAVALLRQLDAACASADDLEAAAIESFNQHPDAGIITSFPGLGALTGARVLAETGDDRSRFSDARGLKAYAGAAPITRASGKTKSVTHRRVKNNRLAAAGYIWAFSALSASPGARGHYDRRRDAGDRHAAAQRNLFGRLLGCLHHCLLTGQHYDETIAFPTPEPLPAAA

SEQ ID NO: 357530 - protein, 407 aa, unidentified
MSYFVGLDWASREHAVCVINEHAQIVWRTTIPHTAAGLAELRTRLTRLAPPATLPIAVERPSGLLIDSLVDGGFIVVPIHPNVLKASRPRYTAAQGKSDAGDAFILADLLRTDGHRFRPLRPLADDTRALRALVRTRDDLVTQRGALANQLRALLESFWPGAAQIFADVDSPIALAFLARYPTPSSAQRLGEKRLAAFLAQHHYCGRRPVRDLLARLHAAPTVPCGEAESEVKGDLVRALVAVLEPLVRQLQHLTSAIEQAVAVHADGPIVMSLPRAGRINAAQILAELGDDRRRFTSYEHLAAEAGVAPVTQASGKHRAVTFRWACNKRLRLALTTFADNSRHASAWAAQVYQRARTRGCDHPHATRILARAWLRVLWRCWQDRLPYDAAHHRSAHSLPHIAAASA

SEQ ID NO: 357531 - protein, 337 aa, unidentified
MSMYCGIDLHSTKSWVAVLDDQLKVVRERGLKNNLEDIVRLLEPYREEIEGVAVESTWNWYWLVDGLMDAGYRVHLTNTWAAQQWDGLKYTDDRHDARWLAHLLKLGILPEGYIYPKEERPVRDLLRRRTFLVRKRTSFLLSMRGAFECRTGMRTNSNDLKKWEAEDVEAYLDDDMSALGITCLLEPVKALTAQIRTIEKEALKRARLRDEFTPLLTVWGIGKILALTTMYEVGDIRRFRKVGNFASYCRLVDTARLSVGKRKGSGNRKNGNPYLSWAFSEAAHHANRHHEEARKYFQRKKSKTNGIIAIRALAHKLARASYHVMRDQVDFDSTKLF

SEQ ID NO: 357532 - protein, 353 aa, unidentified
MTSTLASHLVGTEFVIGVDTHKASYSAAVVTAGGAEVETLTVPSDAFGHKKLLAFAQRVGAGRRLWAIEGTGSFGRVLTTFLLEQGEAVAEIDRPARPARRNGAKTDLLDATRAAREALARQHVAQPRRRGLREALRVHARTRTTAVRAKSIAICHLKSLIVTAPGPLREQLRRLSDAKLAPTCGRLRTTLTQTPEHRATVHALRATARRILMLEAEAEDHASAIELIVRELAPALLDEPGVGPLTAAELLIAWSHPGRLRSEAAFAQLAGVAPIPASSGQVTRHRLNRCGDRHVNCALHQIVLARSIHHEETRTYLARRTEEGCSPREIKRCLKRFLARRLFRLLERSVMPS

SEQ ID NO: 357533 - protein, 343 aa, unidentified
MNKLNVVGVDLAKHVIQVSVLSRGQRELQNRVLSRRKFAEFLAQQGRSLVAFEACATAHYWARVAQRHGHQVKIIPAKAVTPCGNGHKTDENDALAVAEAALRPKVKLAPLKTVEQQGLQAIQRSRELLVQERTGLSNHVRGLLMEFGIVIPQGYAALYRQLPEVLEDAENELPHLYRPTLHLLWQRLCALHEDIERLNREIEALVRQNPACERLTALEGVGPIGAVLLLATLGTGEAFANGRQFSAYLGLTPKQYSSGGKVALSGISKRVANRRLRAVLIQGARAYVHKLKQPRSSKDHWLAALIQRGGHGKAAVALANKNVRTAWAMLTQGTDYQRAPAGA

SEQ ID NO: 357534 - protein, 350 aa, unidentified
MNITAIGMDIGQRVFHLIAHDAKGHEVWRRALRRAEVLPFMAQVPACRVVIEACGGSNYWGRELERLGHEVVRLPTQHVRAYVRGNKHDYNDADALLEAAGRARHRSVALKGLEAQDVQSLHRVRQTYLKQRTSLVNQWRGLLAEYGVVLPAGITAFRREAPKILATEDPRFTAVLRELLTMQWEWLKSLEAQIATVERRLRQVERDDPRMGLLRGNLPGVGTLTATALVSRIGDGRDFRRGRDLSAWLGIVPRQHSTGGRTKLLGISKRGDPYLRTLFIHGARTVVQHATRKSDPFSAWVNRLRARRGMNIAVVAVANKNARMAWALLHKQAHGLSIRPVSAAADAPTE

SEQ ID NO: 357535 - protein, 362 aa, unidentified
MIGQRTSVGLDVHARSVVGCGLDMQTGEVLRTRLTPAHEDVLGWLRSLPPPVKVTYGAGPTGFGLARALEAAGIECPVAAPSKLLRPPGDRVKTDGKDALHLAQLLALGQVSAVAVPDEETEAARDLVRAREDARGDLMSARHRVTHLLLRQGVGYSGGTPWTREHENWLRTHRFARPALQAAYDAALEAVAATEGRRDRLDAAIAALAAASRFTPIVDRLACLRGISTLTGFALAVEVGDWSRLSPATIGAYLGLVPGEDSTGERRSQHGVTKTGNSHVRRLLIEAAWHHRPPYRPSTKLQRRWSRAPGPVVAHAAKGNRRLHARWQSFDARHKRPVVANTAIARELAGWCQALVIMDPDR

SEQ ID NO: 357536 - protein, 337 aa, unidentified
MKQIKFFVGTDVSKDWLDMCIMLEEEILHRQRIDNKVAAIRKWLRQTRQQYGYLMENTLFSMEFTGIYNNHLLEVLDAAAANIWLIPGIEINASRGLQRSKNDQEDARLIAEYAAGNRKKIRLWKKPRIVLKQLACLLMMRDKLMLTKHQYETTFRESRGYSAKEEYQIVKGHSDPVLKTIHKELEKLEKQLAALIKGDERLKELHGYITSVDGVGIIISANTLVETNEFLDINEGKKFSNHSGVVPHTDDSGKKIKKARVSNKANKKLKKLLHLAAMSTIRMKGEMKNYYERKLAEGKNKMSVLNAIRNKIVLRIFACVNNKRKYDKNYVYSLAIP

SEQ ID NO: 357537 - protein, 344 aa, unidentified
MIKRTTIGIDLAKNSFYFVILNEHGKRTTRKKLTRNQVLPYLVNFEQSVVAMEACSSAHYWGREIQKMGHEVQLLPPQHVKGYLRGQKNDYNDAQAIAEAAQHGAIRPVAIKTVEQQDEQSILHMRRLLIVERTRLINHIRGLLSEYGIVIAKSAAAVRKEIPLILEDADNGLTDIFRQFLNRQYSRLLDIEEELQFHQIYIESTVKDDDTCQRLISMPGIGSIVSISLKSWIGDGKQFKRGRDASAALGLVPRQNSTGGKTVLLGISKRGNSHLRSLVVNGARAVVAHAKNKIDCLSLWINRLVEHRGFNRAVIAFANKMIRMAWAIVTKKQEYRTMEKLIAG

SEQ ID NO: 357538 - protein, 411 aa, unidentified
MPNIEHPVRTATRLDHATPIDMDATLFVALELSLSSWVVVASAPGEDKASKHRVEACDGPGLLALLDRLRLRSEQRCRRPVAVVVMQEAGRDGFWVHRLLEAYGVRSQVVDPSSIAVNRRSRRAKTDRIDAEAMLRTLMAWARGERQVCAMVRPPTREAEDARRLGREREALLAERIRHANRIKGLLATQGVFGFEPTLRDRRARLAEVRTPEGAALPPRLEGEILRQVDRLELAMSQLTAVEAARDAAFAAENVAGPVHGAATSVDDGANGAVALLPQHEAPGARLLRLKGIGPETASVLAGEAFFRDFRNRREVASYAGLAPAPGRAAASTTTRASRRPATRGCVRPWDSWPGCGCATSRKARSAPGIAIASAMDAAVSSASPSPHSRVSCLLHCGASSPRAWCRPAPC

SEQ ID NO: 357539 - protein, 416 aa, unidentified
MKVVYQTCCGIDVHKSFLVATIIKTTSGVDPSYQKKRFSTFNNSILQFKNWLIENQCRDVCMESTGKYWGPVFNLLEDEMNVTIANPKWVKAVKGNKDDTKDSKWIGDLFRLGLVQGSYIPCKPIRILREFTRYRYKLTSCRTSEKNRYQNALTVCNVALDSVVSDIFGKSATSVIDYLIEQSGNSINHEEIASRLLRSLKKKSDSVIESIEGYQMTDPPKYRMRLVRAHLDYITSTINDIDTMLDSLIAPYENAVQLLCTIPGVDRNSAITVISEIGTDMTPFSNSKRLCCWAGLTPGSNESAGKKKSVRITRAGVYLKPALVQVAHAAVKSDKSPYYKQKYERIMKRRGKKRAIIAIDRMILTAIYQMLSTGEAWNPTDLYKTDMPEPLKEKQKEKAIKQAKKLLIREGILSES

SEQ ID NO: 357540 - protein, 449 aa, unidentified
MGKGSGITRGDRRRNAKKARLRALVPHENAVAGLDLGEKRQALAVTGADGLVLARRSPQVSVHDLGPYLDRALEQARAAGYAGLSVACEPTGSRWMALQDLCEARGLPFVCVQPLVSHLAREQEDLTGDKTDEGDSGLIARLARELHCYEPEHLEGAWAELREEGRRRAQLITNATAAKQLLRDKLGLVAPALLESACEPFDSPTWLASLEVVLERCGADVAKVTAMGYEAFAAAVAAVLPGWGGQRVGGTCRQLFRALADGRGVARMRRAALRRARGALADLKYARSRRARAEADMIALLGELGVDVDRICQIPGLSPATVAAILAETGDLRQYESSSSVVKHAGMSPARNESGSFRGQTRISRRGRPALRLAAWRATWAVLRHCDVLAAKHAALTGRDDDSRLTAEQARVACAASLLRWIWSLMVHGTCWDARIAAGQLGHHHAMAA

SEQ ID NO: 357541 - protein, 375 aa, unidentified
MSTMITFVALDSHKKQHSVAVVYPHTGELAQWTVRNSQKDIAKMVKKVKQQAPGNVRFCYEAGVCGFVLKRWIETQGCSCSVIAPSLIPVKPGERIKTDRRDARKLLTLFMNGQLTEVHAPSVEQEAARDLTRCRQAAQEDVQRNRHRLLKFLVRHGYLYSEGDHWTDRHRQWLESLVFEQTLLQEVFDQYVTELEHSEQRLACLDKQVAQLAQSEGYRPVVELLCCFRGIEMLTAITLVTELFEFGRFESPEALMNYLGLVPSESSSGDQQHRGRITKTGNRRVRRLLIQAAWHQRHGYTISKTLRRRRRGQPQWAIDLADKAGQRLRRRYRALTERSKEPCKVVVAIARELSGFIWAMLREYQAQQKQAKKAG

SEQ ID NO: 357542 - protein, 486 aa, unidentified
MAKRKMSTFERLQSGRLNRQQRKELAQRLNASDPGLTIVHPDAAGIDVGNESHFAAVPAGRDAQPVREFGSWTADLQRMAGWLKACGIRTVAMQSTGVYWIAVQEALEQAGLEVYLVNARGTKNLPGRKTDVQECQWVMKLHTYGLLANSFRPPEQIRMVRTIWRHRDRLVKDAGRAIQQIQKALTTMNIRLANAISDVSGVTGLAIIRAILKGERDPRELAKLRDRRIQASEEEVVRSLEGNWRDDVLFELKQVVEGYDFYQQQMVACDQELQKYLAVLPDRKGEREAVVDTAPTKGSKKGRKSKAERRGKTRRKNQPGFDLEAELHRVFGVDLTRIDGIDIMTGQVILSELGPDLSAFPSEGHFASWLELAPRRDISGGKVIKQKTRESKNKVANALRMAAESLSRSDSYLGARYRRLRGRLGGKKAVKAMARYLACLAYRLLTKGQAYVDRGAAYFESRRTEREIVALQRKATELGMQLVPVA

SEQ ID NO: 357543 - protein, 327 aa, unidentified
MSQEKYIGMDVHQATISVAVMDARGKLIMECLLETKAATILEFIQGLRGTLALTFEEGTSAAWLHDLLKPHVSRLVVCDPRKNALLKDGNKSDRVDARKLAELLRTHQVKPVYHGKHGTRALKELGRSYLTITKDVTRVMNRIKSVYRSWAIPCAGTSVYTPRHRAEWLAKLVEPGVRIRAEHLYQQLDSLQPVRLEARRELLLESRKHAAVKLLRQIPSIGPIRAALLVALLQTPHRFRTKRQLWAYSGFAVEIHDSGEYRSVRGKLQRNRERITVRGLNDNHNKDVKSLFKSAAISASTRPGPLLIDPKAGWSLKISRLHASEPN

SEQ ID NO: 357544 - protein, 373 aa, unidentified
MSKVSKFVGLDVHKETIAVAVARGDSAAESLGSIPNDADAVVKLVHRLGADDGLWCYEAGPCGYELQRLLSELGVNCIVVAPSLIPTKPGDRVKTDRRDALKLARLLRSGDLTAVWVPDAAHEAFRDLTRARQAAQEDLTRVRHRLTKLLLRLGVRAPATAWSKAYRQWLDALTLPQSLQQLVLDETRLAVAQGEQRVERLTAAITEAASQVSQAAPIAAWQSLRGIRLTTAAMLGAEIGDMTRFRSPRELMAYAGVVPSEYSSGGSTRRGRITKTGNAHLRFALVEAAWHYRHGPRLSKALKARQQGQPAEVLAIAERAQRRLNSRYRHLVARKTKQQAVVAVARELLGFIWAIAWAVHPDQRLRPAQRQAA

SEQ ID NO: 357545 - protein, 320 aa, unidentified
MSFDLGLDVAKAKLDCALRLPDGKHKSKVVENNSNGFKALIEWLAKHGAASAHVCMEATGVYWEAVAEYLAGKGMVVSVVNPAQIKAFGQSQLVRTKTDQVDARLIADFCADRHPAPWQAPSANEQALRAMVLRLESLQVMRTQESNRLEVSRDVVKPSIAAHIEWLDETIKALAKEIREHMDGDDSLKDKHALLDSIPGLGERTIAILLAYYADLERFGNARQAAAFAGVDPRQYESGTSVKMKPRMSKIGHAFLRKSLYMPALVALYKTAWGKRFRERLAAAGKPPKLIIGAMMRKLIHVAFGVLKSGKNFDPGLHGC

SEQ ID NO: 357546 - protein, 324 aa, unidentified
MNREQKPNVGIDVSKQHLDVCLGSEHQRVANDAGGWEVLTRQFKEAGVDLIVIEATAGYERDLVWTLQNAGLSVARVNPRQSHDFAKSMGELSKTDKVDARMLRDFADVLARHKDRAKYITPLMDAQRLELAQLMTRRRQLMDMSVAEGHRLEHAKGRAVRSIKTVLKTLDKQLEVIDADIDSHLDQHFKSQRSLLDSVKGVGPVTILTLTAALPELGQLGRRQIAKLVGVAPLANDSGQRAGKRRIWGGRSEVRAVVYMATMSAVRFNQPIKAFYDRLLEAGKPKKVAIVACMRKLLTILNAMLRDQSSWSSLKHELSLQQST

SEQ ID NO: 357547 - protein, 338 aa, unidentified
MAILTLGIDLAKNVFAVHGVDEAGKPALVRPEVRRNKLVEVIASLPPCVIGMEACSGAHHWAREFEKFGHTVRLMAPKFVAPYRMAGKRGKNDANDAAAICEAVTRPQMRFVPIKSIDQQAELFVHRARQGFVQERTAVINRIRGLLSELGIVLPLQPTTVRREAHKVLEDLPGWCNIVIGDLLSELTRLDGRIAEYDTHVRHMAQHDDKARRLMQLAGIGATTASAIVASVGNGLEFKSSSQFSAWLGLTPGQHSSGGKARLGRITKAGDSYLRSLLILGARTVLNVAASKSDPVSRWAIKVQERRGYWRAVVAIASKNARMCWAALRMGEAFKVPA

SEQ ID NO: 357548 - protein, 410 aa, unidentified
MIYVGIDWADDHHDIVITDDSAKTLDQFRIDHTCDGFAQLHSHLANHQTSPDLVLIAIETSRGLLVHELLQKGYTVYAINPKAVNRYKDRHVLSKAKSDALDALSLGHLLRTDRHLFQPIKPLPEDYRLLSRLCEDLRKVVDERSRIVNQTISCLKEFYPKALEIFSLNSQIFIDFLKAFPDHGTLSACTKKTFLVFLKKHRYPYPAKAEELWKTIQSPALQPDRVVARTGRLRLGMLLDQLKNLKEHITHYEQEIQVILDSLPESTPVKSLPGVGERLAPELVATLGPNRKDGHHRFHAAEEIAKLSGCVPVVRESGKWRSVSLRYACVKPLRRTFHDWAFASINHSSWARAFYDYHKARNQSHCTILRNLGKKWIKILFAVWLKGTTYNETLHIQNLKARNVPWAMAL

SEQ ID NO: 357549 - protein, 330 aa, unidentified
MKARITQARVTFGFDPKPEVVMTKQWIGIDVSKKRLDIYIRPIGEAFSCDNTPTEIAQLVERLKTKNPTLVVLEATGRLHIEAATAIANAGIAIAVLNPRQIRDFARAAGRLAKTDAIDAKILAHFAEVMQPSVRPLPSEQTQKLNDLVTRRHQVVEMLTAEKNRLQGMSGVVREDIEANIDWLEKRLSHLEQQLQELIEQAPVLQEQDNLLQSVPGVGPVVASTLLAELPELGHLSHKQISALVGVAPLNRDSGQKRGQRRTWGGRSAIRAALYMAAVVGMRFNPVIKRFYERLKKVGKPAKVVLTACMHKLLIILNAMMKHKTSWQPN

SEQ ID NO: 357550 - protein, 401 aa, unidentified
MKYGGIDLHSNNSVVVVSDEVDRVLVRRRVANDAAAILALLAAHREELVGVVVESTYNWYWLVDALQAAGYRVHLANTAAIKRYEGLKHSGDEDDAAYLAHLLRLGILPSGYICPPAARAVRDLARKRMQLVRSRTAQVLSVENMLSRATGAGMRSRAVQRLTAQAVEGFRFNPEVERSMCANVAVIKTLNREIDKLERRLQQCVRLRPEFRLLTSVPGIGQTLATLIMLEVGTIERFATVGNFASYARCVDSARISNGKKKGEGNVKNGNAYLDARFPQGYRDSLLLAPFAQTARRRLRGRSPSLLQTGGLALSEYYSYHISHGENSKHPEGRHARPDSGCGRACAASQRLRWRARRRRDERSRSHPWRLLRALPVARGTVGRSPRARGTGECSRSGAGG

SEQ ID NO: 357551 - protein, 523 aa, unidentified
MVTKEKTRKSAGTKKRFIGKPAGKIQDRVRQCGPEHFGIVTVDCAKRRSRWMLCDFFGRVLVEPRAVEHRRGDMAAMISMINDACEAEAITDRIAAVEMTGIYHRPIQQALRKAGFDTRTVHPFASSHYRKPLHPDAKTDDYDLEAIFHAAINGYGLASLPVSEDYQSLQSLSRHRHNLIKQQARLKVQIRRLMHQSMPGYAELWEDDKLYHRSVALPIALKFSSAEAIAKAGVDGIAAHLKKHKIRFQMRTLERVVAWSRIAAEPSELSAMHTRQWKELNSLRESYDERVRATEPEMAGFLVKTPYVLLLSVTGINVVSASRLAGEAGPIEHYASARAINGRAGLFPSRYQSDEVDHADGTLVRQCNRKLRAAAMLVAENLIKCHPYYRGLSGCWAQQRVDPRDRRCRIANRAIRMVFQIVGGRQLWRGKGVDREYLLAKLQEFHRVHGTPIEQSVRDLHEAFTWLPKSAYAEEAKPLAQLVRKKHRGAKSIGDLLVPLLARLGVGATEEVESKPSEARSSR

SEQ ID NO: 357552 - protein, 356 aa, unidentified
MEYFKDIERFVENKTVFCGIDVHREHWNLCFMCDGQVIEKIKMAVRFSQLLHHLNTKYKLAGRIRLVYEAGFSGFHLQRQLTASGYDCVITPPNRIPSYHDKVKTDKRDAQKLVQYFSGGLLKEVFIPPLSYESDRQILRLRHDYQKKLTRVKTQIKSFLFLRGIQKPDNLCSYWSKKYVTWLSGLEFEYTGFFMTLSSYLAEYKFYRLQLANLTRQLRSLSRRDAYNRQFQLLTTCPGIGLITAMTFLLELSDIVRFPSAEHFSSYLGLTPSQYSSGTHVRLGHITREGNSHVRRVLVESAWTVIRYDPFLRAKYDRIRSKGTNGKKAIVAVARSLAVRLRRCLLDEAAYLATSC

SEQ ID NO: 357553 - protein, 429 aa, unidentified
MNYTQNEKIEQVTDSTMVVGVDIGSQIHYARAFDNRGRELTKRIFSFHNDLEGFNSFNLWAETLKTENKKTAVLIGCEPTGHYLFAFAKYVNDHQKRLVMVNPFSVKKIKELDDNSPKKTDSKDPKTIAKLVVDGRYSIPYMPEGIYAEIRDLVYSRDRIMKQHNISANRIQRWLAIHFPEYLGLYTRFDAISGLAVLEKAPLPKDVIVLGVNGIRKIWHDKRMRGRGVTEDRAKTLVEAAHNSVGLDGGIGTKSELYMLLEEHRLWTSQLEAVNKVLEEMILKVPHVEKLLAIKGVGSITIAGFIAEVGDIRRFDSPKQIQKYAGLELVENSSGKHKGRTRISKRGRRKLRKILYQVMVPLLARNKEFRGIYDYYVTRVKNPLKRRQAMVAVSCKLIRVFYAVLTKGVEYDRFKMMSDIHRKSDIIAA

SEQ ID NO: 357554 - protein, 350 aa, unidentified
MIIGIDPHKLSHTATAMDAATNTATSSLRVGASLAGYRELLGWARQFPDRRWAVENAKGLGCHLAQWLVARGEAVVDVATTATSRVRELTRGGRRKNDVIDASAAASVAALQGDAQVVDAADETTVFAVLEERRANLAAQRVRCVNQLHAVMRDLVAGGVRTALTAKAAGEALRKVRPTTRTERIRKIIAWDLVRDVRNLDRQLNTIAAQMPETLDDYDNQLLEIDGIGPVLAVRLIGRTGRPSRFRSSDAFASYTGVAPIEVSSGQRSTHRLSRSGDRRLNSALHLIAVTQVRMRDSAGHRYFERKIEQGKTRNEAMRCLKRKIASHVWRRMLAAELRRQHHVALPEAA

SEQ ID NO: 357555 - protein, 468 aa, unidentified
MTRARKEVRSAARAAQGDLVITHRHAAGIDVHAAEHFVAVAPEDVPSGFVNPDRKLPVGVGKFGANTADLEAIAHWLKQCRVETVALESTGVYWIPLYDLLASRGFEVLLVDPRQTKHAPGRPKTDVVDCQWIRRLHSYGLLTGSFRPGDEIVRWRGFQRQRESLIRYAAQHVQHMQKMLEEMNVKLTEVVSDIVGLTGMKIIKDIVRGVRDPLKLAKHRHESCKRSEAEIAAALYGNWRAELLFGLKQALKLYEFYQQQLRDCEAQIKACLRSMKDRSDGRPLPPSLRQRKPEKNEVRFGARALLFRMSGVDLTQIEGISETTALVILSELGIDLSAFPHEKNFVSWLGLCPQHRGSGGKIFKRRIRRGANRVARALRMAAQGCHHAHNALGAFYRRIQGRSGGGKAVVATARKIAERVYRMLKFGQEYVRQSEAAYEQAYELRLVKSLAKRAAKMGYKLVPDTATT

SEQ ID NO: 357556 - protein, 342 aa, unidentified
MNQYAGIDVSLECSSACVVDANGKILREARVASEPEALIAWFSSLGFDLERIGLEAGPLSQWLFAAMKAAGLAVELLETRHVRDAFKAMPVKSDRNDARGIAQLMRLGWFRPVHCKSLSAQETRATLTARKLVQSKLRDVENSLRGILRGFGLKVGKTTEREFAGRINELVTDHPHLQRIADALLAVRESLRKEFTAFEKQTRKMVRSDTQARLLTSVPAVGPIIALTYASAIDDPGRFKSSKQVGAHFGLTPKKHQSGETDYTGRISKIGDGSVRTALYEAAHLMLTKPIKGCSQLKSWAMRIARRAGMSKAKVALARRLAVIMHRMLADGTPFNAAAAAT

SEQ ID NO: 357557 - protein, 356 aa, unidentified
MQTQVTKKIDFKGKDLFIGLDVHKKSWSVTILVEGMEHRTFTQPPDPRTLYNYLQKMFPGGTYYSAYEAGFCGYGIHRALNDLGIKNIVINAADIPSSQKDQLQKRDPVDSRKIARALEKGLLRAIHIFDRDMEELRSLNRTRFYLMRDLRRSKNRIKSFLQYYGISIPLEYDNSLWTLKYIDWLKQIQMKTLSGQDAFSNLISSYEYHREQILALSRQIRIRMREYDNELYNLLKTVSGIGPLTSSALITELGDINRFPHINHLSSFVGLVPRVKQSGETSYNAGMTFRCNEYLRTLLIESSWQAIRLDPALMQYYQQHITNNKGQKVIIKVARKLLNRIRYVMKNRQPYVTGVA

SEQ ID NO: 357558 - protein, 349 aa, unidentified
MRFYNQQHRFYCGVDLHARTMYLCILDGNGQVVYDKNLAAEPDAFLKAIAPFRDDLVVAVECLFCWYWLADLCVKEQIAFVLGHALYMKAIHGGKSKNDQIDAAKIARLLRGGTLPQAYVYPAGMRATRDLLRRRMYLVHKRAETIAHIQNTNSQYNYAPFGKKLAYAANREELQVAERFTDPSVRRMIDVDLALIDQYDTLLGDVELYLTRTAKVDDVNTFHRLRSVPGIGKILALVLLYEIHDIRRFPEVGNFLSYARLVRCAHESGGKKLGSGGKKIGNPHLRWAFSEAACLFLRQSERAKKWLQRQEKKRGKGKALGILAAKLGRAVYHVLHKKVAFEEARFWAS

SEQ ID NO: 357559 - protein, 345 aa, unidentified
METMHYIGLDVHKKTIDYCVKDGSGRIYAAGSIRATRLDLDMWMKTLPRPWTAAMEATIFTAWIYDHLQPHAAAVKVAYPLMLRAIAVAKKKNDRIDAKKIADCLRCDFLPECYMASTEIRERRRTLRYRNLLVRQAVQMKNKIAVLLMEAGVSYNKQKLHKVGYFRELLATNPDIDEGLKPLLRLCRETVVHLGKTESALVRSLERDSLLVERVERLMTIPAVGPITALTWALEVGDVQRFSSIKKAISYCGLCGAERSSANITQRTPLSKQRNKHLQTVLIEAAKMAPRNSSELAMVYEHEKQKGNANRATLAVARKMVAYLVAVDRRQKGFLVVENKNRTAA

SEQ ID NO: 357560 - protein, 411 aa, unidentified
MQVLYPRCAGLDVHKDTIVACVRCVSAPLHQEVRSFDSTTSGLLALTDWLALHGCTHVAMEATGVYWKPVWHILEGNFELVLANAHHIRGVPGRKTDVNDAMWIADLLAHGLIRSSFVPPAAIQELRDLTRTRKQLVREIAQHSLRIQKVLEDANLKLGSVLSDILGHSGRAMLKAIVAGEHDPMQLAALAQGNARKKTAELREALRGHITDHHRTTLKLHLDIIAALEHTLAELDAVVGKALAPIRQRARLLTTIPGVSDLTAQVLLAEIGVDMTRFPDAGHLVSWAGLCPRNDESAGKRRSTRVRKSGTWLKTALVTAAWAAVRVKSSYLCAQFLRIKARRGAKKAILAVAASMLTAAYHMLRDGAEYADLGSDYFNRHDVSKTIRRLLKRLADLGCHVDPIAMPSSAS

SEQ ID NO: 357561 - protein, 331 aa, unidentified
MSVHVGLDVGSRTTAMGWRDKGHAAGSWDIAQTPKGRKAAVKKLLALKPLSVVMEATGIYYLDLALELSTAGLPVSVINPKSSRNFARLMLQHSKTDAIDAQLLAEYGERMTPRLWTPPSPAQLELRAIGRHINRLTCHCTRAKNELHALQATETTSAMLIEDEEEAIAMFGRRIERFRRAGRDIIASCPILQEQFDHMVAAPGMGEVSTFAVLAELTTLPVTLKSPQISRYAGLDVRLTQSGTSIDKPGRLSKGGNAYLRSAMFMPAMSAIRCDPYVKAFYDVLVGRGKRKMQAICAVMRKYLTGLWACIRAGEDFDTAKLFSEKHLLKA

SEQ ID NO: 357562 - protein, 373 aa, unidentified
MPRPALTSRLRNLERENPMNVLHYIGFDVHKKSISYCVKTAAGEIVEEGNLPAERNAIRQWAAHRTQPWHGGMEATLFSAWIYDTLKPYATQLQMGHPARMKAITSGKKKSDKIDARTIADLLRCNLFPACYVLAPDIRDLRRLLRYRNMVVQQSVRMQNKIAGLLMETGAPFNKVKLHGKKYFANLLKTLEEVPDSVKDLLRMSRAAMEMFDATQKRLVKQLLAHPELEPRIERLASIRGVGEITALTWALEIADPHRFPSIGDALSYCGLTTAFRSSAGKEQRGPISKQRNAWLQTALIEAAKLAPRWNPQLAAVYARELEHSHHNCATLEVARKLVAYLLAVDKSGQPFQVRIPPATSNTPPATVLAPAA

SEQ ID NO: 357563 - protein, 339 aa, unidentified
MKEVYAALDVSDKTTHICVVDGEGTIVWRGVSASDPDALATVLTKRCPAVLRVVLETGPLSAFLYHGLIERGLPAICVCARHAKGVLSTRTNKSDPHDAEGLAQLARTGWFKAVRIKQETTHIDRAHLKIREQLITSRQAMANQLRGLLKLFGLRLGKVTTPGKRRERLEALFAQKPELRPVMQPLIDGIEALEAQIKRSTKLLAASAETDPVASRLMSVPGVGPFVALTYKSSIEDPGRFANGEDVGAYAGLVPRRNQSGERDYKGRISKAGDAMLRSALYEAANNLLVRVKRPCALQTWGKKLAETKGPKRARVAVARKLAVLLHRLWLSETEFCWT

SEQ ID NO: 357564 - protein, 353 aa, unidentified
MSTSTDHSRTDLPSDLPSDLPSDPGSPGSRMYAGIDVSKAKLDLARSGSGSGSDAVETFANDAAGVGRVVEVLAALGPALSVVVVESTGGLERPLVEALLDAGLPVALVQPGRVRYFAKGLGILAKTDRIDALVLRRFGELAAPRLLERRSKNQAELRDLVACRRQLVQTRAQQYNRRSSTFSKAALRSIDAVVGALDRQVESLDRQIRRLLEADDDFKHLDGLLRGVPGVGPALSATIAAELRELGRVDRQRACALAGVAPFNDDSGAVKGKRSIRGGRTALRCVLYMAALSAMRSNPVIRAFAARLKAGGKAGKVVVTACMRKLLTLINAMLRDGLTWDQLDIVKKLATNG

SEQ ID NO: 357565 - protein, 458 aa, unidentified
MSQAKKRKLKEKKAPELPVLNPMAAGIDVGATEIYVAVYPECDPEPVRCFATFTEDLQRLADWLKACGVDSVAMESTGVYWIPLFQILEERGFEVCLVNARYYQNVPGRRTDVSDCQWLRHLHSVGLLRPSFRPADQVCALRSLVRHRDSLIQAASSHVLRMQKALNQMNLQIHHVISDITGITGLRIIEAVLAGERDPVKLAGLRDGRIKASEETIVKSLVGDYRREHLFTLRQTLAAWRNYQKLMTECDREIEEQLTAFEAKIDVLANPLPAAKVHRRNLYTNEPSFDLHSHLYRIFGVDLTAIPGISVLTAHTLLAEVGPDLSRFRSGAAFASWLGLCPDNDISGGRKLSVKTRPVNNRAATALRMAVNGLHKSQTWLGNFFRRMRGKLGAPKAITATAHKLARITYQILSTRQPYDESIFAKSEETARIRTEAKLKAQAKALGFQLLPVQPTAA

SEQ ID NO: 357566 - protein, 426 aa, unidentified
MSERDYSKQVARRQRIGSTTLVVGVDIGCASNAVGFMSKEGRVLGSYPNMPNSREGFEQFVKMADGLKAKHGLTDVLIGMEPTGHYWRKFAYFAKAKGCEVRFVRTTALKHHRELDESSSAKSDQRDALTLTNITREGKYIDTVIEDGRMRQLRTLVKVREKIQKRNVSAKNSLHAALDDYFPELKEIFWSMHARGLWALLERCPFPVDVVSLKVSVLKELIGRASRRRLEASRKATAVYQAAKESIGLRQIGSADRYRLKMCLEEVKRTELMIKDIEREIKRTLKEIPDAQYLLSIPGIGPLSAAVFLGELGDPSYFQRAKQVVKYAGYDPQENDSGYRVSRKFISKKGRWLLRKHLFLMSMRVVVLSRYFQEYYQRKLQTKNRFGQLPRKKEILCAVAIKLIKVIFALLRDKRNFEDTVACSVE

SEQ ID NO: 357567 - protein, 372 aa, unidentified
MGHHTEVFVGIDTSKSRNAIAIADGGRGGEVRYLGEFSATEAAIRKLVAKLAEKYCHLTFCYEAGPTGYGLYRLLKSLGHDCLVVAPSLVPKKAGDRVKTNRRDAVSLAKLLRAGELTAVWVPDERHEAMRDLSRARQAVKKDLQGKRQQISSLMLRLGRIYPGKTTWGPAHMRWLMSQKLEHREQRIAFEELLEGIRQESERMERLEDAIREVVPEWSLAEVVAALQAMRGIDLIAAVGVLAEIGDPSRFQNPRELMGYLGLVPTESSTGDKVKRGGITKAGNGRARRILVEAAWSYRYPPRVSRDKQPKVEAAPRRAREIAWKAQTRLCGRFRSLERKGKRRTVIVTAIARELSAFIWAINRELMPPRQA

SEQ ID NO: 357568 - protein, 358 aa, unidentified
MKYVGIDVHKKMCQAAVLDGNGELLDETRFMNTVEGIEEFTLKLSAYRDEVRAVVESTGNLWIQVHDRLEEHGYDVALSSPANSRLVSESRVKTDRTDARALARLHRAGVLSTCFVPGEEERSRRELLRHRLRLVKNRTAVRNRVHALLDKHGLRIPYKTKFSKKAVAWMRELSLGFMDDAILRSDLALLEALDEQIGYVEEKLAALSVDDARVRLLMTMTGVDYFAAMLVLAEIVTIDRFSSDKRFSSWMGLAPRVRQSGEKTWIGGVGGPGNRRMRWLMVQCAHSACRYDPRLRRLYERHSRRKGGKSAVAAVAHEMARIMYFMLKRNEPYRGVNRGLWERKLKSLEKRALSGLRN

SEQ ID NO: 357569 - protein, 330 aa, unidentified
MYLSVQSLGIDVSKATLNYCLLGSGGEIKEEGVVANDATGIHELSSMCGDDTGSIHVVIESTGDYHLLATLMLNEAGYCVHLINPLLTHMYQRANVRKCKTDKADARLLGRMGVEHREDLSVFHLTTDQVVLKKKAALIHQLTKTKQRLASSLRQTKETLDILGDGSSAIETGDKAVKAIEDTIENLEKEVTDAGKQDPMVAKLAEIPGVSEKSAALLMSAFLGKRFDSKEKMTAFAGLDVSVRQSGTSIRGKGRLSKRGNPGLRKTLFGIAWGLKQHNEAFKRLYDYYRGKHKHYTAVMNILARKFLHVLFGMMKNQTPFNPAFIKLPA

SEQ ID NO: 357570 - protein, 390 aa, unidentified
MNYLGIDVGKFSHAACLIDETGRKKIFQIPSNKHGFEKFGKLVKSLKVDELLVGMEATGHYFLNIYDFLLGLGLSSENVAVLNPLQVKAFRNTNLRGAKSDDIDATRIAVLLRFGDFQRCNVAIDKLMNLRELTRLRSELVSNNGDIKRKIISVLDRIFPEFPTVFSNCFGKTAMYLITKYPTPEDLGSLSLTKLEKTIKRLSKRGISKGKIEKLHHLATNSIGIKLGVEAFKIELQILIARLKMCKEQITDLEKKISKIVSQFPNHIFSIPGVGVSTGATILAEIGDINNFKSSIKLIAFAGLDPKLKESGKYQGRTPISKRGSKYLRNAIWQSAMVAARVDPMFKKIYQDKRDKGKSHKYAVTATANKMAKVIYSVLKNNRSFKEQVP

SEQ ID NO: 357571 - protein, 374 aa, unidentified
MTKIARIGIDTSKGSFQLHGVNEKDEVVLRRTVRRRQFLEFMAKLEPTVIGLEACGASHHWARELRRLGHRVMLIPPQAVKPYVSPGRKNDKNDAEAICEAMSRPRVRARLVPIKSVEQSASQMLMGVRDSLLKRRTQLCNTLRGHAAEFGLVAAKGLDKIEPLLARIAGDEGLPALAREIFADLGREHAELSKRIAQIDRKLAAFHRANELSRRLMEVPIVGPVGAGLLITKIVNPHGFRSGRLCAAWVGLTPKDHSTGGKQRLGGITRAGDESLRAVLVSGATAYIQQVRRGRIVPSPWLAALLERKPPKLAAVALANKTVRIAWKLMTSGERYDPTHGVGREGLGASLYGGLRAEPLAPSPTGGDSHAVAA

SEQ ID NO: 357572 - protein, 409 aa, unidentified
MDQLIERCCGLDVHRDTIAACVRVPGPNGKRQHEVRTFGTTAVELLALRDWLEAHAVTHIAMESTGVYWKPVFYVLEEAFTCLLVNAAHIKQVPGRKTDVKDCMWIAQCLEHGLLRGSFVPPAAIREIRDLTRHRKVLIQERTRAANRVHKLLEDAGIKLASVATNILGVSGRAMLEALVHGTTDAEVLADLARGKLRKKLPALRQALAGRFRPHHAFLVSQLLAHVDYLDEAIATVSEEVEGRLAPFAAQLTQLDTIPGINKRTAEVIIAELGVDMSCFPSDRHLASWAGICPGNNESAGKHKSGKTRKGNRWLRMTLIEAAAAATRTKDSALQARYRRVMRHRGHKKAVVAVAHAMLRAVYHLLAEGTTYREPGAAYYDRRHTHRVTRRAIQLLERQGYRVVLEPAA

SEQ ID NO: 357573 - protein, 363 aa, unidentified
MLIIGIDYHPSFQQIAFMDQETGEYDERRLNHSDGEAERFYRELKQRRVSVRVGMEATGYSRWFERLLAELGFEVWIGDAAEISRQRVRKQKTDREDARLLLRLLRENRFPRIWVPSPENRDLRQLLWHRHRLVQMRTRIMNQLQAVAMNEGYRWKKKLFSEQGRTQLEKLSLAPWASRRRKELLELLDQLDPKIAELTTAVEQEAQQRPEVLRLMTHPGVGSITGLVYVLVIGTPDRFPCGKQIGSYTGLIPSEDSSAGRQRLGHLSKQGNALLRYLLGEAAQAAARCNPHWRRRYVYLAMRRHKNIAKAAMARKLAVRLYWMWRNGWNYSQFVEFGSHAGKLATGHGLKKSVVHLIGHPAP

SEQ ID NO: 357574 - protein, 376 aa, unidentified
MNSVAVVPLDIHKRFSKAVEMGEGGEVLGEARVSHAGRDEMKKYFSRFPAGTDVVMEATFNWPWIADAAEEAGLRPHLAHPMRAREMAKGMAKSDRKDAIFLGKLWLAGDIFPESYLAPPEVRRMRGLFRLRLTLVSMRTALKNAIHGQLHRQGILISECSDLFGKSGLAILEKLPMKEHERWQLDTKLSVLGDIGLYVKEMEQKIRRELKTDPRAQLLMSLPGVGEITAYSMLAEIGEIERFHNSRALASYAGLLPLDNESAEKDFGKRTGAHCNRFLRWAMIEAVTGAVTASGRMKSLYMRVKNRNKDKPQKARIAVARELIELSHLLLTRKVKYEEKRPPRPGSKEVGDGTRPNRASQSALCARSPQASQAAL

SEQ ID NO: 357575 - protein, 380 aa, unidentified
MLLVTDGGRKHVFGPVEFAMTRSALSAMVDRVSAVVAASAQVKVGVEAAGHYHRPVLDYRWPAGWEVLEFNPAHVAEQRRVAGRRRVKTDVIDLEAITDLMLAGRGQVITDREVRIGELAAWATHRSRRVASRTATKNQLLGQLDRAFPGLTRALPDVLGTKIGRLVAVEFADPARLSALGVKRLIRFAAAREVALRRPVAERLLTAAADALPTRDAVVARRVLAADLELLADLDTQIVDAESELAALLPLTPYATLTSVPGWGVVRVANYAAALGDPGRWPGPRQIYRAAGLSPMQYESAGKRRDGAISREGSVALRRALIDLGIGLWLTEPAAKTYAAGLKARGKHGGIIACALAHRATRVAYALVRDRSRYESARWT

SEQ ID NO: 357576 - protein, 344 aa, unidentified
MSHSTIAVDLAKSVFEIAVSNHPGHVSEHHRLSRPRFERFFAERQPSTVLFEACSSAHHWARELQRLGHSVILLPPHATRPYVMRNKTDRTDTKALLEAFRNQDIHPVPVKSLDQHVLATLHRYRSAYIANRTARINTTRGVLREIGIFIPMGASRVVSTVRSLIEDPDSTIPPTLRPTLHEACTEISHLESRTRDIERQIQSLARENPVAARLQTIPGIGILTATALVAFVGDVRRFPSGRHFASYLGITPREHSSGLIRRLGSISKRGDPYLRMLLIHGARSVLWAAKKREHPNRLEIWALNIERSRGHNKAAVALANKLARIAWAVWSKDRDFEITTEVIE

SEQ ID NO: 357577 - protein, 434 aa, unidentified
MEEAHDEPLFCERAAGIDIGKQMIMVTIRVPSDRRMGGRQQETREFGTTRRQLLALADWLRCWGVERAGMESTSDYWKPVFFLLEREGFDCVLYQASQVKAQPGRPKTDKLDSVWLAKVTERGSLRGSFVPPEDIRRLRTHTRYRRRLTQARTAEKQRVEKLLEDAHLKLSSVISDVHGVSGRAMLEALIGGERSPRVLAEMARGRMRVKIALLEEALDCSFLTGEHVFVLSMMLDNIDHYSAQIAVLDERIAALCEPYERQVAQLDTIPGFGVTTAQDLIAETGTAMSAFPTAGHLCSWARLTPRVTESAGKRKGKNATGRGNPYIGGALGEASAGAARTQTFLAAKYRRLCRHMPKKKAQVAVMRTQLSAAHALLSDPGASYQDLGPSYYEQQADARRSTRGHVRSLERLGWKVTLEPVDPDTGEVTAPASS

SEQ ID NO: 357578 - protein, 349 aa, unidentified
MPPVPPEQLLGLDARIRKVGKAGGSRGGKGAIVDSEKLFVGIDVGKYHVDMALSGESDVRQFKNDDGGIEEILRLLQGRSVGLVVLEASGGYERQVLASLLGASIPAVAVNPRQARDFAKALGKLEKTDAVDARMLARFAESVRPAVRPRPSEEIAEVQEWLSRRRQLVEMLTAEKNRTQHAKGGVLKDIREHIEWLKKRIRDNERELGDLLKDAPEWNAEVEMLDAIKGIGPVSALTLLAAVPELGTLNRKQIAKLVGVAPLCRDSGTLHGKRTCWGGRAEVRACLYMAALVATRANETIRTFYGRLLAAGKPKKLALVACMRKLLTILNARVRDHRAALATPRLGPS

SEQ ID NO: 357579 - protein, 342 aa, unidentified
MKVATIIGIDLAKSSIQLYGVDSRGKAVLKKKLPRKQILTFFANHPQCLVGMESCATSAYWQREIAKLGHTVKRIHARFVKPYLMADKNDANDAAAICEAVSRPHMRFVPPKGQEQSDIQALHRVRSALIQERTAKFNSVRGLLAENGIIIAKGAAHVRTHLPLILDDYENALSATVRILLRKQLDLIDVLDEQLNELDGMVKTLVKEREECSRLKEIPGVGDLTATILAAVLGNGNNFKNGRQFAAYLGLVPRQHSTGGKSRMMGITKRGDTYIRTLLISGARAVLASFSRGRKPLKEKTQWLEDIYIRRGHNIACVALANKMARIAWSLITHQTSYRPTI

SEQ ID NO: 357580 - protein, 359 aa, unidentified
MKARLSKKQEWFKRISLTKDDEIYVGIDVHKKSHSVAIWLNDAPAIDFVMPADNKKLIKRLEKLRIATKMIVYEAGPTGYALARQLQKASLPIKIIAPSKTPSPSARDSKTDQLDCRKLAQYAAKGLLRPIAIPTRLQEADRQLTRTREQQVTRQTRIKLQIKSFLLQHGLKEPVGLSSWSIKAVNELKVINISKQLRFSLNILLEELNFIQTQIKKTEKQLEKTFSEKRHSAKMKVLPTHPGVGPVIARQFTAEIFNPKRFADKTELAKYVGLAPTIIQSGQSRRDGPITKTGRPQLRSNLIQGAWRWISKDQKAYKIYQRILHNTGEKNKAITAMARKLAIHLWKMSCDIKQYDPAA

SEQ ID NO: 357581 - protein, 333 aa, unidentified
MELEALYKRVIGLDIHQAQITACALIEQTDGTTRIEQRQFGAFKRDRKELATWAASLQPDEVVMESTGIYWKSPYAALEAVGIRAKVVNARHVKNVPGRKTDMADAHWLAMLCRAGLLRGSFIPPANLRELRLVARQRQKLVGQLASEKNRLHKVLTDSGVRLAVVVSDVHGKSARAMVKAIIDGQPPHRVIQLASQRLKASRADILDALQGDVTDTHRFILGELMQHIEEIEARIARFDARLLAGLEREHSTLKLLQTIPGVDLIGAAMLLVEIGSDMDAFGHPDRLASWVGICPGNNESAGKRKSGRVRKGNPYVRRLLCENAILLAGSRP

SEQ ID NO: 357582 - protein, 445 aa, unidentified
MNQSPPKKVKHVGLDVHATSHDVAVAESGCEEVRYYGQIPGTPEAVDKLLRKLGGEGVELRVCYEAGPTGYGLARHLLARGISCRVVAPGLIPRKAGERVKTNRLDAQRLARLSRAEELTFVHVPDPGDEAIRDLVRARTAAVEDLRRQRQRLLGLFLRQGRRYPGKGRNWTRAHMAFMASMEWEREEHHFLCQEMLQAIDTEQARVDRFTAALERRLAGWRWAKVVAALRCLRGFDTVSAMTMVAEVGDFSRFESPEKLSAYLGLVPGEESTGSRRIQGAITKTGNDACRRTLVEAAHHYRCAPAVGAQLRGRQEGQPEVVVAHAWQAQVRLCGRFAHLKSQHKKTVVVVTAVARELAGFVWAVAMLAMGKRLPERSHRRASPRVPLGKAPKGSAGPAEKTKTAVQKTKSPRIYELRPIEETGGAASRTIPTRRRAATGSSPKA

SEQ ID NO: 357583 - protein, 344 aa, unidentified
MEITTIGLDLAKSVFQVHGVDATGQVVVRRSLRRAQMLPFFARLPSCLVGMEACGTSHYWARELIKLGHQVRLMPPAYVKPYVKRGKTDAADAEAVCEAVARPTMRFVPVKSPEQQAALSMHRTRDLLVKQRTQLVNMIRGLLAEFGMDIPKGLERALLMARRIVDGEAPDVPMEAAKIVGTLSQQALDIHVRLREIDRDLLVWQRGNDVARRLMTIPGIGPVGATALAASITNPHQFRSGRQFAAWLGLTPLQKSSGGKERFGRITKMGDKYLRKLLIVGMTSLVRRAKYNPKTVNPRLADLLARKPVRVATVAMANKTARIVWAVMARGEIYRADHRPALAT

SEQ ID NO: 357584 - protein, 316 aa, unidentified
MKIVRPICCGMDVHKNIIVATIGITNKKTRITEYIQETFSTLNPDLLNLKQWLINHKCFDACMESTGKYWIPIFNILEVEINIYLTHPKYVKAIKGKKTDKKDSKWICDLFKHDLIKFSFIPPKEIRALREISRYRYKLVGMRSSERNRYQNCMTVSNIGIGSVFSDPFGKSAQAIMKEVLESDIIEDEKILKCIHGSCKNKDKILDSIKHCNIETDQRFKMNESMTHMEELQVHINNCEIEIMKRAAPMFDRFMHITQLPGISTLSAILIISEIGVDMKQFESDKQLACWAGLAPANNESANKKNQFVFLKQVNI

SEQ ID NO: 357585 - protein, 369 aa, unidentified
MSEITRGEIVRVGVDLAKHVIQVHAVDQTGRTVAAKPLPREKFLAWCTLQLPPGCLIAMETCGGAHHWARQLQALGFDARLIAGRFVGPYRMQGKSGKNDANDAAAICEAASRPSMRFVPIKSAQQQALLCVHRLRDGYKEERTACINRIRGLLTEYGLIFAQSPEVLRQALPDTLEDASNELPTLARIALQRAHLQWTEIECHIAWCDERIAAHVRSDAQAKTAAQLCGIGPVTASALVASVGDFTQFKTGAQFGAWLGLVPSQNSSGGRTSLGRITKRGDDYLRTLLIQGAKSAVMSAHKRSDRISQWLVQLKERVGWQKAVVALANKNARIVWAVLAKGRVFDPNHVPVKPGEIVGEVNSAMAAAT

SEQ ID NO: 357586 - protein, 366 aa, unidentified
MKKISTVRVNGNMIFKGHKLTIGVDLGDRWSCYCVLDEAGEILLEQKVATTPEAMKQIFEKIPRGLIAMETGTHSPWVSRLLKELGHAVLVAHAQKVQLITKSNRKDDRHDARTLARLARIDPQLLGPVRHRSAKAQIHLTVIRARAELVSARTGLVNAARGLAKSYGERLRKCGTQQVSRELAAELSVELREVLEPLLKEIESLNERIKEYDVRMEQIARESYPQVELLKQVKGVGTQIALTYVLTLDDPQRFPKSREVGCFLGLRPGRRDSGESHPQMHISKEGDPYLRTMLVQGAHYILGPFGEDSDLRRWGLKLAARGGKSAKKRAVVAVARKLAVLLHRLWVSGEVYEPLRNSQKAMRAAA

SEQ ID NO: 357587 - protein, 402 aa, unidentified
MREHEPAPELWAGIDAGKGHHWITVVDGTGGRRWSRKVENDESAILDALGLILPMARTVHWAVDISGTSCALLLALLAAHGQQAVYVPGRTVNRMSGAYRGEAKTDERDAYVIAESARQRRDFTAIDVPAQLAADLAVLVGHRKDLVADRVRMINRLRDTLTGIFPALERAFDYSSQRGALVLLTGYQTPAALRRVGQARLERWLAKRNVRGAEQVAATAVHAARAQHTTLPGQQVAAEIVADLATQLLALDERIGRIDKQVTAAFRTHPQAAIIESMPGIGPILGAELLAAAGDFASYTDDGHLASAAGLVPVPRDSGRRTGNLHRPKRYNRALRRVFYLSAQTSIIRDGPNRDFYLKKRAEGLKHVQAVIALARRRISVLWALLRDNRTFTPHAPATQTA

SEQ ID NO: 357588 - protein, 422 aa, unidentified
MNEPTQEPFDGFKYFAGFDWASDSHHVVIVDGSGNIVLSVCIDDAAPGWARLREKIQNLPGLAVAVETNCGPAVERLLEMGLAVYPLNPKVAERYRDRKSPAGVKSDERDAFSFADALRTDGHGWRRLRPQDPLTAELRLLCRDEIGLIEQRTALVNQLRAALHEYYPAALEAFEDWVSKPAWEFVIAFPTPQSLVIAGKRRWQRFLHTHKLYRPQTADKRLEIFSRASAFASPSVAVTSAKSLLAVTLAKQLCLLESQLNEYRARITKLFNDHPDKDCFGSLPGAGEKLAPRLLAELGTDRQQFDSPDALRCFAGTAPVLKESGKKRFVHLRRACNKHLRHAVHLWADKSRPWCAWADAYYQQKKSQGLTHAAALRCLGQRWLKILWKMWQTGSRYDEALHTRNQIKHGSWVIQLTSPANA

SEQ ID NO: 357589 - protein, 408 aa, unidentified
MLFVGDDWAEEHHDVELQNETGRVLARAKLPEGVAGVTRLHAMIGEHIGEDEDEPTVVVGIETERGPWVQALIAAGYQIHAVNPLQAARYRERHSVSGAKSDTGDAHVLADMVRTDRHQLRPVAGDSAEAEAVKVLSRAHKTLIWERTRHLLRLRHTLREFFPAALVAFDDLTATDALELLAAAPEPTAAAALSLDTITAALKTARRHNRAAKAEAIAAALRAEHLGQPPVVAAAYAVTVRAQVAILSVLNTQIAELEEQVEANFSQHPDADILLSQPGLGIVLGARVLGEFGDDKQRYTDAKARRNYAGTSPITRQSGKKKVVMARYVHNDRLLDALGRQAFSALRTSPGARAYYNRIRARGTGHQAALRQLGNRLVGILHGCLKTGTRYDEAKAWAPTQQDQQLAA

SEQ ID NO: 357590 - protein, 410 aa, unidentified
MPLLSPPTVFVGIYWGGSEHEVRVLDHDGTTLTRQRVSHDRDGLEELDQLLSQFAEFHPVVAIERAEGLLVERLQANGWPVYCISPKLSARARERYRLANTKSDAFDAYVLADSLRLQHEQWHPMARASDLTAELACLARDRERITQSQRQVESRLRATLEAYHPAPLHLFSSLDRDITLAFIRDYPNPHAASAVGVERMRRFLRRNHYSGRTSPEELTSRLKEHLLQAAPGSEQGRQRLALHLVDQLSLLNTQLDDYDKALAELVPSHPDGALFLSFPGIGPVIAATLIGEMGDDRSRYPHAAALLADAGLAPVTRASGRTRQVRFRYAANHHLRHAIDCWMTVAARDDPWSHEIYQTSRAAGQGRYRAYRGLGARWTRILWRAWTDHQPYDTERHHAPKTQPDTPGQA

SEQ ID NO: 357591 - protein, 391 aa, unidentified
MTKPKSKTVNDFSRCLDPLDMDATVIAVIEMSQSSWLVAGIVPGVERQPLKKLAISEHGLLNLLNRWRAEAEKQGHRITRIAVAFEAGHDGFWLARWLAARGVEAHVIHASSVAVTREHRRAKTDRLDTELLKRGFLGWLRGERGHCKMVAVPTLAEEDAKRPSRDRETLVGEASRIITRVKSAFVRLGIRGFNPKLKAAATRLETLRTPEGEPIPPNTLAALKRDLERHRIVKQQIREIEQTRLDVLKQAPEKGPHAMVLLLARVIGVGVETADMLVREVLSRTMRDRRAVGRYAGLTGSPDESGAKRRDKGLARSGNARVRHGMIQLAWRFLLFQKDSALAQWYRQRTADAPSMRKTLIVALARKLLIALWRLARDGVVPEGVRMRPAA

SEQ ID NO: 357592 - protein, 337 aa, unidentified
MSYLGVDLHTNSFTVCYRNCQGKQRIETFDIRRIDRFRKTLRKADEVAVEATGNTAWFVERICDRVSRVVVVDPHQFEVIRRSVKKTDKHDARTLAYFLSKDMLPEARMKSKENAQLHSLAGTRDKLVKQRTALVNKIYNVLNRHGLSWKKETLTTEKGLKSIMAFDWEPIVRMELEVLAEQIRSLTRSIKKLDDQISQEGKKLDGHKNLTSIKGIGERSATVLLSVIGDIADFADENKLAAYFGIVPRVSDSNGKIYHGRITKNGSKLGRTTLVQCTLAAKRYSPYLCEHYERIKRHRGSGKAIIATARKFLGIIYQTLKNDWIFEDFPNFVIANT

SEQ ID NO: 357593 - protein, 374 aa, unidentified
MTASKEVFVGIDVAKLRNAVALADTGRDGEIRYMGEFDASPESMTRLIKKLAAKYDELHFCYEAGPTGYGLHRLITELGHSCMVVAPSLIPRKAGDRIKTNRRDATGLARLLRAGELTPVWVPDPAHEAMRNLIRSRTTTVETIRSHKQQVGAFLLRHSRIFPRHKQWGARYRRWLQEQSFEHPADQIVLQEAIQAVRLAEERLSRIEKAITEFLSDWHLRPVVEALQALRGIDLVVAASFVVEIGDIRRFAHPSQLMGYLGLVPAERSTGETVRRGSITKMGNVRIRQLLVESAWTYRFPPRVGAKKQRHLDKVSSKIREIAWKAQSRLSARYRAMAARGKKSTVVCTAIARELVGFMWAVAMEVQPAASPAA

SEQ ID NO: 357594 - protein, 315 aa, unidentified
MNTIEQPNQPVHIGIDVAKATLQIDLLGKSRKLPNTTAGHQELLGLLPGNAFIIMESTGSYHIAALECFQAAGISVAIVNPVRVKQFGKARGTLAKTDPVDAALLSAFGRAFLPHPTPPRDPERVLLSELVNLRDTLSAQITLWNNLVEHQQSAAARKLSEAQARAASKAMADVEVRIAKLIKESKTMAPVADVLRENKGVGAVTVAVLLAEMPELGHLNRREAAALAGVAPCANDSGKHEGKRYIRGGRPRIKRALYLASLSAVRHHATLSPTYKTLRASGKPAKVALIAIARKLVVILNAKLKEHYATLAQPI

SEQ ID NO: 357595 - protein, 412 aa, unidentified
MQDILTCVMGLDVHRDIIVACLVRGAVDAEPEAETRTFSTLIPEMQKLRDWVIEAECRNIAMESTGIYWQPIYEMLESCFDGEISILVVNARHMKNVPGRKTDMKDAQWIATLLRAGLLKGSFIPDKTFRELRHLTRYRKSVVHDITAQKNRIDKFLQSSGFRFTAFLSDTFGASGRNIIRHLIEHGSIDREALEKCLKTKTRNRIDEILVALNGSLSVHQRRFLNMVFLHLEDLEAHKHTIEDEITEEVLKHTDALNLLCSIPGIDVTAAAAIVAEIGTDMSAFPDSKHICSWAGLSPGNNESAGKRKSVHINKGNPYLKSMLCETAWIMASHRKLYLSGWYWKVKQRKGAKRATIALARKVLSIIYTMLKTGTPYSEECFEQRRQRCERKRANRMVNELQKLGYTVVAPD

SEQ ID NO: 357596 - protein, 357 aa, unidentified
MGKSIIDTSSVTHVGLDLAKRVFRIHAVDTTGSVVIARSVNRRTLLKFFDALPRCVVAMEACSSAHHWGRQLLELGFAVRLIPPAHVKPYVRRNKNDAADAAAICEAAGRPGQRFVPVRSVENQAALMRHRARELMVEQRTAALNALRGHLSEIGVVAAQGVQNAYVLKRLACDGVDDDGEIVVPDCVRLALAPLVRQIDALDEAIEAIDKTLEASARTDETARRLMTIPGIGPVTAMALLATIQDFAAFSSGREFAAFLGLTPREHSSGGKPRLGRITKMGDRYLRKLLVQGACSALGHRKGHNDALRRWASGMLERKTVKYKFKLTAVALANKLARIVYALATKGGHYDDRPVAA

SEQ ID NO: 357597 - protein, 340 aa, unidentified
MKELATIGVDIAKIVFQLHGIDAEGKIILRRKVKRRDFLTFFTNLHSCLIGMEACSSAHHWGRELTELGHSVKLMPAVYVKPYVKRQKNDATDAEAICEAVTRPTMRFVEIKSEDQQAVLMMHRARQLLIRQRTMLVNALRAHIAELGMVRRQGITGANQLIALIECEDDESIPNVARTALTPLVRQLRTIQQEVDHLQDAIQDWHKQSDLSKRLETIPGIGPITASALAATVTNPEVFKSGRQLAAWIGLVPRQNSSGGKTRLGRITKQGDPYLRRLLVLGAHAVLRFRQHGKAASTRWAASLLERKPYMVCAVALANKMARVVWAIMMHGSKFEVQRA

SEQ ID NO: 357598 - protein, 344 aa, unidentified
MYSFYLGLDLHLKKTYAVLLDAQGDTLDERQIANEELPIYLQQVVPPKTYAVLEATRNWPFLYDLLGEYVERVELAHPKELKAISSAAVKTDRIDARVLAQLARLNYLPIAYAAPATTRDLRILMRHRSQLVWARTRAKNRIHALLAMYNLRAPVSDLFGVSGREILEQELCPQLRPAARNVLGNHLSLIDDLNQQITATEAALELTPEQKQAVRLLTTMPGVGKTIARIIVAEIGEIQRFHSPKALCNWAGLTPRVRQSAAITHRGPITKQGSPYLRAAMTQAATIASRYSKRWYGVYEHLARRCGKQAAKVAVARRLLTVVYYLLKRNEPYQEDYQRKHRGA

SEQ ID NO: 357599 - protein, 403 aa, unidentified
MNNVAGIDVSKGKSMVSVLRPFGEVVAKPFSIGHTGSELKELADYLKSLDGETRVVMEHTGRYYEPVARFLHEEGVFVSAVNPKLIKDYGNNTLRKVKTDKADSRKIARYGIDNWAELRQHTPMDTIRMHLKTLNRQQSLYTKTKTMMKNNLIALLDQTYPGVNALFDSPVREDGSQKWVDFATAFWHVDCVRSMSLTAFAERYRKWCKRHGYNFSQSKAVEVHAGAQDLIVMLPKDALTKTMVRQAIDALNAVSASLERLKAEMRTLAAQLPEYPVVMAMHGAGDSLGPQLMAELGDVTRFTHRNAITAFAGVDPGADQSGTHEAKSTRVSKSGPPELRRALFLVMDCLLKTQPQDDPVYRFMDKKRAEGKPYLVYMTAGANKFLRIYYGRVKEYLASLEGN

SEQ ID NO: 357600 - protein, 460 aa, unidentified
MNPKRSKSRNGGKMPMVHPNAAAIDIGATMHMAAVRADRAPEPVRSFGTFTADLHRLVDWFTECGVETVVMESTSVYWIPIFELLDARGFTVFLVNARDAKHVPGRKTDVSDAQWLQRLHSFGLLRASFRPKGQIAELRAYVRQRERLLEYAASHIQHMQKALTEMNLQLHHVVADITGATGLRIIRAILAGERDPEALACLRHYSCHSSAETIAKALTGSYRAEHLFALEQALALYDAYHEKASACDARIEAVLKELSIDRGGCHGSAPRVSRRRNRTDQANALTFDVREALFALLGKDITTIDGLGPYLSLKLIAECGDDLSSWPSAKHFTSWLGLAPSNKVSGGKLLSSRTRRSGGRAAALLRLAAVTVGRTDTALGAFYRRLSARIGKAKAVTATARKIAVLFYNAVRYGMDYVDPGASSYETRYRARVVSNLHRRARAFGFVLQPLEPKVGAAVS

SEQ ID NO: 357601 - protein, 403 aa, unidentified
MNSVGIDISKGRSTVAVMRPFGEVVISPFEVRHTDSELSELARQLKSLDGETRVVMEATGNYHTPVAKLLHDAGLYVSVVNAKLVHGYGNNDLRRVKTDKKDSVKLANYGLDRWLTLPRYIPEEDTRLLLKNCYRQYRQYSKVQTVLKNNLISLLDTVFPNANRLFSSPIRGDGSEKWVDFVAEFWHCRCVSEKSERAFTSKYLRWCRKHGYNFSEAKAHTIYAEASGHIGVMPKSETTKLLVEQAVAQLRATSTALAALKHEMQALTSMLPEYPVVMDMFGVGPTLGPQLIAEIGDVRRFYSKKALVAYAGLDAPPNDSGDVTGRHKSMSKIGASSLRRTLFLVMSVYLQTAPLDEPVCQFMDRKRAEGKPYRVYMMASANKFLRIYYATVKAYLESLEHTA

SEQ ID NO: 357602 - protein, 350 aa, unidentified
MQGTGRWIGLDLSKETYEMCYFDQKGKVGRSGGETTKGGRAKLYAKLKAEDIVAMEVNSLAFVMEKEMRTIGCAVVILDASQLSIIYASTKKTDKEDALKLARLVKIYEKEDLPIVDVPTEKEYYRRKLTKECKTLKDDRTQEINRLHALFLQCGITTMKRSNLQTDANRQKVLPQLFGYEVGQAKRVCERLTLLEAQIKELEQTITKECKADKDIERLKTIPGVGDKTALAFTAYVGDGKRFNNGDEVANYLGLVPRGDCSGSINRYGHITKKGNRIVRALLYQAAWSIVRSKHGGALKAKYFYMTEHGKGKKISITAIARKMAKLLYLVMKNKQMVYQELPFPDLQAG

SEQ ID NO: 357603 - protein, 320 aa, unidentified
MSPNTTNTMTETNSVVHAGLDIAKAQLQLHLQNQQHVLPNTVTGHQRLIRLLRVVAGVHVVCEATGGYERKVVSALHSANLPVSVVNPAQVRHFALAQGQRAKNDPIDAALLTAYGHALRPNATPVPQAVLAELRELVQWRDHLKEQLVRARQPAEHATLAFVRRQQSKEARHLEKQMAAVEKELAAALTRHPCWREQVQRLAELDGVGTLTAVSVLSQMPELGHLNRGQAAALAGLAPWTRQSGPWEGQRHIGGGRAVVRRALYMSAVALARQTGSTLGKFYARLRAAGKPAKVALTAVMRKLLLQMNQVLKYHVPDPA

SEQ ID NO: 357604 - protein, 344 aa, unidentified
MDHFAGLDVSVKETSICIVDDAGKIVREVKVASEPEALLAVLKNPAYHFKRIGLEAGPLSQWLFSALAEAGLPVICVETRHMQAVLKAQINKTDRNDARGIAQMMRAGLYRPVHVKTIRSQKLRMLLTHRKLLQSKAIAIENDLRGTLRNFGLKVGMVGKVKFEARIRELVENLPDLAVLVEPMLIVRRTLREQIIILHRHLLAIVRDDEVCRRLMTTPGVGPVVALTYRATVDVPARFRKSKAVGAVFGLTCAKYQSGEVDRNGRISRCGDEMMRVMLYEAAQSMLRSKKWSWLKAWAMQIARRRGMKKAIVALARRLAVIMHRIWVDGTEFRWTRERATAAA

SEQ ID NO: 357605 - protein, 318 aa, unidentified
MPESMEVGIDVAKDTLEVAFGPEATPQCFSNDDDGHEALVTALSAHRVELIVMEPTGGYEAPCACALQAAGFAVAVVNARQVRDFAKAMGYLAKTDRIDARVLAEFAAVLAKRPDRDKVVRVLPSEEQQRLHAMVLRRRQLVQMLVAECNRLATSHRAARRSIEVLIKTIRKQIGEIEGELASHVERHHAELAKVLQSAKGIGPNTCMVLIAELPELGKLSNREISALVGIAPFNRDSGTMRGKRTIFGGRAQVRCALYMATIVAMRHNRVIRTFYERLLGVGKPKKVAIVACMRKLLTILNAMVRNGKKWDETLHFV

SEQ ID NO: 357606 - protein, 334 aa, unidentified
MNQKYFIGIDISKGKLDCAVILSDYTVVAENIIPNNVKKIKSFLNGFTKKHNTEFDQILVCCESTGIYNGPLRQMCSDLNIGLWEEHALKIKRASTDMRGKSDRKDAMRIAEYLVRYRDKALLYKQPSDVLKTLDQLNKVRETLLGSKLALQNQLGESKSFDPDGYKVLLKHYKQMIAQIENQLKKIDLEIQDLLNQHEEIQQNINLMKGVPGVGKQTAMQIIIYTQNFTVFKSVKHLACYAGVVPFQNESGVVIKRARVSKMASKKLKSVLHMAALAAVRTKSELKAYYIRKIAEGKNKMCVLNAVRNKILQRIWAVVERQTPFLLNENFRPI

SEQ ID NO: 357607 - protein, 339 aa, unidentified
MKHSVIGMDIAKRVFQLHSVDPTTGEIERIKLRRDEVLPFFAQRSASLVAIEACGSAHWWARELRRLGHEVKLLAPKSVRPFVRSNKTDAADARAIWTAVQQPEARLVAVKSEQQQAILALHRLRAQLMKFRIMQTNALRGLLYEFGEVLPEGYSALAKALPAALASVAERLPAMLIDSLREQWARVQMINTEITTIERRLASALRASEPCRQIAAIPGVGLLTATAAVAALGEPNSFASGREFAAWLGLVPRQNSTGGKIRLGGITKRGNRYLRRLLINGASANLLRSRATKADPWVIGLRRRRPPLVVAVALANKTARIAWAVMLRQKEYQPRAVAA

SEQ ID NO: 357608 - protein, 412 aa, unidentified
MRLFAGDDWAEDHHDIEVMDQAGKVLAKKRLPEGAAGMAQLHALIGQFVPEDDMDSAEVVIGIETDRGPWVAALAAAGYTVYPVNPLQASRYRERHGVSGAKSDAGDAHMLADMVRTDSHQLRAAAGDSPEAAGIKVLARTHKTLIWERTRAVQRLRHQLREYFPAALEAFEDLDAADTLELLGKAPEPARAAKLTRAQVSAALKRARRRNIPDKASAILAALRSEQLGQPEALTAAYAATVRSLLAVIIVLNEQVKALQGQVGEHFGRHPDAEIYLSQPGMGKILGARVLGEFGDDPARYRDGKARRNYAATSPLTRASGKKKVVAARFIHNGRLADALNAQAFAALNASPGARAFYDGLRTRGIEHNDALRRLANRLVGILHGCLKTRTLYDEATAWGHRQNLPQSSVAA

SEQ ID NO: 357609 - protein, 312 aa, unidentified
MEKLSCGGIDVSKDRLDVVVLPEGWFFSVSNDTAGWAELVARLRPLGVSAIGLEPSGGYERGIIRALLAAGLSVRRINPNKLRQFARARGVLAKNDRLDARLIAEYVAIMPTRVVQRDDAVERLAEIVTMRRQLCDEHVAVENQAAHLEDAMLRRLSKRRLIRLEADIRLLDKRLAEMVATNAAFAQLYELLTSMPGVGPVLAFTLIALLPELGKMSRKQIAALVGLAPYDFDSGKLRGHRSIYGGRMPIRNVLYMAALSASRHNPALKAFSNRLADANKKSKVIIVAVMRKMITTLNAVLRDNAAWQLKPA

SEQ ID NO: 357610 - protein, 450 aa, unidentified
MSPLALDVVIKTGKTPVLGRMLSKYVGRKTSSIENDITKARNHSRQRGNIMRVVFGIDVSRASSEVAILINGEKVHGYTIPNDAIGFNRLLGDLKTVHQPEIVFEATGVYSRRLQAFFEDNSYAYTRLNPLESKKQLDSLRVRKTDKIDAEKLATSQFILNRKPSYVQEALYQELRDLSRFYQNLTEDIVCAKNRLHKVLQVTFPELENILSAPTGEQYWNLVMTFPCNSFVLELDDATLRAIIRQSTSKRISEKRVTYLVDKLTKLANQSYCAVKKTSPMMEEVKYYAGELLRLSEYRKSVLEEMVTLAQPLPEYEILLSIPGIAETTATSIIGELGDIRRFHSANQINAFIGIDLRHYESGDFLAKEHITKRGNPYARKILFKCIHNIASASHTNPCHIADFYDKRKRQSQVTSTKPHTIASIHRLIRTMYYLITHNKLYDYTSTQNR

SEQ ID NO: 357611 - protein, 395 aa, unidentified
MKYILSFDIAKGKSVYCFIDELKNIIIEPTLIEHNKNDFDNLFNLIKDYPNLIVVMESTSIYHLPVENYFRSKAFDTVVMNPKLVKQFKDTLNKSKTDKLDCFKIARCYLGTIDNFYYKNDEYFMYNPLARQYWSLIEGQTRLKNRYKQLVEIIFPEFNLIFNDLYDDLALNFIHDFPHPVLFVNRRIDYLMNYLKEKNGTTQAYRFKNKILKMKELASNSLCFVCFDSYQVKNLVQIIEMIQYHKSEINKIKNQLISKMKDKKLFKIINSIPGFGEFSTALFLAEVGDITRFDDKYQFISFIGIDSVTSQSGVSAYHGPISKTGCKFGRTLLFNVITTTIQISAHSDKSNPIYLFFRKKQSEGKHHYKCIIACETKLCKIIYKLCSSNCLYENK

SEQ ID NO: 357612 - protein, 385 aa, unidentified
MGSQRFIPRDYDIFSGLDVDKRSISVTFTDHQGLVKSLRMPYSVEHLLNHVRKHFPNQKVAFGYEAGPTGYGLYDGIVAQGHPCLVAAPSMIPQAPGQRVKTNRLDSRSLSENLRGGQLKSIHVPSPIYRELRHLTQLRDVLVSEMVGMKQRIKSLLLMEGIEFPKAPAGSQWSFIVKGKLRKLSCSGATRFKLDQLLDSLEFNEKQILKATREIRRFLKNDAELSQCMKYLMTIPGVGWIVASQLLARIGDWRELKNIRQLAGFLGLVPSEYSTGERTDRGSITRTGDGRLRSKLIQASWSTIRQEDELRDFFRVVCGKHPREIASRVAIVAVARKLSVRISVVLMKQRPYEVRKKVHSAPLTQEETSPQGTPRREPEPGEKNS

SEQ ID NO: 357613 - protein, 372 aa, unidentified
MESIIYVGMDVHKDTYSVCCYKSSEDRNYYEKKMKATSSNIIKYLKSAEKEFGEGTVFVCGYEAGPTGFGLYRDLQKAGYICVVMAPTSLKKAPGNRVKNDTVDARYLAKTLFTKDYSEVHVTTKHEEAIKEYCRMRLSIKKELKTAKQLLQAFLLRQDKKYSDGTTYWTWNHRKWLKTIIFEDSYLQEAFNEYMITINTLEDRLKNIENRIEEIAKDSAIKEKVEKLVCFCGIETLTAVTIAAEIGDFNRFKKAYHFANYIGFGWAEDSSGKKEKVLGMSKCGNINIRRLLTESAKSIKKTNSRGKKSKRLIDRQKGKDPQVIAYADRCRYRLKNKMIHLECRGKHSNVSSTAAARELACFIWGMMTDNIA

SEQ ID NO: 357614 - protein, 340 aa, unidentified
MEKRYIGIDLHRNRFTCCLRLENERTYVTEWELEDLGKFVKKLRPSDEIAVEITGNTRLFYDAVAPHVARVVVVNTTQFKVIRQSVKKTDPHDARALALYLSKNMLPEVRMKDKEHGQLASLTQTRDTLVKLRTALKNKVNNILSARGLNLPKEALGSEKALNGVLELPFDEIVRIELRVIVEQIRSLNKSIAELEKTIGEEGSKLEGHKGLTSIKGIGKITGAILLSAIGDVNDFADEGRLASYFGIVPRVSNSNETEHSGRIHKRGTKLGRTALVQSALIAANYSPYLKRFYEQVKARRGAGKAIIALARKFLGIIYRTLKNKWVFQDFPNFVLAEAS

SEQ ID NO: 357615 - protein, 345 aa, unidentified
MKPKTNIAMKKNDYKYFVGIDVSKKTLDMSLVVKEGMRVLDSTRIENCKSGLKRMGVWLKTFNLKLEDVVFCLEFTGVYNEPVLSYLSKLNAFVWLEMPIKIIRSSGLQRGKNDKVDAIKIAIYAAKNSENMQRWVQPGKTIQIVRDLISLRNRLIKALKMMLQPINELEDMEECDRAGILKQEMKSMHSKLEQKIKAIEKRIAAELKKEPEMENKVKLAVSVPGIGKWTALHLLLTTNNFERMLDGRQLACHCGCAPFEHTSGSSVRGKTRVSKMANKPLKTLLTMGAVSIINSKNDFGAYYQRKISEGKNKMSVINAVRNKMLHTVVAVIKRNSPYQLSTIIS

SEQ ID NO: 357616 - protein, 484 aa, unidentified
MKKPSNKARRPAPPIVARGKGPIRPATSLPVVHPHAAGIDVGASELYVCVPEDAVSPGESPVRRFGVFTGELDKLVEWLQSCGVKTVAMESTGVYWIPPYQKLEAGGLEVVLANARHLRQVPGRKTDVKDCQWLQRLHSYGMLQGSFRPAEEYCRLRSLMRHRENLVDGCVQQVQYMQKALDLMNVRLHQVVSDLNGETGLRILDAILAGERDPKKLTSLRDERIKRSTPPEMEAALQGDWREEQLFILQQGRETYRFVETQLARCDAQIEKVLQQIVVVAERRPSLETPPNPTAAPTPRKKKERRPRKTGHGLKRDLRAELQRICGIDLTQVIGLNVLSVLIIISEIGVNMSRWRSAKAFCSWLGLNPGNRISGGKVLSSRTPHVVNRVSLLLRTLATAVGRSETWLGIFHRRMKARLGPAGANTATARKMACMIYHLLKYQEQYIDVDTLIYAEKIQRIRLNKLRKTAQELGFELLPIKQAA

SEQ ID NO: 357617 - protein, 505 aa, unidentified
MGTLAYVRGVEASVSLRSELRGRLWSNHFGWQSLFDVGHAPSWEHWTKSRPADQSLTGHPMSFDRLKRPQSRKRLPGHKLKPSRATLLVQNSKPHLSMKQTYILAIDVAKHKVRAALSGADERLLFEKDLPVSAGGLRELLVRLREHVAEPEGLLVLIEATGMLHLNWSVALIRAGYAVVVINPLIARRLYTLGNSIRDNKSDPIDARQLCGIGRLHGEKLLSLYRFALKPEQLCLQRLQSVRKAVRKSLSNLKKSYGSLLDVSFPELGRLLEIDGVGIRQLLSQAPTPCAIARMRRSSLEKNWMLRPKAAQLKKLAAESMADPELAQASRPALLAMLQSIEAMETRLRELDRQIEALTSQSVDPQTKALVESIPGFGALNAAKLLAFLPGEILHAGSNRQAAARLQAYMGNDPRVRQSGQWQGQTKMSKRGVEMLRTALFQCAFSASQHDPELRSFYQRKRAQGKHHEVALSHLMRILTRRLVAVLRSGQPYQPNDNSELKNAA

SEQ ID NO: 357618 - protein, 398 aa, unidentified
MLSIGIDVSKGKSTVCGMKPGGEIVYTPFEVQHTREGMSELVSLLRSSGEEVRAVLESTGSYHCPVVAALLENGIFVSVVNSLRMKRFCSQSIRRVKTDQIDAMQIALYGLAYWQELQPTRLPENTYRELQLLARQYYQMTSLLIKAKVDFNALCDQVLPGMQELMSDHAGRHKLSDFVLRYHHTAHILEMGETRFRKDYCKWAEKKGYRNHERMAALIFATAQNGIPVLPDAPSTQIVITEAIRVLHTVEASRDAILTQMQALAKTLPEYSLVREMPCIGDTLAPRLIAEIGDVRRFHSKRALIAYAGIDAPPYQSGKFCANNRHISKRGNRYLRKTGYEVMQSYVMHKPANDPIFTFIEKKRSEGKSGKLAMVAGLNKFLRVYYGKVTELYRSLPQ

SEQ ID NO: 357619 - protein, 419 aa, unidentified
MNDHYAALVGLDWADEKHDLCWKVPGEDQVYAREIEQSPEKIRDWVAGLMKRFPECRYAVCLEQSRGPVVNALMGYGAIDLFPLNPSSMKNYRKAFYPSGAKDDPTDAKLMLEMLERHRDSMRLWKPDTVETRRLRFLCEDRRKLVDLRSGQLNRLRAGLKQFYPQALKMADDIGSELFCAFLMKWPDFEKLSLARPDTVRSFYHRYNSRNEHKIAERLELIRESQPLCNDAAVIDSGRMLAEALVAEIRLLNKQIKKYDERICVFYQSHPDHEVFSSFPGAGEHLGPRVLVCFGSDRERYDSAESAANYIGISPVTQRSGKQEWIHWRWHRPKFLSQSLVEFARCSLGYSDWAMVFYERQKSRGKSHQAAIRSLAYKWVRIIYRCWKDHEPYDEVKYMASLARNGSWIPHEVGKEQLA

SEQ ID NO: 357620 - protein, 416 aa, unidentified
MLSRHEEVTLTITCGIDWAEAHHDVALIDKQGVVLARSRIDTDAAGFSMLLALIAEHGGGPDDTPIAVETDKNLIVVALVEAGFVVYPINPRAVARYRERYGQAGGKSDPGDAAVLAHILRTDRHLHRRLPANTSQAGAVKVLARQHQEAIWALHQAVSRLRSVLLEFYPQALQAFPNLKHHAATAVLAAVATPAAAEKLTRTRVATLLRRSGRGDQPVLAERILTELKVSALRQPPRVEAAYGHTVRGLVGAVVAMRTAVDELEKGLACEFDQHPQSDLLRSVPGLGPVLAARILAEIGDDPARFDNPQSLRAYAGTAPVTIASGRSHYVKARKVRNKRLADACHWWAFTTLTKSAGARAHYDRRRAAGDHHNAALRNLANKLIGRLWWCLVNSQPWDERGAWPNTISTEKPTAA

SEQ ID NO: 357621 - protein, 402 aa, unidentified
MNCVGIDISKGKSMIAVMRPFGEVVVSPFEVLHTDSELSKLARLLKSLDGETRVVMESTGNYHAPVAWLLHGAGFYVSVVNAMLVHDYGNNSLRRGKTDKKDAVKLANYGLDHWLTLPRYVPEEDTRLMLKTCYRQYQQYSKVRTMLKNNLISLLDTAFPDANRLFTSPPRADGSEKWVDFVAAFWHCECVCGLSEKAFTAKYQKWCKKHGYNFSEDKALDIYASACGHFGVMPKTDTAKLLVEQAISQLRATSAALAALKQEMQSLAASLPEYPVVMEMFGVGPTLGPQLIAEIGDVRRFHSKKSLVAFAGIDAPPYQSGQMDIRSRSISKRGSASLRRTLFLVMGVLLQCAPMDEPIYQFMNKKRSEGKPYRVYMMASANKFLRIYYASVKAYLDSLEHN

SEQ ID NO: 357622 - protein, 428 aa, unidentified
MKTWTDLTHYAGFDWAKDHHDIVIVDRSGTKVADFRIPDTAEGWRDFADRVKKFPVVGAVVETRYGAMIERLLGAGCAVFPINPKTATRYRERKTSSGAKSDRLDAWSMADALRLDGQSWKALEPEDALTQELRQLCRDEVALIEQRTAFVNQLQQALHEYYPAALEAFDDWTHPAAWAFIERFPTSEVLKSAGKKHWEKFLHMHRMYRPQTHEKRLACFARAGDFCGSPGTTAAKSLLALSIVEMLKPLQKQLDEYRCRITKVFERHPDHDVFGSLPGAGGKIGPRLLGEIGTDRERFEDPQALQCYAGTAPVTQATGKRSKRNASVYMRRACNLNLRQAVHFLADLSRRTCTWAQVYYQKKRGEGHRHASALRCLGQRWMKIVWAMWRERKKYDPELHQRNQVAHGSWVVALITDNQAPLAPAPTN

SEQ ID NO: 357623 - protein, 444 aa, unidentified
MQKKKETTMPIINNNAAGIDVGSRSHYIAIGQNPEDVKEFGVSTDGHQAAIDYLRSNQITSIAMESTGSYWQSLFRVLQQEGFEVLLVPGNQTKNARGKTDVKDCQWIQKLHSLGLLTGSFLPDEQTLKLRNIQRHRSSLIETAAKYTNKIQKALRLMNIRLDVSIRDIAGKTGRAIVESILEGERDPTELVKLVDARVKKSKQEIEKNLHGQWDDELLYELNDCYDLLKIHEQKINDCDLKIDSILQQQTMHIDFDVNTSLAKKQNKGKHQCRIDLQKYCYQIYGTDIFAINGVSVSTALNLMSEIGLSIYKFDSAKKFTSWLRLSPNNKISGGKVLSSRTEKSKNVLTKSLRDAANAVGLSKKDDYLTHFFRKIAFKKGRGAAITATARKIAVILWNMIVKKQPYTPIKTKEYLEQQKQRKIKFLKKDIQKYGILINELSAS

SEQ ID NO: 357624 - protein, 321 aa, unidentified
MSTNPPNTFAAGIDVSKDTLDLAFFPKESARSFDNSPDGFQKLIKFLKAEPPTKVIIEATGAFEIPLAIALTDANIPFCIMNPRQMRDFAKSLGKLAKTDKIDARVLAHYGHAINPPLTELATEETRNFQALLARRGQLTQMQTAEKNRLKQATTKRVKDSIETLLACLAQELEDLDKQMDQLVQACPAWREREEIITSVKGVGIQTSRTICALLPELGNVSRQTAGALVGVAPLNRDSGQFRGTRTIYGGRAVIRQVLYMAALSATVHNPVIKQYYGKLVAAGKRKKVALVACMHKLLTILNTLLRTKTKWRDLTLPVNP

SEQ ID NO: 357625 - protein, 340 aa, unidentified
MVKVSTIGLDIGKKVFQVHGVDAAGMVTVNRPLRRGQVLAFFAKLAAPCLVGLEACATSHYWARELRKLGHAVRLIAPAYAKAYVRRNKTDAADAAGICEAVSRPAMRFVGIKTPEQQAAAGLHKVRTLLLKQRTMTSNALRSLMAEFGIVVAHGPQHVGELVALLADPHEHRIPAPLHDGLKRLVDTLAALAEQIAAVDAQILGWGRADATCRHLITIPGYGPILSSAMAAMVVDPTVFRSGRDFAASLGLVPRQDGTGGKVRLGPISKRGNGYLRRLLVNGAMAVLCGRHARKDPWLAKLLATKKRKVAAVALANKMARFGWVVMMRQEDFRARPAAA

SEQ ID NO: 357626 - protein, 426 aa, unidentified
MGIAKPVDRKSNTKEGENVNQLFVGIDVGSRDNAVHIMLPDGEKYSSFSVRNNLDGSQTISKNVVSAMTAKGLKNLEIGIEATGVYGDGLMCFLNENDALAQFEKRLYILNPKQVEKFKQAYSDLPKNDPVDAFVIADSLRFGRIKTNPYQDDYRYKSLQTLTRARFFAVQNLTREKQRFMNYLFMKCSGLAQEKVFSDTYGAAALAVFEEFDTPDDIAEMDIEQLASFIAEKGKNRSPRPDEIAKAVQAAAKGSFRLPKTVNNSVNQVLSVSISSMRAMQSQIKALEKEIERQFQNIPNTLTSVPGIGPVFSAGIIAEVGDINRFTKGQSGLAKYAGLVWKENKSGMFEGQNTRMIKSGNRFLKYYLCEAAISLVRCDTEFRRYYDLKFKEVNKYQHKRALALTARKLVRLVFRLLKDNRLYRPA

SEQ ID NO: 357627 - protein, 375 aa, unidentified
MTETRTLPGSVSEPTLYVAFELGKKEWKLAMTSGFGVPPWLRTVASQDWRAVERTIAQGRTRFGLGAAVRVVSCYEAGRDGFWIHRALTARGIVNQVVDSASIEVNRRARRAKTDRLDALKLVTMLVRVWCGEPRVWSEVRVPTVAEEAARHVSRERTALTQDQTRLINQMRGWLATWGATLPGRRRSAWWTSVCDGAGVPLPAEVQARLARAEARLAGLERQIAELDAQQQVAVTAAAPTTALRQLVALKGVATTSASVLLDEGLVWRKFQNRRQIGGLLGFAPTPYDSGESTREQGISRAGNARLQTISIQLAWNWVRWQPQSALTQWYQAHFGKGKRARRIGIVAVARKLVIALWRYVTSGVAPSGAILKGA

SEQ ID NO: 357628 - protein, 421 aa, unidentified
MLSEGVDWSEDFHLVALGRPGEGVFDVIRVEHRPEAVGRLLTRIAQLEPEPDEVRVVIETRHGLLVEALLDAGFVVLPVNPDLVARRRGPARKKDDTEDARIACRLGLDRFASLKPLVPHGDLAGELRSLARDDGRAARDQRRLLNRLRMDLVRSFPAALDIVGEDLGAPTMLRLLERWPTAGLLAAASREDLVEFARSLHHGWPERLADRIVSALSQAQFVARPALIRAKADGIRLAASQLLLIGQQRKLWQRRMGELLGVPRRGRDHQPRTDELGQKFPNGEIYLSFAGLGDRLAARVAGEIGDPPQQFSSPNSLQCYAGKAAVTRRSGKSEFVVAHRLACNRHLPDAVQQWAFCSLKESGWAREFYDAKRAAGKTHNASLRALGNRWLEVLWHCLKNRTRYDEALHVANRNRALGRAA

SEQ ID NO: 357629 - protein, 343 aa, unidentified
MQVSTIGVDLAKNVFQVHGVDNVGKVVITRQLRRKQVIDFFSKIPACLVGMEACGTAHHWAREVSKLGHTVRLMPPSYVKGYVKRSKNDAADAAAICEAVTRPSMRFVPIKSADQQALLMSHRTRDLLIRQRTQLINALRAHLAEFGLVAETGREGLAQLAEIVTDESNRDALPPAMKQALQAIIDQLAALELQIGALDRAIHAHHRVNDMSCRLETVPGIGVIGATAIASTVTDPSNFKSGRDFAAWVGLVPRQHSTGGKERLGGISKQGDRYLRRLLVSGATAVVRNARQHPQKHPWIMRLLARKPAKLVAVAVANKMARIAWAIMAKGGYYRAPELAAAA

SEQ ID NO: 357630 - protein, 352 aa, unidentified
MALPTLPHPQVLVTLGVDTHADSHVAAALDQAGRPLGTRTISTTPGGYAALLGWARRLGTVDRIGVEGTGSYGAGLARWLRAHGQLVIEVDRPDRAARRRQGKADDLDAHAAARAVQAGTATGQPKAGDGMVEMIRSLRLARRSAVKARTQAANQLKALLVTAPDGLRAQLRCLPPAELVTTAARLRAATTPATPTDAAKLALRSIARRWLQLTQEITDLEVHLDRLVAMAAPALVAVKGVGTETAAVLLVAAGDNPERLRSEAAFAHLCGVAPIPASSGKITRHRLNRGGNQEANWALYLIAVGRMAWHGPTHTYVERRTKEGKSKAEIIRCLKRHIARELYGILASRPAT

SEQ ID NO: 357631 - protein, 351 aa, unidentified
MENGITVGVDMGDKKHNICILDAEGEVQHRGTVTNTATAIRRYFGKLDPCRVALEAGTHSAWVSRILDELGFEILVGNPRKLRVIWDSDEKNDDRDAEMLARIARFDPQLLYPIHHRGAQAQCDLSIIKGRDMLVKTRSMLVTHARGIVKSTGERITGGSTETFHIRLQNEMPGELRDALEPIMKSIEDLTQRIRHYDRLIRKVSEEKYPETAQVRQIAGVGPITGLAFILTLEDASRFTKSRDVGPFIGLTPRQNQSGKTNMQLGISKAGDGHLRRLLVGAAQYILGPFGPDCDLRRFGLELAARGGKNAKRRAVVAVARKLAVKMHHLWKSGEVYEPLHREIQAEKKAA

SEQ ID NO: 357632 - protein, 385 aa, unidentified
MATTIIGIDPHKESWTAVAVDPRGQKLAALRAPVTAAGYRQLRRFADQYQEPVWAIEGAYGLGAPLSALLAGDGVTAWDVPAKLAARVRVLSTGHGRKSDEDDALSVAVAATTSTKLRPVHTDPAATELKVLTEHRDDLVRTRTQTVNRLHAIMVLLVVGGAPRNLTADTAAALLRRVRPSESLAVTRRLIATDLVAEIRRLDKRITTATGHITTRVANAQSTLTSIPGIGPLTAGKILARTGMVTRFTTEAHFAAYAGVAPREVSSGDVIRHRLSRGGDRQLNYALHVIALTQISMRTSPGRIFYDRKRSEGKSSKEALRALKRRLATVVFRILTADYTRLAVGPVRQPGTALISSMTGSHPTTGSSEKSLTRPTTTKPTHDAT

SEQ ID NO: 357633 - protein, 392 aa, unidentified
MQNVEGYAGLAGTEPHAWETSLMDTITYVGLDVHKATVSVALAEGGRGGEIRQVGVFENRPEILMKLAARLSKGGRRLSFCYEAGPCGYGLHRLLTGGGHDCVVVAPSLIPVKAGDRVKTDRRDAVMLAKLHRAGELTPIWIPDAAHEAMRDLVRARATAGRVLSKARQHLQSFLLRHDQIYRGVRAWTLAYRRWLTTVRFAHPAQQIVLQDYIHAVQDAEARLDRLTRQIEELLPSWSMAPVVTALQAMRGVALVVAITVVAEVGDFRRFANARQLMAYLGLVPCEHSSGASVKRGGITKAGNVLARRVLIEGAWAYRMPARVSRKLHDRNEKLSPAIRDIAWKGQVRLCSRYRRLAAAGKPKVVVTTAIAREMVGFIWAIAQIAQPALAA

SEQ ID NO: 357634 - protein, 425 aa, unidentified
MRSVGLDVHLDFCEVALVEDGEVRSAGRIATTPGQLELFAQSLGRDDRVALEVTGNAWEIARIIEPHVARVVVVSPGDTGIRQARAKTDRLDARTLAKLLAAGELDPVWMPDRDTWVMRRRLSRRGQLVRARSRTKNEIHAVLMRCLVGRPPVSDLFGVKGRRWLAGLRLPLEERETVDGCMRQIEFLDREIADVERLIAQDALGSPQIRRLMGVPGVNVIVAASFLAAIGDIDRFESPRKLVGYLGLDPRVRQSGPGPATHGHISKQGSVRARHALVEACWTTVRQPGPLHAFYERVRARRGHSVAIVAAARKLACLFWCLLTREQDYAYAQPSLTRKKLRRLELTAGHQRYAPEAAGIWHANDSVRQAERELARQAELAYRRTVRDYHAQANKTGAGATAGRASPGRQSGKQRGRASVPNPAL

SEQ ID NO: 357635 - protein, 445 aa, unidentified
MTFRTIGIDLAIRGDHLAQIYDDGRPNGRAIRFRHDQPSLAAFVQTAVMGLRADDHIQAIMEPTGMSWFPVAHHLADAGITVARVKGKRVKALRRYLSEHAKTDMADAQILAAMPSFGGPRLDPVHIPDPRSHALQRLTKQRSRFQNEIADARRRLLDLIRWASPRLEAVLPDLGTRLSLALLQKWFHPSDVLKARRTTLAKYVAAHAGGNHPRSGPFVETLITGLREAAQYAQDLHGTHIDFSELQFEIAMEIKNVLAKIQTVGDLERHIADLYKHLDPQGLVLSIPGVGRHLAPTLVGILQNIERFHSEKHLRGFCGLFPRRADSGGVERAGQTLTQGGNNRIKQALYLAADTARKTDPELAELYWRLMTVKGHHHKQALCAVANRIVNRIFSVLKRGKPYEVRDKEGNSITLSEAKAIILERYTVGENIRAGRRSNRIEKTP

SEQ ID NO: 357636 - protein, 424 aa, unidentified
MKFKMQNKQNQLIERISVKHLVVGIDIAQQLHVARAVNFRGIVVGDPLTFTNNEEGFSSLLKWINNLQRINNLDESIVGMEPTGHYWINLSKWLFKHNIEVVTVNPYLVKRNKENRDNTQSKSDKKDALVIADMVKNGYYSEVRPTSESFEKLRVLMSNRDVVVKRLVSSTNQLNRWVDIVFPELRQVFKDITAKGAIATLRLFPSPVELGTMEPEEVIMGWKSIMKRQPGLKKALLLIQVAGKSVGTKQALDAYKFHLEQLLEEYDLALKQLERVEEQVTDALLKIPFAYKLLAIKGISVISLAGILGEAGDLSGFSHGNSLLRHAGLHLAEASSGKWKGQIVISKRGRSRLRRFLYLATMSLVVNNPEFKAIHSYNVKVKKMKKMKSIMKLIGKLARIFVGIARRNEFYCPEKVNHIIVLAA

SEQ ID NO: 357637 - protein, 415 aa, unidentified
MGGSIIENCKVIVGIDVSSKDSTVCVLMDKVRQGKTFKISNDMVGFQQLYKRLRLYSVIPLIVFESTGVYSLSLQAFLEKKHIQYLKLNPLKAKKLMDNNLRHNKTDQVDAYRLALIQFNAPQKLLKPQSRAYHEMQNASRYYEELNKAMVVAKNQLHRNLQTTFPQIENLMCHPTGKIYWSVVALFPHAQAVLDSNKEHILGELETISGLSQKKAEYLTQRLISLARLTCAYDNKDSIVIRAIQRNIACLFSLDQEKKEALAYLYKLASKNQADTRILTIYQSIPGIAKTTALRLLAELGDLRRFDSPNQIDAFIGIDPGIYQSGELDSHLSITKHGNSIARKIMYLSIGQMESVKTTQPCHITDYYDRKKSSQSRGFKKIAIASVHKLIRTMYALVTKNQLYDYNVATRNQRL

SEQ ID NO: 357638 - protein, 597 aa, unidentified
MTTTQANPVTTIGVGIDTSRYGHYVSFLRDDLQPATEPLTMTESREGYDKLLSTLRELSRRYPNVEFQIRLDEAGQYAANLKTFLYALPFEKTVSIGDCIRNKNYRVAHFPKRKSDSVDSLSVARYAVLEQPQAAEKIPLQLGALRDVASRLEAQAREVTRHVNQLHNVLARVFPEFDTIVRDLGAHSALELLRKYPTPAHLARARLTCIEAIPRLRVKTARHLHEAAKTSIGSLTGPVAETIVRTVVDQVRFAQKLKCQYEKLLVESYRSLPVTNQLDSIIGFGEITAAVLTAKIVSIDRFDRPEQLVGYFGIFPEEKSSGIAPDGSAHPRRKTRMSQKGDDLVRRYLFIAALSAVQSNPAVRALYRRLRARGAAGKVALGHAMRKLLHLAFAVWKSGKPFDPQYYPWDQTPGNLTAETKEAAGHNQEASPVEQVVTATSTETLSPPTSDVNTLSSGVDFQSVRSQTSMQQVLELLKFDPVEARGDHLRGACPVHHSTAPSSRSFSANLSTNTFRCFKCHAQGNHLDLWAAATKQKLYDAAVDLCQKVHIETPRVTLVQHRNPTGEEEPVSEPVVTARNSRAKPASSRLTPIDKSS

SEQ ID NO: 357639 - protein, 391 aa, unidentified
MSMYFVGIDISKYKHDCCIISAADQQIVSKFTVKNDKDGFEHLLTTLNSLSNPEDIKIGFESTAHYALNLELFLENAHHSFMEVNPVLIKEYKKSTTLRRTKTDSVDCESIARWLMTVEYKPHSKGFYHSYSLKSLTRLRDRLIRQRSFFLVKITNVLDHTFPEFKPFFNERLSKTAIYLLENYGSAEKMAHMNSASYDKLRCASRGKFSIQQFLRLKELAANTVGVNNSIFDIELNSLLTLYNSLCKEIKTLEAEITKLIEEVHPHYMSIPGIGPISAAVIYAEYGDISNFSNPGQMLAFAGIEPGINDSGTESHGGRMVKHGSSQLRYVLLNACLPLIRFDITFATYYAKKRAEGKKHRVAITHVAKKLIRVIYALERQDVDFNVQKLR

SEQ ID NO: 357640 - protein, 475 aa, unidentified
MTDARVDVCEKDVLLMSSKGLVSQNSQEDVVIQSSGLSRGDKRRNAQLAKLRELVPVVNAIVSFDLADEKQAIVLTNHDSQVLARKRVKAKTWRLGPVLDWARTEARQLGFADVTVGCEPTGHRWRVLDQLAAQRDMTLVCVQPLLTGRARESEDYTRDKTDDKDAVLIARLVAQLRCYVPERADETWARLRHLGARRARLITEATACVQQLRDLLECAWPAVLGAAVRQFDSVIWCAALAVVLQRCEGRPERLKRLGLARFEAAVRRELPRWGGKQTRRRMIAAVFAALTDPAGVSAQRRGALERAGWLLEDWRAVKSRRAQVETCMLEILNELEFTELAGSIPGVSVIGVAAILAETGDPTRFDSPRALVKHAGLCPRENNSGTSTGRSRISGRGRPGLRLAAWRAVWGAQRHNPVMAARYRHLRTRDNNPLSDHQAKAALAAAVLRWVHVIITERVAWNAERAGVTPLPAAA

SEQ ID NO: 357641 - protein, 310 aa, unidentified
MGACIGVDVSKHHLDWNSGGSGNVTRVPNTPAGLGRLVAKLRGLEATLIVVESTGGYERALTETLSEAGLPVVLVNPWRVRRFGEGLGVLAKTDPIDARILAIYGERARPVRRPLPAPRQRQMADLVRRRRQLIAMIVAEKNRLDTASAVIRRDIQALVKVLERRVAKIDERIDAAIAADPEKAENWERLQSVPCVGPGVARALLVDLPELGALGRKQISSLVGLAPFAKDSGRKIGQRRIRAGRSGPRTALYLAAMNGARFNPLLKAFYTRLIEAGKPPKLAFIALARKLLTILNAMLRDGTTWQQATR

SEQ ID NO: 357642 - protein, 407 aa, unidentified
MRYYIGVDWADEEDVVWVANDAGDKMLSRRFAHTVAARSEWARWLRERQAEGIELWAAIERPHGRIVDFLLDHGVVVYPINPKSLDRARDRFRVGGSKSDPFDAKVLALFLRSDHLRLRPLRPNSEAAQELQGLTRDYRRQVHLQTRLLNQLTATLKEYYPRALELGEDLTAGWAQAFLARYPTPAAAAALTEPDWQAFAHAHRLSPTRTAALWETLQQPQLQLPAHVVRLKARLLQALLRELAPTLATIAEYRQAIDDFFATMPTAEIARSLPVGKSGTTVPTVWAELGDHADRWASFRHLQAYAGSVPETDCSGKHHVVKFRFACNPALRDAMHQLAFLSLPHSLWARAYYDRYRERGHTHHQALRALGAKWLKIIFVMWTRHVPYSETHHLATMAPQHLHQTAA

SEQ ID NO: 357643 - protein, 388 aa, unidentified
MKTPAEVNLQTGGEQVAVGVDPSRNALQLAILAPHGTVSKRFPLTPASLRSIDAMLGQGQGVRIGIEGAATCGALVLLHWLRQGYDIREVNPQISKRLRECFTEAHTDASDAQGLAWGVRFHPNLPQVRLTVTTAAWKRLSRLRTRLVKAQTGLYNRLHSLLAESYGAVYKRLFPKLKSKRALEFFQAFPTLDDALNDLPQVRSLLGEEKAALLEEAGHWGEGVYLETLRLEIRLTIQLLFAHRAAIKGVEAKMAELSRADPQVERLRAVPGMGTTLALTILGHSGDFSRFRSHDAYAAYCGLAPAVWQSGQSRVYAKRRRRYSRPLRQAFLQLALTQLRLNPESRAYYERKRGEGKPHWVALTALARRLCKRVYKLMREETPAMSAY

SEQ ID NO: 357644 - protein, 343 aa, unidentified
MESIYYIGLDVHKKTIAYCIKTVRGEIVRQGVVGAQRKALQQWLKEIPGAWMGALEATIFTGWIYDFLKPHARELKVAHPEMLKAITAAKKKNDRADAEKLADLLRVNLLPECTMMSEELRELRRILRYRNMVVRTATQMKNKMSGLLMEVGAIYDKQRLHGRKYFGELLERVEDVPDSVKELLQLSRSNLELFTAIQKKLVKTLRENDLIRERVQCLMSIAGIGEITALTWVLEIGDPARFHSSREAISYCGLCSAQRESAGKEQRGPLSKKRNKYLQTALIEAAKLAPYWNPQLAALHEKELTKGNRNRATLAIARKLVEYMLAVDRRGTPFVVESPSQVA

SEQ ID NO: 357645 - protein, 352 aa, unidentified
MGFRHSAAGLEEAHAVVELSGLALVEMIERLKARSLAAGRPILRMILTYEAGRDGFWLVRFLQRRGVEVHVMQASRLPVDRRARRAKTDMIDVEMLLRTLLAWLRGEPRVCSMVPIPSEADEEARRAHREREDLTGSRRSLVNKIDGILATLGISGFRALRRDRREQLANLRQPDGAPVPPAAQERIERSLDRLELILKQIKTVEATRDAVVKKSSAQDESERMIRDLVQLCGIGAESATLLVREAFCRDFANRRSLGAYAGLTGTPFASGGMQREQGISKNGNRRLRALVVELAWFWLRFQPDSALAKWFRARVIGAKGRVAKIMIVALARKLLIALWRFAKDGVIRKEQR

SEQ ID NO: 357646 - protein, 435 aa, unidentified
MDALITEKFENEQLTIRQDSVSYKNIHAQKIIFCNGINAMENPWFKLLPFSAVKGEALIIETEELTNEHIFKKGLMLAPLPVQNTFWVGSNYQWEFENKKSWRVNIQDSEFELEDFTQNPDAVLLHKHLTKRYPGASYKIGYEAGFSGFSMQRSLSGSGCQCWVVNAADIPASDKDKKQKGDKADARKLCEYLQSKKLKGVHIPDAAWEHARTLVRTRERIVNNQTRSKNRIWQLLHFSGLPVPAEQQEGKYWSKRFIDGLQRLDCGGSMHLQQSLQLHLKDYLQTRGLLLEATRAIRSLCREEKYEGDIRLLRSIPGIGEINAAVLLFELQNVTRFKRFDYLCSYVGLVPDTSDSGETKRTKGITHRHNYFLRTALVESSWSVVRKDPALLMKYKEYCRRMEKNKAIIRIAKHLLSRINFVLKNKKEYVTGVVA

SEQ ID NO: 357647 - protein, 391 aa, unidentified
MMETPLAKPYDLSKPLVALDHDSTLVAVVEMSGTSWLVLAIVPGIDRRPLQKLPVDENRLFRQLEIWREEAGRAGKVMRRIVVAFEAGRDGFWLARWLRARGVEVYVIHPASVAVPREMRRAKTDRLDTHMLMRALLGWLRGEPDCCRMVAIPTVAEEDARRPGREREHLVRERTRVINRIKATMARFGIRGFKPGLKNAVARLQELRTPEGETIPSHTRSELLRYLERLQLLKKQIATIEQRCKEVLSEATPDRANAMVQLLAKVRGIGIETAEMLVHEVLSRNLRDRRAVARYAGLTGTPDESGRRRREKGISRAGNGRVRCGMIQLAWRLLMFQQESALARWYRERVAGARGSGKKTFIVALARKLLLALWRYATLGEIPEGFVLKSA

SEQ ID NO: 357648 - protein, 346 aa, unidentified
MLYAGLDLSRKRLDFHLLDEAGETVEAGAAPPDADGLRGLAGRVARFDEPVRAAIESMNGARFVHDQLEQAGWEVEIADALKVKGLAPLACKTDRIDAWVLAELSRRDLVPAIWLPDPEVRAERERARFRLHLVRHRSSLKQRVHAVLLAHGTPCPVSDLFGVSGRALLERMALPAPWAGTVEASLRLIDELDREIAACEAGLRALGAEHRYVPLLCTIPGIGWVLAYTIAAEIGDIGRFPSPAKLAGYTGLCPRVYQSGESDRRGPLAKHGPKYLRWALVEAAVRASTHPVYRERYQRTKTRLGRQRGARVAQVDLARKLAEAIWHMLTRNQPFAPAGATNPLAA

SEQ ID NO: 357649 - protein, 419 aa, unidentified
MKLFVGLDVSKAHLDTCFLLRDYDSDTILLEKRVKNSDAGSSMIKQYILEFHEEFDFDKIVVGMEATGQYSLHPSLFFSNDSDLMLMNVQTVVENPRVISRYSKVFTEEKNDQIDARLIAEFLSTEKYTETKPRSEKHVALLRLTRTRYQLIHQKNEAQQHYLETLYYKCNTLTSDLKEADISTSVFSSTMVELMNGTFTMSQLQAMKTTDLVEYLQKLGRQRFKDPEKLAKVLKKSIRDSYRLGKIAQNSIDINLGVQMRVIRAFEKEIKTLDQAIKDIAETMSESNILLSIPGIGPVFAAGIMAEIGSIDRFEHEAQLAKYSGLHWPKHQSGDRQKEHTPMSKSGNRYLRYYLVQAANSVRHHIPEYKDYYKKKYNEVPKTQHKRALVLTARKFVRLVFALLSNHQLYIARSEATES

SEQ ID NO: 357650 - protein, 460 aa, unidentified
MDVIVERCAGLDVHKKTVMAAVRTPGPKGRRQQVKEFSTFTADLEHLRDWLAAEGVTQVAMEATGVYWRPVWHVLEAMAGVELLLVNPRHVKNLPGRKTDVGDAAWLAQLLECGLLRGSFVPPREIARLRDLTRYRTKLTQERVRETQRIQKLLEDAGIKLDSVATDVLGKASRRMLEALIAGERDPEVLAQMALTRMRPKIPELRKAMVGHFDDHHTLLLGMHLDHVDRLSEIIGRLDEEVDRLMAPFAEAATRLLSIPGVAKRSAEVIVAEIGVDMSRFPTPAHLASWAGLCPGNHESAGKRSSGRARKGNGVLRAAMCEAAWAASHTRDSYLAAQYRKVQAALRDPQRRQGHLRRRPHHDRHRLARALRRSSHLWRARRRLLRAAQRRRGPQALPHPGARTARTARHPAARSLTPSFGLSAERGSAPHPRPDAPLPCRELRSFVSEAMSILTAVARC

SEQ ID NO: 357651 - protein, 332 aa, unidentified
MAFNHEMKEHWMSVIIGIDPHKSTHTAVAVDRDEQPVARLTLPARAGQTDRLLAWAEPLDADRVWAIESAAGLGRLLAQQLIAAGERVIDVPPTLSARVRLLSSSRAGKNDTNDALSTAIAGMRHCGLRVVRPDDQLVVLRLLADRHHDLTGLRTQAACRLHVMFRELIPGGARLRVSAAHARRLLDEIDPVDAVASERHRLAYEHLGDIERIDAEIDAVKQRIASRVAATGTAITELHGVGPVIAAIVLGQVGDISRFRTRAQFASYNGTAPIEASSAGKQRHRLNPRGNRQLNHAIHMIAVTQVAHDTPGRATTFAAKPKARPAKKPYAR

SEQ ID NO: 357652 - protein, 385 aa, unidentified
MQTPNDLSQSRIVLKQDSTLIAVIEMSLSSWLVAGMVPSVERQPLKKLPIDENALLKLLHRWREEAEKAGRKIERIAVAFEAGRDGFWLARWLRARGIEAHVIHASSVAVSREHRRAKTDRLDAELLKRAFLGWLRGERDHCKMVAIPTIEDEDAKRPNREREGLVGEQTRIINRMKAALSRLGIRGFNPKMKKAAQRLEDLRTPADEPIPPNTLAELRRDMERRRLISEQIRQIENARLELIEHAPRHGPHAMVRVLARVIGVGIETADMLVQEALSRNMRDRRAVARYAGLTGSPDESGTRRREKGLARSGNARVRRGMIQLAWRFLMFQKDSALARWFRARTENARGARKTMIVALARKLLIALWRLVREGVVPDGVVLRPV

SEQ ID NO: 357653 - protein, 423 aa, unidentified
MERYDDSRLSEFRQLRQGIRQPKEHMVVGIDIAKDRHRAFFGTPTGRTLLRKVVFENTREGFEKLLFHTDILMRRHALKKVVFGMEPTADYHKPLGEYLTGMDHTVVLVAGGAVRKNRELLDGRWDKNDTKDAANIADLVCQGKCLFYDHPSPKIRELRMLLSLKRRLKKEEHSLTVRIRNHLIAQYFPELDPYYTCGEGPAVVRWCIDPREVSTLSLQEFSRMVSARNGGEKQRRRLGEIHAIAASSIGCSVTPGVSYEAGLLVDTVRKTKEMVRETDERIAFVCSFLPEYPCLMSIPGFGPDVSAKVLGALGDPRRFENHRQVLKLAGLDLSGDRSGKRSDVPVVISKRGKADLRYALYQAAMVASSKNPVFMKYFTDRMAGRQRERGIGTRIRVKMAAKMLVIAWTLMKRKEMFDPGCIN

SEQ ID NO: 357654 - protein, 351 aa, unidentified
MAEALRNSIAFVGIDIGKNSFHVVGLDGRGAIVLRQKWSRGQVEARFANMPPCLIGMEACVGAHHLSRGLQKLGHDARLMPARYVRPYSKGQKNDFRDAEAIAEAVQRPTMKFVATKTADQLDLQGLHRVRERLVSQRTGIINQIRAFLLERGVAVRQGLRFLRNELPSILAAPSDALSPRMVRIIEDLAGDWRRLDERVEGLAKEIEAIARRDAGCERLISVPGIGPIISSAMVAAIGAGDVFSKGRDFAAWLGLVPRQISTGDRTILGKISKRGNRYLRVLFVQAAWVVLIKPKSWERHGLKSWIEAAKKRLHRNVLAIALANKLARIAWSVLAHGRSFEASKLAAAAT

SEQ ID NO: 357655 - protein, 413 aa, unidentified
MPTNHPYDLVIGLDRSDRTADLHLIDTHTGKVQKQTVATSPEALHDWLAQLRQDHPQARVALCLEQPAANLIVFLETYSWINLYPINPISLQKFRETFVTSRAKDDGKDAQYLAELLLSHHDKLKAWQPDDSQTRQLQQLVLHRRAVVDQRTGLTNRLKALLKAYFPQALELCGEDLWRPLATAFLLKWPTLQSLQKVRKESLKQFYHLQGSRSQTLIEQRLERIDKAVPLTDEIALLQSYTLRVQLICKELQLLDKTLDQFDRQIANGFQQHPDRSIFEALPGAGPVLAPRLLTSMGSERERFPRPGNLQCLSGVAPVTKQSGNKCYIHRRYLCPKFLKQSFHEYAKESILHSRWAAAYYLQQRTKGSQHHTAVRALAIYEAALKKSKSPLVGLLDQIELGESPVKSRAKKS

SEQ ID NO: 357656 - protein, 417 aa, unidentified
MDIVHPRCCGIDVHKATVVACVVISRQRGKPTREVRTFGTMTDDLLELAEWLAQRQVSHVGMESTGVYWKPVYTVLEGRFELVVANPQQVKAIPGKKTDMKDAEWLAELLRHGLMPASFIPPTAQQHLRELTRYRMSLVQEHAAEANRVQKVLESANIKLASVASDVLGVSGRAMLQGMINGETDPQALAGLAQGRLAKKRPELVRALRGRLQPHHRFLLAEQLRHLEALEESIQRVSQEIEERLRPFDQQLALLDTIPGVARTTAEVLAAEVGMDMSRFPTAQHLASWAGMCPGNNQSAGKRRSGKTRKGSPWLRSALVEAAWGAAHTKDTYLAAQYHRLVGRRGKKKALVAVGHSILVMVHSILKQGVAYRELGGNYFDQRAKEATQRNLIHRLQKLGLKVTVEPLAPATVPSAA

SEQ ID NO: 357657 - protein, 401 aa, unidentified
MVSDFRKGRYNLMKIYVGIDIAKLNHFAAAISSDGEIIIEPFKFTNDADGFQLLVSKLESFDKNSLIIGLESTAHYGDNLVRFLVTELYQVCVLNPIKTCQMRKNNVRKTKTDKVDTYVIAKTLMIQDNLRFVSFFDLDMMDLKALGRFRQKTIKQRTRLKIQLTTYVDQVFPEIQYFFKSGLHQHAVYALLKEAPSPKEIASMHMTHLANLLKVNSHGHFTKEQAKELRVLAQKSVGANDSAISIQITQTIQQIELLDSQLEKIEAEMTDIMKFNDSVIMTIPGIGYINGGMILGEIGDIHRFSNPNKLLAFAGLDPSVYQSGNFQAKTTRMSKRGSRVLRYALVNAAWNVVRNNATFKAYYDAKRAEGRSHYNALGHCSGKLVRVIWKMLTDNVEFNLK

SEQ ID NO: 357658 - protein, 371 aa, unidentified
MKSILSVGMDVHKNSFSLCAYDGYTGEIVSESTFASDVKLVIKFIETLKSRYESDVEIKCGYEAGCLGYSLYKSLTSRGVDCVILAPTTMQVSAKNKMVKNDRMDALNIAKNLASGSYKAVYVPDEEDVEIKEYIRMIHDFKKELKRVKQEIYAFVLRHGYQYDGKSKWTIRYMNWIRELEMSEIQRETLNEYIAEMENLNDKINRFMNRIDEMYQSERYHEKVSKLRCFKGIETFAAMTIQVETADFERFPSAKAYASYTGLTTGEHSSGDKNNRIGITKQGNTVIRKTLVECAQSLVKGNVYAKKSQGLKSRQKGMDVNIIAYADKATERLKKKYQKLIERNVPRNKAIVAVARELACFIWGMETGNIH

SEQ ID NO: 357659 - protein, 319 aa, unidentified
MNTTTAAHIDRSERNVGIDIGKSTLDVCIFELDVYLQYPNATEGIRELIKKLSRYKLTRILVEATGGYERGLVEACAERELPVIIVQPTQVRQFGKAQGVFVKTDKIDSRLIAQFGAILKPEPRPLNSKKVRYIRDLLSRKRQLNEIRTQELNRQHKAPSILTATHKRLLKVLDKEIESINKLLAEVVSEVTEWQRTYEILSSVPGVGDGVTFTLLGELPELGQLSPRKIAALCGLAPYNRDSGIMKGRRRIKGGRAPIRTVLYMAMLSAIQCNPIMKKFYKKLVQQGKHKKVALTACMRKMVTILNAMVRDNCEWQAK

SEQ ID NO: 357660 - protein, 361 aa, unidentified
MKKVSRELPKMEAGLVKPEMTVGLDLGDRYSHYCLLNSDGEVVEEGRLQSAEAALRRHFEGEDCLRIALECGTHSPWVSRLLNVLGHQVIVANARKIPAITGSESKNDRNDAEKLARFAAFDPKLLSPLEHRSEERQVDLNLIHARSTLVRARTMIVNALRGLVKSAGGRLPACSTEFLPARALAAIPPALSAVATPLVEQIGLLNAQVDGMDKQIEKLSAKYPEIVLLRTAPGVGPIVAAAYVLTLGQPDAASNRSAGAFLGLRPAQSQSGAADPQRRISKAGDSFLRSLLVQSAQYVLGRFGPDSELRRWGLKLAATGGKRGKKRAIVAVARKLAVVLHALWRSGQRFQPFPQQAAVAA

SEQ ID NO: 357661 - protein, 342 aa, unidentified
MLIIGCDYHPSVQQIAWVDTDTGECGERRLTHSGGEAEKFYRELKKKGVSVRLGMEATGHARWFERLLGEINYELWVGDPAQIRAKRVRKQKNDRRDAEHLLKLRLENNFPRIWVPTPENRDVRQLVLHRHRLVGMRTRVMNQLQAIAMNEGVRRKRGLWTEKGRAQLESLRLPPWTTRRRQELLELVDRFDPSIDQLSQAIEQEAARVPEVQRLQTHPGVGPITALAFVLVLGTPVRFSCGKQVASYLGLIPCEDSSADSWRLGHITKQGNSMLRFLLGQAAQSVARSDQQWRHQYAHIAMRRNQAIAKVAMARKLAVRLFWMWRRGWDYQQLKKFGSHVG

SEQ ID NO: 357662 - protein, 369 aa, unidentified
MGEITRAMPARVGADLAKSVIQVDGVDAAGRRVVVKTLRREQFLPWCARLPAGCIVAMEACSSAHHWARKLRALGLDARLIAANFVSPYRMEGKSGKNDATDAAAICEAASRPNMRFVPIKSCEQQGLMSLHRVREGFKEERTACINRIRGVLAEFGLVFGKSPKTLRSVLADVLEDASNELSTRARWVLQRAFEHWRELDEHLRWCDRQVGAHVRSDPAAKRAAGITGIGELGASALVAGVGDFKQFRSADQFGAWVGLVPRQNSSGGKISLGRITKRGDDYLRTLLIQGAKAAVMSAHKRDDPISRWLVQLRERVGWQKACVAMANKNARILWAVMTREHEFDPQHVSVKPLAKQPTAQARSSCCAA

SEQ ID NO: 357663 - protein, 436 aa, unidentified
MQALPVLDPKAAGIDVGSETLHVSIAGDAPKVFGTTTGQLHALRDWLKAQSVHSVAMEATGVYWLCAYEVLEAAGLEVLVVNGKHVKNLPGRKTDLKDCQWIATLHAHGLLRSGFVPPEHIRRLQDYLRLRADHVTMAASHVQHLQKALERMNVKLHDVISSVVGVSGLKVIRAILAGQRDPLTLLSLCDAQIQKKKADAVQEALRGTWKAEHLFALKQALELWEFYQQKIGECDGRIEGVLRELAGPEPQDGTRKAGGKPGGPNTPQIQNLHQMLVRLCGDKDATVLPGLADHTLLSLVGEVGTDLARWKSEKHFTAWCGLPPGSKQSGKRRGNTARQRNRAGRLFCVMARSVGRSVDKALGGFYRRLKGRRGGLVANQALARKLAELFWRLMVHGKDYVEEGLKKYETKVAETEARWLRKLAKKHGLSLLPIPI

SEQ ID NO: 357664 - protein, 354 aa, unidentified
MRFHSQPHRFYCGIDLHARTMYLCILDHDGNIVFDHNLACNPKAFLHAIAPFRDGIVVGVECMFGWYWLADVCRQEQIPFVLGHALYMKAIHGGKAKNDRIDAGKIARLLRGGTFPLSYVYPKGMRETRDLLRRRMYLVHQRGALTTHVQILNSQCNLPPFSKKLSFAGNRAELKIAERFSDPSVRKNVELDLDLIDKLDELIGATELYLTRTVKVDDTQSYYRLRSIAGVGPILALVLLYELHDVARFEHVGQFLSYARLVRCAHESAGKKLGSGSKKIGNAHLRWAFGEAACLFLRGSERARKWKQKQEKKRGPAKALAILAAKLGRAVYHMLRKKEAFDEERFWNTAIAVV

SEQ ID NO: 357665 - protein, 350 aa, unidentified
MDTIVVGIDVSKDRLDVSVQPAGTALSYNRDAVGIEGLIEALAPLAPQLVAVEATGGFEAVVAASLAAAGLPVVVVNPAQVRSFADALGKRAKTDRIDAQVIAQFAAAANPPVRALPDAATQALADLVTRRRQIIQMIVAEGQREKRASVRARKSIQRLLKSLRAELSEIDAEIDESVRGSAIWREKENLLASVPGVGSGTARTMLAELPELGTLNRRQIAALAGLAPFTRQSGKWRGKSFISGGRASVRTALFMAAMTAMRCNPALRAFHHRLRAAGKPKMVALIAVARKLLTVLNAYPQRQNKMAKRLTANTVAEERPKGASRRMAAGSEIATILRGSLRSLLRMTVG

SEQ ID NO: 357666 - protein, 319 aa, unidentified
MYYTGIDLHKKTSFLTTVDQKGKVVARANLPNGEVDILDYFAALEEETTIVIESMASWYWLYDLLSAHTFKVVISNPLKTKAISSAKIKNDKVDSHMLAQLLRADLIATVHVSSLKIRKLKELLRHRRRLVHDATRMKNRIQMLLMKNNIALPVSDLFGVSGIKYLQEIDLPVYHRHQLKSYLTLYGHLTRQIEPLNKRIRHLAQKNPMAHLLMTIPGIGPINAMFIIAEIEDISRFPSYRNLASYAGLVPSVDASAEKIRTGRITKQGSPYLRTALVEAAQAIPRMKKSRLNIFFRRRIVRAGYKKAIVATAHKILVW

SEQ ID NO: 357667 - protein, 364 aa, unidentified
MNKCHSNTELSSHEGTRCQFNGDTGVIKLGIDVHQDFYVVVEQVEGSNPKPPQRFQKQAFLHWAAKLRSQSAEVYAVYEACGFGFTLQRNLSALSIHCYVVCPQKLDEQNKRVKTDGLDAKALCLKLDRFVQGNRAALAIVRVPSEAEEQKRAIHRQREQLVKARKQLEAQGRSLMVNHGLEPVQSWWKPRAFAALPVPQWMKELLANSQPILVALQQKISTLTLQLQAAAAPTNPRGLGQMTSVIIDREIGDWNRFNNRRQIASYTGLCPGEYSSGQTRLQSCVTKHGNPRLRAALVELSWRLVRFQPNYKPIVKWRQILATGALATGAARKKAIVAVARQLAVDLWRIKTGRLRAEELGLIN

SEQ ID NO: 357668 - protein, 424 aa, unidentified
MKVTYQTCCGVDVHKSFLVATIVKTTGGIEPSYQKKRFSTFNSSILEFKQWLLDNDCHDVCMESTGKYWVPVFNLLEDEINVVIANPKWVKAVKGNKDDTKDSKWIGDLFRLGLVKGSYIPCKIVRILREYTRYRYKLVSCRSSEKNRYQNALTVCNVALDSVVSDIFGKSSTSIIDYLLEQSGTSINHEEIASKLLRSLKSKEDAVIESVEGYQMTDAQKYRMRLVRAHMDYITAEINDVDKMIENMIFSNPDFENAVQFLCTIPGVKRDSAITIISEIGTDMSQFGGSKRLCCWAGLTPGSNESAGKKKSVRITRAGVYLKPALVQCAHAAVKSDKSPYYKKKYESLVKRRGKKRAIIAIARMILTAIYQMLSTGEQWNPSDLYKIDMPVALVEKQKAKAIKQAKKLLQREGILPPDEPLAS

SEQ ID NO: 357669 - protein, 371 aa, unidentified
MIIIGCDYHPSFEQIAFVDTETGELQERRLQHREEAEKFYRDLAAQGMKVRVGMEASGHARWFERLLSELQFELWIGDAAEISAKRVRKQKTDRQDAQLILRLMLKDDFPQIWVPSWENRDLRQLLWHRHRMVQARTRMMNQLQAVALNEGLRCKKKLWREAGRAQLEAFKLAPWASQRRTDLLELLDRLNPTIAKLTQAIDREVEKCPAARRLQTHPGVGPLTALAFVLIIGKVDRFQCGKQIASYLGLVPLEKSSGNQRRLGHITKQGNSLLRFLLVEAAQVTVRSLPEWRSKYCHLTLRRGRKIAKVAMARKLAVRSYWMMRKEWDYEQLRKFGSYAGKPGHVAEFEQKRFVLLDVVGLFQRRHSTSP

SEQ ID NO: 357670 - protein, 316 aa, unidentified
MSQEVTFEQVVSRGCGLDVHKETVVATIKGEGLQETTRTFQTFTSSLNDLQGWLKSAGVTHVAMESTGIYWKPVYSVLEESFEILLVNARHIKNVPGHKTDKKDSAWIAKLLLSGLLKGSFIPPAEIRELRELFRYRRKLTGQRSSECNRMHKVLEECNIKLSSVLTDIQGASGTRIINALIDGHEDWDMLSGFCHGKIKASKSDIKEALTGKITDHHRFMLKLIREGMQSMDKFIEQIDARIEEKSAFCKQQIELLMSIPGVSRLTAEGIIAEIGTDMSAFPNEHHLASWGGVSPGNNESAGKKKAPEQSRGTSI

SEQ ID NO: 357671 - protein, 389 aa, unidentified
MKIYVGIDIAKLNHFAAAISSDGEIIIEPFKFTNDADGFQLLVSKLESFDKNSIIIGLESTAHYGDNLVRYLVTELYQVCVLNPIKTCQMRKNNVRKTKTDKVDTYVIAKTLMMQDNLRFVSFFDLDMMDLKALGRFRQKTIKQRTRLKIQLTTYVDQVFPEIQYFFKSGLHQHAVYALLKEAPSPKEIASMHMTHLANLLKVNSHGHFTKEQVKELRVLAQKSVGANDSAISIQITQTIQQIELLDSQLEKIEAEMTDIMKFNDSVIMTIPGIGYINGGMILGEIGDIHRFSNPNKLLAFAGLDPSVYQSGNFQAKTTRMSKRGSRVLRYALVNAAWNVVRNNATFKAYYDAKRAEGRYHYNALGHCSGKLVRVIWKMLTDNVEFNLK

SEQ ID NO: 357672 - protein, 343 aa, unidentified
MIYVGVDLHLRFCYMTVLDANGKILQQGRVENVDSALQQFFTNLKSSLPEKTGIAAAVEACGFWCAFVDCVEPLVERVVLVHPAKVKAIAHAKLKNDRVDSLTLAQLLRADLLPEAWKADRATRDLREVLRMRVALGRDRTRYKNQIHAVLHLHGQRAPVSDLFGRQGRAWLQALALRPTARQAIDTSLRMVDQLDHELRGVDRQLQKSAQQDPDARCLLSIPGIGAFSAMVLKAEIGDIRRFPDKKSLYNYAGLVPVIRQSADHLRRGGITRSGSPLLRWVMSEAAVTATRYSPAARAWFTRLAQRKHPHVARTALARKLLGAVWALWTQGICFDERIFAAM

SEQ ID NO: 357673 - protein, 411 aa, unidentified
MHNRQNYLYVGVDLHKEHHTAVIINCWQEKLGEIQFENKPSTFSEFLLEVETYVSNGLSVVFGLEDVGGYGRALAKYLVDHEQVVKEVNPALSFLERKSQVMIQKNDSWDAECVARILVNKFNQLPDAKPNDLFWSIQQLVSRRNALVKAQSALKNQLHIQLNHHYPSYKKFFSELDGKTALAFWQQYPSPSCLEGTNIKRLTAFLLDVSNNTCSVKKASEILKLVKEDGHTMKEYQETRDFLVRSIVRDIEFKKTEMKYIERELKQLVKLLDYQLETMPGIELVTASALIAEIGDVRRFPNANKLARFAGIAPVYFGSGGKGKVHKSKQGNRALHALFYNLAVQQVQVAKGSKMPRNPVFHTYYQKKLKEGKTKGQALVCIMRRLVNIVYGMMKYKTAYELPIVEEKEVV

SEQ ID NO: 357674 - protein, 340 aa, unidentified
MNKIITIGVDLAKNVFQVHGVDAKGAVVVRRQLRRRQVLAYFKKQPACLVGMEACATAHYWAREITALGHEVRLMPPRYVKPYVKRNKNDAADAEAICEAVTRPTMRFVAVKSAEQQGLLMVHRTRELLVRQRTMLVNAIRAHMAEFGVVARTGLPQVKELLAVIADEADERIPPLARTCLEGLARQLLSLEREIVGAERRIHAWHRTNEESRRLETTPGIGPITASALASSITDPHVFRSGRSMAAWIGLVPRQTSTGGKERMGRISKQGDQYLRWLLVAGAMTVIRHAKRRGTTDPWLADIIADKPTKVAAVALANKNARIAWALLRHGGTYRRPATA

SEQ ID NO: 357675 - protein, 376 aa, unidentified
MTRVIYIGMDVHKDTYSLCSFDSHENYMFSEATIKSETTAVLAYIKTIENRFKDDDVMVVCGYEAGPTGFSLCRELQKKNISCVVMAPSSLPKSTDDKKRKTDKIDARQLALHLAHNTYKSVNVLTPEMETIKELTRTRATALKAQKRAKQILLSFLLRKGMVYPYGNRSKYWTQKFYAWLKTLEFTNDIERYSFEEYLSEVNHQMSRVSRLDDKIAEIAETPLIKDDVKKLCCFSGISILTAVTLISEVEDFNRFEKATYFASYLGLCPGIHASGLSSQNRGITKAGNKHLRCLLIEAAQSMSHSQLCGKKSLRLLARQKDMNPLIVFYADKATERIKRKRNSMIFRGVNPNKATTAAAREMACFIWGMMTNNIA

SEQ ID NO: 357676 - protein, 327 aa, unidentified
MNIPALGIDISKAKFNICLINSPEKLKHKVFPNTPSGFQQLAEWLDKQSVDSVHVCLEATGTYGEALALFLHQAGHSVSVINPAAIKAYAGAQLSRTKTDKVDAELIARFCHTQRPPLWMPPSAEVRELQAFVRRLEALVEMHTAESNRLEATITVAEVRASVEEHLAYLKAEIKRTENLVRQHINNHPRLKEQSELLNSIPGIAATTAATLLAEVANITQYSSARQLAAYAGLVPRARQSGSSVRGRTRLSKIGNARLRKALYFPAITALRCSPFFEAWAKGLRERGKCKMSVIGAAMRKLIHLAYGVLKTGKPFDPEWTKKAQNA

SEQ ID NO: 357677 - protein, 308 aa, unidentified
MRFYTKQHPLYCGIALHARPMYLCVLHQEGEILVHRNMPAGPESFLKAVAPYRDGLVVGVECLFTWYWLADLCAREGIPFVLGPALYMKAIHGGKAKNDKIDAQKIAVLLRGGMLPQAYVYPAEMRATRDLRRRRMHLTRKRAELLTHVQQTNWQYHVPEIGKKMAYKANRAGVAERFPEPAVQKSIEVALARIDYDDHLRRDLELTMVQTAKQHDAKTLSLLQTVPGIGKILSLVLLYAMHAIARCPRVQDFVSYCRLVKCAKESAGKHYGTSGTKIGNAYLTWAFSEAAVLPIQIGSQKFFGRFDH

SEQ ID NO: 357678 - protein, 321 aa, unidentified
MNYMGIDVSKATLDVCLMDGESQVSEAQFSNDVAGFDQISSWLDNRTTDKELHVCMEATGIYSRALAIYCYEAGYTTSVVNPARIKAYASSQLQRNKTDRVDARLIADFCRTQSPPLWTPPDEAWSELRTLVRYLYEVKTMRQEEINRRKASQTNHVKQFLESHIAFLDEKITQIEAEIQSVIEQNQTLHHQQQLLVSIPGIGELTAAKLLAEIRDIPDFDNVRQIVAYAGLNPRQHRSGSSVHRRSRISKTGPASLRSALYMPAIVAKNRNPILKTFAKRLEERGLTGKEIIVAVMRKLLHLAYGILKSGRPFDPNYLAN

SEQ ID NO: 357679 - protein, 366 aa, unidentified
MAITHVALDDSKRVIVAGILRADATQPELREIPNDPRQVRRLFERLLREAPVRACYEAGVSGYDLYRQLTALGVDCAVIAPALTPRKPGERVKTDRRDAAKLVRLFRAGELTAIHVPTEAEEGVRDLTRCRDDVRADIVRWRHRVLKLLARHGRVYQAAKNWSQAHWTWIRAQRFDDVPLARTLEASLEALEQALRRRADLDRAIDGLASEPRYRDAVGPLRCFRGINTLSAMILVAEIVDFERFRRPRALMAYLGLVPSEYSSGDRHRRGALTKAGNTHARRVLVEAAWHYRHRPALGPRLVRHTADQAPAVVAEAWRAQHRLHRRYRHLVGHGKRPTVAVAAVARELAGFLWAAMTQAPRVRAA

SEQ ID NO: 357680 - protein, 472 aa, unidentified
MSSNHARSHDTRLRKREEEAAKLASMPVRNPHAAGIDVGDRSHWVCVEHTPDGSDTIREFPAHTPGLRDLTAWLAFCGVTTVALEASGAYGHVLFLTPLEAGGHVIITSPKFTRQIQGRPKTDRLDCQWIQRLHRHGLLPSVFQPDDATQTLRDFVRQRASLVRLSGHHVQRMQKALELMNLKLTTVVEDVTGVTGLRIIRSILAGERDPRVLANLRDRRCKHTAAEIATALDGRYRDEHLLELRCCFHMWEQYLAMIVDVDHAIAAQLRRMRTTTELPPLPKRKHVRGRRPHDPAFDVRTALYLMLGLDLTEMEGLDEMNALTLISELGTDFTKWPTVSHFTSWLGLCPNFKKTGGKGQSSKTRRGKGRAAYTFRLAAWSLVRSTGYLGAFLRRQRSRLGAPKAITAAAHKPARIFYTVMRYGVAYQKRSEEEFVTEHRKRMEKNLHRRAKELGYELRKIETPAEAEPQPA

SEQ ID NO: 357681 - protein, 341 aa, unidentified
MKNLFIGVDFSKEKVDVAIIFADGLVETAARVFKEFKTTVSGYRQLVKWVEQNSYGIDSSLWLFCGENTGDYSKGLCNFLYGKGYDMWLENAKSIKDASGLRRLKSDRADASMIAEYAMRNYDKAIMYEPLSESLAQLRELFLYRQMVVRHRCSFQVRRGEKRLTMEKSPVKTMISQSGRHIVSELNKEVEKIDKRIAELIKSDEELTEVFTIVTSVPGIGTQNAVCLMVYTDNFRRFNYDSRKIACYYGIAPFGKDSGTSVHSDPRVHYMANRQIKAMLTQAALAAVKFNPVMARYYMRLVERGKKKQVALNNVKNKLVHLVTAMVRNRQTFTPEYKISA

SEQ ID NO: 357682 - protein, 400 aa, unidentified
MRVIGMDIHRSFAQVAVLENGEITRQLRVDLLHTAVTEFAQTLSREDDVVLEATGNSAAVERLIRPHVRRVVVANSRLVRAIAYARVKTDKIDAAILAKLHAAGFLPEVWVADDTTLARRRLIAERMGVLEQLVRTKGRIQSILHSNLIPKYKGHLFGKAGRKWLDGLPLPNEERALLERLVQELERVSAQLAELDRVLAAKALDDPQAKRLMTIPGVSYVVASTVLASIGDVSRFETPQKLSSYFGLTPKVRQSGDGPARHGRISKQGNSAARTMLVEAAWSAKTAPGPLRAFFTRVQKKSGSGAAAVATARKLAVMIWHVLTSGQEYAFARPAFTAMKLRKVALKAGAPREYGKAGPGRDYWIAEIRHREMDYVERAERAYERMVDAWRDKPPKSAPA

SEQ ID NO: 357683 - protein, 311 aa, unidentified
MTKIVCGVDVSKRRLDAHVEPLGTFESFDNDAAGIAELAIFCRRQGVQLVVMEATGGYERTAFLLLWKAGIACGLTNPRSVRRYAEAMGVFEKTDQLDARIIARFAIAKDLKPNTPPTPGQQRLNALVTRLCQITDDLVVQKQRRSSAMNSEMVASIDEVIALLKRQTRTLEGEIASLIDDDPLWACLDKALRTKGVADRAVARLLAQLPEIGIYSNKAIAKLAGLAPLPDDSGTRIGKRHIRAGRAGIRSILFLVADIVRRYDPSLAAFHQKLTKAGKEKMVVRIALARKLLVRLNARAREARESYALAT

SEQ ID NO: 357684 - protein, 327 aa, unidentified
MGRVECALVTTNERPSVGIDVSKATLEVAVLPGGAAWQVPNTPEGCATLLERLQAVAPERIVLEATGGFEVPVAAALGTANLPVVVVNPRQVRDFAKAIGQLAKTDRLDARVLANFAQVVRPEVRPLPDATTRVLSALVARRRQLQEMLTAERNRLMTAAVQDAPQPLRDQLSQHIAWLQRHVQDVDRELHDQVRSSPLWREQEKLLRSIPGIGPVVSATLLAEVPELGQLDRKQIAKLIGLAPLNNDSGKHRGQRTIWGGRAAVRAALYMAALVASRCNPEIKALYQRLRAAGKPSKLALTACMRKLLIVCNAVLRTRASWRTISP

SEQ ID NO: 357685 - protein, 348 aa, unidentified
MLIIGCDYHPGFQQIAFVDTETGEVGERRLTHREEAEQFYGALKERSVRVGMEASGHARWFERLLNDMQFELWIGDAAEIRTKRVRKQKTDRQDAQLLLRLMMEDRFPRIWVADAANRDLRQLLWPRHRLVQMRTRIMNQLHVVALNEGLRRKKALWRPAGRSELESLRLAPWAKRRRQDLLDLLDQFTPKIQQLTRALEEEVEKRPVTRRLMTHPGVGPLTALAFELVIGTPERFHCGKQIASYVGLVPSEESSGDRRRLGHISKQGNVLLRFLLVEAAQVTVRSQAQWRSKFFHLALRRGRKIAKVAMARKLAVHLYWMWRQGRDYGQFEKLGSHAGEPGNRHGVK

SEQ ID NO: 357686 - protein, 351 aa, unidentified
MLIIGCDFHTRYQQIAMAEENTGELLLERRLDHQSGEAHAFYRNFSGAVRVGIEASGPIHWFERLLAELGHELWIGDAARIRASEVRKQKTDERDARLILDLLLAKRFPKIWVPTPAERDLRQLLWHRHKLVCLRTMRGNQLHALALSPGLCRKKKLFTKKGRVELVSLGLAPWASRRRAELLKLLDQLDPPIAELDRAVLEEAERRDDAVRLMTHPGIGPVTSLAFVLAIGPVTRFPRSKKIASYLGLNPTEESSGGRRRLGAISKQGNTMVRWLLIEAVYPAVRKDLALRQDYQRLKFRRGHAVAKVAIARKLAVRMYWMLRSGADYTQLVRRQGSPGGTLMNASSSLA

SEQ ID NO: 357687 - protein, 332 aa, unidentified
MQYHPTKLGIDIAKLTFDCFLKTGKKGKVKTFHNDATGYGELMRWLEKEGVKEVHASMESTGNYWVALAEYLVKAGQQVSVINALQIKRYRDYGKLHGNKTDKADAQLIAEYSEKEEERLRLWQIPSEKSRHLRALVRLTDDLKGDLTRTRNRIASIVTDEMVLASLKRTQANFVEEIKKVEAEIKVVIRQDPELNRKFGLLRSIHGVGDKTATRFLADFPDLSLFRTHAQLVAFMGLNPTIAESGTSVRGRTKISKQGNSQWRAALWFPCITAIRKNPIVSKLSERMLASGHAKMEVKIAAMRKLVVQMYGVLKSGKPFDPVNGRNIALSS

SEQ ID NO: 357688 - protein, 367 aa, unidentified
MQKVSTVAARQTKIFFQQKLTIGLDLGDRSSWYCVLDEAGEIVLEQKLNTTPKAMKEVFGAIPRSRIALETGMHSPWISRLLSELGHEVIVAHARNVRLIGESRKKDDRIDAQTLARLARIDPQLLCPVRHRSAKAQADLTVIRARAGLVRARTALVNTTRGLAKSYGERLRGCNVRNINPEKAEGLSPELQRALEPLLAGIESLSERIGEYNEGIENLAQQSYPQVALLKQIKGVGTLIALTFLLTLEDPHRFRKSRDVGCYLGLQPGRRNSGQSEPQMHISKEGDPYLRTLLVQGAQHILGPFGVDCDLRRWGLKLAERGGKSGKKRAIIATARKLAVLLHHLWVSGEVYEPLRNSNQRAMPAAA

SEQ ID NO: 357689 - protein, 343 aa, unidentified
MQIRSVGIDLGKTTFHLVALGDNGKVLLKKKFTQKQLIAFTANMQTCLIGMEACSGSHFLGRALREQGHDVKLIPAQFVKPFVKSNKNDFIDAEAIAEAVERENMRFVAIKTDDQLDLQALHRVRDRLMTRRTALINQIRAFLLERGIVFAKSPIRLREALPEVLENVNENLTPSMRNLVAMLWSEWKDLELQIVQMNDEVERIASSDAACRRLRQIPGIGPLVATAIVASIGNGAAFRKGREFAAWMGLLPKQHSTGGKARLYGISKRGNSYLRKILIHGARAVVLRSKRDRIAMGAWMTSLETRAPRNVLIVATAHKLARIAWAVLSTGQDYRAVPEALTV

SEQ ID NO: 357690 - protein, 428 aa, unidentified
MNCNTQNTKIASITEKTLIVGIDVGSETHYARAFDWRNFEFTRKPLVFSNTQAGFLTFKAWIEEIQEKNGKTAVIPGMEPTGHYWFALGKFLQDNGMKPVHVNPHHVKKSKELDDNNPNKNDRKDPKTIAALVNEGRFSYPYIPTGIYAEMRSLSNLRFQTQEEVTRIKNRIARWFAIYFPEYKDVYGDLKAVSGRMILKAAQLPEDIGKLGVEGVNQIWRDAKLRGAGMKRAKTLVSAAEHSVGSKEAPEAARMELKNLLDDMDVYTSRLEELVQKIEGKLKEIPYIDKLLEIKGIGMVTVSGFIAEVGDIRRFDNPKQLQKLAGYAIVANDSGKHNGESRISYRGRKRLRYVLYEAAISLVGKNAGFREIHGYYRTRKENPLKKMQSVVAVACKVIRVFYTILTKGVDYDAARLLGDIKHPQMQTA

SEQ ID NO: 357691 - protein, 327 aa, unidentified
MNTRKIILGIDVSKAKLDACLRLPQPRTLTVPNTPAGHAQLLAWATPAGPLHLCLEATSTYGFPVARHAHAAGHTVSLLQPLAVHRYAQATLARNKTDRLDAALIADFGHTQQPRPWTPPTAAQATLQAQSRLRTELIQAQQGWTNRLATAAAVVRPVLRQVIRSLQTQIAKLDAQLAATLQADPELHRQAQLLRSIPAVGPVLCAGLLAELPADLRDARAATAYAGLNPRHRESGSSVRGHTTLSKIGNARLRRLLYVPALAGLQYNPVLRAQAQRLAARGKTGKILVGALMRKLLCLCVGVLRSGQPWNPVGRPTPKTPEQMPSP

SEQ ID NO: 357692 - protein, 406 aa, unidentified
MNYLGIDVSKANSRYVLLDSDGEKAAKPFTLDNNQQAFTQLLERLKELNLQPDDLLLGIEATGIWWENFYCFMTEQKFKVIVLNPHQTNKFREALRLKAKTDDIDAYVIAGLLRSGEYAASYIPEETIQVLREIVKLRHQLVTNRQSFERQAHALLGLLFPEYEKTAIKNPFAIASLAILKAYPTAKHLAEAKPKNIEKIVRHIKGNNFNIAEIKTLIETAQNSIYSGRAKDARGMNLNILLTHVETLYNSIAQLDQRIDDILSPQNSDDAMSFPGANLLSIPGVGPKTLAAILSVVGADGKAYRDGKSFIGYIGFFPQIYESGETRRDNNISKRGPNYIRRALYISAVACLKHNAELKSFYDVKISQGKKPKQALICVAKKLAHMCLSMLKSGESYNSARVFMPA

SEQ ID NO: 357693 - protein, 364 aa, unidentified
MNKKRKRMTTAPDPKPFAPDQVDPCGTEVSAEELIVALCRKGVQQPLKSFPNTPEGHREIGHYLARSGRLVRVCMESTGVYGLDLALALAAQAGIQVRVANPRAVRNFAKALMERNKNDRVDAGVLQEFAARMPFEPWQPPARPALHLCALARRLEAITDLCAAEENRLHASQATEALPAIIRQDLERSIRFHQRAAQRLTREALKIISEDSNLQQHYTLLVTVPGIAQTSALRILAERVMISAHLDARQWVAYAGLDPREYSSGTSVHKKVRISKAGNRHLRRGLYMPALVAVRHDPHLRGFYQHLLANGKLKMQALVAVERKLLHAIYGMFKHQQAYDGTKVYRLPDGLTPASSAPVRTEAA

SEQ ID NO: 357694 - protein, 399 aa, unidentified
MIRLAGIDVHKDFLEVAFRELSGSVKVIRIEYTPKGLNKLIKLLRKYGITDAYMESTGDYYLPLYYALKGAGIRPHVMNAYKIRRPEANKTDERDAVWLLEVGESDLFSDSYVPNEDIQALRFLTRKRMKLVDRISNIKREINNILWRLGLQASQLAKKLRSKKKRKLLLDLLEGRLKPNSISDSDVRALYDVLSKPEFRAYIFVLKSRLAELAYLESQLEEFDREIEALARKFKDFVRILMSVPGISFILAVGILSEIGDINRFPSPGHLASYAGLIPIAKNSGGKRRVGRPSKKTNKYLRRYMFLAGMAAVRSRSCVVREFFQRLLGRGKHYKVAVVAVARKLLCVIWYLLHRGEFWREDNYFKGSRRLSKRGRVRISVREAIAILVRAGYVVKKRT

SEQ ID NO: 357695 - protein, 410 aa, unidentified
MSKLFVGIDVDLRKNTIHCMAPSGDTLKKFKVPNTFDGALALVDNVVELSARHSMQEVVLGLEATSNYGYHLAALFKNSEKLAPLSPKIHILNAKAVHNFKKSYSDLPKNDDVDAWVIADKLRFGRLPQEVFMDERFLALQRLTRTRFHLVNTIKREKTYFLNNLFLKFSSLRQEKIFSNNFGATAMAVVEEFLSPDEIAAMPLEELVSFLEQKSKNRLVDAEGMAKALQKAARSSYRLSKSLADPVNACLASSISVVKALQSEVKKLDKLIEEHMKAIPQTLTSVKGIGPVYSAGILAEVGDVMRFKNHKSLAKFAGLVWNEQQSGEWKAEDIKRVRSGNKYLRYYLVEAANLIRVHDREYAEFYRAKYDEAHTHKHKRALVLTARKLVRLVYALLRTNQLYIPRKRGG

SEQ ID NO: 357696 - protein, 412 aa, unidentified
MEVVYRCCAGLDVHKKSVSVCVSCREADGSKRQEIRAFATTTRDLLALADWLGEQGVTHVAMEATGVYWRPVWAILEGHHHLLLANPQHMQAVPGRKTDTKDCEWIADLLQHGLLQGSFVPPTEIQDLRDLTRYRAELTQAQTGVANRIQKLLEQANIKLSSVASNTLGVSGRQMLRALIAGETDSGQLAERARGRLRSKIPELRLALEGRVRDHHRFLLGEYLEEWDAIGQRIGRLEAEIERRIGPFEYAVALWQTIPGIERVTACSLVAEIGVDMRQFPSARHLASWAAVCPGNNESGGKRKSGKTRDGNRWLRRTLCQAAWAVTRKKKCYLSAQFKRIAARRGVKRAVMAVAHTMLVTAYTMLKKGRSYQDLGGDYLERINKDQLQRYFVKRLQNLGLKVTIQSVTATA

SEQ ID NO: 357697 - protein, 368 aa, unidentified
MARIAEQAGPVTGGVDTHADVHVAAVVDQVGRVLGTQAFPATAAGYRAAVAWMSSHGELAKAGVEGTGSYGAGLARYLAACGIEVAEVIRPNRQARRQRGKSDAADAVAAALAALSGEASGMPKTRDGAAESIRALRVARAGAVKARTQAGNQLRDLILTAPEQVRRQLAGFPSKRQAETAARFRPGGLTSPAEGAKAATASVARRHQELTAEIARLDAALEELVTHAAPAGFLAKQGVATQVAATLLATTGDNPGRVRTDASFAALCGASPVDASSGKQRRHRLNRGGDRQANSALWTIAMTRLAHDPRTKAYAARRTAEGKTAKEIIRCLKRYIAREIYKAICRPPQPGAVSTPQAKQDLLTPVLT

SEQ ID NO: 357698 - protein, 362 aa, unidentified
MTVIGIDAHKNWHTLVAVDEVGRRIDVLTVEARAAGHQKIMTWLEQFEEVIIAIEDCRHLTRRLEADLLDAGHKVVRVHTRLMAGMRRSGREPGKSDPIDAEAVARVALRESDLPTAELPGPAREIKLLSDHRRSLVARRTALQSKVRWFLHEIDPDLQIPSRALRRYHLLDELITHLDGLTGVVPEIARDILEDIRSLTRRINEIESRLSKLVRANHQHLLEVPGLGVLGAAMIIGETAGVRRFKSKDAFARFNGTAPIPVWSGNKVRVRLSRGGNRRINTALHMAAVTQLRLGGEGTDYYDKLIAAGKTRTEALRLLRRRISDRVFAAMRADEARPVAEATSPPPTAVPRTPIPALQAAA

SEQ ID NO: 357699 - protein, 342 aa, unidentified
MTVTTIGVDLAKSVFQIHGVDAEGRAVLRRRVRRQDLLAFFARLPPCLVAMEACSSAHHWARELVALGHEVRLIPPQYAKPYVKRNKTDAADAEAICEAAGRPTMRFVPIKTRESQAVLALHRVRSLLVRQRTASVNSARGLLGEFGLVAPKGIGRVGELRSGMEEANPSVLPDEARSALTALFDHLDALTVKIKSVEDEILAWHKTSKESQRLATAPGVGPLTATALVAAIGDGAQFRSARHFAAWLGLTPRISASGGKERIGRISKGGDRYLRTLLIHGARAMVGTTFREKVKPRPWLLALMARRPINVAAVAVAHKTARALWAMLRRGEAYRHPTKAVA

SEQ ID NO: 357700 - protein, 412 aa, unidentified
MFKIFRNNCCGLDVHKTWIYACIGITDPNGRTEYKQARFSSFSKGLRKLAAWLAKYSCTEVCMESTGKYWIPVFNILEKSCFVTLAHPKYTKPQKGNKTDRKDAKWICNLFMCDMIKPSFIPSPEIRQLRDLVRYRVKLTNMLTGEKNRAQNCLTVSNLKLDDVFSDVFGKSARSITNYILEHPGETFDVSPFVDPRCKTPVSEIQAAVDGAISPEQAVKLRQCLAHIDELEAHRKEIESEILQIAEPFSAVLDLLYTLPGLDKNPMTAIAILSEIGPDMSVFPSSKHLVSWAGCCPRNDQSNQKVKSRRISRAGSYLKPLLVQVANALIKSKKHPEFKERYHRIKSRRGHKKAIIAVCKMLLTAIWNMLSKLEPYNPDGFLEHRPVKQEKILTVSQALELLRLRGYTITNQ

SEQ ID NO: 357701 - protein, 422 aa, unidentified
MLEATSDREEIIERVAALDIGKAEQVCCVRVPGAEGKSRRVQEVTTYPTMTRALLGMVDRLTELEVTRVVMEATSDYWKPPFYLLEAAGFETWLVNAKDVKHLPGRPKTDKLDAVWLCKLAERQMLRPSFVPPPPIRVLRDLARYRADLIGVRTAEKQRVEKLLEDAQIKLSVVATDIFGVSGRQMLAALIAGQRDPQILAQYARGRLRGKLAALEEAFTGRFNDHHGFLLSKMLARIDQVSADLDDLDAAIEGEVAPFAQAAARLDEIPGIGHDTACVILSEIGMDMSRFPTAAHLCSWARFAPGVKESAGRRKGNGTTGHGNSYLARVLGEAAVSAGRTDTFLGERYRRIARRRGKKKAIVAVGRSILVIIWHLLGDDQARFHDLGADFYDTRAGTEHAKRNHIRQLQALGYRVTLEPAA

SEQ ID NO: 357702 - protein, 349 aa, unidentified
MLADEVDYVVGVDTHRDQHVLAVVVASSGGVIAQRSVRSNAHGYTEAIGFARDYAPGARIWAVEGAGHYGAGFARYLSSRGETVHEVSSTARGERRLQGKDDLLDATRVARSALASTARALPRSGERQEALRLLLLARRSAVDVRRVAIVQLRSVIVTAPESLRDELRRLPLGELLRRCSRFRRSSSRTPDQLATILVLRSLAQRIQAATREASELEREILTHVRALVPELLDEPGVGPIVAAQLIVTWSHHGRVTSEAAFARLAGVAPLPASSGLTTRHRLSRGGDRQLNRALHTVILHRRQHDPATRDYIARRITEGKTPRDATRILKRYLARHLYRVMQNASPAMT

SEQ ID NO: 357703 - protein, 347 aa, unidentified
MKFYTKQHTHYCGIDLHARMLYVCILDSQGETVVHKNIKANPEALLRLITPYQDNIVIGVECMFSWYWVADLCREKGIAFILGHALYMRAIHGGKAKNDKIDSHKIATLMRGGMFPEAYVYPSEMRGTRDLMRRRMHLMRKRSELLAHVHNTNSQYNLPEIKKNLRYAFNREGVADRFNDPSVSKSIDLDLNLIDFYDKQLSKVEWHIQQHAVDCDQHSLILLRTVPGIGKILSLVILYEIHTIERFPSVQNFASYSRLIKCKRESAGKSYGTAGAKIGNAYLKWAFSEAAVLFLRKNPDAQEWLKKKTNQHNKARALTILAHKIGRAVYFMLKRHTIFDQEKFLNI

SEQ ID NO: 357704 - protein, 349 aa, unidentified
MKILALDLGKYKTVGCAYEGENGRHRFQATCTTAAGLERLVKEVQPERVVIEVCNLAGWVCDLLRGQGIAVQVANTSDDAWRWRKVKRKNDRCDALKAAQLSAVNQLREVHIPRLEVRQWRALIAFRQQLVQRRSRIKNHIRDLLLTEGQILPRGASCWTQLGVARLEALAKPFSEVGVHELWRGQLDIELRQWRAVQQEIAAAEAQLDAIAGADGRVALLRTIPGVGPRLSEAIVALLDQPARFHNAREVSAYVGMVPKELDSGETQRRGRITKHGSRLVRSLLVEVAWAGMRYNPWVRQTYQRISGDKKSRKKIAIVAVGRRLLVRCWAMLRDGTRWRPPAIQAARQ

SEQ ID NO: 357705 - protein, 315 aa, unidentified
MENTIGIDVSKAVLDVHVRKGEKDLRFENSAEGIDKCLRMCLEVKPELIVMEATGGYEYLAAATLSGEGLAVAVVNPRKTRSFAKALGITAKTDRIEAKAIAEYAARCEPMAQDAIDENSRILRALTARRQQLLGMRTAEKNRKEHAVGKAVQRSVETMIRTIDREIDKVDKQIRDRIDGMPELKEKAKILSSAGGVGQTTAAMLVSELPELGTLNRRQIAALVGVAPINRDSGTLRGKRMTGGGRRDVRNRLFMPTLVAIRYNPVIREYYNRLVEKEGKSKMVAVIASMRKLLCILNAMLKKNEKWQPRILQNA

SEQ ID NO: 357706 - protein, 347 aa, unidentified
MRFYNTQHPFYCGIDLHARAMYVCILNQAGETLLHRNMQTTPEAFLKVIAPYRPDIVVAVECMFTWYWLADLCADEEIPFVLGHALSMKAIHGGKAKNDKIDSQKIAVLLRGGMLPQAYVYPAEMRATRDLLRRRMHLAHKRGELLAHVQNTNSQYNLPAIGKNITYKANRDGVAERFADPAVQKSMEVDLALVSYYDELLRDVELTIVKTAKQHDANTLYLLQTVPGIGKILRLVLLYEIHQIDRFPRVQEFASYCRLVKCAKESNGKRSGTSGAKIGNAHLKWAFSEAAVLFLRDNPAGQKFLTRLEKKHAKGKALTILAHKLARAVYYMLKRKVAFDMKRFLND

SEQ ID NO: 357707 - protein, 391 aa, unidentified
MFYIGVDIAKNNHEASIIDSNGKLVSESFSFSNSIRGLEKFQKFISSFSIDFNNCIIGMEATGHYWLSLYSFLIDLEFSCIVINPIQSDAFRKMYIRQTKNDSVDSFVIAQILRFGEFSVSHFSDEDTFALRNLSRFRFALVDEASDWKRKLVAILDQVFPEYSSLFSNIYGVTSKELLSKYPLPEDMISIPADELAKLLSKCSKGRFGIDKAKEIQEKASNSFGIKFALKSFSFQIKQIIAQISFIEEQILEIEDEISSMINSLCPVITSITGIGDVLGAAIFSEIGDISRFERANQLVAYAGLDVAVKQSGNFNATDTKISKRGSPYLRRAIWLAASVAAFKDPALSVYYQKLRQRGKAHGTAIGAVARKLTNIIFAVLRDNKAYIPNI

SEQ ID NO: 357708 - protein, 366 aa, unidentified
MFHFTTLFIGMDVHKESFSLCYYDMMTNQFKHSTKVGPNVSYIVNYVNELRRLYGQDAEVLCGYEAGCLGFTLYHQLQAHGIPCIVMAPTTVMKEGSKRVKTDKKDAAQLAKALAFRSYRPVHIPTVEDEQVKEYIRMRTDHKVALKKIKQQIFAFCLRHDFRYTEGSSNWTQKHVRWFHSLNPKGLYAEILTEYLLTYEKLVDQIERYDARIVQLAQSDSYQEKVSQLSCFIGVKTLTALSIVTEIGDFNRFATAQHFASYLGLTPSENSSGDKERRGAITKAGNSYVRRLLIEAAQSLAKGTIGYKSKELKRRQSGNRVEVIAYADKANERLRRCYRTLVLGKNKKQNVAKTAIARELSGFIWG

SEQ ID NO: 357709 - protein, 328 aa, unidentified
MCEFTGIDVSKEKFDIGWLRDVKTGKKKTKVFKNTRAGHQQVQDWLLNNLKVPAQDIVITLEPTGVYHEALMYFLHDCGFQVLLVNPGKARKYAESLNQIHKTDKLDAVTLAWYGHAQQHKLTLWQPEAPEIRELKVMIRRLDALEKDLQREQNRQEAAQVSLSSDRVAQSLKDMIETLKAEIERLQQDIDNHIDRFPELKRNRQLLQSIKGIGTVMSRELVYLFASKRFKSAKQAAAYIGLIPKLRESGKLKGRTMLSKIGSARLRAKLYMAAVCASTHNPDIKAQKARLLKAGKVKMQALGAAMRKLIQICFGVIKHQCEYQPQLV

SEQ ID NO: 357710 - protein, 350 aa, unidentified
MLIIGCDLHTRYQQIAMLDKETGEVVEHRLEHESGETRAFYASLPCGAVVGIEATTPAHWFERMLTEFHHELWVGDAAQIRAMSVRRQKHDPRDAWHLMDLMASGRFPRIWTPSPRERDLRQLLAHRDKLVRIRTAVKNQLHALALSQGLCRGHRLWSARGQAELQSLTLLPWAGRRRQDLRELLTPLDTTIAELDKAVAREAEAREEVKLLMTHPGVGPVVGLAFVLKLGAIERFPRSKPVGSYLGLNPREHSSGGRQRLGRISKQGNVMMRWLLVEAAQTAARFDPELHRRYHRLKFRRGSSLAKVAIARQLGVRLYWMLRNQKGYAQLVRMQGSPGSGVVDPGPSTN

SEQ ID NO: 357711 - protein, 337 aa, unidentified
MRFCGIDLHSNNSVVVITDEMDKVLASRRCPNDLGKIVAVLEPHRAELAGVVIESTYNWYWLADGLMAAGYEVKLANTVAMKRYDGLKHSGDEDDAAHLAHLLRLGILPTGYIHPPSERGLRDLARKRIQLVRSRTAHVLAVENILARELGATPSSNVIKRWPVEAVDALGLATDVALAVKANVAVIEVLNREIERLEDRLLENAKLRPEYALLKSIPGIGEVLAIVIMLETGDIGRFAEVGNFASYARCVDSARYSNGKKKGEGNTKNGNAYLVWAFIEAANSARRFSDEARRFFDKKKTKTNNVVATKALAHKLARASYHILKEKQPFDVKRCFA

SEQ ID NO: 357712 - protein, 320 aa, unidentified
MDASLGIDIAKAKFEVALLTPDGRVRHKSCANTPTGFADLAAWLQRQHVTHVYACLEATGTYGEGLALWLHDTGHVVSVVNPAVIHAYARTQLARSKTDRIDAELIARFTATQQPSAWTPPAPEIRQLQALVRRLDALQGMRIQELNRLEAGMVVADVRASIEAVLANLDAQIAHVKQLIRDHLDRHPGLRAQRELLTTIPGIGEMTAAVLIAELFDKSYASARQAAAFAGLVPRLVESGTLRRRSRLSKIGPARLRKALYMPAVAALRWNPTIRAVRARLAAAGKPPMVIIGAAMRKLIHLAYGVLKSGRAYEPTWAHP

SEQ ID NO: 357713 - protein, 458 aa, unidentified
MNRNRSKSKIDRTMPMVHPNAAAIDIGATMHVAAVRADRAPEPVRSFGTFTADLHRLVDWFTECGVETVVMESTSVYWIPIFELLDARGFIVFLVNARDAKHVPGRKTDVSDAQWLQRLHSHGLLRASFRPKGQIAELRAYVRQRERLLEYAASHIQHMQKALTEMNLQLHHVVADITGTTGLRIIRAIIAGERDPEVLARLRHYSCHSSAETIAKALTGSYRTEHLFALEQALALYDVYHEKASACDVRIEAVLKELSIDRGHRSDSLPSSRRRTDQANGLAFDVRAALFALLGKDITQIDGLGPYLSLKLIAECGDDLSAWPSAKHFTSWLCLAPSNKISGGKVLSSRTRRSGGRAAALLRLAAVTVGRTDTALGAFYRRLSARIGKAKAVTATARKIAVLFYNAVRHGMEYVDPGASFYETRYRARVVHNLHRRAKAFGFVLQPMEPTPAAVAVS

SEQ ID NO: 357714 - protein, 466 aa, unidentified
MSQQGAKRRGRKKQIAQLPPELSHVNLDAAGIDVAAECHFVAVPQGRDPEGGDVRKFGAFTADLYALAQWLSRCNVTTVVMESTGVYWIPLFEVLEERGFTVRLVNPRHLKSVPGRKTDVLDCQWLQQLHTFGLLQGSFRPDREICVLRSYLRQRTMLIGYASHHVQHMQKALAQMNIKLQHVIGDITGVTGLKIIRAIIDGQRDPCALARMRDYRCKHDEATIGKALQGHWREEHLFALKQAVDLFDFYHRQITECDQRIEATLSTFEDKADGKDLPPPSQRRCRRNAPAFDLRTYLFRMTGVDLTRIDGIDAPTALKVLSETGLDMSRWKTTKHFASWLGLCPGNKTSGGKVLSSKTKPSANRAAAAFRLAAHGLHRSHSALGAFLRRKKAQLGKPQAITATAHKLARLFYFMLKNGTAYVDAGQEYFERCHRERAVATIRRKARALGYNLLEIEPLSLQGAQA

SEQ ID NO: 357715 - protein, 347 aa, unidentified
MLIIGCDFHTRFEQIAMLDTETGAVVERRLEHENGEAKRFYEGLQEPALVGMESTGYTLWFAELLGQLGHELVVGEAGKIRAQETRQQKHDRRDAQLILDLLVRGGFPQIWLPSAAERDVRVLLEHRHQLVQWRTRAKNGLQALALSYGVQRRSRLWSAAGQEELQKLPLREGMGRRRADLVHLVGQLDQWVKELDQRIDQEVARRPEAQRLMTHPGVGPLTALGTVLVLGPVERFPDAKHVTSYVGLIPREDSSGGRQHFGHLTKQGNRLLRFLLVEAGQIASRYDAALGRVYRRLAFRKGLPSAKVAVARKLAIRLYIMLREQIDYAEFCRRGSHAGRLVSEPLV

SEQ ID NO: 357716 - protein, 363 aa, unidentified
MTTSIPAPPATNLATSGGEQVLLGVDTHKNEHVAAVITTIGGLLDVRTFPATGAGYVQLLAWARSFGTLHRAGVECTGSYGAGLARFLHANSLQVIEVNQPDKSLRRRHGKSDMIDAEAAARAVLSGRATGGAKTGDGPVEMLRLFKMAKNSAIKSRSQAINQLKAIIVTAEDELREQLAELSNPHLIRRCAGLRRGTKTGTSAAVRHTLRLLARRIQHLTEEIEDLKTQIADAVEQAAPGLLEVQGVGPDSAAALLIAAGDNPQRMARAASYAALCGVSPIEASSGLTHRRRLNRGGDRQANAALYRVVLSRLRWDQRTQDYLHRRMAEGRTRREAIRCLKRYVARELYLVIRHAADAHERP

SEQ ID NO: 357717 - protein, 347 aa, unidentified
MRYFAGLDVSLEETTVCVVDDGGLIVREARAASEPEALVAFFRGCGLVMERVGLEACSLTAWLHQGLTEAGIVAICIEARQAKAAMGAMPNKTDRNDARGIAQIVRTGWYRAVHVKNPSCRSWRALLTARRMVLNKRRDVENGVRALLREAGLKVGTPSRKNFAARVGELVADDPVLAGLARSLLSVIEVMTQEVDRLTKRVLDEVRVEPTCRRLMTVQGVGPLTALAFRATIDRPDRFRRSRDVGAHLGLTPRRYQSGETDVQGRISRCGDELARTALYEAAHSLLIRSTKWSVLRAWGMNVAKRRGMARARVAVARKLAVILHRVWSDGSEFRWGKQVITTTAAA

SEQ ID NO: 357718 - protein, 351 aa, unidentified
MSEYIAFDSHKRYSWVDREDHSSGKSRGHRLEHAPGAVREYLSGCASGTAVAVEATGNWYWIVDEIEQAGLVPQLVHPRKAKLMMGQTNKTDKLDAQGLNRLQRNGTLPTVWIPPGPLRDLRELTRTRLVLVAQRTRLKNRLSATLAKWGTPASEYSDPYGKRGRAELENHLQRLPEQTRWVSGQLVAQLDFVSAQVRQLEQRLEELVEVTEAMQWLLSMPGVGVILAATIALEIGEIQRFPSAMHLASYAGTTPRVHASGGKVRYGSLRADVNRYLKWAFAEAGNSVAVHHTRCPDRHVSQLYRRLRQRKGHPKAIGAVARHLAEAAFHVLQGKQMYRDPGLGRGRTSQG

SEQ ID NO: 357719 - protein, 378 aa, unidentified
MKDIRYVGWDVDSEKIMVAVAEPGGEVRALGAIPYREESVRRLIRKLGPAKRLRVCYEAGPHGYGLYWLLTKLGVHCDVVAPTLVPVKSGDRVKTNRRDAEKLARCYRSGDLTAVWVPDAAHEALRDLVRAREVAKKDQLRARHRLGKFLLRRGLRAAEGVKNWTLKHLLWIKTLRFERPEQEATFLDYLHEVEHQAERVKRLDQAIDQAIESAPAGMRALIAALQALRGIQTVSAATLVAEVGPLSRFARPKQLMGYSGMVSSENSTGTSVRRGAITKTGNAHVRRILGEAAWAYQYRPAMSPELKKRQEGLSEEVKEIAWKAQHRLCSRYRRLTAKGKLRQKVMTAIGRELLGFIWAIGIQVEKELSHRKRPEKAA

SEQ ID NO: 357720 - protein, 348 aa, unidentified
MTTMTDGRRLVTGGVDTHRDVHVVAALDQHGVELGVQSFPTTPAGYRSTLQWLRHLGEVTRIGVEGTGSYGAGFAAHLRSRGVEVVEINCPNRQRRRSHGKSDPVDAIAAARAVLSGEATIEPKTRDGQVEAIRTLRIADRSARHNRNMAVNQMRALLLTGPEDLREQFRGTTVWRMVRGAARLRVSDPTTPLGATKFTLRLLARRVLELESELGALKAILKPLVERTAPELVACHGVGTYTAGALLVAAGDNPERLRDERSFAHYCGVSPIDASSGLTTRKRLNRGGNRSANEALWRIVMVRLVSDPATQHYMERRVKEGKSKRETIRCLKRYVAREVYPHLVSAAP

SEQ ID NO: 357721 - protein, 395 aa, unidentified
MNYNIQNAKIASITEKTLIVGIDVGSETHYARAFDWRNYEFTKKPLAFSNTEAGFLTFKAWVEDLQEKYGKTAVIAGMEPTGHYWFALGKFLQDNGMKPVHVNPHHVKKSKELDDNNPNKNDRKDPKTIAALVNEGRFSYPYIPTGIYAEIRSLSNLRFQTQEEVTRIKNRIARWFSIYFPEYKDVYGDVKAVSGRMVLKKAPLPEDIKKLGVEGVNKIWRDAKQRGAGMKRAKTLVSAAEHSVGSKEAPEAARIELKHLLGDMDVYTARLEELVEKLENKLKEIPYIDKLLEIKGIGMITVSGFIAEVGDIGRFDNPKQLQKLAGYAIVANDSGKHNGESRISYRGRKRLRYVLYEAAISLVGKNTEFRAIHEYYRTRKENPTEKDAVRSSCGM

SEQ ID NO: 357722 - protein, 374 aa, unidentified
MENTITYVAMDTHKKQHKIALHYPCQEEIVEFTISNTVRDIKKMVKKISKQAPGEVEFCYEAGVCGFTLKRRIEQFDCRCIVIAPSLVPRKPGERVKTDRRDARKLLMMHKAGLLTEVHAPNEHQEAARELTRLRETAKENLKRARHQLLKLLTRHGYVYTQGHHWTQKHIAWLRTIEFTEPMLTKVFEGYFDQMIYCIGRLEALDKEVELLAGSQEYKEIVGLLRCFHGIDTLTAITIITEIFEFGRFDSPRHLMSYLGLTPSEDSSGDKQKKGSITKTGNKRVRRLLNEASWHYRHRYVPSKALKQRRKGQPQWAIEIADAAGRRLSTRHRHLINNGKMPCKANIAVARELAGFIWFVVTQYHARKHTNDAA

SEQ ID NO: 357723 - protein, 348 aa, unidentified
MKILALDLGKSKSVGCLLETATNAAKYVTVKTTPVEIQRLVGRLRPQRVVLEVGTPAGWVHDVAKGLGVEVQVANPNHEGWRWRNVKRKTDRLDALKLAQLSAVDQLPQVHMPSRRVREHRALIGYRCQLVSRRTRIKNTIRSLVHRQGLTMPPGAEGWTRKSLEELRSWACPLEEVSPEATWRGQLQEELESLAAAESRLARVEARLDALGQQDERIRRLQTIPCVGPRTAEMLVAVIDDPHRFASGKQVASYVGLVPRQYQSGQRDRSGGISKQGHRQLRRLLVEVSWLALRYNPPLGGVYLRIRRGSRTRRKIAIVAVARKLLITAWAMLRDGTPWRPGGVELAA

SEQ ID NO: 357724 - protein, 377 aa, unidentified
MKRVKFVGLDVHAETIAVAVAEQNGEVRSLGVIPNREDSVRKLVRKLGPVEEPRFCYEAGPTGYLLYWQLTRMGAKCEVVAPTLVPVKSGDRVKTDRRDALKLARNYRAGELTPVWVPDAAHEALRDLVRAREAAKKDELRARHRLNKFLLRQGRRPPMGVKLWTIKYLEWVKREVHFEQMAQEATLLDYLHEVEHAAARIMRLDGAIAEAVKLAPPKMRAVIEALQALRGIAHVAAVTVVAELGELSRFARAKQLMGYGGIVASEHSSGERTRRGGITKTGNAHLRRVVVEAAWNYRHRPAMGTSLRKRQEHVSEEVKEIAWKAQQRLHQRYKKLLANGKNKGVVVTAIGRELLGFIWAIGIKVEAAQKESLQRAA

SEQ ID NO: 357725 - protein, 459 aa, unidentified
MKKSHTRVKKEKGISFDRPVLEPNAAGIDVGSRQMFVSVPPDRDSQPVRVFDVFTDDLNQLADWLEGCGVTTVAMESTGVYWIPLFEILEQRKLRPCLVDARHMKNVPGRRTDWQECQWIQYLHSVGLLRPAFRPAEEVCVVRALMRHRKNLVEMASQHVQHMHKALTQMNLQIHHVLSDLTGVTGMAIVDAIVDGERDASELAKLRDPRTKATTETIRKSLIGNWRPEHLFALKQSRECYSMYQQQISACDREIEKLLRAAPSRREPSDKPLPPNKKRKRNNGIDSESAFSVRTEAYKLFGVDLTQVPGLAQNVLSLYAEIGSDMSRWATPAQFVSWLALCPDNDVSGGRTLWRGMRKCKNRAAAIFRMAAYSLHRSLTPLGDYLRRMKGRLGPAGAITATARKIAVIVYAMVKNQVPYDETRWAEYEALRKMRIEAKLHRQARRLGYQLVPLQQPAS

SEQ ID NO: 357726 - protein, 312 aa, unidentified
MDLFVGIDVSKAVLDIAVAPTGEAWSVGNSTEGMQQLVSKLGEISPRLIVLEATGGLERRAIAALAGASLPVVAVNPRQVRDFAKATGRLAKTDAIDASVLALFADRIRPQVRPLRDEETQELEALVVRRRQVVDMITAEKNRLAAAPPSKRVRTAIGKTIKWLQKQLEETDSDLDNSVKGSPIWREKDDLLRSVPGVGKVLSRTMLSLVPELGTLGKKQLAALVGVAPLNWDSGQQRGRRCVWGGRAHVRAVLYMGALAAARFNPVIRAFHARLIAAGKLPKVALVACMRKLLTILNAIVRDRTPWTREAA

SEQ ID NO: 357727 - protein, 425 aa, unidentified
MSTGVSEGSDYVALIGIDWADEKHDVAILDTRTGKREQKVIVHTPEGLVEWTSWLRERFEGGQVAVCVEQAKGGLIYGLMMYGFITIYPINPHAFSEYRTALHVSGAKDDPTDAALLLDYLEKHREHLRAWVPDDEITRLLAMMVEDRRKAVDQRTNLTNRLRAALKAYYPQALSWAGEELHTSLACDFLAKWPTLASAKKTKAEVIRKFYYGHQCRKSELIEERIREIQNGTPLTTDRAVIDASVMVVKMVVGQLRILHEAIAEYDRKIAEVFSSHKDRDIFNSLPGAGENLAPRLLIAMGTDRNRFESSEEVQCMVGIAPVLERSGKKSHVHWRWACDKFTRQSFHEFANCSRRDCLWAQAFYQKQRDRGKDHHACVRALAYKWIRIIYRCWKDRVLYDDAAYLSSLKVRGSDLCQLIDQVAS

SEQ ID NO: 357728 - protein, 413 aa, unidentified
METGSKGRIDTRKENIIYVGIDLHKETHTAVMLDCWNQKLGEITFDNKPSVFHKLTRKVSRFVTKEKTAVYGLKNAYGYGRALAVWLLEKGCAVKDVNTALSYAQRKSVPMYQKNDSYDAEAVALVLINMLDKLPDAVPDDAYWTLGQLVNRRDNICSHQQRLKKQLHEQLCVAYPSYKGFFGDISRATALYFWLNYPSPEHLRGKTAEELASELRPISHNNCSIKRAEKILERVRTDGQTAREHQASRDAITRSIAGDLEHYREQLKIVESAIETMLPSFRCTLMTMPGVDVTTAANMLSEIGDIHRFPNADKLAKFTGICPINFSSAGKGKDMCPKQGNRRLQSIFYFMAIQMIQVSTNGTPRNKVFREYYLKRVAEGKNKQQVLICIARRLVNIVYGMLKNHTEYREPEQ

SEQ ID NO: 357729 - protein, 343 aa, unidentified
MGIDISKEKLNICLKRGTETVREEEIPNTAAAVRKCVKRINKENGVAVDEMLACAEFTGRYIYPLVCACDELGLFLWMEDPTRIKNSFGVTRGKDDRVDARRIAEYAYRFSDKAVAYEMPDRTLVSLKNLLADRDTLAADRKKYEMQLHDQKGYMDPSDYARKKRSWAAVVRTLDKQIALIDAEIQRLVESDEKIRHQKELLKSVDGVGDRVAVCMIVVTMAFTRFETPRQFNCYAGLAPFRYTSGKSIYSKSKVSQRANKQIKALLHLAAVSASTHMKESEYKEYYRRKTGEGKHPLCVLNVVRAKLVSRMFAVIKRDEAYQRHYNISTPNEKISQKTIANS

SEQ ID NO: 357730 - protein, 370 aa, unidentified
MLDTTTFVGLDVHARSIKAVSLDVMTGEARCATFGYDAGAVAEWVRSVDPKAKCVYESGVTGFDLQKRLSGLGVDCVVGAVSKMIKPSADRRRKNDRNDAEFLARMLSVGNVVEVWVPDDECEAARDLTRALEDARDDLSRSKQRLSKFLLRHGLAFDERTPTGRRKGNWTRAHWSWIESIRFAERADEEVLAYYVDAVRRAAEEKARLEGLVEAEARKPRWRKRVDSLRCLKGVDTASAADLVFEAGEFSRFRNARSFAAWVGLTPSEHSSGESDRRGAITKAGNKHLRKTLVEAAWHYLTCSGRPKDLAKGQAPDRGARRHAAKGVRRLAERREALLARGVHGNKANVATARELACWVWAVGLMAEEA

SEQ ID NO: 357731 - protein, 418 aa, unidentified
MREVGLDVHRDFCEVAIFEAGEVRSAPRIRTTLEELELFARSLGHDDRVALEVTGNAWEVARIIEPHVARVLIVSPSDTGIRQARAKTDRLDARTIAKLLASGSLEGLWMPDRRTRALRRRLARRRQLVASRTRAKNEIHAALMRRLIAKPKVSDLFGREGRRWLAELELPAEERETVDSCLRQIDFLDSELAQADRVIADDALRSAEIRRLMSVPGVNVITAATFMAAVGEIGRFGSARRLVGYLGLDPRVRQSGSTPAAHGRISKQGSPSARYALVEAAWSVVRQPGPLRAFYQRVRARRGHQVAIVAVARKLACLFWCLLTREEDYAYAQPSLTRKKLRRLELTAGAPKGRVAPRLWATNVAMRTAERELARQGEVAYERTVADWQAHGKKRGAGATPGRASRAARQESAPGPAL

SEQ ID NO: 357732 - protein, 400 aa, unidentified
MISIGIDISKEKSTVCMLRPYGEVVEPPYNVAHNESELNALIEHIQSFDEDVKVVLEATGGYHHIVVSKMLSAGIFTVVVNPYIMKKYCAATLRKAKTDKIDSVKIANYGIDLWFSMTAYCPPDEVYAELKLLGRQYEQYVRLKVGCKIHLAELLDGVLPGIKKILTGNVPAFSTKDKLCDFVEKYWHYDHIKKLSEEQFLVSYEKWSKKKGYRYNESQAIAIYQLSKNNIPTLKSSTSSTKMLVLQAVKSVRDAELTLSLIISQMQEIASTLPEYSVVNEMKGVGAVLSVRLIAEIGDVRRFHNGSALVAFAGIDAPPYESGSFVGTNRHISKRGSASLRKIGYEIMHALKVTKPTDDSAVYDFMIKKENEGKPKRVAKIAGFNKFLRIYYARVMEVYC

SEQ ID NO: 357733 - protein, 329 aa, unidentified
MYYVGIDISKRVVDVCLLADGIKGKRKTKTLPNGPNAVQALAEWLTRQKCEPSQAHIIMEATGVYHEHLAYGLHQSGIAVSVINPHRLREFARGMGILTKTDKVDACVLACYGCLRQPEGWTPPSPEIRKLRALLQHRDSLLGDKQRLENRLSTLNATLTTEEVVTSLESMVQHVKGELERIERLIEDHIDKHPGLKNDLKLLKSIDGVGDQIGWNMLATIRGSNFRSAEQVAAYLGVIPVERRSGTSVRGRARLSKIGPPAIRAKLYMGAIAAISHNRHVKAQYERLLLKGKAKMLAIGAAMRKLVHLCYGVLHTQQRYDRDYGVVAS

SEQ ID NO: 357734 - protein, 506 aa, unidentified
MKVQASKPTFTIDYNPIGQYGSNICRQDIGRKRPYRSLLRQRYWAWSFTSKLITMAKVAKRKQTSKGLRLEVVNPNAAGIDISPKEMQVCVPSDRDGECNRTFGVYTEDLHYIAEWLKACCIDTVAMESTGIYWLPVFRILKESGFDVILVNASDVKNFSGRKTDASDAEWLMMLHSYGLLKPCFQPENIARTMRNLVRHRDNLIRSASREVLHLQKAMEQMNLKLDNVFSDILCKSGQSVIKAILNGERDPKVLSDLADPRCRTSKEEIEKFLQATWDEEHLFEMRQSDSLYQFYQQLIAECDAKINEIAMQYSATVDAPKTELLRSGKYNAKKNRIGFDVEKVAFELWGVNVMRIPGMSRGALLRLVGELGAGFTTKFVDVKHFVSWANLVPNNKISGGALLSSKVPKKKNPVGIIFRQAANTLKAAKNPLGNYFRHMRAKGGHLQAMVATGKKLASIFYCMVQRKVEYNEKVYCNHRKQELQNKVAYLHKRLQRMESELANCG

SEQ ID NO: 357735 - protein, 346 aa, unidentified
MLYAGLDLSRKRLDFHLLDADGATVEVGAAPPDVDGLGGLTQRVARHGEPIRAAIESMNGARFVHDRLELHGWQVEIADAQKVKGLAPLACKTDRIDARVLAELARRDLVPAIWLPDPQVRAERERARWRLHLVRHRSSLKQRVHAVLLTHGKPCPVSDLFGVRGRQLLAKLGLPEPWQGTIEASLRLIDELDREIGECERELRRLGADHRYVPLLCTVPGISWVLAYTIAAELGDIGRFPTPRKLAGYSGLCPRVYQSGERDLRGPLSKQGPRYLRWALVEAATHACTHPTYRDRYQQTKARIGKQRGAKVAQIDLARRLSEAIWHMLSRGEAFAPKGATDPLAA

SEQ ID NO: 357736 - protein, 343 aa, unidentified
MKLIRVGVDLAKNVFQVHGIDRSEKPMWRRKLSRANWLETLLETIEPGCLIGMEACGGAHHWARRLQGHGFKVRLIAPQFVKPYVKSNKNDANDAEAICEAMSRPNMRFVSVKTVEQQDIQAVHRVRFELSNQRKAKANQIRGLVAEYGLVAPKELLQLRSAIPGWLEDAENGLTDRFRRLLNGLWHDMLALDQRMTELNREIAQIAATDPVAKRLQQLRGVGPMIATAMVATFGDVKHFANGRQMAASLGLTPRQNSSGGKERLLGISKRGDSYLRTLLIHGARSALRTAKDKDDRLSRWVTRIAQNRHHNVAAVALANKTARIAWAMMKNGTEYQPNLAAQ

SEQ ID NO: 357737 - protein, 362 aa, unidentified
MTIVTEHDQLRRVIVGVDTHKDVHVAAAIDDRGALLDVREFVASPAGYLELIAWSEAATAGLGADVLQYGVEGTGSYGAALVTAIEPSGRQVYEVSRPNRRDRRLRGKTDSFDAENAARAVLAGTATATPKSANGTIEMIRVIKVTKAAAVKARSQAMISLKHLIVTAPAELREDLRNLTRMALIRRCAGLRPGAVTDPRSAVKYALRAMARRWLSLDEEIKEHESRLDELTTTVAPLLRQGCGIGADSAAEILSLFGDNPERLRSEAALAKLCGVNPIPASSGKTNRHRLNRGGHRHVNAALYRIVIVRMRLDERTKTYVARRIAEGKTKAEIIRCLKRHLIREIWRNTRHLLHQTLTLAA

SEQ ID NO: 357738 - protein, 346 aa, unidentified
MTIVGCDFHPGWQQVAVFDSETGEIRELKLENGNGEAERFYRELSSRALIGFEACGNTQWFEDLLDRLGHEVWMGDAAAIRASYVRKQKTDRRDAAHILKLLIENRFPRLWRPSAEDRDQRQLLIHRHKLVGIRGRAKNGLQHLMLNRGVQMKRKLWSEAGQKALRALPLEGWAAQRRQDLLKLLSVLDPQIRQLEEAIKSAAQQDPRARLLMTQPGVGAITALAYVLTMGDVNRFQRGKQVASYLGLIPSECSSSKRRRLGSISKQGNSFMRMLLVESAQTVNRLDEGFRKQYQHRCHRMAKGVAKVAAARRLAVRLFWMLRTNTAYPEIAHIEGSPRKGVVGES

SEQ ID NO: 357739 - protein, 350 aa, unidentified
MLIIGCDFHSRFQQIAMLDPATGEVVERRLEHENGEAKTFYATLPSPARIGMEATCDAPWFERVLREHHHELWIGDAAEIRAAMVRKQKTDSRDALHILDLLLTDRFPRIWVPSPAQRDLRQMLRHRHKLVRFRTSVMNQLHALAMGQGLCRRKKLWAKVGRKELKGLVLDPWASLRREELLQLLDQFDPWIAKLDEAVVQAAESHPAAVCLMQQMGVGPVTALAFVLTIGPVSRFANSKKLVSYLGLNPSEDSSAGRQRLGAISKQGNPMMRCLLVEAAQTASRLDPELRRDYQRLKFRRGSSVAKVAIARKLAVRLYWKLREAEQPVPSARMQGSPASPVVGESLSPN

SEQ ID NO: 357740 - protein, 415 aa, unidentified
MALCLLSDLSCRVWGRQERCCLKGSLDVSRLGSDVAFLPIPDHRNHYFQQEHIMTAHIGGIDPHQDSFTVGIIDQHGIEIVHESFDNSAVGYVEAIELLATKRVRLVGVEGSAKWGAHVSIALVAGGFDAREVPPSRSAAQRRSRRLEKTDAVDAIATARALQAEPTLGPVQTLEVYDAAVAKIEAVLEHRRALVATRTLMLHHIGDQIAKLPTEIRDQLTTTGKIEGRLRRLETIDIANLDTTASGIYRLEWLQNQIDQDREARREIRRLERLIDDLLDAHGTTLRDEPGIGPISAATLLCETGDPFRFARESKFARWCGTGAVALSSGEGSGQPVRHRLDFGGNRRINSVLYIASVTQQRDTDQARVYLERKAAEGKTKREARRAHKRHLANRVIRRMWKDEQARTSLQSIAA

SEQ ID NO: 357741 - protein, 381 aa, unidentified
MKQDNKAKQNRGNQISAEAPQGTFDLGRRRWRVQREGLTVGLDVGDKISHYCVLDEEAEVVQRGKLKTTPAGLQPWMEALPASTRVVLETGTHSSWISRLIEQAGPETLVAQPRKIPQIYACKRKNDRRDAEKLARTGRLDPNSMGPIRHRSAEQQADLAVIQARDALVRARTQLINTVRGLVKSTGERLTGCSARSFARQAEEQIPQRLRAALLPLLSQIAALSEQIERYDVHVEQLAQRKYPETELLRQVSGVGPVTSLAFVLTVADRWRFRHSRDVGPFLGLVPGQDESGESSPQLGISKAGNGYLRRLLIGSANYILGPFGPDCELRRWGMKLSERGGKNGRQRAKVAVARRLAVLLHKLWVRGEVYEPLPEKRAAA

SEQ ID NO: 357742 - protein, 422 aa, unidentified
MTKSHILGLDIAQNSAVAQLERADGTRCWRGTLTTDLAGWQQLQKILLEHDAPFAATRVLVEATGVYHFAWCSRLTQAGAEVFVLNPLLAARLQSAANALREHKTDGVDVARLCETGRLYASALGRFRFQPQAAAQGLKQLDHARRQLRRTLTNLKKSLQSHLELVFPALLKANIGADTARGAAILARAPTAGAWTALPDLERKKLARDKQPALDQACAETLADEALAQACVPALHALLRAEQAMADQLHECDQAITPRLPAERVALIASLPGFGERTAAVMATYLPASFEGWGPRKKIVARLQALFGFDPRLRQSGQWVGKVKLSKRGIAAGRTALFQAAFCSLGHDPDNTAYYAALRAAGKQHKQAMVDLMRKQLRRLVAVLCNERPFVPSVTSPHTPPRTPPNAPRNKTDPRRKTSAAA

SEQ ID NO: 357743 - protein, 427 aa, unidentified
MPYRIAGIDVHKKMLAVAVADVEVEGDVHFERLKVGTSPVQLRALAEWLVEREVEEVVMESTAQYWRPVWEALERYWRSKRRTRPDAGPVSGTLHLAQAQSNRGAGGRKRDFPDAERLVKRLVAQELTLSFVPAAEQRLWRTVMRRKYQITRSRVQLHNRLEALLEEAHIKISSVVSDLLGTSARRMLHAVGDGETDPAALAALADQRLRATPEQLRDAFGACADLHPVYRRLVKLTLDELRTIEDHLTQLDQQMAQLLAHHHDAVHRLAEVPGLGVDSAQQIIAEVGVSAAAFPSAKQLASWMGACPGNEESAGVNYSHRCPKGNRQMRRVLNQAANAAVKAKGTIFAIVYRRLVPRLGHAQAIGAIAHRLCRLIWKILHEGVRYEERGPAVSVEAKKVRTRKMIRELRTLGYRVELLQASSSNPT

SEQ ID NO: 357744 - protein, 403 aa, unidentified
MDYDLLAYDVYAGFDVGKFAHHVVAIKANDQQIILNKKVAQDEESIRDVINGFKVFGRVLAVMDQKGNVGRLLAATIKDMGIDAGFLTPSDFHAFSKGYSEVKSDAGDAYIIADVAMRFTNRISPIADFEERVEALRVQTALRGALVRDSTQAKNRIRDLLVQIHPSFEACIGRDGLDKPVYLCILEHYGGPDGIRRAGKKRLKAFISKLAYYGQKADALTEQIFSALSKQTVCLPGADAREDAIRFWVAALILRKQEIKGVEEKIKAIYKSFPESVILNSMPGIADVFGAVILAEIGDINQYQNAGHLAAYGGVAPSKRQSGTTLNSGKKKVKCNRQLRNAFCESARISVNFDDWSLWYYKKKRAEGKKHRQAILALARHRTDILYAMLKTGSVYEPKTMTR

SEQ ID NO: 357745 - protein, 397 aa, unidentified
MVLKEWLEPDAGRPARPVLRGRRRSDASLLPDKDSITVAYAIDAGEVELLGKTGTTGADIDRLCTRLQSKAPHVRVVYEAGPCGYGLYRQLVQKGFDCMVCAPSLIPRKPGERVKTDRRDAIKLARSLRAGDLSAVYVPGIEDEAFRDLARAWAAAREDLRHARQRLKSFLLAHGVRYTGSANWGEVHRRWLGRCSFPSAWQHLAFDEHRRTIEDRLAQCARLETALREAVISWRFYPVVLAVQAMRGVQFVTAVGMVSEVGDLSRFEHPRQLMAWLGVTPSEHSSGGKRRQGSITKTGNSYARRLLVEAAWSYRHPARVSPEIQARLEGLPKAIIERAWDAQVRLCRRFRRLTARGKPINITVVAIARELAAFIWDISRLAMALAIPRSKLPSPCT

SEQ ID NO: 357746 - protein, 417 aa, unidentified
MKVTRIAEKINLNKVMDISVDVHKDALNFFFASNGKEYTDICSNRTDVIQRRIIKYKNIAKEHGMSNLRIICEPTGQYQNSLLRTARRNSCLTCYVNAESVKKFRVVETNDTGKTDIKDPRVISTLAGLNKVIRHRMIGEDYLMLRKLGKIYDETDVEIVRLKGRLNKLMVELFCDYSFKKDFLYSNSGLALIKKYGCNPYRFEKTMRHAAPRIQGNTLKRLFEDAQSSVLNELPPGYIEVLQIRFYQLFGDYLNQQKRKEEIVENMIEILDHLREKDLNIPPPTPGVISAKNIARLFGETGPISDFSSYRKLLRYFGLNIRMRQSGKYQGQNKITKKGRPLGRKVLDNIVLPLVKKGCLYGDYYHIKKEKEKRPGNKAMTIIMRNFLKKFYGWYKSGKAFDEKRFFDNKSLYLKAA

SEQ ID NO: 357747 - protein, 430 aa, unidentified
MAAVSIPIVDWLDKPQSFHFVQGYEDRFLWNTVVANDTRSDAYMIYLGIDVAKNSHVAAAMSSEGEVLLMPFPFANSADGFTLLREKLNSLPKLPLLVGLESTAHYGENLIYFLCGNGYHVAMINPLQTAAIRKSAIRKTKTDKVDDFVIAKALMMEGYTELQQADIQILKLKGLCKTRQNLILMRTRCKIQLGSFVDQLFPELNQFFRSGLHINVSYTLLKAHPRPAEVGALHLTYLSNLLRKASRGKYKKEDAIRLRELARNSIGTDSPALALQIRQAVSQIELFSAQLKQVESEISTIMDSLGSPIMTVPGIGYLNGAMILSCIGNIQRFSSPAKLLAYAGLDPAVVQSGNFSAKSTRMSKRGNSMLRYALINASHNVVRNNETFAQYYNSKIAQGKSHYCALGHTAHKLIRVIFTLLTNNIAFDLA

SEQ ID NO: 357748 - protein, 430 aa, unidentified
MMEEVDDAELVVERIAALDLGKAGLEACVRVPSPHRPGRRMQELRGYGTTTAQLLEMVAWLRHWGVQRAVMESTSTYWKGVYYLLEAEGFECWLVNAREVKNVPGRAKTDRADAIWLAKVAERGMCRPSLVHPAEIRRLRDLTRYRRALVQDRTREQQRIEKLLEDAQIKISSVLSELHGVTARAMMDALIAGQRDPRALAQLAKGRARKKTAQLEEALRGFFTDHHAAILRMMLDNTDRISAQIAALDARIEKEIGPFFGQAARLAEIPGVDAVAAAELIAEIGVDMTRFPSDAHLVSWAKFCPQTHESAGKSTSKGRGRGNPWLAGTLGRIAFANSRADTFLGARYRRLARRRGKQKAIVATGNSVLTVVYYLLSDPMATFCDLGPGYYESRINVHRRARDLVTQLQALTGQHIVIRDGKAVITDAAA

SEQ ID NO: 357749 - protein, 347 aa, unidentified
MAAVMIGVDPHKASHTAVAISVAEEPLGELRVRACAAQAERLLAWAAAWPQRIWAVEGAGGLGHLLDWQLLAAGERVLDVPPKLGARVRLLAAGDTNKNDPDDARSVAVAALRSAGVREVRPDDHAAVLKIWSKRYRDLGRTRTQVVCRLHAVLCDLVPGGVSRPIYAARAARILEQITPPDAVAAARCELAAAFLEDLRRIDAQMRDAKKKLTVAVAASGTTVTEVFGVGPVVAAIVIGAVRDVSRFPSRDHFAAYNGTAPIEVSSGPRKIYRLSRRGNRRLNHAIHMAAVTQVSHRHSDGRAYYERKLAEGKTPKEALRALKRQVSDTIFARLQADAQRAAAGTR

SEQ ID NO: 357750 - protein, 310 aa, unidentified
MERIFVGLDVSKDRLDVHVRPTDDKFAVAYDEEGLARLVSRLGLLQPTLIVLEATGGYEVKVAAVLANAGLPVAVVNPRQIRDFARATGQLAKTDTLDARANARFAETVQPAARPLATEQAQVLAELVARRRQLVDMLGAEQNRRRQAREPGLQKRILAHVTWLTRAIEELEGEIKRLIRSSPVWREAEDLLTSTPGIGDTTAHALIADLPELGRLDRRRIAALVGIAPLNRDSGLWRGRRMIGGGRPPVRRALFMATLVAIRYNPVIRDFYRRLTTAGRPKKVAVIAAMRKLLTILNAMLRDHRQWQPA

SEQ ID NO: 357751 - protein, 412 aa, unidentified
MEVIHSRCAGMDIAKRDAKVCIRLAGSGRRRTVETVTTWGATTRQILALREHLVAERVTCIVMEATSDYWKPFYYLLEDLVGVEVMLVNARHVKNLPGRKTDVADATWLAQLGAHGLVRGSFVPPAAVRQLRDLTRTRTAVTRERGREIQRLEKVLEDAGIKLSSVACDITGVSGRAMLEALIAGNSDPTAMADLARRRLREKIPALTEALTGRFTGHHAFLTRTHLNLIDQHTAAIDELTARIEVVIEPFRRFRDLICTIPGIGGNTADVIVAETGADMSRFPSAEHLASWAGTTPGNNESAGKVKSSRTRPGNPYLQGALGIAAISVSHTKHTYLAAKYRRIASRRGPLKANVAVQRAMLIAIWNMATTDTAYLDPGADYFTRLNPEKARTKAIRQLEAMGYHVTLEQAS

SEQ ID NO: 357752 - protein, 367 aa, unidentified
MKKVSTAAVKRMRNFSQHKLTIGLDLGDRSSCYCALDEAGGIVMEQKLSTTVKALQSAFGAMPHSRIALETGMHSPWVSRLLSGLGHEVIVAHARNVRLIGESRRKDDRLDAQTLARLARIDPQLLCPVKHRSAKAQADLTVIRARAGVVRARTALVNTARGLAKSYGERLRGCNVRNMNPEKAEGLSPELQSALQPLLVGIESLSEQIREYNERIEKLAQSSYSQVALLKQIKGVGTLIALTFLLTLEDAHRFRKSRDVGCYLGLQPGRRNSGQSEPQMHISKEGDPYLRTLLVQGAQHILGPFGTDCDLRRWGLKLAERGGKNGKKRAIIATARKLAVLLHRLWVSGEVYEPLRNSNRMAMPAAA

SEQ ID NO: 357753 - protein, 386 aa, unidentified
MIVIGADTHKGSHALAAVDDGTGKVRGSRQIKAEEPGHLAAVRWARELDEERVWAIEDCRSCSRRLEQALLAAGERVVRVPPNRMGASRRGEREPGKSDEIDALAVARAVVKDGVEQFPVAYLNEQAMEIRLLVEHRNDLVAERTRTVNRLRWHLLELCPELEASLKRKALNQARTLDRVDRQLRKLPTGARVRIAREQISDLRGLNRDIERLAAELAELVTAHRPRLLAEYGCGALTAAILIGHTAGNERFRSEAAFALQTGTAPIPCSSGKRTQHRLNRGGDRQLNHALHIIAVTRAQHDPATKEYLARKEAEGKTKKGALRSLKRHLARRFHQLLSEPPADQQPTPEPASIIEPEPPTIPERPKPRREVEQITAAPTPMACIS

SEQ ID NO: 357754 - protein, 350 aa, unidentified
MIIIGADYHPSFQQIAFVDTNTGEVQERRLEHPEEAEKFYRALGAQGSSVRIGMEASGHARWFERLLSELKFELWIGDAAKIHAKRVRKQKTDRQDAELILKLMLKDDFPQIWMPSGENRDLRQLLWHRHRMVQARTRIMNQLQAVALNEGLLCKKRLWREAGRKQLESFPLAPWASRRRQDLLQLLDRLTPTIAELTQAIEREVEKCPEARQLQTHPGVGPLTALAFVLILGKADRFQCGKQIASYLGLVPMEDSSGNRRRLGHITKQGNSLMRFLLVEAAQVTVRSDPEWRSKYFHLALRRGRKIAKVAMARRLAVRMYWMLRKGWNYEQLNKFGSHAGQPGYRHGVQ

SEQ ID NO: 357755 - protein, 469 aa, unidentified
MAARKQQKRGMSAQVVEDEDYQLRYEIVAGIDVAKESAVVCVRMPPAAGRKHRTSHLQTVPATVPAIGELAAELTAAGVQMVSMEATSDYWRIWFAVLEEAGLAVQLVSSSQARNLPGRPKTGKEDARWIARLTEMGMLRSSFVPPPEIRALRVYTRHIWDLTADRTRYWQRLEKLLEDALCKLSAVVSRLAGHQRARAVIEAMIAGERDPRALAALGRGRMRNDKLPALAEALSGMRFGPQHAHAAASLLRAIDLLEAELRDLQERVAAHLAAIPVSWGVDADGVTGPDAGREEDAAVLPAADRLDEIPGLGGEAAAALIAGIGLDMTRFPAPEALVSWAGLTPTARQSGPRKGRGKKGRGNTYAKRIAVLAAYAAANTDTFLGERFRRLSARPGGDGRKKAGCAVGRSILVIVWHLLNDPAARYRDLGPDWHARHTDRSRKARNARRQLEALGYDVIIIITLREDAA

SEQ ID NO: 357756 - protein, 339 aa, unidentified
MFCFIAFTGSHKTLYSGSMETVSFEQVVSRGCGLDVHKETVVATIDGEGLKRTTLEFGTFTSSLTKLKDWLVENKITHVAMESTGVYWKPVYNILEPTGITVWIVNARHVKNVPGHKTDKKDSRWICKLLLAGLLKPSFIPPREQRELRDLTRYRKKLIQDVASNKNRIIRILEDCNVKLSSVLSDTSGITATKLINKLCDGKKVTPEDIDEVYHKKIRATKEEIWEACNGNITDHHIYLMGAIRSNNRHIESSIEELNQKIRQILSPYENVMELLREIPGLSHKTADDLIAEIGLDMEVFPSEKHLASWVGVSPGNNESAGKKKATEQPTVTSRQKQH

SEQ ID NO: 357757 - protein, 419 aa, unidentified
MSKSMFCGCDVSLESNTVWLMLDDGAQPVKLFNTDNNQLGAELLVEKIYNISKEHCISDILIGTEATSMYDWHLLEYLAESKLGLEFNLKIYRFNAKWIKNFKKSLAPRGKTDPIDSFAIAERMRMGRLPKEYIPDSKYQPLRKLTRFRFHLQQQIAREKNFFLANLFLKASAYSQVKPFGSTFSATSLAVINDFFSVDELAAIPIEELTEFILEKGKSHFSQPSEIVDNLKRVAKESYRLKPELAPTVNLILASTYNNIRCYKEQVKLVDEAIAKNLKAFKHTLESIPGIGPVYAAGILAEIGGVNRFPNDSALAQFAGLTWPKYQSGKFQAEETRMSHAGNQYLRYYLVEAANSVKRCDAIYKAFYEKKYKEATKHHHKRALVLTARKLVRLIWTLLTRGVIYQPGYCSFEDLSKIG

SEQ ID NO: 357758 - protein, 343 aa, unidentified
MQAVTTIGLDIAKSVFQIHGVDAAGNVIVRRQLKRRYVLPFFQRLPPCLIGIEACASSHHWSRELKALGHTVRLMPPAYVKPYVKRQKNDAADAEAICEAVTRANMRFVETKTLEQQSCLMLHRTRHLFIRQQTAVINAIRAHLAEYGIVAAVGRNGVEELLGVVADPSDKRVPEIARACLAALGAQLRMLKAQILEFDRMITAWHRSNETSKRLDAIPGVGPALATALVASVPDPKAFRSGRNFSAWIGLVPKQHSSGGKDKLGSISKQGDRYLRSLFTAGALAVIRYAKIHGTKHRPWLTALLARRPAKVAAIALANKIARMAWAMMAKGERYKEPVALAV

SEQ ID NO: 357759 - protein, 344 aa, unidentified
MIYVGLDISSKSLVLHGMNEKKKTVFTGEIPPNKRALRKAMLGLGAETRLVVFEASNQLKWIAQCLRKIKGVHIHVVHPNELKWITQSNGKTDKADARKLAELARGNLLPRKVHIAEGVIRELRELISARNTAMRKRVSLTNCLRSYALQEGCSINASFLLNPKWPELLPSLKITENLKVIFTTIMPAVDALRDAEEEFLLRIKDIEDDRLDLVQTIPGIGPLVSATIVSALDNVERFENKKCVAKYGALAPTIYQSGNVTRLGHINFDGRREIRRVLLQSAHIIIRMKSPAAKPLRDFYDRIKAKRGKKIATIALCRKVLTIAYGILKTGNPYDPFVLTPNLA

SEQ ID NO: 357760 - protein, 347 aa, unidentified
MSITMIGLDTAKSVFQIHAVNETGKAEIKRKLSRNDLLPFFKKQELCTVVLEACGAAHYWARILTGLGHDVKLIAPEAVKPFVKKGKKNDAADAAALCAAASRPDMKFVPVKSLEQQGILALHSARSMLVKQKTMLANAMRGLATEFGLTVPKGIGRLEELTVLVDTDEAFPVKARQAFTGLFDQCKALTESIVTFEAEIVAHARHDETARRLATIPGIGPITASLIAATVTDIGLFKSARHFAAWLGLVPRQHSTGGKTRLGRITKTGNREIRKLLVLGATSMVYRAPQWNSAAGLWIRGVLERRPVRLATVALANKMARIAWALMTRKEVYQAKGRVAAAAVAAA

SEQ ID NO: 357761 - protein, 462 aa, unidentified
MQEKRESEAGRNRRRQLQGLPLMRADVAGIDIGSERHWVCAPTTDGSGREIADFGATTAELIRMAEWLQARGVRSVAMESTGVYWIPPHEVLEAHGLEVLLVDTRQLAQVPGRDKKTDPTDCEWIQRLHSCGLLRGSFRPAEAICMLRTLVRDKATLVAESADWMRRMQKRLDQMNVRVHRAVSDIDGATGMAMVRAIVEGERDARKLAQLRDPHCRKSEAEMAEQLNGHWREDHLFSLSQAWKMDEAIQQRMADYDNEILRKLGEMEQEEAHGQEAPALKNANKARKIKSRGQEPIRQALFRMSGVDGTQIDALGVETMEVILSEYGPDLSRFPSEKEFVAHATLAPHVPKSGGKPIQKKKRHSASARVANVLRMAAQSLRHSDTALGAYYRSMAQRKGADVATFAVARKSATLAYRLLRWGQPYVDEGAEAYEKRYQQQRIRSLQSRAKQMGYQLTPLTA

SEQ ID NO: 357762 - protein, 338 aa, unidentified
MKITTVGLDLAKSVFTLQGVDERGIIVLRKTVRRARLLELFAQLAPCVVGMEACSGAQHWARELRKLGHEPRIMAAEFVEPYRCGGKNDANDAAAICEAVSRPKMRFVAIKSVEQQAVLAVHRLRQGLVEERTALANRLRGLLTEYGVVVGVGLDRLRRALPEIMEDGANGIPGIARDVFADAGQQLRELDARIAAYDRRIAALARASEPVQRLMKIEGVGPVTATALVASVGNASVFNNGRQFAAWLGLTPRQHSTGGKQRLGAMTKHGDVYLRTLLIHGARAVLRVTPKRSDAKSRWAESLRRRRPDNVAAVALAAKHARIIWALLAREQDYRPAA

SEQ ID NO: 357763 - protein, 356 aa, unidentified
MRFYSKLHKHYCGVDIHAKTMYVCIIDQEARIIKQKNIKSNPAAFMKAIDKYRDDIVVSAECMFTWYWLADLCSKENIIFILGHALYMKAIHGGKAKNDRIDAYKIAYLLRGGNIPMAYVYPPEMRATRDLMRRRNHLVRKRAELLGHIQNTNHQYNLPPLPKNIRYKGNREGLIEHFRDECVQKSMETNLFLIDQYNSILLKLEHYICKKAKVHDHEALLRLLSVPGIGQTLALVILYEIHDIRRFPRVQDFVSYSRLVKPSKESAGKIYGHSGKKIGNVHLKWAFSEAAVSMLRRMPDVKKYKEKLQRKHGKAKALSIVAHKIGRAIYYMLKRKEVFNIEKFLTKKEQIQAGQA

SEQ ID NO: 357764 - protein, 375 aa, unidentified
MKEKVRFLGLDVHAETIAVAVAEPDGEVRSLGTIPNRAESIRKMIKKLGPAEKVRACYEAGPTGYVVYWQLAELGIECEVVAPTLVPVKAGDRVKTDRRDAEKLARCYRSGDLTAVWVPDEGSEALRDLVRAREAAKQDQMRARHRLSKFLLRSGQRPPTGVRPWTRPYLIWVAQLRFTQIAQEATRQDYLHEVEHIRARVMRLEQAITEAVKLASPALQQVINDLQALRGIADISAVTIAAELGQVSRFGSARELMGYCGAVPSEDSSGKRIRRGGITKTGNAHLRRIVGEAAWSYRRPPCIWYGLRRRQESISEEAKEIAWKAQHRLHKRYMKLRAAGKAQGKIITAVARELLGFIWAIGIRAETIVSQRTAA

SEQ ID NO: 357765 - protein, 321 aa, unidentified
MKNQYVIGVDMAKESFYACFDECTPPKSFHNTHAGIDQFFQQIQIYFVDIPAQQIIIGVESTGIYHLLLCVQSQKHGYTIKLINPLITKKYTQLQLRATKTDVLDAKLIRLCTQNSEGYRFQDTPETLTLKQLIREREFLAHLKRTLAVRHATTACKEHSIGASLYSAQTTLLPVIHAELKQLQKQLAHYKKEEQKLLQTIPGVGPLTAAAFISEVQDITRFSTIKQLIAFIGIDPKVHQSGTSIDKYRHISKRGNTLLRTRLYNAVSVAVLKPNQFQHFFQKKRSEGKPYRVALIATMNKLTRIIYAVWKHNSPYQEPQH

SEQ ID NO: 357766 - protein, 338 aa, unidentified
MSTKNTSNPSIFWAGCDLAKVSFDLAIWGHQSMPDMRVRHVRRQASEIPAVLNWLRPSAPEGARLGIVMEATGAFSEETARWFLAQDPNLLVAIVNPTQTCAFIHSLGLRNKTDLLDAKALAIYGHDRRPVPWEAPTEEVVQLRDLVRTRAELVDTQTAMKLRLKDHERSSKAATTALEQVIVTLGAQIKILDAEIQAMIDRNEVWKAQSKHFQSIKGIGPVTVATVLAELGDLRRFLRSRQLTAFAGVSPRKKDSGTSVHGKARMCKQGSARVRATLYMAASCAVRFNPDMKKVYERLVSQGKERRSALGAVMRKLLVLMRALLKSDKDYIPCLVAA

SEQ ID NO: 357767 - protein, 532 aa, unidentified
MATKRNSRKSGGAGISLLGKPNGVIQPRVQAVGPERFGIVAVDCAKARSKWMLCDFYGRVLIPPTTVEHGRAQLQLATVQLREACARHGLLDHLVAVEMTGTYHRPVQRAFRQAGSETRLVHPFASRHYRLPASADTKTDDKDLEAIFRAAVNGFGLLEPPAHETYQRLQLWARHRRDLVEKRAKLQCQIREGLERCLPGYAALFPEDDLWTRPVAMFLARRAGTAEAIRAAGVRGVTRWLVEAQLRFQARTVEKVVTWSGNAAAADPLAPDLTRLWRALDDDRQEKTKQITRLERELAEILVKTPYLLLLSHPGINVVSAADLAAETGPIEHYAHAKAITGRAGLFPSRYQSDEVDRADGPLARHRNARLRAAWLRVADNLIKCNAHFHGKFELWKQQRVDARDIRCRIANRAVRTVFQMVSGRRLYQHPSRLDRQYVLDKLLTFHQEHDTPPAEILRDLQSAAAQIPKHEQAAEAAPLVERYRKCRKSRRRGAQSLGTILLAVLARYGITGLESKGEAQGPIAAESVTST

SEQ ID NO: 357768 - protein, 450 aa, unidentified
MSFWSSTSFRRLAPLPDGVTPISWIALLIALYLTRLCAVRIRGSPARSIRFKRLEERMFYIGIDVAKRKHSLAVISEGGEKVITHYEFTNTTEGFKGMLGKLTSLGISHENSRSCMESTGHYGHALWSHLTDHGFEVCLANPIQTKNYARAQTIRKVKNDAIDALALAQWLLIENPSASSLSSEETAELKSIARFRTFHSQIIGDSKRKVIAILDVSFPEYSGFFSDDFGKASLAVLSRYPSASVLSRAHIDTLASLLEKNSRGKLGYEHALALRELARSSFGIGYAKEASTFQLKALIAQIEFTKHQMRAAEAKMEELLAKAATPIKTIPGIGTVSAAIILGEIGDISRFSKPSQLVAFAGYDPSVFQSGQFIGSKNHLSKRGSPYLRWALWLAADRARMFDPVLREYYEKKRSEGKCHKVAICAVARKLCNIIFAVLSANSAYICKTA

SEQ ID NO: 357769 - protein, 345 aa, unidentified
MQYYAGIDVSLESASVCVVDANGRIVREAKVASEPEVLINWFRGLGFTVARIGLEAGPLSQWLYAGMRDVELPVELVETRHVRDAFKAMPVKTDRKDARGIAQLMRLGWFRPVHCKSLPAQEVRGLLTARKLLQSKNHDVEMSLRGVLRGFGLKVGRTTPRSFAARIHELVAGHPTLSTIAEALLAARGTLFEQWQKLEKRLRSLAREDGRVRLLMTTPGVGPIVGLTYAAAIDDPGRFKSSKTVGAHFGLTPKKYQSGETDVTDRISKIGDGGVRTALYEAANVILTRPVKGSALKSWGMRLAARAGMRKAKVALARKLAVVLHRMLANGTSFLTDKAAAALAR

SEQ ID NO: 357770 - protein, 427 aa, unidentified
MTESLSDSTASGWKRYIAIDLHKHYLMVGGIDGSQRVVLPPRKLDLERWRAWAQANLTAADAVVIEATTNAWHIYDQLVPLVGRIVVAHPPKVKQIAAARVKTDKHDVLIVAQLLRADLIPEVWVPPPHVRELRALISHRQRLLRARTMGRNRLHSLIHRYNLTPPAGDLFAAKQRAWWVSLELSVTERLRVDQDLSTLDHLAKHIATVEAELHRLSTTDLWADQVPYLVQLPGIGLITTMILLSAIGDVTRFPAAQQLVGYAGLGAGVHSSGKTHRTGRITKEGRRELRWVLVEAAQIASRTHPYWQGEFQRLARRIGEKKAIVALARKLLVVIWHVLHGQSVDQRADAERVAFKLMVWSWKLTDEQRGHLTSRQFIRAHLIRLGIGNDLSHITRGGMKRPLASVAEVLALRPELRGPGAGAPLRG

SEQ ID NO: 357771 - protein, 351 aa, unidentified
MIAIGIDIHKETSTFYAFGDDGEPLEEFNKKFRRVRSNEKGYGEVTAFLEGKECEFLMENSTKTHDSFWTLRSLGFERLYVAHSTDLALITKSDKKNDDNDAEKLAMYMRVKQQNIDQFRTCYICTPEDMMKRRLCRVAKQEMVEASKYSRRVKAEFLMFGIRCPFNTTTKKAHEWMMEHRDPALAALGRAMEDNRVRIADLNKRITKEFTGDPVYEKLIAIPEFGPVTAGYLASIIVDIRRFASAKELAAYLGLVPRQKDSGETVSHCRITKTGDPSARWLLIQTVFRLVSDEENDSGLKRFFDTKNGGSIAERSSRGLSPVCSRKALVAAANKMCKIIFAILSHDGRSW

SEQ ID NO: 357772 - protein, 414 aa, unidentified
MTVAFSFAHFAAIDWAKQTHHAVIVNHTGQIVTEFSFSHTLEGWQQWRQRAARLAPLAVAIETSQGVVIDQLLQTPDCTIYPLNPKAARAYRNRKAPSGTKSDHLDAWSFADALRLDGSAWKPLSKQDPLLEQLHLLCRDEIALIEERTALVNQLLAALHEYYPSALAAFEDWTLPAAWAFVEAFATPQALAHAGKRRWEKFLHTHKLARPETYQKRLELFAKATEFGASEALTLAKSRLALTRVRQLRVLQIQLDDYRQQIEKLFEQHPDHEIFGSLPGAGPKIAPRLLGELGSDRHRFESPQALQCYGGTAPVSYQSGLVHQVRLRTQCNLVLRSTIHLWTDRSRHACPWADTYYQSLRKRGKTHACALRCLGQRWLKILWKMWQTRTRYDAELHQKHQIQHGSWVIKLHNA

SEQ ID NO: 357773 - protein, 367 aa, unidentified
MQKVSTVATKQSRNISQLRLTIGLDLGDRNSWYCVLDETGQIQEEQGVRTSAKALQERFSAMPRSRIALEIGTHSPWISRLLSELGHEVIVANARKVRLIGESRKKDDRLDAQTLARLARIDPQLLGPVRHRSAQAQADLMMIRARAGLVRTRTGLVNTARGLAKSYGERLRGCNVRNMNPEKAEGLSPELQSALAPLLAEIESLSERIVEYNDRIEALAQQSYPQVELLKQIKGVGTLIALTFLLTLEDPHRFQKSRDVGCYLGLQPGRRNSGQSEPQMHISKEGDPYLRTLLVQGAQHILGPFGIDCDLRRWGLKLAERGGRNGKKRAIIATARKLAVLLHHLWVSGEVYEPLHNSKPTTVAAAA

SEQ ID NO: 357774 - protein, 340 aa, unidentified
MKLCGAMDLHSNNNVTVLSNEKDEVVYRKRLPNDLKLILGQLAPYQSEIEGIVVESTYNWYWLVDGLMEQGYRVHLANTAAIQQYNGLKYTDDDSDARWLAHLLRLGVLPEGYIYPREQRPVRDLLRKRGQLVRQRTTNLLSIQNLFTRNTGSSLSANEIKGLQVEDIDGRVAAKDLALAIKANLAVMQSADEQVQILEQTVRERVKLRAEFKFLKTVPGIGQILALTMMLETGDIRRFPSVGNYASYCRCVGSQKISNGKKKGKGNTKNGNKYLSWAFVEAANFAIRFSPKIKSFYQRKKSKTKGIVALKAVAHKLCRACYYIMRDRVAFDVTKAFGQK

SEQ ID NO: 357775 - protein, 436 aa, unidentified
MRVVHEHVAGIDVHKDMIKVAIRSPGDKNIRETEILEFRTFYGVLQEVARLLRRRGVTHVVMEASGIYTDPVYYAMCEQDFTEVAVVNPAHARALRGHKTDAADCRRLAELFECGLLRGSYIPPAELGEMRDLTRYRIKTAQARTSEIQRLGKALESAGIKPGSVVSEITGASATAMIDALIDGERRGQVLADLAHWRIRAAGKTADLSMALTGRFTGHHALLCRLHRDRIAVFDEAIAGLDEQIAGRAGHWQRELDLLKTVPAFGDVVARAWLAEIGPAPHLHFASHGKLASWVSLCPGNNISARKRKHGRTGDAGTYIKPVLVQAAWNAIRTRGRLQARYNRLVRRFGGPSNPGAKKKAIIAIAHTLLKIAYQVLKTGKPYQDLGADFCTRRESPAQQHVYLERRLQRLYPGRTITITAGPPEAALASAVSHAP

SEQ ID NO: 357776 - protein, 444 aa, unidentified
MPHAGVLTRGDRRRNERLARLRSIVRRDYAVVAVDLASAKQAVVVTDHDSVVLGRRMFTGDAWVIDDALDWAVPIAAAAGFTGVVLGCEPTGHRWKPLLDRARARGIELVCVNPMLVHRGREEEDFTRDRSDFKDATIIAKKVSELRCYLPYQLDGHWCRLRHLGVRRDDQLVTAGAARQALRDLLECAWPAVLRTAADPLEALTWRAAMAVSTHPEQIMAMGYEAFAAAVTAELGRWGGKRRNLRILRAIWAAAQAPGGVRAERDAAAERAADVLRDWHRALAEITDVEVRMLAVLDALQLTELVTTLTGLSAVGAAAILAQTGDPARFDCARTWVKHAGLCPRANESGAFTGTTKVSGRGRPGLRTAAWRAVWGALRHNPVYRARFQHLTSRAANPLRRGQARAAIAAALLRQLFIIVTRRVAWDPAIAAGHPGSEVAPQAA

SEQ ID NO: 357777 - protein, 335 aa, unidentified
MDFKVFIGVDVSKDTLDFVPTLEGKALFHEQTKNDNKGINQFYKRLSKTVDARPDQWLFIMEYTGVYCNPMLEFAIRKELPVWMESAAKIKVYHALERGKNDALDALRIAEYAFAKKDKIKLWKAPRKIMIRLKFLIKLRERLITSKKRLMDPLREDKQFCDKGWVREHEKFLKPIMAKIEKQIKGVEQEIQHLINEDENLKKLYGLISSVSGVGQIVTINTLVVTNEFKQITDPRQMACNCGVVPFKYDSGTSVRSKARVSHRANKSMKVLFHLAAMSAISTKGELQDYYQRKVDEGKNKMAVINAVRNKIIHRIFACVRDQRKYEKNYTHSLV

SEQ ID NO: 357778 - protein, 367 aa, unidentified
MKKISTVVAKQGRNNSQQELTIGLDLGDRNSWYCVLDEAGRIQLEQRVRTTAKALQEVFGTMPRSRVALEIGTHSPWISRLLKQLGHEVIVANARKVRLIGESRKKDDRLDAQTLARLARIDPELLYPVKHRSAQAQADLMMIRARAGLVRARTSLVNTARGLAKSYGERLRGCNVRDMDPEKAENLSPELQRALEPLLATIEELSERIVEYNDRIEALAQTSYPQVDLLKQIKGVGTLIALTFLLTLEDPHRFGKSRDVGGYLGLQPGRRNSGESEPQLRISKEGDPYLRTLLVQGAQHILGPFGIDCDLRRWGLKLAERGGRNAKKRAIIATARKLAVLLHHLWVSGEVYEPLHNSRRLTVAAAA

SEQ ID NO: 357779 - protein, 385 aa, unidentified
MGIETFIPRDYDVFGGLDVDKKSISVTFTDHQGSVKSMRMPYNVEYLVKHVRKHYGDKKVAFAYEAGPTGYGLYDGLVAQRYPCLIASPSMIPKAPGRRVKTNRLDSVGLAENLRAGQLKSIHVPSTLYRELRHLTQLRDALVSEVVAMKQRIKSLLLMEGLEFPPAPPGSQWSFLVKAKLRKLPCSSVVRFKLDQLLDNLEFGEKQVLKVTREIRRFCQNDPELSRCIEYLKTLPGIGWIVASQMMARIGNWRQINNIRELPAFLGLVPTERSTGERTTRGSITHNGDPRLRSKLIQASWSAIRQDAELREFFRTVAKKHPRHLGPRVAIVAVAHKLCVRAAVVLMQQRPYEVRVKVQSAPLTQEETVPQGTTRRRAVPGEKTS

SEQ ID NO: 357780 - protein, 391 aa, unidentified
MICVGIDVAKDKHDCCILDSEGTTLADCFTIPNNLDGFKRLLQTIKDCTQKSDKIKVGLEATGHYSCNILGFLLDNDLPVYVMNPLHTNLYRKSLSLRKTKTDRVDAKTIATMLLSDVDLKSYTDTAYHNEELKSLTRYRFDKVQERAKLKQSVSRLVTILFPELEQLVSSIHGTSIYALLSEYPGAKQISEAHLTRLANILVTTSRGHYRKDRATHIRDAARTSIGSVMPAKSLELKHTIKLIQELTSEINEIEDAIQKIMDELKPPILSIPGMGFYSAAMILAEVGDFSNFNSPDKVLAYAGCSPSTYQSGKLTNCYAHMEKRGSRYLRYALYTATKYVCYWNPVFTEYLTKKQAEGKHYNVALSHATKKLVRLIYALQKSGKAYLAIT

SEQ ID NO: 357781 - protein, 355 aa, unidentified
MTMLEERRQPHVIVGVDSHKYVHQAAVLDERGVLLGNRGFEATSAGYSELLGWVETMGTPTRIGIECTGSYAAGLTRFLRARGMDVLDVNTPHKAVQARRGKDDAIDAEAAARKVLSGEATTVAKDTTGDVEALRQLRVVRESAVKARTIALQQLQDLLITAPAALREAVDHKGTRNKVRRASALRPDLGHLEDPMQSAKYSLRALARRVKALDEEIAELDAHMGRLVARCAPSLIARCGIGTQHAAQLLITAGQNLDRLDSDAAFARLCGVAPIPVSSGNTHRMRLHRGGDRQANRTLHLIVVVRLKLDDRTKAYMRRRLSEGLSKRDAMRCLKRFVAREVFNDLRHDFLANRT

SEQ ID NO: 357782 - protein, 312 aa, unidentified
MATLSFGGIDVSKDRLDVLLLPRGMYFSVHNNAPGWTELVARLRPFPVVAIGLEPSGGYERGIIRTLLAAGLSVRRINPNKLRQFARACGVLAKNDRLDARLIAEYVAAMPTRVVRRDEALERLAEIVTMRRQLCDEHAAAMNQATHLEDAMLRRLSKRRLVRLEADICLLDKRLAELVGADPRLAHHYHLLISTPGVGPTLAYTLLASLPELGQLDRRQIAALVGLAPYDFDSGKLKGHRCIYGGRMPVRNVLYMAALSASRYNPHLKAFSKRLAAAGKKAKVIIVAVMRKMIVTLNAMLRDNIGWRPAIV

SEQ ID NO: 357783 - protein, 318 aa, unidentified
MSTSCNQNNINVGVDTGKSQLDIYIRPLDIYFTVTNDDDGISQAIKEIKKHNPTRIVIEATGRLEFSFIAACSKSDLPFVVANPAHVRKFTGALGQLAKTDKMDARSIAHYGEAIKPPLSTLKPAVMRSMSDLLARRTQLLTMQTMEKNRLQIMPKSLHSSIKPVITVIKNQIEKINLKLQKLIESCNEYKTKNDILQSMPGVGNVVALSLLSNMPELGYISNKEAAALVGVAPINRDSGIYNGHRKVRGGRHQIRTVMYMAMLSAIQHNPVFKATYNRLVAAGKPKKIAIVACVRKMIVILNSMVRDGVHWNPEIAK

SEQ ID NO: 357784 - protein, 357 aa, unidentified
MQTQVNDLNFNGENIFVGIDTHKKNWKVALYSNDIALKTFTQNPEPGLLVNHLRKNYPNANFSCAYEAGFGGFWIQKQLAAQGINCIVVNPADIPTTSKEKEFKTDPRDCRKIAKSLRSQLLTPIYIPSDRGLAFRSVVRLYNDAVKNQTRQKNKIKGHINFYGIRYPDEFKLETSHWTKSFCLWLSELKLDCEENTWTFQFYVQEYLKAQGEVMEVTKKVREIAKKAPLSKSVNRLISIPGIGVLSAMKILTEIEDIQRFKSLDQLCGYIGLVPTTKSSGEKENVGEMTNRGNKHLKTTIIECAWSSIHHDPGMSQKYFELIKRMDSNKAIVRIAKKLVARIIFVLTKEEEYKVIK

SEQ ID NO: 357785 - protein, 357 aa, unidentified
MVEGSWVGLDVHARSVVAGVLDAGSGELRTLRVAVGSEELVAWLRELPAPVRVAYEAGPTGYVLARACAAAGIACTVAAPSKIPRAPGDRVKTDRRDAERLARLLRLGELVAVRVPEPHEEAARDLVRAREDARGDLMRARHRLSKLLLRHGLVYEGSAWTLAHDAWLRRQRFASRPRSLAFDECYGVVLQSKGRRDTLDRAIAELASEPPFAEVVGRLVCLRGVSTLTALALTVELGDWCRFRPQSLGPFLGLTPSEDSTGERRRLGAITKTGNTHARRLLVESAWHQRRPLRTSVALERRRQGQPAAVCARADASGRRLHARWEALEGRGKRRTVVAVAVARELAGHCWALATMA

SEQ ID NO: 357786 - protein, 374 aa, unidentified
MNEDKVWVGLDVGRERSQVCIVDATGAELLQQDCETKLTALKKAISIYPADRIAMIAVEASNDTHIVRKLRNVGFPVTIFETYKASKFLALRRNKTDASDARGLADLARLGRHTVSEVYLKSPECQKLRGILVMRQRLSIMRVAAENVLRSRLALHGLSMKRVYALGGLRQEVNDQLALLRAEEEVDLTSDLQPLVEMCEGLRAYLRQVDNDLQQRAKSHPVCRLLMEVPGVGPICALSFYTAIENPDRFTDASGVGAYFGLAPRRYQSGQTSRTRGISKAGSKLTRTHLVTAATVFGNTAPDCGLKRWFLALRERAGSGRARVALARKLAVILLAMWKTQSHFRYGPPGPDSLPGPDSPEPPRESCCEDIPLL

SEQ ID NO: 357787 - protein, 338 aa, unidentified
MNKGDISRSDDSKCMFVGLDVHKKYTEVAIVDEDGVVEKQERIENEPGRIEEFSNTLSNATMVLESSSTWYWLYEILSRKHRVVLSNPAKTKAIASAKLKTDKVDALMLANLLRGGYIAESYVPSRRVMSLRELVRYRANLVRMRGTIKNRVHAYLLMNNIKIGGSPFTKGFLEELKKVKDARVEGYLRIIERLNLEIHEASKKICNEALNDESARLLMTIPGISFYSALLLVSEIGDVGRFPDSAHLVSYAGLASSTHSSGGTTYHGRITKAGSPYLRWVLNQCTWVHIRNEPDGNVATFYRRLSGKKGHSKAMVAASVKLLKIAYWVLKEKRPYQG

SEQ ID NO: 357788 - protein, 413 aa, unidentified
MAGIHFDQVVSRGCGMDIHKKVVVATVQGEGICKETKSFDTFTSSLTQLREWLVSLGITHVAMESTGVYWKPIYNVFEDYIRNIWIVNARHIKNVPGHKTDKNDSEWICQLLMAGLLKPSFIPPREQRELRDLTRYRRKLIETVSANKNRIIRTLEDGNVKLSSVLSDTSGSTATKLIEMLCDGRIPTLADIESVRHKRCLHSAEEMLEACTGYMNSHKIYMLQKIRSCNRRLTEEITEMDRHIKEILSPYEDVIARLSEIPGVQNRTCEELIAEIGLDMGNFPTAAHLCSWAGMCPGNNESAGKKKSGRTSHGDKHVRATLVEAAWAASRTKGTFFMERFNRLAPRKGNKKALIAVGHSLLKCIHYVLSTDGRYKELGDSYVPEKKEKQRKEYLKGELKKLGYHVVLTKKKD

SEQ ID NO: 357789 - protein, 384 aa, unidentified
MNKKTYYIGLDVHKESVAIGYINNRSRDKATYFGQCGGSNHAVVRNLKKLSKELGVAFDKLKVCYEAGPTGFVLARRLIELGVDCVICSPSKTERKPHEKIKTDKRDAIKLAKEFRNGDITPVRIPPSLDEAVRDVCRARTDAVDDLKRAKQRLKSFLLRNGYNYQGKADWGPSHMGYLRDLTMPNEALKIVIEEYVQAIDSAQNRVNRLKLHLKGLLNDWEWKSVVLALMACRGFQEVAAMTVIAELGDLRRFKHPQQLMAFVGLVPSEHSSGSSRRQGSITKSGNTHARWMLVEAAQHARRTPKVSGALTLRQQGQPDQVKELSWRMQNRLHKKYTRLKFRGKLENKCVVAVAREMLGFIWELQNKCALDMPEPSTNTFNNN

SEQ ID NO: 357790 - protein, 402 aa, unidentified
MTYDYVIGMDVGKYFHHACVLDIDGAQVLSKHINQNEKSLRTLFSTFSANNHKVLVVVDQPNNIGRLTIAVAQDIGIDVRYLPGWAMRQLSRIHAGNVKADIRDAYIIAHAAKNLPESLRSVDRVEEAFLQLKVLNGIDEDLARSYTRLINQIRSALVGCYPQFEQALRGQIIHPQVGSAPTCTLRRAHQNKAPRKAKAAAFARRYKARNPEPVIDAIFAAISEQTVVIAGAQYAEMGVAMSAKDALLKLEHCKQFEQEVIELINGIPHTQILLSMPGIGPKTAAQILMTAGDMSDFPTARHLASYAGLSPRTNQSGTSIMSNSLNRAGNKKLKNALWQSSFASIRFHERSRQFYERKRREGKRHNAAVVALARRRLNVLYAMMSNHEYYRDPDQSQEVKAA

SEQ ID NO: 357791 - protein, 343 aa, unidentified
MKASIVGLDIAKSVFQAHGTDANGKSIFKCKLGRSEVSAFFAKLAPCEVVLEACGSAHYWARVIGRIGHDVKLVPPDRVKPFVKKGKKNDAVDAAAICMAATHPDTMFVPIKSEEQQGVLSLHSTRALLVKQQTMLSNALRALASEFGLIAPLGTRRLPVLMAKIEASADLPAAMKQSAMLLFEHYEKVAQSIDALEGQIRARAKNDDDARRLMTIPGVGPITASMIVASVADIGSFASARHFAAWLGLVPRQHSTGGKTRLGRITKAGNRQIRTLLVLGATAMLHRAQKWESAAGQWLCELMARRPRRLATVALANKMARIIWVLLSRKEIYRPIGHSVAAA

SEQ ID NO: 357792 - protein, 378 aa, unidentified
MSQSTTLYVGLDVHKDSIDIALAEASRDAEVRHLSTVAGGSEAVTKALRRLVSAGHRLHIVYEAGPCGFALQRHLSALGWRCDVVAPSSIPRPSGERVKIDRRDAMKLARLARVGELVAVRVPDGADEAMRDLVRGREDAVREQRNARHRLKALLLRNGIAYSGRAAWSGAHLRWLAGVKLEHPAQQIAFQEYLHAVTEAGARIVRHEQALRDALSGWTLAPVVSALQALRGVQLIAAMTLVAEIQDFWRFASPRQLMAYLGLVPCEDSSGPRRRQGVITKAGNAPARRMLVEIAHQYRLAARVSPGIARRQSDLELPRAVTDIAWNAQTRLCSRFHRLSARRLPHNKIVVAVARELCGFVWAIARQVTPEPSLSHAT

SEQ ID NO: 357793 - protein, 388 aa, unidentified
MSSTSNPRELTEIAFRPDHATVYVSLELSRSKWLVTSMSAWRDKMSKHSVDAGDGAALLERLARLRMEAEQRLGTPARVVVIQEAGLDGFWIHRLLEAGGIESHVVEPASIAVPRRHRRAKTDVVDGEMLVRTLAAFKRGEPRVCSMVVAPSPEEEDRRRVSRERRTLIKERIEHANRIKGLLASQGISGCEPMRRSFRDRLESLRTGDGRPLGLRLKAEIGRELDRMDLVLRQIAAVEADRDALVRPDHADAEAPAARLMKLRGIGPEFAAVLWLEGLFRRFANRRQLAAYAGLAPSPWQSGRVDREQGIAKSGNPRLRTAMVELAWLWLRHQPDSALSRWFRERVGSERGRIRRIAIVALARKLLAALWRYTTSGELPVGATLKTA

SEQ ID NO: 357794 - protein, 315 aa, unidentified
METTTPSIEATYVGLDIAKDRLDYTVDGARCHHVPNTPQGHESLIAALRPLRGVRVICEATGGYERAVVAALLLAKFEVCVVNPGRVRAFAQAEGLLAKTDRLDAQLLRRFGQKVQPRLHAPMDQAAITLRELLDYRRQVSDQLVAVRNRLALAGPVLRARLEGQVTFLEQELTATDRLIQDHIDHDDTLRRKAKRLRTLQGAGPVLTATLLAYVPELGEIDSPQLSALIGVAPFARDSGRRHGARHVRGGRGVVRHVLYMAAVAATRHNPVLRAFYARLVAAGKPKPVALVAVMRKMLHTLNRLIADPNFVLVR

SEQ ID NO: 357795 - protein, 427 aa, unidentified
MGRFGKGPTVEIIYERVAGIDVGKKIIAVAVRTPGERPGKRRQQLRKFDTYYQTLTEMVAWLIAEGVTHVSMEATGVYWRPVFHALCEAERALEVLLVNARHVKNVPGRKSDALDAVWLAELTECGLLRGSFIPPREIAAIRELTRYRKKLIEQRTSELQRLAKVLEDAGIKIDSVASALTTLSARDMIEALINGERDPGVLAEFARGKMRRKISDLRLACAGRFGAQHALMCTLHLEHIDHLADMIARLDTRIDEASLPFVRQTTSLATIPGISERAAQVIISEIGIDMARFPTAAHLASWAGLCPGNNESAGKHRSGRTRKGSKELRALLTECAWSAGRTSTYVGAQFRRFHRRFGSKGGKKAATATAHTLIVIIWHVLAEATAYRDLGSDYFTRRLDSPEARKRRLIHELEALGHKVTIEPAAA

SEQ ID NO: 357796 - protein, 414 aa, unidentified
MQIVALVLAVRSEFVGARLAVPDRAAVTPIKAGTASRAPCMSFTVYFMDDACRRDRPCAPRAQSSCCSLVVTPLVVDPEQLPGPPSPHRARSGHREEEIMSAEMNVGIDVAKELLDVAERPDDVRWSTTNDAAGIGALVARWTVSRPARIIVEATGGYEMRLVMALAAAALPVVVVNPRQSRAFARATGQLAKTDKIDAMTLARFGEAMRPAVRPLPDAQTRALSALLARRRQLIDMRTAEGNRLEVVDRPIEREIRTHLRWLNKRIDAMDRQLDKAIKASPVWRQKDALLQSVPGVGPVLSRTLLADVPELGTLDHKKIAALVGVAPFNRDSGTFHGRRCIWGGRAPVRTVLYMAIISAAQHNPVIRAYHQRLMAAGKPFKVAQVACMRKLLVILNAMVRQGTHWQNDYARAV

SEQ ID NO: 357797 - protein, 319 aa, unidentified
MLVGIDVAKAELVVAVRPSGERWTAANDERGVRTLVERFRREAPELIVLEATGGYELLCVAGRVAAALPVVVANPRQVRDFAKATGQLAKTDRIDADILALFADRVRPAVRPLPDAEAQELEALLSRRRQLLEMLGAERNRLGQVFGRGKRQVKRSLKGHIAFLERELRIADTDLGDMVPKSPAWRERDDLLQSVPGVGPVLSLTLLADLPELGRLSRRAIAKLVGIAPLSRDSGTLRGRRFVQGGRASVRAVLYMGTLVATKRNPIIRTFYQRLLAVGKPKKLALVACMRKMLTILNTMVRTNQRWSADHISGALVPA

SEQ ID NO: 357798 - protein, 316 aa, unidentified
MVGIDVASLHVDVAAIGAELPASLARLSNDADGHSALADGLVRLAPGLVLMEATGGYEAALACALQAAGLRVAVINPRMARDFARAMQRLAKTDRIDAATLAELAGVLARRPDAERFIRPVSEPEQQDLAALVTRRRQLVAMQLSERQRLRLARPVARPSIEAMIEAIKHQLDDVEAEMARHVEQHHAQMAALLQGVAGIGKVAAATLIAELPELGRLNRRQICALVGVAPYANDSGSSRGRRRIAGGRFEVRRALYMATLTAVRYNPPIRDFYERLVAAGKLKKVALIACMRKLITHLNAIARDHLNAHDRLAIA

SEQ ID NO: 357799 - protein, 393 aa, unidentified
MTATHSVNSTASVSPVLYVAFELSNGQWKLASTTARGQRARLVSVPARDTARILTEIARAKSRFGLPQSAKVFTCYEAGRDGFWLHRFLHQQGISNAIVDSSSIEVNRRARRAKADSLDAVSLVGLLVRYREGETDVWSTVEVPDPADEDQRHLHRELDQLRRERTDHSNRVRGLLAAIGIKIPSKCTLPCDLDSLRQWNGEPVPTGLKRRLTHEFERMELLARQIRAIETEQAEEINNDQTRHVDKVRALMGLKGVGQTSATILVYEFFGWRQFANRREVGALAGLTPTPYQSGESNHEQGISKAGNARVRWIMGELAWSWLRFQPESSLSQWYYRRFGRGTARMKRTGIVAVARKLLIALWRYVEQGEIPEGATESDWKAKLKRVLGRRSA

SEQ ID NO: 357800 - protein, 408 aa, unidentified
MKRYYIGVDWGDRLHQVYVGDDEGKKVREMKVPETVEGLAEIGRWLNEKRAEGLELWAAIEKPAGCIVDFLLDHGVEVYPVNPKAVDRVRDRYRMSGSKSDAFDAYMLAEFLRTDQAHLKALRPSSEKAQELKILSRDQHRVVRHKTRLLNQLTTTLKEYYARPLEVFEDIETEIALDFLTRYPTPAHLGALKRKEFNRFATKQHHLSKPRCEELWEKLSQPQLAVPEHVVRAKAQLVEVLIDQLRASIKAVKTYNHRVESFFASSPAAAVAKTLPGGKSGTLVAAIWAELGDAQGRWQSSGHLQAEAGAVPVTKASGKSHVVHFRFACNKHLRYTMYWFSFVSLNNSEWAKLYYRGQRDKGHSHPQALRALGAKWLKIIFVMWRDHKPYDENYHLANIALQKMRQAA

SEQ ID NO: 357801 - protein, 359 aa, unidentified
MTIVAHAHPFVVGVDTHARTHTLAILVASTGELVATEQFPATNAGMDRAIAWAARRTGGDLAALWVIEGVATYGAQLAAAVSQAGYELVEAARMDTRAHRGTGKSDPLDARRIAAAVLSLEPGQLRRPRRDDGTRAALRILVTARDHMTTERTATINALTALLRVVGLGLDARKPLTAGQVNEIGRWRSRTEDLATATARAEAVRLARRVADLDKELSANHAQMTELIRDSKAAVLLEKTGIGPVTAAVVLAAWSHVGRVRSEAAFAALAGVNPIPASSGNTTRHRLNRGGDRRLNRALHMAVITRMTHDPATRAYVERRRAEGRTTKEIRRSLKRYLARQLYRTLNALHSPEVEPQNA

SEQ ID NO: 357802 - protein, 400 aa, unidentified
MISVGIDVSKGKSTVCILKPYGEIVSKPFNITHTHKDLSELSSMLFRLNDEVKIVMEATGIYHLPVLTYLQEKGFFVSVINPYLMKSYRNESLRKAKTDKIDSRIIANYGIDHWFKMKEFQTSGEIYEELKLLGQQYRHYMKLHLLSLAELTHLLDLTMPGIKNLLASWNETNRKDKRSDFVERFWHYDVITSMSEQEFTEKYILWAKEKKYVPSQEKAKVIYTLAQESIPTLPSETSSVKMLVTEAVRVLKEVDATLGLILSRMQEIAKTLPEYSVVREMGGVGNTLAPKLIAEIGDVRRFRNGKALVAFAGIDPPPYESGQFVGCNRKISKRGSASLRKVGYETMRSLKMRSRPEDPVYRYVVKKESEGKSKKSAKIAGLNKFLRIYYARVTELYKNI

SEQ ID NO: 357803 - protein, 349 aa, unidentified
MEHTITIGMDLGDLSHLVVVQDDAGNELDMAKVINTKKAVGHYFKDYAGATVALEAGTHSPWISRLLSELGCTVYVGNPRKLRMIWDSNDKSDERDARMLAMVCRVEPKLLSPIKHRGRQAQTDLSLIRSREVLVKNRTSLINHARGLVKSFGERLPKCSAASFAKRCESEIPSYLLSALKPVFTVISAISEQIRDLDKQIETLGKERYPEVQLLKSVPGVGALTSLAFVLTIDDPARFGKSRQVGPYLGLTPRKDQSGQSDKQLPITKAGDGYLRQLLVSCAQYILGPFGPGSHLRRHGHKLAVRGGKNAKKRAAVAVARKLSVLLHRMWVTGEAYDPFYQPNMQKAS

SEQ ID NO: 357804 - protein, 356 aa, unidentified
MSQKLNSEVAVIGIDIGKNSFHVVGQDRQGALVLRQKWSRGQVECRLANLPPCLIGMEACVGAHHLSRKLRALGHDARLMPAKYVRPYSKGQKNDYRDAEAIAEAVQRPTMKFVATKTADQLDLQALHRVRERLVGQRTGIINQIRAFLLERGVAVRQGLRFLRAELPGILATRTDVLSPRMLRIVEDLAGDWRRLDERIEGLSGEIEALARQDECCERLMTVPGIGPIISSAMVAAIGTGDAFSTGRDFGAWLGLVPKQISTGDRTILGSISKRGNRYLRRLFVQAAWVVLVKVVPKRWERYGLNSWIEAARKRLHHNVLAIALANKLARIAWAVLAKGRDFEVRRSDDAVVRSA

SEQ ID NO: 357805 - protein, 338 aa, unidentified
MSRVCVLDQEGEIIEESSVKTTDGALQQRFAAMSSTRVAIEAGAHSPWVSRLLEGCGHEVLVANARKMRLIYENDRKCDRVDAESLARLARLDPKLLAPIHHRDASRQADLAVIRARAAVVAARTQLINAMRGMVKAIGGRLPSCSTKSFHLKVDSAIPESLRLALEPLLAEISSLTGSIQSYDRQIEELAQTKYPETAVLRQVTGVGALTALSFVLTLEDPRRFSRSREVGAYLGLRPKQRESGNSSPQLGITKAGDRDLRRLLVQSAHYILGPFGPDTDLRRWGLKLTERGGKNAKKRALVAAARKLAVLLHRLWVTGEVYEPLRNVSQKETVEAA

SEQ ID NO: 357806 - protein, 340 aa, unidentified
MSIQPVVAVGVDPHVDTIAVAGVDGLGAVVWESTAPNTPGGIAGLVGSAGSEVWAVEGSGALGRLLADSLIGRGVSVFEVPTRLTARLRLRAGFSKSDRADAAAIARMALAETLPQVDHDPIIEALRVLVGQRESLVKGQVEASNRIRARLRELDSEAARRLPRLRGRAMFEAILERLPEADPDPHRQALIVATGLQAQECIDRIGRIRRLEAEIRKVMPPGGSKLMEIPGIGLITAAMILAATGNIDRFPTEGHYARYAGTAPLDASSGRQQRHRLNRWGNRSLNQAIHIAVVTQLQRGGQSHHYITRRIAEGKTKQEAIRAAKRYLTRHIYRTLKQHP

SEQ ID NO: 357807 - protein, 380 aa, unidentified
MNTTTVGIDLAKSVFAVCEGDYRGHGSRSSILKSGEFLKWLRTLPTGTVVAMEACSSAHSWGRTMQALGLEPRLIAAEFVRPYRKNQRIKNDTRDAEAVLTALHAPGMRFVTIKTEDQQQRLAWHRLREGWKAERTALFNRIRGLLTEFGIVVELGAAKIRRKLAELESDAAYPQSIQLMAQSVRAQIGILDQRLAECERQIARQSKSDPAVARLRSRPGIGPLTADAIVATVGNARQFKNGRQFAASLGITPRQHGSGGKTHLGAITRRGDSYLRCLLVQGARCVLQAALRLHKNKPNTLNRLQLWMITLNERVGYHKAAVAIANKHARQVWAMITRGEAYNAEAYKDWEAAHATVRPGDIQEASDYDLSTAALAAASV

SEQ ID NO: 357808 - protein, 376 aa, unidentified
MKNVRFVGLDVHAETIAVAVAEASGETRSLGIIPNRAESIGRLVRKLGKREQLRVCYEAGPTGYVLYWQLSELGVKCDVVAPTLVPVKAGDRVKTDRRDAQKLARSYRAGDLTPVWVPDAAHEALRDLVRARWAAKRDQLRARHRLSKFLLRHGQRPAQGTTAWTGSYLQWVKTLHFAYPAQELTLDDYLHEVEHAAARIARLERSIDAAIETLPVKMRTVIEALQSLRGIAQISAVSIVAELGELSRFAHPRQLMGYSGVVCREHSSGARIHRGPISKSGNAHLRRIVVEAAWAYRHRPAIGKTLAARQQRSSAAVLELAWKAQQRLHRRYARLMARGKNKQQTVTAVGRELLGFIWAIGVHVEQQVSAPMRQAA

SEQ ID NO: 357809 - protein, 338 aa, unidentified
MKTYAGIDLHSSNNYIGVINTKDKRLYSKRHDNRIEDVLKVLGKFKSNLQGVVVESTYNWYWLVDGLMDQGYTVHLANPNAIKAYDGLKHTDDKWDSFWLAHMLRLGILPEGYIYPKHQRPVRDLLRRRLMFVRQRTSQILSLQSMITRNRGLNYSGAQIKRFRDEFIDKLFSDRHLVFTAKTNLRTIQFLDQIVSEIEQEVESQIKLKKQFISLLTTPGIGKILGLTIMLEVGDIHRFAKVGNYSSYCRCVESKKISNGKKKGENNKKNGNRYLAWAYVEAANHAMRCCPKAQKFFQRKLAKSERVLATKALANKLTKATYYIMRDQVAFDEDKLFH

SEQ ID NO: 357810 - protein, 400 aa, unidentified
MISVGIDVSKGKSTVCLLKPYGEIVCKPFEVQHTEKDLEELANLLQKLDGELKIVMEATGIYHLPILTFLLEKGFFVSVINPLMMKRFSKDNSLRGAKNDRLDSVMIASYGIEKWYKLKKYEVNDRIYTELRLLGRQYYRFMQTHVKHVQELTHLLDYTAPGLKAMFNSWNEHSNRDKLSDFVERFWHFDLITSLSREEFVEQYLLWAKEKKYHQSRSKAEKVYDLASNGIPTLSSHTPSTQLMIQGAINVLRIVNNSLYHILSRMKELAKSLPEYATVRSMGGVGDSLAPRLIAEIGNVKRLRNGHSLVALAGIDPPPYESGQFVGTHRRISKRGSPILRKIGFEVMRMLKSHKEPEDNAVYNYILKKEAEGKNKKLSKIAGLNKFLRIYYVRVMEVYQ

SEQ ID NO: 357811 - protein, 367 aa, unidentified
MKKVSTAATRQSRNIFQPKLTIGLDLGDRNSWCCVVDEAGQIQLEQRVRTTAKALQEVFGAMPRSRIALEIGTHSPWISRLLSELGHEVIVANARKVRLIGESRKKDDRLDAQTLARLARIDPELLYPVKHRSAQAQADLMMIRARAGPVRARTGLVNPARGLAKSYGERLRGCNVRNLDPEKAEGLSPELQRALEPLLATIEELSERIVEYNDRIEARAQTRYPQVELLKQIKGVGTLIALTFLLTLEDPHRFGKSRDVGGYLGLQPGRRKSGESEPQLHISKEGDPYLRTLLVQGAQHILGPFGIDCDLRRWGLKLAERGGRNGKKRAIVATARKLAVLLHHLWVSGEVYQPWHNSSRLTVAAAA

SEQ ID NO: 357812 - protein, 399 aa, unidentified
MAQVIIGVDPHKLSATIEVVDRREKLLGSGRFSTDQAGYTAMRAYAKNWPERVWAVEGSNGAGRPLAQRLLEAGEHVVDVPAKLAARVRLFDTGHNRKTDARDAHSIAVVAVRTTTLRVLRRDGELEALRMLCDRREELIRLRVQTVNRLQRLLAELVPGQAKKDLTALQAKAILATVRPRDIAGKTRRRIAAEELADLVAVEAKMKKATAELKVLVAARGSRLMDLPGVGPVVAARTLADVGDIARFADRNRFASWTGTAPLDASSGEQNRHRLSRAGNRRMNHMIHIAAISQIRLDTPGRTYYRRKLIAGKTKLEALRCLKRRISDALYRQLLADAGRAEGAGPGGHCGASQESSAVDLPPHIDTSDQPLPGPAKPTLQPTSRHRKTTKENALPSAS

SEQ ID NO: 357813 - protein, 355 aa, unidentified
MNSEKYIGLDVHQATISVAVMDSMGKLIMESILETKAATILEFVAGLRGTLSVTFEEGTWAAWLYDLLKPHVDELVVCNPRKIALLKDGNKSDRIDARKLADRLRLNDLKPVYHGETGVRMLRELARSYLNLVKDQTRVMNRLKAMYRSWAIPCAGRDVYYARHRAEWLGKIREAGVRRRAEHLYQQLDMLQHLRQQARRELLAESRQHPITAKLRQIPSLGPIRSALAVALIRTPHRFRTRRQLWAYSGLALETRTSGEYRCVEGQIRRSKKQISIRGLNKDHNHDLKGLFKGAATRASIQPGPFQDFYQRSLAKGIKPTMARLTLARKIAAITLTLWKKGENFDAEKLKSQAA

SEQ ID NO: 357814 - protein, 310 aa, unidentified
MKDSIGIDISKDQLDVHRPRTGASARFGNTPAGFRALQRWIGDTPPDLLVYEATGAYHAALERRFAGTLPLVKVNPLQARRFAQARGTRAKTDAVDARILAVMGSALDLVPDRPAGENQHALKQLQIARMALIKERTRLLNRSKTQTLPILKRQSKARLAQIKCQLSELDEALLELTRQCPKRARAFDILCSIPGLGRVTAVAILVECPEIGTMTHKQIASLAGLAPMTRQSGQWRGKAFIQGGRKFLRDTLYMPALVAARYNPDLRQKYQALIKAGKPAKVALTVLMRKLIELANALIQQDRNWVPKTT

SEQ ID NO: 357815 - protein, 410 aa, unidentified
MAERFVGIDVALREHRVAVLDRDGEAVGPSFTVAASQDGVAMLLRTLAARGATATQTLLGLEASGHLWENLEAALVGGGYRVLVLNPLQTRRYRDVLRRKAKTDDIAAHVIAGLIRSGAAQASYVPDEHIQSLRELARLRARLMDDRQDYLRQLIAQLDVVLPEHQTALGDLRSARARGILAQFPTAQHLAQASPRAIRRAAEDAGTRGFALDDAIAVRDAARQSLYSGKAAAARAQVVRTLVSQLDRLTTAIDEVDRAATALLPPSEPGTGPSDADLLQTIPGIGPHTAATLLGELGAPTRFTDAPALVAYVGFYPVITESGQHVGRPRLSAVGSRIARRALYLAAVNAVRRSAEWRTIYLRKRAQGKPAKQALIVVAVKLLHTLYAMLKHRRPYNPSRLLVAAATIGT

SEQ ID NO: 357816 - protein, 445 aa, unidentified
MHYKRLLALIDSVSSHLSVGLDVGADFTWMSIALPNGSFTGKPFKIVHSDPGSRDLAVAKIKEAQETYSLKSRCFLESTGIYHIPLLCFLRDKGFDCSVINPIITKNSTNINIRKLHNDKFDSKKAALVGLNVSLKTSIIPDNSVVDLRNLVRDYYYFKDLQSAVALKLTAELKVSFPAYAKVFSKITTQSSLKLLSAYPLAKDMLAASKDDIVEIIRSTARFGEAYALRKYNAIIAAAQDAAVFGRALPSNAVRIRLYIDTYQEYQKHLDALLKALHETVDRLQDTLVYDQICLLQSLRGIGFLSAVVLIAEMGDFKLFSSPKKLYAYFGLDPAVKQSGKLNGDKVHMSKRGSSLARRVLHMAALNNVKVDKRSGTPVNPVVYDYYARKCSGKKKPVAMGAVMHKICNIIFAMLRDNKPFEVIPPEEHCRRFAAEHPDKIRKAA

SEQ ID NO: 357817 - protein, 380 aa, unidentified
MKIIGCDFHPAVQQIAVCDSETGEYSEHRLSNGDGEAERFYRALSMRCLIGIEACGNSRWFIDLLERLGHEVKVGDAAKIRASYVRKQKTDKRDAGHILTLLLENRFPAIWTPSRQQRDQRQLLIHRHKLVQMRARIKNNLQHLALNQGMQRKSKLWTQTGQKMLKQLPLEGWTAIRRQDSLALLQQLDKQIEQLDEAAELAASSDPQACLLLRQKGVGPITALAFSLTIGDVSRFEHSNQVASYLGLIPAEYTSSNKRRLGGISKQGNGFLRMLLVEAAQSVVRLDPQFHKHYVHLCRNKHKAVAKVAAARKLAVRLYWVLRTEQEVQKAVHNESRSGVPLVSESQTETLIERSRIQQRVASAGNDGKRKIRASHIPNA

SEQ ID NO: 357818 - protein, 342 aa, unidentified
MRFYCGLDLSARSCQVCVIDGRMKVLVQQKVRNDLEDIMYLLAPFKKTLECVVESTFNWYWLVDGLQEGGYEVCLAHTLGLSMITGAKVKTDPRDALALAKLLRAGMIPKAYVYPKETRPVRDLARRRIRVVNLRAQEYVSLGRLLLQQGTLDYRRYDIKLIIEEDIEGLFRNPWIQLNAKHELARIRLYTAQIREMEGKISETIKDSLKYSRLLDIPGIGKILAITIFYEVGDISRFPSDRDFSSYSRVVTGVAQSGTSCKKGRGSKQGSSYLKWAFSQAAVYAVKNYPKIQRFYERQRRRHRGKGEKLIAYSIVAHKLALAVYHILRDGTKYNEEILFRN

SEQ ID NO: 357819 - protein, 391 aa, unidentified
MTSSHRIDTLAAGDKDGTLYVAFELSKSKWLIGLVVSGESKLSRHQVSGGDTAAVWQLISKKRAYAEKKLGRAVRVVSCYEAGYDGFWLARRLGEQGIDNRVLDPSSIEMPRRARQAKTDRLDLERLMRVLIRHDGGEPRVCSVVHPPSPEQEDARRLSRERDRLIGERTGHGNRIKGLLHGQGVREVEPRRKDFLERLAQARTGDGRVLPARLVAEIKREHARLVLLGEQLAEVEGQMRAEREAAAPDSRARQVNQLLGLKGIGAVGGETLVNEVFWRDFQNRRQVGAYFGLVGTPFDSGQSSREQGISKSGNGRARTLAIELSWLWLRYQPDSALSLWFKQRVGDQKGRVKRVAIVAMARKLMVALWRFLTLGLVPENAIVRAAAPAGR

SEQ ID NO: 357820 - protein, 285 aa, unidentified
MNKQLQTSATLLRYCVGIDVSKDTLQVCISVIDTHGKVNLKGTCTVNNKVSGFDSLVNWAKKHCKEQSLPMRFVMESTGVYHEQIAWYLFQHDLAVSIVLPNKAKHYLKSLGHKSKNDKIDAKGLSQMGLEQNLTLWRPLSKNIYSLRVLTRQHQRLQELKNQSENQKHAVLHSQFRDKFILKQLDKLIKLYEQQIQQVGQEIAKLLDKDQVLKTKIDKICKIKGLALLSVSTLVAETNGFEGFENVRQLVSFAGYDVVENQSGKRAGKTKISKKGNTGSPVRPN

SEQ ID NO: 357821 - protein, 418 aa, unidentified
MVEDVHWFVGIDWATQSHRVVLIDAEARQVGEREFGHGGAGLTELRDWLLQKTGAAPTRVAVAIEMPHGPVVEMLLEHGFAVFAINPKQLDRFRDRFTAAGAKDDSRDALVLGCSLRTDRKAFRKLATDQPTVIELREWSRLTDELQQERTRLTNRLRQQLWRYYPQIAELTDDVGDEWFLALWHKVPTPAAAAKVTEKAIARLLKEHRIRRLDAATVLQTLRKTALFVAPGTTEAACVHIRSLAARMRLVNQQIKEACNALDSLCARLGAPDEESPSGQRHEQCDVTILRSWPGIGRIVLATLLTEAAHALQARDYHALRTLAGVAPVTRQSGKKRLVSRRLACNRRLQTAVYHWSRVAIQHDAAARRCYDALRQRGRGHARALRSVGDRLLSALCATLKRQVPYDANLRSPQPATP

SEQ ID NO: 357822 - protein, 347 aa, unidentified
MRFYNRQHRHYCGIDLHVKTMYVCILDATGQVLVHRNVPSTPAALLEVVTPYRDDLVVAAECMFTWYWLADLCAAEGIAFVLGHALAMKAIHGGKAKNDKLDSFKIASLLRGGLLPQAYVYPAAMRATRDLIRRRLHLVRKRGQLLAHIQNTRAQYNLPAFGRRLAYPANREGVREHFADPSVRKSIDVDLTLVAQYDTLITDLELTIVREAKRHDADAFHRLRSVPGIGKVLALTILYEIHDITRFDRVQAFASYARLVKGQKQSAGKTLGTSGAKMGNVHLKWAFSEAAVLFLRHTKDGKKLLAAIEKKHGKGKALSILAHKIGRAVFYMLSRGTVFSPEKFLAA

SEQ ID NO: 357823 - protein, 423 aa, unidentified
MMKLKYSICCGLDVHKNVIVATIVTTNKDGISEYKQKSFSTINSDIQKFHNWLIENNCYHVCMESTGKYWIPIFNYLENDIDVCLTHPKYVKAIKGKKTDKKDSKWIADLYKFDLVRCSFIPPKDFRQLRELSRYRFKLVCMKSSEKNRIQNCMTISNVGIASVLSDPFGKTATEIISYLLEHTADSMDEKAVRKLIKKGAKSKSDEIIEAIKGYTIETDQAKKLELARGHLEYLDDMITQTEVELYVRIKPYYEFVEFVSTMPGMTELSSTIVLAETGVDMDIFDDAKHLCSWCGLSPANNESAGKKKSVRIAKAGDYLKPMMVQCALAAIKSKKQPYFAIKYGRIKKRRGHKKAIIAIARMMMVCIYHMVSEKKPFTPTDYEELMDPQNHVESVVLNENNVFAYLESLGYDSSKLVKRNDN

SEQ ID NO: 357824 - protein, 431 aa, unidentified
MPYRIAGIDVHKKMLAVVVSDVEIESEFQFERRMFGSNPEQLRSLAAWLLEQEAEEVVMESTAQYWRPVWEALERHWKPLRKKREGARPRSGTLHLAQAQSNRGPRGRKKDFRDAKRLVKRLVARELTLSFVPDAEQRLWRTVTRRKYQLTRDHVRLQNQVESLLEEAHIKLSSLVSDLLGVSARRMLKALAEGETNPTALATLADERLRATPEQLCDALGACTDLKPVYRRLLKMMLEQLQFLEQQIGQLDQEMASLLSQHQGAVERLAEMPGLGVDSAQQIIAEVGPAAATFPSAKCLSSWVGACPGDDESAGVNYSHRSPQGNRHMRRVLNQAANAAARTKGSIFEIVYRRSVPRLGHNQAIGAIAHRQCRLIWLILHQGVSYEERGPSVTKQAKQRRTARMIRQLRSLGYRIEPPNPQPQPSPAQAR

SEQ ID NO: 357825 - protein, 324 aa, unidentified
MILGIDLSKRYFDATLRSTAGATWYARFTNDAAGIAALLAWLRSHGVQTLPACMEATNIYWEEVAQRLPEQGYTVSVVNPARIKGFAQSQLRRNKTDKQDSAVIAGFCAAMQPAAWQPPSELQRRLRSLERHRDDLQQSLTQQKNRLATSKEPAVQASLQRLIDALQQELAQVDQQVAELVEQDETLRHNKALLRSIKGIGDKTAYKLLAELYDLPHYETARAAAADAGLTPAHFESGDTVRRKPKLSKVGKAAIRRILYFPAITAMRFNPLIRAFAERLRQRGKPEKVIIAAVMRKLVHLSFGVLKHQTPFDPKWGLAQPIPT

SEQ ID NO: 357826 - protein, 409 aa, unidentified
MTVFCGIDWAEAHHDVAIVDDGGSVVARARIGDDAAGFAALLNLLAEAGDTPHDPIAVAIEKDHGLLVAALRATGRAIYPINPLAASRYRSRHQVSGAKSDAADAALLANILRTDAAAHRLLPADTALVQAIRVLARAQQDAVWSRQQIGNQVRSLLKEFYPAALAAFADLDGGLARRDARTILAAAPTPARAARLTRAQLRRLLVKAGRQRFLDRDIDRLREVFGDIYLHQPPQVEAAMGIGLAALLRQFDAACVAADELALAVTTHFDEHPDAKIVTSFPGLGQLTGARVLAEIGDDHSRFTDARGLKAYAGSAPITRASGKKTVVLHRHIKNRRLAAVGPIWALSSLRASPGARRHFDARRTAGDWNHQAQRHLFNKFLGQLHHCLQTGQLYDEHHAFPPPLALAA

SEQ ID NO: 357827 - protein, 420 aa, unidentified
MVYLERGYNLKELPWSKTVSNSFLFKEACMILVGVDVAKDKHDCYIMTSEGEVLFKSFTIANNMEGFNQLYEKILSVIDNFDNVKIGLEATGHYSYNILGYLLDKGLTPYVINPLHSNLYRKSLSLRKTKTDKVDSRIIASMLMSDVSLKPYSNTLYHNEELKSLTRYRFTKVQERAKLKISISRLVTILFPELEKLVPTLQMNSIYALLYEFPSAHAISKAHLTRLTNLLNTTSKGHYTKDKAVLIREAVKNSIGSNMPAKSLELKHTIKLIKELTSEINEIEEEIKIIMNKINSPILTIPGIGLSTGAQILAEIGDFKNFSSPDKLLAFAGLSPSTYQSGNMYSSNAKMEKRGSKYLRFALFNAAIYVSYWEPTFSQYLKKKRVEGKHYYVAISHVVKKLVRLIFHLEKTNERYSTVV

SEQ ID NO: 357828 - protein, 357 aa, unidentified
MTHQKNKKLDFSNQKFFIGIDVHKKNWKVTIRTHQMEIKTFSMNPQPDELVKHLSRNYPNGRYYSCYEAGFCGYWIDSELKKNNIKNIVINPGDVPTTNKEKLSKTDGIDSRKLARELENRNLKGIYIPSSYHQELRSLSRLRHALTKDQARIKNRIKSHLFFYGKKTISESRHWSGRYITELRNLEFSHTLGKEYLDIYLDELLRIREKIAQVVGILRKISRENKEARVINILTRSVPGIGFATAVTFYCEIIDMKRFNTIEKLASYVGLVPSLNSSGERERTRGITVRRSKYLRPMMIEAAWVAVRKDPSLLEYFSRLTRRMNKKRAIISVARKLLSRIRYVWLNEEDYICGYGS

SEQ ID NO: 357829 - protein, 341 aa, unidentified
MGRFIGVDLHKNSFTVCYMQKKGEHSLKTFRVNPSDVETFKNTLAKQDEIAVESTGNTGYFAREVKESVSKVRIINPIQFKIISESVKKTDEHDAVTIARYLSKGLIPEVRMRSKDEAKLGSLIGTRDKFVKLRTTLKNKIHNILNASGIVTTKEMFTSDKALERVAAMDLDDADLFEIRIIVDQIKSLNKSIDVINKELIDRGKKLDGHKGLTSITGIGDISATVLLNTIGDVDDFGDDKKLAAYFGIVPRVAVSNETSHYGKITKRGNKIARTVLVQSTLVAIRYNHYLRHFYFKLKAKKGSGKAIIATSRKLLTIIYRTLKNDWVFEDFNKFKLAVSV

SEQ ID NO: 357830 - protein, 369 aa, unidentified
MNKVTYVGLDVHKDTIAVAIAEDGRGGDIRFFGTIAHTTDSVLRLTKQLMAAGNTPSFCYEAGPCGYGLHRHLTKLGFECAVVAPAMIPRKAGDRVKTDRRDAEMLARLWRAGELTPIWTPDEEQEAMRDLIRTRKQAMDAVKVAKQQLLSFLLRHGLRYENGSYWTKRHRRWLAELRRFRFSYQQLAFEELKRAVDQAEARVATLDQAIDEAVQDWHFAPVVDALRALRGVNTIIAATVVAEIGDITRFENPRQLMAWLGLVPSEQSSGSTTRRGRLTKTGNTLARTMLVEAGWSYRHPPKEGQPFLKRSAHLPQEIKDIGWKAQTRLCKRFRHLSNTGKPQPRVLAAIARELAGFIWDIARKTPLSA

SEQ ID NO: 357831 - protein, 399 aa, unidentified
MMHTTTFIGLDVHARKIVAAALNTMTGEVHSATFGYDAAAVADWIRSVDPSAKCVYESGVTGFDLQKRLTGLGVDCAIGAVSKMIKPSADRRRKNDRNDAEFLARMLSVGNIVEVWIPDDECEAARDLVRALDDARDDLRRCKQRLSKFLLRHGLVFDETTPTGRRKGNWTAAHWAWIRSIEFSEKSDNDVLAYYIDAVRQATEDKKRLERLVEAEASKPRWKKRVDSLRCLKGVDIMTAADIVFEAGEFARFGNARAFAAWLGLVPSEHSSGEKIVQGGITKAGNRHLRRVMVEAAWHYNHCSAHSKDLSAGQAPDPAAMRHAAKGVRRLVERRRGLLGRGMQKNKANHGGIEGRAHHCIKPSITSRGRIRGRWGESQVFFCERLRRHPRRKTVRMTR

SEQ ID NO: 357832 - protein, 290 aa, unidentified
MRSDGEVFVGLDTSKLKISVALAEEGRNGEVRFLGDIENSPDVVRRIVAKLSGKYRRLSFCYEAGPTGRGLNRQIRGLGHGCSVIAPSLIPKRPGERVKTNRRDALTLAPLHRAGELTTIWVPDPDHEAIRDVVRAREAAIEDLRAKRQHLQSFLLRHGRRYTGLGSWTQVHARWLSNLIFAHPAQYLVLREYRQAIEDAETRLERLEQQIAELVTSWSMAPVIEAYQAMRGVAFLTAVTFVAEIGDVRRFDTPRQLMAYLGLVPSEPQPVSWSGAATSPRPATLEHGGS

SEQ ID NO: 357833 - protein, 414 aa, unidentified
MAEEETISWFAGVDWGSERHQVCLLDARGATVGEREFPHSGEGLAELGDWLLSMARAASMVAVAIEVPHGPVVDALIDRGFVVYAINPKQLDRLRDRFSVAGAKDDRRDAYVQADGLRTDRRLFRHLQVADPRLIELRAWSRLAEELQAERVRLSNRVRHQLWRYYPQMQKLTNDLAAPWFLELWTIASTPAKAGRLRKSTVERLLKQYRIRRIDAETVLRILREPAIKVAEGVAEAASIHMRSLIARLRIVNRELREAERKLDELCTAVSEIEQTSGESLQRRDVAILRSMPGIGRINLATLLSEASGPLSRRDYEGLRTLSGAAPVTKRSGKSLIVVRRYAAHVRLRDTVYHWARVATQRDPKCRARYTALRKRGHSHGRALRSVADRLLALACVLLQRQTLFDPHFGRPTT

SEQ ID NO: 357834 - protein, 344 aa, unidentified
MNEITTVGLDLAKRVVSLCGEDSSGRVVVRRTLRREAVIAWFAQRPTCLVGMEACSSAHWFARELAALGHSARIIAPEFVRPFRLSGKNDTNDAAAICAAVRQPQMRFVTVKGAEQQARLVVHRLRQGWQEERTAGINRLRGLLAEFGRVYPNNAAAAIVGARTALTDETLPLALRRGLARALEHLRAIELQLAECDREIARDVRDDPRAQRVRRIAGVGVLTASAVAATVVDPAQFRCARQFAAWLGITPRQYSTGGKTQLGRITRRGDSYLRALLVQGARSALQAALRLAPSRRTRLSAWIVATYARIGYHKTLVAIANKNARLLWVLLTRDQPLRAHAAIQ

SEQ ID NO: 357835 - protein, 334 aa, unidentified
MQNITLIGIDLGKHSFHIHCQDKSGKALLRKKFTRTKLMQFLATCPPSVVVMEACAGAHFMARCISDFGHETKLISPQFVRPFVKSNKNDFVDAEAICEAASRPSMRFVQPRTETQQAMRTLHRVRESLIRDKVKTTNQIHGFLLEFGISLPIGDAVIKRLSLVLAEHEIPEYLSRLLVRLHTHYFYLVEQIAELESELSQSINADDTAQRIMTIPGVGPITASLLSSQLGDGKQFSCSRDFAASTGLVPRQYSTGGKSTLLGISKRGDKNLRRLLVQCARSFIMRLERKHGKLAEWVREQLNKKHSNVVTCALANKLARIAWAITTQKKEYQA

SEQ ID NO: 357836 - protein, 375 aa, unidentified
MSTAMTRMDQDTRTLYVAFELGEKEWKLAMSPGLETRPQLRSLRARATTRLLEVLEKARQRFGAEQIVSCYEAGRDGFWLDRFLRAHGIDSRIVDSASIEVRRRARRVKTDRLDAQKLLTMLHREALGEKDVWSVVHVPSVADEDARSLQREYRTLVKERSRSSNRIKGLLASQGLVAPRIDGRLSEWLASARLWDSSPVPSGMRARVEREFARWRFTHDQVLALEKERRDRTKDETDRSLEKVRALYALKGIGLGAAWTWGLEFFTWRNFRNGKEVGALSGLAPTPYQSGDSEHELGISRAGNRWVRGLAIEIAWGWLRHQPDSALTHWYNERFARGGPRARKVGIVALARKLLVALWRYVETGAIPEGAVLKT

SEQ ID NO: 357837 - protein, 320 aa, unidentified
MEDILEICAGLDVHQKNIVACVLDGTLNKRPKKEIKSFGTETEELLKLLDWLEEKKCSHVAMESTGVYWKPVWNILETGNFELILANAHQIKNLPGRKTDVKDAEWIASLFRSGLVNKSFVPEQPIRDLRDLTRYRKKIIFSINREKNRVHKLLQDCNIKITSQLSDIFGDTGRQIIDHIMNNRHIGRNEIEEMVKGRGKGKIKTKVDDILKSVNGNVREHHRVMIRFSYEHVEFLENKQKEIEKLIDKLVQPYTKEIEILNTIPGVSKNSASIIIAEIGVNMEQFPTDHHLSSWAGLSPGNNESAGKKKEAKLCREINI

SEQ ID NO: 357838 - protein, 482 aa, unidentified
MKPKPKEKTQKATDHPTQSHWHEMNRKQRREMMRKMQSEDINLEVVHPDAAGIDIGNESHYVAVPPSRDSQPVRRFGCTTAELKAMAAWLKRCEIRTVAMQSTGVYWVAVFDILEQAGFEVYLVNARDTKNLPGRKSDVQESQWLMKLHTYGLLRNSFRPSQEIRTMRTYWRQRNDLVQSAGRHILRMQKALTQMNIQLANVLSDVSGMTGQTIIKAILGGERDPHKLATFRDCRVKASEEEIARSLEGNWQEDLLFVLKQEQDGYEFCQQQMAECDRQLAQYLQQQEDRSHGASLPEEKRKGRLKKKRANKPRFDLREALFRITGTDLTRIDSIDVTTAMTVISEAGWDMSKWETEDHFVSWLRLCPDNRISGNKIIGKGRLPTNNPITIALKLAASTLRLSNTYLGAQFRRFRTRLGAPIAIKAMAAKLARLVYRILRYGMKYVDQGTAFYQAQHRNLQIKHLKSKAASLGYQLIQVPAA

SEQ ID NO: 357839 - protein, 311 aa, unidentified
MSQTLRTSVAVIGIDIGKNSFHLVGQDRRGAIVLRQKWSRGQVEARLANLPPCLIGMEACVGAHHLSRKLRMFGHDARLMPAKYVRPYSKGQKNDFRDAEAIAEAVQRPTMKFVATKTADQLDLQALHRVRERLVSQRTSIINQIRAFLLERGIAVRQGLRFLRAELPGILATRTEVLSPRMLRIVEDLGADWRRLDERIKSLSGEIEMLARQDKGCERLMTVPGIGPIISSAMVAAVGTGDAFSKGRDFGAWLGLVPKQISTGDRTILGSISRRGNRYLRSLFACAQHFCLAPDSAHIAASSERSKRAND

SEQ ID NO: 357840 - protein, 339 aa, unidentified
MSLYCGIDLHSNNHVLTLIDEQDSKILEKRLPNKLETSLSIMAPYQNDIVGVAIESTYNWYWLVDGLMDAGYPLHLVNTAAVKQYDGLKYTDDQHDAFHLAHLLRLGILPTGYIYPKAQRAIRDLLRKRSFLVRHRTAHTLSAKSLHTRMTGRNATTSVIQGAHAESIYLPGLADVHRQLEMKASLHMIQVLEQQIIIIEKAVLKQMKLSPAFIGLKKVPGIGEILGLTIMLETGEIGRFASANNYASYCRAVASKNMSNGKKKGEGNRKNGNKYLGWAFVEAANYMIRTCDPGKRFFQRKLAQRNRAVAVKATANKLAKACYYIMRDQVDFEPGLLFR

SEQ ID NO: 357841 - protein, 397 aa, unidentified
MGNEFAVCCGVDVGKWAHHVVAIDTETGEVLFDSKVDQSEREIRAALSPLCAAGKVRVVVDEPGPMSRLLFAVAKDMGMEIGFLTPRAMAKAIEMYGGDIKTDRRDATILAEVASGIPKLVKAVDEKTPERHRLAAIMSHDRELTAEVTRSANRLHALLLAVCPPLEELMAGKKIQGGLALLLLERYGGPCGLRAAGRGRAKRFVRSRKGFGGASGAKVDRVFDAISEQTLVLPGAEDLEDLIRMEARRLSSALESRKTVAKKRDAILEAIPEAEILMSMPGVGAVTCATFLAEVGDVTRFPTAAKLASYAGLSPKVRQSGRSVNSVTKPRGGNRRLKRVLVLSASKSILFCDESRKYYERKRAEGRCYNSSITALARKRLDVMYAMLRDGNKYKKK

SEQ ID NO: 357842 - protein, 322 aa, unidentified
MNTNQQPPVVTFEQVINRGCGLDVHEKTVVATIDGLGLKRETRTFDTFTESLIELRNWLKTHQVSHIAMESTGVYWKPIFNILEENFRILLVNARHLKNVPGRKTDKADSEWICKLLLSGLLKGSFVPEEKLRNLRDLSRYATKLTQQASAEKNRIHKILEDANIKLSSVVSDIDGAVSNRLIAGLIAGRRDLGQLVEETYHKKLKANKSDLLKAITGKLTDHHRFMLGQIQSHLEYLEKQVMAIEDQMDRLLEDHEQQIELLKEIPGVDDKAAKKVLSEIGTDMEVFPSEKHLAKWAGICPGNNETAGKKKVDEPRRETNT

SEQ ID NO: 357843 - protein, 457 aa, unidentified
MSRKSQSKPKQMPATEWVTLHPDAAGLDIGASEIWVAVPPDRDPNPVRPFATFTPDLQALAEWLTACRVTSVAMESTGVYWIPIFELLEARGFEVYLVNAQHIHNVPGRKSDVQDCQWIQRLHSYGLLSASFRPEAEMVVLRAYLRHRAMLIEHRAPHMQHMQKALQQMNVQLTQVLRDITGLTGLAIIRAIVAGERNPVVLAQLADPRCHSSQEQIAKALTGNYRAEHVFALQQSLALYDAYTGQLAECDRQVERQYAATKPRFDPDDPQHPLGPDPKPNAHTKNGPNFEVRTPLFKLVGVDLKAVDGFNESIAQTVLSEIGTQMDRFPTVKHFCSWLGLAPHNDITGGKVVRRHTLKTHNRAAQALRMAAQAAGNSHSAMGDYFRRMRARLGPKDAITATAHKLARIVYHMLKHRQPYNPLTPEAYNEQLRQRELKYLKHRAAKLGLTLQEQPTG

SEQ ID NO: 357844 - protein, 424 aa, unidentified
MVTIVGPPDGRLSKEEAMATPDTVDVWIGLDVGKEFHHAVVLDDAGNALFDRRVANTETDLVKVFDAAATHGTTALAIDQPGSIAQLALALARQRDIPVAYIPGLVMRRAADLYPGEAKTDRRDAMIIGDTARTRRKQVHWLTIDDELLLQLRVLNGLDTDLAADSTRHANRLRDALTSISPALERAVGAKLSHAGVRDLLAKYPTPTALRSAGKARIRNTIAKRSPRLKVSVTERVWAALSQQTVTVPAEETVGRVIAELVVELDRIRDRRDRLEKEIEVVFLAHPLGPVLITMPGIGPRTGARTLAEIADGSGFANGSKLAAYAGLAPVTRQSGTSIKGERRSRRGNHRLKNALFLAAFASLSDPDSRAFYDRKRAEGKKHNAAIICLARRRCDVILAMLRTGEPYLTSTQLAERAETKKAA

SEQ ID NO: 357845 - protein, 364 aa, unidentified
MKKLYIGMDVHCKTSFFVVQNEQGEVVKEKEVLTREEEIEKFLRDLGGGELIRGTEIGMESGHQATWLSRFLSSLGMKPIVIDAREVRAKARRIGQKSDWRDAFEICDGLRRGIYQTIVYIPDKKIQRLRNIIRKRRHYVRVCTGEINAAKSMLRANGISVSEKFLKQSRNWEMMIGSIGEEDLVKYAKMHYELWKIAIKKVRELEEELKKALEPYEEIVDILMSAPGVGLITAATYIAIIGTPERFEDSSRVVSYVGLAVSTYNSGGKERHGHITKRGSAELRAMLCEAAQQARNPQNPLNPYFMRICAKHGYKRAIVSVAHRLAQILYRMWREKKRFDINKLNIEKGEYHKIRKIYYKIKTR

SEQ ID NO: 357846 - protein, 368 aa, unidentified
MSEDITAFVGLDVHKESIAIAVAQAGRDAPRFIGTTGPRISEVEKALSHLGTRAELFIVYEAGPCGYVLARQLREHGYRCELVAPTKIPRKPGDRIKTDRRDALSLAHFARAGDLTPVMVPDESDEAIRDLSRAREDALRARMVARHQLKALLLRHGQPYTGKSSWTLAHERFLAKIGFAHPAQHITFVEYRTAVKEANERLERITAALRVQVTEWRLQSVVAALMTLRGIDFVAAVTLVCELGDLKRFAHPKHLMSFLGLVPSESSSGESRSQGGITKAGNSHARRILIEAAWSYRYPARIAREMQIRQEAQPRALREIAWRAQLRLCQRYRRLTLRGMHQNKTCVAIARELCGFMWDLARHLPSAG

SEQ ID NO: 357847 - protein, 409 aa, unidentified
MKLFVGLDVSSQDAKICFLNGEGDCLQSFTITNDLPGALILKKKILDTASKSNCKIIKIGLESTSIYSYHPAMFLHNDKELRTYGSQVFMINPKQISNFKKSYPEMDKTDAIDAFVIADYVRFGRHTMSIVKEEQYMALQQLTRSRYQLVHALTKEKQHFLQHLGLKCSQFTQDVESSVFGNAMMELFLERFSLEELAQMPLQELVLFLQEKGKKRFGNPEDVAKSIQKAVKGSYRLSKVVENSIDLLLSTSIQIMRTYQAQIKEIEKGIESLMSTLPQTLESIPGVGPVFAAGIVAEIGQIDRFADETRIAKYAGLFWKKYQSGRFTAENTSLTKSGNPYLRYYLVEAANSVRRHVPEYRDYYTKKSAEVPKHKHKRALVLTARKFVRLVDALLRNNQIYAPGRGVDR

SEQ ID NO: 357848 - protein, 410 aa, unidentified
MDVFLERCAGLDVHQASVVCCVLIGAPGRKPQKLLRSFGTTTRDLETLRAWLAEHGVTHVGMESTGVYWKPVYAVLEGHVDLTVGNAHHIKNVPGRKTDVKDAEWIAQLVRHGLVAKSFVPPPAIRDLREMVRYRRTLIETRTAMRNRVLKLLEGANIKLSGVASDVFGVSGMAMLEALAAGTNNATEMAGLARGRMRRKHAALEAALDGRMREHQCFLLSMQLRSLEAIDRDLEALDARIEIQLEPYQAQHRLLMQIPGVDWVTAASIIAEVGTDMDVFASARRLAAWAGVAPGNYESAGKPKGDGTRRGNVFLKSALFAAASAAVRTKGSYYRDKYNRLRARRGPVRAIMAVAHKLLIAAFHMLSTGEAFRDLGESYLDQVARKRSTTKLVQRLSNLGYDVMLVPKAA

SEQ ID NO: 357849 - protein, 396 aa, unidentified
MAAIWAGIDAGKTHHHCVAIDESGRRLLSRRVANDEPELTELLADVLALADEVTWAIDLADGGAALAITILLNQDQPVHYISGRAIHRASEGYCGEGKTDAKDAAVIADQLRVRRDLHPLHGGDDTIIDLKLLTSRRMDLVTDRTRTVNHLRAQLTGVFPGLERAFDFTNTGPLTLLTGYQTPAAIRRIGAKRLEAWLRNRHVLRPDRLAEIAVQAAERQHTSLPGEKLAAQLVHTLAKEVMAYNQQVTEVDKDIEARFRDHHTFDVITSMPGLGIILGAEFLAATGGDMAVFGTADRLAGFGGVAPVPRDSGKISGNLRRPQRYNRRLQRVFYTSALFSIRHCDESRRFYERKRAEGKRHTQAVLALARRRVNVLWALLRDGRCYELSPPNTLAA

SEQ ID NO: 357850 - protein, 441 aa, unidentified
MPDMALTTPEPVWAAFVAMDWGSQKHAWILQPAAGGKPESGFVDNTPEAIAIWAAELNWRFGGQPVAVALEQKRGSVVNLLLPYPHLVLFPVPASMSAGYRKTFVPSGAKDDPADASWILDLLVRHRDRLRRLQPDDANTRLLLMMVEDRRQLVDDKTRLVLRLQDCLKQYFPQLPQWFDVDTPLVDDLLRRWPDLQHLQRCHDGTLRAFFRQHHYGQERTRERIAAIRAALAATNDPAVLEAGAQKARHLSQSIALLRDQITELERRRDELVASHPDSSIFASFPGAGRATVPRLIAAFGTRRERYQSAFEVECDSGIAPVHIRSGKLDRVCIRRACQGFTRQTFHEFAGQTIPRCQWAKDFYQAHCHKPEQHHAAVRALAYKWVRILYRCWKDRKPYDEQLYLTSLRRRKHLLGHDLASVTSVEWKTVAGFNKLSEKSS

SEQ ID NO: 357851 - protein, 422 aa, unidentified
MLTESHDEEQIIARVAALDIGKAEVVCCVRVPAGADAKKRLQEVSTHSTMTRALTELANHLVDLGVERVVMEATSDYWKPAFYLLEAHGLDPWLVNARDVKHLPGRPKTDVLDAVWLCKVAERQMLRPSFVPPRPIRRLRDLTRYRIDLVGARTAEKNRVEKLLEDACIKLSVVASDIFGVSGRAMMAALIAGERDPKVLAQLARARMRAKIDLLEEAFNGHFDNHHAFLLTRMLGRIDTIDADIAAVDTQIEAYLAPFASAAARLDDIPGIGPVAAAIILAEVGVDMSRFPTAGHLCSWAKFSPGICSSAGKPKGNGSTGHGNRYLARVLGESAVVAGRTDSFLGERYRRIAKRRGKKRAIVAVGRSILVIVWHLLSDEQAVFTDLGADHFTRHVNSETKKRNHIRQLEALGYNVTLSPAA

SEQ ID NO: 357852 - protein, 379 aa, unidentified
MYEDITYAALDDHKRRHQVAVLLPGMARKDALTWMVENTPSGIRKMVRKVLKMVDGDVRFCYEAGPNGYALQRQISRFDRVECVVVAPSLTPRRAGDRVKTDKRDARKLVGLFRADELVPVVSPMKEEEALRDLCRCREAAQKRVMASRHQLDKFLTRNGYIYRQGKNWSKRHWEWLRGLSIDDWRRERAFQTYLFAIEQDEERVKRLDVEILRAAEEEPYRTLVGYIRCFRGFETWSAMVVVSELFAVGRFGTASSLMGFLGLVPSEDTTGWKPRRGPITKAGNEHVRRILVEAAKHYRHPERISKALALRRKGQPEWVITIADKAQGRLHQKYSKMVWGRSKHANTTAVAVARELVGFLWAVLIQSGTNMNSSELAA

SEQ ID NO: 357853 - protein, 355 aa, unidentified
MVTIGVDAHKRVHVGIALDDAGQEIGHGRGPNSVVGWESLLGWVSAFGESRAWGIEGAWNYGRGLAQHLVEQGETVYEVNARWTAAGRRRARTPGKTDRLDAQAVARCVRQEAPHLPRVGADDATAVLDLLTSQRETVLTETTRLRNQLHALLLQLDPEYRDRLPSMDSSTGLEALERYQAAPGSTVLQQERAAAARRLAQRLRIASQQADELKAQIETRTEEAGLLPLIAIHGVGLLIAGALAGILGPGCRFRSDAEFAAYAGVAPLDASSAGYVRHRLNRGGNRRLNSLLHMVALTQLSSWKPAKDYVKRRITEGKTKREAMRALKRFLARAVWQAWKRCLAISNGKGNAQPA

SEQ ID NO: 357854 - protein, 355 aa, unidentified
MVKLMKYAVGIDVSKDKFDVCFCEINTVQQINIKSSGRFCNTDKKFKEFDLWLGKNQKEKIPLILMMEATGVYYDKIALYLYKKGYSVSVVLPTKAKKYMQALGLKSKNDKIDAKGLARMAAEQKHDLWQPMGDYFYKLRQLTRYHEQLQQSKTHFANQIHALEHGSFQVKEVVRHQRKMILLIEKQIVETLKFIKEHVKQKVDNICLVKGIGLLTVATIIGETNGFEMFENIRQLVSYSGYDVVENQSGKHFGKTKISKKGNAHIRRILHMPSFTVVRYDQKPFADLFERVYERTNIKMKGYVAVQKKMLIYIYTLWKNNQPYQPRVNNISGNDESKSLFLLVSEGNIIDSKKK

SEQ ID NO: 357855 - protein, 349 aa, unidentified
MRFYTESHQHYCGIDLHAKTMYLCILDREGQILLHQNVRSRPEAFLDAVEPYRDDLVVAVECMFTWYWLADLCRREGIAFVLGHALYMKAIHGGKAKNDKVDAFKIATLLRGGNLPKAYVYPPEMRATRDLLRRRLHLVRRRGNLLAHIQNTHHQYNLPVPAAKVAYKANREGVAEAFAEPDARKSMEVDFGLIEHYDDVIRDLQLHLERRAKQHDPQAYHRLRSVPGIGKILALTILYEIHDIARFPRVQDFLSYARLVKCEHSSAGKKLGTGGAKIGNVHLKWAFSEAAALFLRNNAEGQKHLRRIAGRHGKAKALSILAAKLGRAVYLMLSKERAFDRERFFAQTH

SEQ ID NO: 357856 - protein, 437 aa, unidentified
MEEVTDEPLYRDRVCGIDIGKAGMAATIRVPSDKDPARRAAETRSFGTTRREVLALADWLRCWQVPAVVMEASGDYWKGPFYRLEAEGFECVLADAKQVKNLPGRPKHDPGDSRWLAACLERGAVTSCFVATPEFRIIRLHTRYRRDLTEERTREKQRAEKLLESAAIKLSSVVTDLHGVTGRDIMDHLIAGERSPKVLAQLARARARRKISELEEALEGAEFFTAEHAALLAAMLARIDRVNAEIARLSEVIETLLEPYEEQLQQAESMPGWGRRAAEDALAETGTDMTRFRTGAHLASWAGRTPLDNSSGKRKGKAKSKKGNRYLGGLLGETAIAAGKTQTREGARYRRLSRRRGKAKALVAVGNTQLKVYHALLSSPGTRYEDLGPDYYERRAEVSRQVRHHVGKLGALGFDVTLCRIPEPGPEPGGTGNSQTA

SEQ ID NO: 357857 - protein, 353 aa, unidentified
MRQLDETIEIVGGVDTHKESHVVAAVDGAGRLLGTSEFPASATGYGDLLGWLREQGVVSRVGVEGTGSYGAGLARYLAQEGIAVVEVMRPNRQVRRRRGKSDPVDAEAAARAALSQEAEGTPKSGDGLVEAMRMIRLARVSAVKARTQAANQIHALVTNGPESLRSRLRGLSLRRLAARARRWRDVDIEDPLSACRSSIKGLARRWGRLGDEIAGYDAQLQRLTQRVCPELLARPGVGVEVASSLLVAAGDNPDRLRSEASFAALCGVSPLDASSGLQRRHRLNRGGNRSANRALWFIAVHRLRIDSRTQAYAERREAEGRTRNEILRCLKRYIAREVYHLLLESQGAQGLLT

SEQ ID NO: 357858 - protein, 341 aa, unidentified
MNHYVGIDVSLEASSVCVVDADGKIVREGKVASEPDALIAWLRGLRLELTRIGLEAGPLSQWLYAAMRQAGLAVELLETRHVHTALKTMPVKSDRNDARGIAQLMRLGWFRPVHCKSMAAQETRALLTARKLLQTKLHDLELSLRGVLRGFGLKVGPTTPARFAERIRQLVAGHPSLEVIADGLLAARVALRREFDCFEKQVRDAARCDTRARLLMSIPGVGAIVSLTFTAAIDGPARFKSSKQVGAYFGLTPTKYQSGETNTDGRISKIGDAWVRAALYEGAHIILTKPLKGCTVLKSWAMKIARRSGMKKAKVALARKLAVIMHRMLADGTSFRNAVAA

SEQ ID NO: 357859 - protein, 343 aa, unidentified
MGEVSTIGLDIAKSVFQVHGVDVDGAVMIRKRISRAKLLEFFATLPTCLVGIEACPSAHYWSRRLQGLGHTVRLMPPSYVKAYVKRGKNDANDAAAICEAVTRPSMRFVATKSKEQQSGLMLHRSRQLLVCQRTMLSNAIRGHMAELGIISAKGRNGTAELLKIIADEQDDRIPAAARFSLNVLARQYAAIREETVAIERRIHAWHRSSEESRRLEEIPGVGPIVATALMAEVGDWKTFSSGRSLAAWIGLVPRQHSTGGKERLGRISKQGNRHLRWLLVAGAMAVIRYARQHGTKRPWLARLMDRRPLKVAAVALANKIARMAWAMMVRGERFKEPKLLPAA

SEQ ID NO: 357860 - protein, 423 aa, unidentified
MKLTYPICCGVDVHKTFLVATIITSDFESPKYKQKRFSTFYRGLLEFKQWLLDNNCKDVCMESTGKYWVPVWNALEDSIHVVIANPKWVSAVKGNKDDKKDSKWIGDLFRMGLVPSSYIPEKDIRVLREFTRYRSKLVSMRSSEKCRFQNAFTVCNLTLDAVVSDMFGKSATDIENYLLESDSVDPNHCVSLLRGSLKKKSEEIINSVEGFNMTAEQKERARIIQGHFADIDNRIAQVDEVIGRLVSEYEGAISLLCTIPGIDRRLAITIISEIGTDMSQFGSSKRLCNWAGLSPGRNQSAGKKKSVKISRAGVYLKPALVEAAHAAVKATAANPYFRIKYGRIMQRRGKKRAIIAIARMMLTSIFAMFSTGEVFNPSDILKFDMPEELKKKQTLSAAKDAVKLLVSLGLVAENSISLQPLAS

SEQ ID NO: 357861 - protein, 391 aa, unidentified
MTVKDCTNVKEFRQLRKEIRGSDRHLIVGIDVAKDDHKAFFGTANGKTLLKRLIFKNDIEGFEKLLARVKEMKVKHSLGELVLGLEPTANYHKPLGDFLIKCGHMVVFVSGVSVKRNRELLDGRWDKNDTKDSANVADLISQGKCLYYEYAPLLLKDLRGLLSLKRRLKKQEHGLRIRIRNSLLAQYFPELDRYYSKWEPEILSVVRWCLDPSVIAGLEYDQFVSLVSPGSKNIRQQGRLEWIWKKAVDSIGCDAGEAAEFEAKVMVEELRHIREVIKETDAKIKDVCVRFPEYDYLLTIPGFGPDVSSKVLAAIGNPFRFNSLSQVLKMAGMDLNANRSGKSSDTAVPVISKQGSPHLRYALYQAAFIASCKNKYFIRYYTNTLRGRERG

SEQ ID NO: 357862 - protein, 342 aa, unidentified
MYYIGLDLHKKTISYCVKDAAGCVLQEGKIGSTRHELEAWVRTLPHPRMMAMEATIFTGWIYDYHLPHAEKVKVAHPLMLRAIAAAKKKNDRVDAGKIADCLRCDFLPECHMAPTAIRDRRRVLRYRNLVQRQAVQMKNRISELLMETGVSYNKLRLHRMGYFQQLLSSNDEISDSVLPLLKFCREHIDRSIQLDRTLLRSLEQDPMLSERLQRLRTVPGVGPITALTWVLEVGDTSRFRSIKQAISYCGLCGAEKSSAEKVLRTPISKQRNKHIQRMLVEAARLAPRYSQELALLYERERQRGNANRATLAVARKMVAHMLAVDRRKTDFIPEGKLRPTAV

SEQ ID NO: 357863 - protein, 428 aa, unidentified
MSDDVMIAVDPHKASNTAAVLDPVTRTLIESARFANSTDGYEQLTGFARRWEQRRWAVEGCHGAGRSLAQRLVADGEMVLDVPAKLAARVRVFSQGHGRKTDKDDAVSIGLAALDGDGVAAAAADGATVSLRLLCDRREELGALRTQAVCRLHRLLTELTPGGMSRELSAGKAAAVLARIRPGDEVSRIRLQLAADHLADIRALDARMKTIGAQIADLVAASGTSLTTLYGIGPVIAGRILAETGDVRRFATKDKFATYNGTAPIDVSSGEQIRHRLSRAGNRRINHALHMMAVTQIRYPTTPGRQYYERKRLEGKTPKEALRCLKRRLSDLVYHQLVLDQQGTIDTCGSPTTGKRTPSTSSSPTTRSRPAGPASQLTRPTASRHSSSSTGKTTASSASKSSTPAPASTTTSSTKPNSSARRRSNGSA

SEQ ID NO: 357864 - protein, 338 aa, unidentified
MNIVFLGIDLAKNVFQLCGLNQAGKPVYTKRTGRKELLQTLANIPACLIGIEASTGAFYWQREFEKLGHKAKVISPQYVKPFVHGQKNDGNDAQAIAVALMEPTMQFVSPKSPEQQDIQALHRARQRIVNHRTATVCQIRGLLLDRGIPIGSAVSRARRAIPLILEDAENGLSSRMRRTIAELYDLFNDLERRIHFFDKEIETVFRQSEACQRIARVKGIGPKTATAVVAAIGKGTEFKNGRHIAAWLGLVPRQHSSGDRQVLMNMTKKGDKHLRTLFIHGACSVVRVATNNDDGHMNQWVNQLKERRGFNKTTVAVANKNARIIWSMLRNETEYQVV

SEQ ID NO: 357865 - protein, 314 aa, unidentified
MAQSESFIGIDVSKETLDVAVIPAGKDLSFTNDPDGIRALCKKLKKMRPTLIVLEATGGLQIPAVAALGVAKLPVSVINPRQGRDFAKATGRLAKTDRIDARILAEFGKAIRPEIRPLKDEQALELSALITRRRQLVEMLTMEKNHLVIAPASIRPGIVESVTWLEQQLDELNNRLGLVIRSSPLWREKDELLQSVPGVGPVLSATLLAEMPELGALNRKTVAMLAGVAPINSDSGKHRGKRRIWGGRSRVRSVLYMACMTAVRFNPVLRVFYRRLVESGKAHKMAMTACMRKMLVILNAILKSGRPWGAVAEV

SEQ ID NO: 357866 - protein, 372 aa, unidentified
MLVAKTAREHSSSRPPFWRSPNGCRGRCSSHEQARISKAGPTPTKRRNRLSNTNPVRHVVGIDVSKRTLDVCLLPADAPHGESFRLSNDQEGIDELLSYLEVASPELVVLEATGRYERLAATSIAAAGIAVAVINPRQARDFAKATGRLAKTDQIDAFVLARFASAIAPSPSVIPDEEAQFLQHILARRRQILSMLTAENNRLQMAPKALQKRIRAHIKWLEKELSRTDGDLDEAIEASTTFKENEALLKSVPGVGPVLARTLLAELPELGTLTHKRLCALVGVAPFNRDSGDRRGKREVWGGRAPVRAALYMGTLVATRYNPVIREFYERLLAAGKPKKVALVACMRKLLSILNALMRDRAIWRCPHVLNP

SEQ ID NO: 357867 - protein, 430 aa, unidentified
MKSNTQNAKIEAITEKTLVLGIDVGSETHYARAFDYRGIEYSKKPFKFSNTEAGFATFKEWILDLKERHEKDKVVPGMEPTGHYWFNLGKFLQDNEMKPVLVNPHHVKKSKELDDNNPTKNDRKDPKVIAGLVREGRYMIPYLPDGVYADLRTASNIRFQLQAELTRIQNRISRWFNIYFPEYKTVYGKPDAKSGMLILKAAPLPEDILTLGIDGVNQIWRDAKLRAVGKARAKILIEAAEHSVGSKEGAVSARMEIRMLLEDYESRNTRLQEVMVLIEELVRKIPMAEKLLEIKGVGIRTVSGFLAEVGDISRFNNPKELQKLAGLALVENSSGKHKGETTISRRGRKRLRYLLFEVAMSLVSKNQEFRELHNYYTTRRLNPLKKMQSLMAIAAKLIRVFYAMLTKGVDYDPKKMVSDIKRPAVYLQAA

SEQ ID NO: 357868 - protein, 445 aa, unidentified
MSEPMPSTKSEPEWAAFVAIDWADQKHFWRLVPADSRQQEQGELENTPEAVEVWAASLQQRFDGRPIAVCLEQSRGALIYMLSKYAHLVLFPVHPTTAARYRETFCTSGAKDDPNDTASLLDLLLRHRERLRQLQPDTVETRLMQFLVEERRRTVNEKTRQSNRLTDCLKRYFPQILRWFDDVDTPLVGDLLERWPSLEELRRAHPGTLRKFFHEHNCRSAERNQERIDAIYAAVSATNDAAVLEAGALTARGLVALLRTLRDTIARLDRRIEQLVATHPEGALFASLPGAGPVLVPRMIVAFGTRRERYDSAYEVQCYSGIAPVKEASGKTSWVHFRRACPKFLRQTFHEFALHSIGQSEWAKAYYDHLRKDEKKSHHAAVRSLAYKWIRIIFRCWKDGKPYDEEVYVNSLRRRGSQLGAALAPATGLGWQTVAGFQKLSANNA

SEQ ID NO: 357869 - protein, 461 aa, unidentified
MSRRKSKRTKGIEEAHPFAGMSQVNANAAGVDIGAEEIVAYVEGAENMQIVKGFGNYTVDLQAIGQWLGEHHVKTVAMESTGVYWIPLFEVLEGMGFQCLLISSRSLRRVPGRKSDILDAQWIQTLHSYGLLESSFRPQADLVALRTLLRHRAQLLEHRAPHILHMQKAMLQMNVQLSQALSDITGETGMAIIRAIVAGERDAEKLAAYRDRNCKKSAEEIGRALTGTWRAEHLFVLKQSLEMYDSYTRQVEVCDAEIDRLYALTRPDWDGGELKPLPMKKRNSHSKNAPKNQEAIRAHLKRISGVDVCAVEGIGVGVAQTVIIECGTDLVQFPKEGNFSSWLGLAPKHEISGGKVLKNRTLKTKNRAGQAFRMAAQSVKRSDCVFGMMFRRFRARMDNRQATVATAHAIARVVYRMLKYKVEYDQIDVTEYEKQYEEQQIKYLKKKAGKFGFQLVPTASA

SEQ ID NO: 357870 - protein, 351 aa, unidentified
MSRTTSAVAASTIGIDTGKHTLHLIGLDEQGMIVLREKLARGRIGGRLANVPPCLIGIEAGMGTHYVARELISLGHDVRQVPPAYAKPFRQTHKNDFRDAYAIAEAVRRPSTRCVPVKTDDQLDLQALHRVRSRLVGQRTAVINQIRGFLLERGIAVRQGLRFLRQQLPEILAKRIDVLSPRMIRIVEDLSGDWRRLDERIEQVTEEIEVLARESESCRQLMTVPGIGPLIASAMVAAIANGAAFNKGRDFAAWLGLVPKQMSTGDRTILGRISKRGNRYLRTLFMQGARVILLRPANWAKHSFGPWLTTAAKRLHHNVLATALANKLARIAWTVLAQRRNYETRVIAEAA

SEQ ID NO: 357871 - protein, 453 aa, unidentified
MILPLDTAKRNQTLKTQNQTMNLNSPDQPPPPAQPFAAFIGIDWADQKHAICLSDCASNKTEQSTLPQQPEAIATWVGELRARFGGRPVAVCLEQSKGALIHALMAHEFLVLYPVNPATAALYRKAFATSRAKDDPTDAQICLELVRFHREKLRAWRPEDAPTRELRQLLEKRRRAVNLRTKLTNSLRDELKTYFPQALELVGEDLHSALACAFLLRWPSVQALQKAKKETLRKFYYAHNARRLDLVEKRLENIATMQALTADAAIIEPAILTVTMLTRLLGPLRDAIAAFDQRIAQLYAAHPDHQIFHSFPGAGPALGPRLLAAFGSDRQRFEGPASIQQYSGIAPVTERSGKSTWVHRRWSRPMFLHQSFFEYAGQSALHCDWASAFLQDQKARGKTHPTAVRALAFKWQRIMFICWRERRPYDEALYLQALKTRGSHLFQKLEKLQLEAA

SEQ ID NO: 357872 - protein, 471 aa, unidentified
MGKGSGNGTTRGDRKRNARRERLRALLPRDGAVIGIDLAEDKQALAVIDHDVRVLARKTVKVKAFRLGEGLDWAVAQARAKGFTAVTVACEPTGPRWLQVQRLCAERGLPLVCIQPLVSHIAREQQDYTTHKTDESDCVMIARLAVELHCYIPEELDETWAHLRHLGRRRAQLITLATASAQRIRDLLSVAWPTVMETCAEPLESRTWLAALEVVTSRCGADPGKLAAMGEEAFTALVRAAVGGWDAKKAWGPIIRRVFAALTDTEGVVISSRRGLLRRVADELGDLQRTRAQLRQAEAEMVAVLDELGLSRLAGIPALSAVGAAAILAETGDPGRYDSSSSLVKHAGLSPSDNASGTFLGDAHISRRGRPGLRLTVWRAVWPMLQFNPVMAAKYQAMTQGADDAADAAEAGSRQAGAAAAAARARRAKARVACAASLLRWIYCLVVHGTSWDPDAASGPAGRRPALAEAA

SEQ ID NO: 357873 - protein, 360 aa, unidentified
MKQITGGESRREAVRVGVDLAKRVIQVHAVDALGRVLTSRTLGRDRFIEWCTRLPAGCIVAMEASSSAHHWARKLAAIGLDARIISAQLVEPYRLEGASGKNDANDAAAICEAASRPSMRFIPVKSIEQQSMLCVHRLREGLKQDRTACINRIRGLLAEFGLVFAQGPRELQLILSDVLEDAGNELGTLARLTLQRAQAQWRELDEHLAWCDERINAHGRDNVEVKQAATLIGIGPVTASAAVATVGDFKQFKNGAQFGAWIGLTPRQRSSGGKSNLGSITKRGDTYLRTLLIQGAKSAVMTAHRRHDKISSWALALRERSGWQKAVVALANKNARILWAVMTRGDVFDPNHLSVKPTGG

SEQ ID NO: 357874 - protein, 273 aa, unidentified
MDHFAGIDLHLKNSYIAVIDTDNNRTFKKKARNNLTEIIKHLAPFEKQIKGIVVESTYNWYWLVDGLIDNGYKLHLANPSAIKQYEGLKHSDDITDAFHLANLLRLGILPEGYIYPKHERPLRDLLRKRIHLVHHRTALILSFQNLVARNLGSKMHVSTISKLNEEDLEELFEDEYLILSAKASISTIHFLRSRIVQLEKIIAKAAKLKNEYKLLKTVPGIWNILAQMIMLETGPIERFKKVGNYASYCRCVQSNRFSNSKSKGKGNRRNGNK

SEQ ID NO: 357875 - protein, 343 aa, unidentified
MSIVTLRVAFVGLDYHASSVQVCVMDKDGNMLVNRKCANDWRAVTAAVYEQCGKEVQVQAAIESCCGAADLADELISRGWMVQLAHPGYVARMKHNPDKTDYGDARMLADLQRLGYLPRVWLAPEEVRELRRLVRYRQDLTKDRKNLKLQIGATLREARQKAPANVNAWTKAWLAWLEASTELSPNARHVTNRRLRRLQEVQEELRRVDKRLERQTREDPLVQKLLTVQGIGLVTATTLRAEIGRFDRFRTGKQLARFCGLSPRNASSGKRQADAGLIKAGNNELRALLIETAHRLIRRDERWTALAARLSGRGKATGVVVAAVANRWVRWLYHQAQPSCLAA

SEQ ID NO: 357876 - protein, 406 aa, unidentified
MLASIGRGRNTARFDAKGESVAERDVTHDGAALSELCAWLIEVTGAQPAQIAVAIETPRGPIVETLLERGFVVYSINPKQLDRFRDRFTVAGAKDDSRDAHVLASSVRTDRRAFRRLTFDDPLIIELREWLRIEDELKQERIRLSNRVREQLWRYYPQANRLSDDVADDWFLDLWEQVPTPATAAQVNENTVAKILKTRRIRRFNAAEALAILRQQPLQVAPGTAKAATAHIRTMAVRLRLINEQIKQAERRLDELCAGIKASAPGQICEQRDVAILRSFPGLGRINIAALLAEACQPLRERDYQVLRVLSGSAPVSRRSGKSWIVLRRYACNNRLRNAIYHWARVAIQHDAVSKRRYDELRRRGHGRARALRGVGDRLLYVLCKLLQRQTPYDPEYKIQQMQLTA

SEQ ID NO: 357877 - protein, 435 aa, unidentified
MFYKVFAGDKAACAVQSESIFNGEMMPNQSSSEPQWAAYVAIDWADREHVWEMQPVEGGPCESGKVEQTPEAIEIWASQLATRFNGRPIAVALEQSRGPVVFSLTKYSHLHLFPVHPSTLAHFREAMVPSGAKNDPGDTRLLLELLLHHRARLRRLQPDTEQTRELQFLVENRRRLVDDRTYFSNRLIAQLKLYFPQILRWFYKPASPVACDFLLRWPTLEAAQKATPRALKTFFAKHNCQDVERRMEEVRKAVCATHDQAVIRSAMIMVQATVRLIQTVHQDISHCEERIEQLTKSHPDFAIFDSLPGAGDALIPRLIAALGTQRDRFASAVEIQSYSGVAPVVKQSGNTKLTHCRQAYPRFLRQTFHEWALHSILKSTWARAYYERQLSRGKKHHTAIRALAYKWIRILYGCWKDRVPYVESSHADAQKKSSP

SEQ ID NO: 357878 - protein, 453 aa, unidentified
MPKTSSSMPQNLTRMNPGAAAIDIGSTMHMAAVNPDCADMPIRSFGTFTHDLHDLAVWFRSCGVTSVAMESTGVYWIPAFEILEQHGFEVILVNARYAKNVPGRKTDVSDAAWLRQLHSYGLLRGSFRPNAQVATLRAYLRQRERLVEYAAAHIQHMQKALMEMNLQLHHVVSDITGVTGMKIIRAIVSGERDPAALASLRDVRCHSSVETIRASLIGNDRDEHVFALSQSLELYDFYQAKMLECDRKLEASIASMTTELEAPLAPLPKIRTKTKQTNAPSFDVRAALYGLTGTDLTQIHGLGSSLALKLIGECGTDLRAWPTAKHFTSWLCLAPGNKISGGKVLSSRTRRSSNRAAALLRLAATTIGRSDTALGAFYRRLAGRIGKQKAVTATARKIAVLFYNALRFGMVYRDPGAAAYDERHRGRVIANLQRRARSMGYELAPMTAGDCVS

SEQ ID NO: 357879 - protein, 356 aa, unidentified
MSQQSNCAIAVIGIDIGKNSFHVVGQDQRGAIVLRQKWSRGQVEARLANLPPCLIGMEACVGAHHLSRKLQLLGHNARLMPAKYVRPYSKGQKNDFRDAEAIAEAVQRPTMKFVATKTAEQLDLQALHRVRERLVGQRTGIINQIRAFLLERGIAVRQGLRFLRLELPGILATRTDVLSPRMLRILEDLSGDWRRLDARIEGLTSEIETLARQDQHCERLMTVPGIGPIISSAMVAAIGTGEVFSKGRDFGAWLGLVPKQISTGDRTILGSVSKRGNRYLRVLFVQAAWVVLVKLGPEKWERYGLKSWIEAAKKRLHHNVLAIALANKLARIAWAVLNKGRAFACAKTDAIASRPA

SEQ ID NO: 357880 - protein, 386 aa, unidentified
MRDKAFIADDYDVFAGLDVSKKSIAATFTGRQGFIRSLQMPYNVEYLLNHVRKHFADQKIAFVYEAGPTGFGLYDGLAAQGYRCLVAAAAMIPKAPGKRVKTNRLDSRGLSEGLRSGQIKSIHVPSAIYRELRHLTQLRDTTVRQAAAHKQRIKALLLLEGIDFPPAPAGRQWTLRVKAQLRRLQCSHSVRFKLDQLLDNLEFCEKQVVSSTKEIRRFCKEDAELLQSIEYLMSIPGIGWIVASQLLARIGDWRQIDNVRQLGSFLGLVPTENSTGDTVDRGSITHAGDGRLRSKLIQAAWSAIRQDPELREFYRSVCHRNGPSKGPRIAIVAVARKLSMRVYAVLKNQRPYVVRKQVHSAPLTQEETSPQGTTRRCAEPGETTDS

SEQ ID NO: 357881 - protein, 418 aa, unidentified
MFKIFRKNCCGLDVHKTWIYACIGITDANSRTEYFQARFSAFSKGLQELSHWLDKYNCKEVCMESAGKFWIPVFNILEKTCLVTLAHPKYTKPQKGNKTDRKDAKWICDLFMCDMIKPSFIPPPAIRHLRDLVRYRGKLTNMLTGEKNRAQNCLTVSNLKLDDVFADVFGKSARSITEYILAHPGEPFDVAQFVDRRCKSPLSEIQAAVDGAVSPEQAVKLRQCLDHIDQLRLLRQRLEQEILRICEPFADILQLLRTVPGLGNDPMTAIAVLSETGGDMSVFPTAKNLCSWAGCCPRNDQSGAKVKSTRISRAGSYLKPLLVQVANALIHSRKHPEFAERYRRIKARRGHKKAIIAVCKMLLTAIWNILSKLVPYSPAGFLSASHDLPPSKSLTVAQGLSLLRRRGFILTDDPLSAP

SEQ ID NO: 357882 - protein, 342 aa, unidentified
MGVVGIDTHKATLAACAIDEVGQVLGERTFPNEPAGFEALLGWLHGLGELTRVGLEGSAGYGAAAARFLLAAGLPALEVPPQLSHRERIRSRRAGKSDPGDALAIARVVLREAELPPVRTADASRELKLLVEARDDLAAEATRVRNRLHADLVVIAPGYSAVAANLVAEKHRRAAGGLLRRMPGVQAELARGRLVRLAQLATEIRQLDRRIEGLVVDHPLRSLWGAGPLVTAKLLGEVGDIRRFRSADAFAMLAGVAPIPASSGQTSRMRLNRGGNRQINRALHGIVLAQVRTYPPAQAFVARKRAEGKSWREALRALKRHLARIVFRLLSQPVRQSSSVGA

SEQ ID NO: 357883 - protein, 437 aa, unidentified
MEEVTDEPLYRDRVCGIDIGKAAMVATIRVPSDRDPARRAQETRSFGTTKKEVLALADWLRCWQVPAVVMEATGDYWKGPFYRLEAEGLECVLADAKQVKNLPGRPKRDPSDSRWLAACFERGAVTACFVATPEFRVIRLHTRYRRDLTGERTREKNRAEKLLESAAIKLSSVVTDLHGVTGRDIMDHLIAGERNPKALAQLARARARRKMAELEEALEGAEFFTAEHAALLAAMLQRIDRVNAEIDELTAVIERLLAPYEEQLQQAESMPGWGRRSAQDAVAETGVDMTRFRTGPHLSSWAGKTPLDNQSGKRTGRAKSKKGNRYLAAVTGETAIAAGKTQTREGARYRRLARRRGKAKAQVAVGNTQLKVYHKLLSNPGLRYEDLGPDYYDRQRDVHRQIAHHIGKLGALGFEVTLCRIPEPEPEPTGSGNTQAG

SEQ ID NO: 357884 - protein, 331 aa, unidentified
MLMKQKQTTETSYCGIDISGETIDVYYPDAMGTYQSETYSNNKEGFKTLLRKTGKHYHFVMESTGVYHLPLCFYLETKKSSYSVVNALQIKRYIQMHLERNKSDKKDAKHIYHYGVERNPARYEMPNSLYFECKSLNHAIESLTKEITSFKNKLYSLSKLDYDTKAVVKAYKNTLKQLSAELENLEAALADKLSEWQPDLVKQVRSVVGIGKRATSILIVSTQGFKNTETYQQLICYAGLSPKEYTSGTSIRGKTKICKQGGGRLRHTLYMCALNAKETNPACKALFDRLVAKGKNKKLAVIAVCNKLLKQVFGVVKSGEMFDRNYLQKIA

SEQ ID NO: 357885 - protein, 373 aa, unidentified
MDQDTKFVGLDVHSASISVAVADPGRGEVRALGTVPNTSDAVVKLIKRLGPASRLSFCYEAGPCGYGLHRRLTRLGTACMVAAPSLIPRKPGERIKTDRRDALNLARLLRRGDLTPVWVPDEAHEALRDLSRARSDARIDLLRHRNQMSKFLLRQSIFPMTRLRPWGKMHRAWLQTLRLPHASHQVVLGDYLETVDHAENRLANLEAELALLAAQSPLAPLIAVLQAFRGIALTTAIILVTELGDLRRFPSPRALMGYTGLVSTEDSSGDRHHRGRITKTGNAYVRHVLVEAAWQYTRPPKVWGALQKRQLGLPPAVLAISWKAQQRLHRRFRRLTHHGKLRHVAVVAIARELAGFIWAAAQAVPMPAQEVVA

SEQ ID NO: 357886 - protein, 367 aa, unidentified
MGWMAPLRHLSAKVLVDRKPPANREPSMNEITTVGLDLAKHVFQVHGVDAEGTTVLRKQLRRGQVLAFFSRLPRCLVGMEACATAHYWARELRALGHEVRLMPAQYVKAYVKRNKNDAADAEAICEAVGRPTMRFVPVKTAEQQAAVLLHRGRERLVRQRTMLVNALRAHLAEFGVIAPQGLRNVGRLIAIIRDDDDAHLPGLARQVLQVLAVQIEQLEAAIAALEKRLMGWHKSNPVSQRLATVPGIGPIIATAIAAMVAEPSGFRSGREFAAWLGLVPRQNSTGGKNRLGGISKRGNQYLRRLLINGASANLLRSKATNADAWVIGLRRRRPSLVVAVALANKTARIAWAVMHRQENYQRMATAA

SEQ ID NO: 357887 - protein, 366 aa, unidentified
MRKVMAGMDLHGNNVMVGIVDAQGARLQHRRLACELPEIIEFLAPYKTELESIAVESTFNWYWLVDGLKAAGFPVVLANPAKIDQYSGIKHADDKNDAYFLAELQRLKILPTGYIYDPELRPVRDLLRRRMSLMRQRTTLFLSAKSLHQRTTGRALELRRLKAMEPEEAVALYTHPANQLIARIQKEHIDSLDQSIRQIEKAVLKVALQQPYYQRLQTMPGVGIILGLTISMEVGNIDRFAGPGQFASYCRTVDAKRVSNGKNKGENNQKCGNKYLAWAFVEAAHGARRFDTACRRWYDRKAGKRCPTVATKALACKLAKAAWYVMAKGEEYQAGRVFPGLTEPKVEEISGEQASARKGVGPNPED

SEQ ID NO: 357888 - protein, 350 aa, unidentified
MLIIGCDYHPSFQQIALVNTETGELQERRLMHREEAEQYYRALGTAGAEVRVGIEASGHAGWFERLLAELNIELWMGDAAKIAAKRVRKQKTDRRDAQHILTLMVKDDFPKIWVPSWENRDVRQLLWHRHRMVQTRTRIMNQLQAAALNEGLRYKKKLWRESGRQQLESLPLAPWASRRRRDLLEVLDRINPTIAELTRAIEQQAEKCPDAQRLMTHPGVGALTAIAFVLIIGKADRFSCGKQIASYLGLVPEEDSSGERRRLGHISKQGNSLLRFLLVEAAQVTVRSDNRWRNRFFHLAQRRGRKIAKVAMARRLAIRLYWMWRRGWDYVQLESFGSHVGQPGHRHGVQ

SEQ ID NO: 357889 - protein, 367 aa, unidentified
MGVLFVGLDVHKETISVAVAEDGRHGEVRSLPTISNTPQAIEKMLAKLSGKAGRLSFCYEAGPCGYGLYRQIVESGHDCMVVAPSCIPTKPGERVKTDRLDSIKLARLLRAGDLTAGWVPDAAHEAMRDLLRSRTDAMHQLKTAKQQLFAFLLRQGRVYSGRKLWGRAHLRWLSEQKFEQEAHRMVFQDYINAVQDGQQRHGALIKIVEGMIPQWSMRPLHEALCVMRGIDTISAATILCATGDLRRFDSPGKLSAYFGLIPAEHSSGGSVKRGGITKTGNNEVRRILDQSAWCYRFPARVTRAKEKIASETEKKVRDVAWRAQVRLCGRYRKLLAAGKCAPLVCMAVARELAAFIWEMGRVVPLTT

SEQ ID NO: 357890 - protein, 412 aa, unidentified
MRIVYPRCAGIDIHKQSMTVCTIVDSQNGSAPEYHKRKFATHTEGIGELAAWLREFQVTDVGMESTGVYWKPVWNALEGEWKLHLCNPHHTRAIPGAKTDFRDGTRVAELLAYGKLPESFIPPQWQRELRDLTRLRARYTQEVTRIENRIEKVLEDAQIKLGTVTSKLLGVSGRAMLEALARGETDVDKLAGLAQRKLKRKKPALRQALQGKVTEHHRFQLGMLLDDLKHTEEKITQLELRIWEYVEPHRELVERLDQIPGVDWLSAAVILAEIGPDVSHWEDARKLASWSCLCPGNCLSAGKRLSGRTRKGNPWLRRAFCQMGWAASHKKNSYTKAQFRRLAGRRGKQRAVLAVAHTLLTVVYHLIANPDLQYRDLGEDYFDRRNAEQTKKQLVKRLAKLGYEVTLTPKAA

SEQ ID NO: 357891 - protein, 425 aa, unidentified
MKKTDYLSTLFVGIDIGSRTNVVSAIDFNREYFIRMKPVPNAKEGAEILESLLVDVLSAHHEFKHVIIGMESTGFYGVHIANYLSASDMLSPFGTEVYCLNPKEVAKYKESFNSINKNDGIDSFVIADFARVGRITIKPWRGAQYLALQRLTRHRLHIAECIAREKTYVLNNIFLKFSEFAMLKSEDHPFSNKYGATAEAIIEQYVTNDDIIRASIDELVELIESKSHGRITDPEETAKLLQSAAKGSYRLDKVVAKPITLSISSSFNCIRAFEKELKAIEKAIEQTVQGINPLEYQVLKSIPGIGPTYAAGILAEIGTIKAFPNNDALAKYSGIIWKENQSGNFRAEDTKMSKAGNRYLRYYIIEATGSVINHCPEYKAFYGKKFAETTTHQHKRALALTSRKFLRMLFGLLDKTQLYSLEKSR

SEQ ID NO: 357892 - protein, 374 aa, unidentified
MSEHSVAYVGLDTSKLHNAVAIAEAGRDGEVRYLGEIDNTTEATARLVRKLSAKHAHLTFCYEAGPTGYGLYRQLTGLGHDCIVAAPSLIPRKPGDRVKTNRRDALSLAKQLRAGDLTPVWVPDPRHEAMRELTRARGAAQRDLQAKGQQVLSLLLRLGRHYPARKTWGKAHMKWLAGQKLEHLEQRLALEEMLLAVRQATDRVQRLEQAIRAAVPDWSLAPLVTALMALRGVDFIAATTLLAEIGDLSRFRTPRELMAWLGLVPSEHSTGERVRRGAITKTGNRRARRMLIQCAWSYRHPPRVGSDKLAKVAAAPEAVREIAWKAQTRLTARFRALCRAGKLDVVAITAVARELAAFIWAIARAVAPGMVMTR

SEQ ID NO: 357893 - protein, 341 aa, unidentified
MNSNVVGLDLAKNIFHLFSLDADGKPIKKKLKRPALLAYIANLPVSLIGMEACGGSHYWAREFKKLGHEVVLLNARYVKAFVIGNKNDFNDAEGIFTAAQQPNKRVVSVKNLEQQDMQMVHRLRQSTVKERTAVVNQIRGFLSEWGIVLDQGVNKVRKQLPDILEDAENGLSVISRGLFAKQYEKLKELDKTITDYDTQIGQLCQQNTLSKRFLSVPGIGPLTATMVASDIGDGKGYAKGRDYAASLGIVPKQHTSGDKQVLLGISKRGNGYLRTLLIHGARAVLKNCQDKTDSLSRWLQGLIERRGFNKAAVALANKNARILWAMASQNKDYETATAEAA

SEQ ID NO: 357894 - protein, 440 aa, unidentified
MIDTNQKQEIEFAAFVGIDWADLKHAWALQIPGHLDVDRGDLDHTPEAVDAWAAALGRRFGGRPIAVALEQSRGSLLFMLTKYAHLVLFPVHPTTLSDYRKGFRPSGAKSDPSDAGLLVDLLVRHREKLRRLNPDTEQTRTLQFLVEARRKFVSDKTRYSNRLTAYLKMYFPQVLGWFSEVTSPIAGDFLERWPSLQKVQKARPETLRKFFIQRHSCALDNVDRRLEEIRRTLPATHDAAVTCSCSAAVLALVRIVRTVRDAILSYDQQIETLARQHPDFAIIDSLPGAGPALVPRLIAALGTQRDRYHSASELQSFSGIAPVLASSGKQRWVHWRWACPKFVRQTFHEWAAHSIGSSAWARAYYEQQRAKGKPRNTVVRALAFKWIRILFRCWKDRKPYREDFYREALARHQQRATTSSPVQLQWKNCAGFSKITAITP

SEQ ID NO: 357895 - protein, 332 aa, unidentified
MKKFKEFIGIDISKLKFDIRIHSNQIASVFDNNNTGFKKMVNWVLKNVDCDKEEILFALEHTGLFSLPISVFLSENKFHFILLPGLEIKRSLGIQRGKNDKIDAKRIAEYAYQKKDKIVPSQLPFKNILQIRRLLKLRERLVKYRAGFLKDKSENKIFLNAKENKLLFEIVDKSIIELNKKIDKIEKEIDIIVESDTLISKQFYLITSIKGVGKQTALFVIAYTNCFSNFDNWRKFASYCGTAPFPYSSGTSIKGRNKVSPLANKKIKSLLNQCARSSIICNPEMKLYYKTRKEKGDNGMSIMNIIRNKMISRIFAVINRGTPYVDTYKFAA

SEQ ID NO: 357896 - protein, 347 aa, unidentified
MKYYCGLDVSLNSTAACVVNQDGTIIREGEVPSEPAAIDQWLKAIGLPMERVGLEAGGLSSWLCKELIALGLPVICIETRHAKAAMKAQQVKTDRNDARGLAHIMRTGWYKEVHVKSQESQELRMLLNNRRFLLDKRIAIDNEIRGSLRTFGLKLGKVTPKTYEPRIRELVGDNKKFQDCIFPMLEVRRVLIEQCKKLEKLVLDYVKEDQVCELFMTIPGVGPLTALIYKTFVDRPQRFQKSKAVGAALGLTPRKYASGEIDYDGHITKCGDSFVRIHLFEAAKVLLSRAGKPSDLKSWGLRLAKRSSKKKACVAVARRLAVIMHAMWRDGTVFQSTQVQAELAAAA

SEQ ID NO: 357897 - protein, 331 aa, unidentified
MNYSHFVGLDVGKKTFDASLMSADEKELSHKSFDNTPTGIQSLLDWIAGYHLSLSKLLFCAENMGSYVTELSVSSVSMGFSLALVCPLTIKKSIGLQRGKNDRIDAKRIANYAVLHYRKLELYKLPDKDLVRLRGWIIIRDNLVKQKVSSIKLLETFSQMAKLADVTESISFLEEQLKSIKERILEVEEDMEQLIAASTSLYTNYLLLRSIKGIGIINAIVLLCVTDNFQRFDNPRKFACYCGVAPFEHTSGISIRGKTQTSSLANKEVKVYLTRAAITAISWDPQMKAYYKRKIAEGKHKASVINAVRAKIIARSFAVIRRQTPFVTLVV

SEQ ID NO: 357898 - protein, 315 aa, unidentified
MSGPAVCVGIDVSKATLDLAVRPSGERWTLANDEAAIQALVHDLRPRAPNLIVLEATGGFEHAVVAALAAARLPVVVANPRQVRDFARATGQLAKTDAIDAQVLALFAERVRPEPRPLPDEAAQALDALLTRRRQLLDMLVAEKNRLGFARPVVRRGITQHIRWLERRLGDVDHELGEMIEHSPVWRAKDDLLRSVPGVGPVLSRTLVGELPELGRLSRKQIAALVGVAPLARDSGTLRGKRVVWGGRAPIRTVLSMSTLAAVRCNPVIRAFYRHLRATGKPAKVALTACMRKLLVILNAMVRSNTHWQPAPAVG

SEQ ID NO: 357899 - protein, 440 aa, unidentified
MSAFLRRSGQNPHRWATKGMKSKKELLAKKKHIKRKSAKAKHNRVLGIHNPHAAGADIGATEIYIAVPPDRLEMNVRCFGTFTQDLRAIVQWLREYKVTSVAMESTGVYWIPLYELLEQEGFEIYLVNARHVKNVPGRKSDVQDCQWLQYLHSVGLLRGSYRPAQDICAMRAISRYRDNLLHFGAQHLQHMQAALDQMNLRLHHVIADLSGLTGMAIIEAILAGERDPRQLAKLRDPRIKASQETIAKALEGNWRVEHLFVLGQALQSWKQVQQQLGQCDQKLEELSSQLEGKIDLANSPLPPSAKYCGREPRSKNQPNGRWREELYRHFGVDLTEVPGLSLGVVQTLFVELGADLSAFPTPRHFAAWMGLCPDNAITGGKVIRRGTRRNRQRIRLALRLAATSLHHNKTQLGECFRRLRARLGAPKAITAMAHKLARII

SEQ ID NO: 357900 - protein, 373 aa, unidentified
MDTHRDVHVAAVLSTLGTIRDTASFPTTTVGYRELWEWASRLGTVRRAGVEGSGSYGAALSRYLLACRVEVFEVNRPDRLVRRRRGKSDPVDAQEAARAVLSGRAHSQAKAGNGPVQCARLFKLAKDSAVKARTQAINQLKAILVAADPDLREQLAGLKNPALIRTCAQFGDHESGDGERRAVEQATRITLCLLAQRIDQLTGQIRGLERRLTELIKRHFPQLLIPMGIGPDSAATLLITMGDNPERLRSEASFAALCGVSPVEYSSGRQHHHRLNRGGDRRANAALYRIVQTRLRFDVRTRTYYERRIAEGKTRREIIRCLKRYAAREVFNLVRPGIAPREGSSRLTVRIGTSLAKSAAPVPRPRRLAPHAD

SEQ ID NO: 357901 - protein, 343 aa, unidentified
MQVIIGVDPHKATHTAVALSDGEDELARKKVRSTRVQVPQLLGWAEPFPTRRWAIEGADGLGFLLAQQLVAAGEHVVNVPATLAARTRLLGTGRSNKNDPNDALSVAVTALRTRGLRRVEAVGHSEVLRLLAKRNTDLGDQRCRLVSRLHALLVELAPGGIAKEINASDVDAFLAQITPATPVEQLRYDLAGELLDDIRRLDTQLKASHKRVRVAVQASATTVTDLFGVGPIIAAMLIGYSGDIGRFRNRDHYAAYNGTAPVEFSSGGRIVHRLSQRGNRQLNHAIHMAAICQLRQPHCEGRAHFERRVADGKTNKEAIRSLKRHISNAVYRQLATDARRATR

SEQ ID NO: 357902 - protein, 389 aa, unidentified
MSRAMKRGPGPSHVLMTPDHAGNVVGIDPHKRTLTATVADARGGILASAHFRVSGEGHRELEAWARQFGQIARWGIEGAASWGRHTAMFLAGRGHDVRDVCANRTPRSDRARQRGTSDMLDSERIAREVLAHSLLPKAFKRAGQEQGPDEQHQLLALWNNRRRSILTGRQHLVGEAEYLLCELPLELREQLPDSKAVRPRLAALARRNRRRRFDAPTKLRLQLLDGYRAQIKALDLEEKQVAAQLEALVDQSGSTLDQLCGLSTRSVAELLVEVGDPRRFTEGGFARFNGSAPLPASTAEGPGEPVRHRYNPGGNRRINAILHRMAVTQLRCEPRAQRIYANARAGGHTKKEARRILKRHLSDVIYRRMIRDLAAADHASVSAQPLLAA

SEQ ID NO: 357903 - protein, 338 aa, unidentified
MNYVGIDHHRQYSHITWLDERGEVVKSGRVANRRRELEGFLQGARDVRAVIEAGRSSYTMVDVLVDLGIETTVAHPKDVKAIAKAKIKTDERDSYKLAHLLRTGYIPEVHKRSRENRCSQRVLRQRAFYVGKQTAVKNRLRALLAQQGEEIRSEVERVENLFTDKGMKVLKGLALPEREAQLVGALLRTYHHLEERINETNALVKELYEKMPSARLIQTVPGFGIFLAVLVAVEIEDLGRFEDVSKLHAYAGVIPSTHSSGDRSYHGKIIKEGNRWLRWAAVEAVWPALRADFDIRCFYDRLKKRKGANSAKVATARRLLTIIYRMLKENRPYIPHKR

SEQ ID NO: 357904 - protein, 336 aa, unidentified
MTKYIGLDAHSSTCTFNVTDERGREIDNTTLETNGRLLVKYLRGIGGVKKLTFEECELSNWLYEILNPEVDELVVCNPVANKDYKKIKTDKMDARKLAKLLRGGFLIPVYHNGSSRERFRSVMSAYQDLVEESVRLKNRYKSLFRKEGKKAKGESLYHDESFLEGLERGDFQFIGRHIYDLLEKMEQGRKEYIKEIIKYSKGFKEIKYLKTIPGIGPIQAARIASQVIDPRRFADKYKYYSYCGLVRHKRISDGKEYGSCKIWGNRILKSVYKTAGLSVLQGSSGLRKYYDCLRSKGISHDNAYNAVCRKIAAISLSVWRKSERYNDEIITGNLTK

SEQ ID NO: 357905 - protein, 414 aa, unidentified
MLKIVYPICCGMDVHKSFIVACIASTNEQGVTTYKSKRFSTFTGDLRRYARWLAENNCKDVCMESTGKYWIPVYNILETTCNVVLAHPKYVKAIRGKKTDKRDAKWIADIFKHDLVAGSFIPPADIRQLRDLVRYRWKLTNFTTGEKNRAQNCLTVSNFKLDDVFSDVFGKAASAITARILENPTEKITDVSGFRTKGMKATDEQVLAAVDGEMCVEQAEKLRIIRSHMKNLDLCKTNLESLILTTAEKYLSQLNLVMTVPGIQSFAAIGIIAEIGVDMSVFPTSKHLCSWAGLTPQNNESAGKKKTTRISRAGNYIKPLLVQCTLCAIRAKQFQEVRNRYLALKKRRGHKKAIIAIARMILTAIYNILKKNEPYNPELYRNIDRPPVHREVSLEEAVFILQRQGYLVTAPPVA

SEQ ID NO: 357906 - protein, 414 aa, unidentified
MRIVYQNVAGLDVHKKILVAAIIVGLVDGSWRTEKRTFGTMTADLLALSDWLLTQGVTHVAMESTGEYWKPVFNILENNFEVFVVNAQHISKVPGRKTDQSDAEWIAELMQYGLLKASFIPPEGQRELRELTRYRSSFVRERATLVNRVQKVLESANIKLASVATDVMGVSGRAMLEAIVAGNASPEQMAELAKGRMRDKREQLAKALHGRVKAHHRFVLTELLCQIDSLEETIARFDQEIEAYCRPFEEAVVLLDTIPGVARETAEIIVAEIGTDMSRFPTADHLASWAGVAPGNNESAGKRRSGKTRKGNKPLRAALTQAAPAASRTRGTYLSAQYHRLAGRRGKKKAIGAVAHSILIIAYHIIQRNEPYHDLGADYFDKRRPEATVKRLVKRLEQLGYQVALEQTLAPAAV

SEQ ID NO: 357907 - protein, 342 aa, unidentified
MLLTEIKHNKVMVFNHYLGIDISKKTLDAALIIKEGEIVGQTKVANNQQGFKELFSWAKKKGAKNVETLVCAEHTGIYGYDLQVWLDDNRLSFSFVPALEIKKSLGIRRGKNDSVDAVRIAEYAYLRRETIALSHKPSDSIFALKALLGERKQYVRTRAGLLARKDALDQYESQESRDRRDNIIQMLTQNVESLEKQMMQIIKADESIYNSYKLITSVKGIGLVNAVNTIVYTNNFTSFQTARQYACYCGIAPFEHKSGTSIKGRTMVSSLGCHQLKAELSMAARSAIINDPWLRKYYKRKMEEKGNVSGAHGVVLNAIKFKLVVRMFSVIKSGVPYKVMAY

SEQ ID NO: 357908 - protein, 350 aa, unidentified
MKIVGCDFHPSYQQVAVFDTLTGEVEERKLIHADGQAEQFYRELEAPALIGMESVGNAQWFVSLVESLGHQLWIGDAAKIRASYVRKQKTDKRDAGHILKLLLENRFPRIWVPNQQQRDLRQLLLHRHKLVGVRTRLKTELQHLALNLGVQKKRQLWSVRGRAELEKLPLQGWTKHRRQDLLALLKVVEPQIEELDKAADEAAAGNPQARLLMSQPGVGPLTALAFVLTIGEVARFARSKQLASYLGLIPSEHSSGSKRRLGSISKQGNVFLRTLLVEAAQSAVRHDPLFRKEYKHRCHHKPKGVAKVAAARKLAVRLYWMLKTSKPYPEVLHIEGSPRHPVAAKASPSC

SEQ ID NO: 357909 - protein, 416 aa, unidentified
MEVLYPRCAGLDVHKDTVVACVRLAAEGSVQTEVRTFDTTTPGLLALADWLNEGGCTHVGMEATGVYWKPVWHVLSDGDVTLILANAAHVKNVPGRKTDVADATWLADLLAHGLIRASFVPEPATQEMRALLRTRKQLVREQASHVQRIQKTLEDANLKLASVLTNIMGVSGRAILKALINGETDPDYLLTLIDRRVKAPRDKVHAALQGRVTDRHRFLLRLHLRQIDTLDAAVAEIDQEVDRDLDPFRDAVRLLCSIPGVSDLTAQVVVSEIGIDMSRFPTAGHLISWAGLCPRNDESAGKRRSNKMRKGAPWLKTTLVQCAWAGVKKKTSYLRAQFQRLCHRQGPKKAICAVAASILTAAYHMLRDGTFYHDLGPDHFHRDSPTAQARRLVSQIAKLGFVCTITETHPEAVVSV

SEQ ID NO: 357910 - protein, 366 aa, unidentified
MTSVALAAERIYVGMDVSRDTIAVAVLRPGEDVPAVEMISHDGEMVRRLIGKFADRSVLAACYEAGPGGYELHRLLTSMGVACDVVAPALIPKAAADRVKTDRRDCVRLALTHRAGLLTAIRIPSEQEEAVRDLVRTRADLVDDRKRMMQRIGALLQRHGRVWRAPRWTYEHRAWLDRQSFTEPALQAALCTYLAALDARDAELAVLESQLRGCWASVDPLASMVRRLACYRGIAELTGLTLAAEVADFRRFPSAPAFMGFTGLTPSEYSSGARTRRGGITKAGPQLIRSTLIEAAWAYRHRPAIGATLKRRQAGCAAETLARSWKAQQRLHATYAKLTRRGKIPSVAVTATARELAGFVWAEMTS

SEQ ID NO: 357911 - protein, 344 aa, unidentified
MDHFAGLDVSVKETSVCIVDDTGRIVKEVKVASEPEALLKVLGNPIYRFKRIGLEAGPLSQWLFSGLAEAGLPVVCVETRHMQAVLKAQINKTDRNDARGIAQMMRVGLYRSVHVKTLRSQKLRMLLTHRKLLQSKAIDIENDLRGTLRNFGLKVGIVGMVRFEARIHELVENQPDLAVLVEPLLIVRRALREQIVILHRRLLAIVRDDEVCRRLMTIPGVGPVVSLTYRATVDVPARFRKSKSVGAVFGLTCSRYQSGEVDWSGRISRCGDEMMRVMLYEAAQSMMHSKKWSWLKAWAMQIARRRGMKKAIVALARRLAVIMHRIWVDGTEFRWTREQAAAAA

SEQ ID NO: 357912 - protein, 385 aa, unidentified
MRSVALDLAVKKVSFCEIEAGEVLARRTVSSLSSLKEVLGPECLPARVAIEACREAWHVHAVLTKWGNEVLLVDTTRVRRLGIGGHGRKTDRIDAEILARAVETGGLPKAHLLSPARQRLRAELGVRRALVATRAEYITTIRGLARAHGIQLPSCDTHRFVVRLQSAALTTSLRELMAPMTEILERVDQQLATTELRLQRIVEEDPKIKLLMTVPSVNVIVAGVFVSVIDDARRFSNAHQVGAYLGLVPSENSSGDRRRLGAITKQGNSYARSSLMQASWVLIRTAPSDDPLQQWARAIASRRGNRIAAVALARRLSGILWAMWRDDTVYDAARVGSRSAAGLQRSAQDIETRANAMARAALKARRRARPHERKLEQLKESRYSA

SEQ ID NO: 357913 - protein, 402 aa, unidentified
MNAVGIDVSKGKSMVAIMRPFGEIVSAPFEIKHTASDIHSLVELINSVEGESRIVMEHTGRYYEVLAHQLSKANLFVSAINPKLIKDFDNDSLRKVKSDKADAVKIARYTLDKWQNLKQYNVMDELRNQLKTMNRQFGFYMKHKTAMKNNLIGILDQTYPGVNTYFDSPARSDGSQKWVDFASTYWHVDCVRKMSLNAFIDHYQNWCKRKKYNFSQSKAEEIYGKAKELVPVLSKDAITKLIIKQAVDQLNSASTTVESLRTLMNETASKLPEYPVVMAMKGVGTSLGPQLIAEIGDVSRFTHKSAITAFAGVDPGVNESGSYEQKSVPTSKRGSSDLRKTLFQVMDVLIKTHPQDDPVYQFIDKKRAQGKPYYVYMTAGANKFLRIYYGRVKEYLSSLPES

SEQ ID NO: 357914 - protein, 354 aa, unidentified
MMIIGCDYHPAFQQIAFVDTETGEVQERRLQHREEAERFYRDLAAQGIKVRVGMEASGHGRWFERVLAELNFELWIGDAAEIRTKRVRKQKTDRQDAQLILKLKMLKDDFPQIWVPSWENRDLRQLLWHRHRMVQARTRIMNQLQAVALNEGLRCKKRLWREGREQLEAFPLAPWASRRRRDLLELLDRLNPTITDLTQTIEQEVEKCPEAQQLMTHPGVGPLTALAFVLIIGRAERFQCGKQIASYLGLVPLEESSGNRRRLGHITKQGNALLRFLLVEAAQVSARSIPEWRNKYFHLAMRRGRKIAKVAMARRLAVQMFWMWRKGWDYEQVKKFGSHAGQPGNRDGVHSNTE

SEQ ID NO: 357915 - protein, 339 aa, unidentified
MMNIIGLDAHSARFFMTAINSQGKTILCTDAETSPENLIAQVCRVNAPRELVVEESHLAQWVKTVLEPYVDRLVVCDPRHNRWIAKDDFCDDRRASAKLAELLRLGAIKEVKHPDDEGAILRSMFLHYNDLNVQITRIKNKIKAVFRGNGIAIKGRKVYSVKGRQEFIDKIASLPHLEMKLSHWYHVLDRLECSKRITTRKMTKIAKSNEGYRYILSVPGVGPVLATGYVAMIGTPYRFARKNKLWNYSGFGNVLHTSDNVVYRSGASSNGNRLLKWVVSENWSHCVGEGKDNMFSRRYKKVIDSGGDAAKARRLTCKLILNVIGAVWMNKTYYKEQMI

SEQ ID NO: 357916 - protein, 378 aa, unidentified
MQPTQLWNGTSRLDVSLELAHKVWKAAGTDGKRANPATFTVNASDLWERFQQLLQRLEDFRAKWGLPARCRINLIYEAGQDGFWIARALKDHGVQAYVVDAASLLAPTHKRRPKTDRLDALKLLEHLRAWLRGERHELRVLHIPSEESEASRHLSRERGLLQKEMTQHLDRVRKLLRLYGCTDELDRQFWERLHAGEVCRADGRPLPQELRSWLLREEERLGLARCQFVRVQKTLMEALPEPMQRCIAMLAQLKGVGWVSATRLVLELFWRDFSNRRQVGACVGLVAQPYSSGESQTDQGISKQGNRRVRALLIELAWLWIRYQPRSALARWFARRTQGGSKRGKRIAIVAVARRLAICLWRYLHDGVMPEGARLKKA

SEQ ID NO: 357917 - protein, 393 aa, unidentified
MRKPQQCRPPHNDLSRSLTSLNLNHTLIAVIELSQKSWLVAGIIPGVEHQPLKKLEPGEDALSTLLDRWRKEANKAGYKVERIAVAFEAGRDGFWLARWLRAQGIEAHVIHAASVAVSRERRRAKTDRLDTEQLKRAFLGWLRGERDHCKMAAIPTFAEEDAKRPSRERESLVGEQGRIVNRMKATLARLGIRSFNPKLKNAAESLEDLRTAEGEPIPPNTLTELHRDLERRRLVIEQIRQIEAARLERLRRTPKAKPNAMVLLLARVIGVGIETADMLVQEVLSRNLRDRRAVARYAGLTGSPDESGSKRREKGLSRAGNARVRRGMVQLAWRFLQFQKDSALAQWYRVRTEHARGSRKKMIVALARKLLIALWHFVRDGVVPEGVFLRPAH

SEQ ID NO: 357918 - protein, 340 aa, unidentified
MTVIIGIDPHKASHTAVAIGCDEQQLAEIRVRATCQQTTKLLAWAEPLGDHTWAVESAGGLGYLLSQQLVNAGEEVLDVPATLASRVRVLGTGRSDKNDPNDALSVAIAALRSPGLRSVEPANHREVLCLLAKRNHELGRLRNIVVSRLHAALANLSPGGISKELNASDAIRLLNDLEPVTAVEQTRYDLAHELLDDVERLDVQLKESHRRVKTAVQASGTTLTDLYGVGPILACALIGYTGDVRRFTTRDQFASYAGVAPIEHSSGGRIVHRLSRRGNRQLNHAIHMVAICQIRQKESEGRIYFEKKVAEGKTKREALRSLKRHVSNAVYRQLLIDAQK

SEQ ID NO: 357919 - protein, 399 aa, unidentified
MDVHRDTVAACVRVPGRGRPREQHVRTFGTTAAELWQLRGWLEEHGVTHVAMESTGVYWKPVYYVLEEAVTCLLVNAAHIKQVPGRKTDVADCVWIAQLLEHGLLRGSFVPPAPIRELRDLTRHRKVVIQERQRAVNRLHKLLQDAGIKLASVATDILGQSGRAMLEALAHGTTDPAVLAELARGRLRAKLPALRDALAGRFRPHHAFLVSQLLAHIDYLDESIATVSEEVDRVLVPFGAQVAQLDTIPGINKRTAEVLIAEIGVDMSRFPSEHHLASWAGLCPGNNESAGKHKAGTTRKGDRWLRMALVEAALAAVRTKGSSLGARYRRVMRHRGHKKAVVAVAHAMLRAAYHVLAEGTAYRDPGPNYYDRRRARHATRRAVELLERQGYRVTLEPAA
